United States Patent Application Publication US 2004/0018514 A1 - sequence listing, part 4

SEQ ID NO: 2058 - DNA, 3011208 bp, Listeria innocua (residues 1,505,605-3,011,208 of 3,011,208)
tttgtaataagaagatatagcagacaattcgatgtcatctcgtgctcttatctttgcggcattgagattttcatcacggattttattttccattgttttcgctacttcggttgtaataacgtcttccattacattaaaatctttgctatcagcctcaattaaagtagtaaaaacttcatctgatatattcgaagtgattttttcagatacattgcttgataatttactttttaagttttttaatttagtttctgttgtagttggtgctggggctggttctttatcttttgctgctttttctttatttttcttatcattttcttctgcttcagaattcacttcaattacataagcgaatagactttgaattaatgccactcgattttgtcctgtttcacggttgtaaacatacacatcttctacagcattacttgccttagtccgttcttcttttgttttctccgtatcttcaacagtctgtggtgatcgaatcgttttttcagctacttgaaatagctttacattatacgattccggttttgtcatttggcagacaaggaaatacgctacgacagcaaaacaaataaggagaagtgggaaaaggtatttttttccactttcgatgtaccaatctttccatttcttggctagcttcacatctttgtctcctttctaattttgtttcccttcgtacgctttaataatttcagctactaaaggatgtcttactacatcatggtgttcaaagtaaacaaaaccaatgtctttaacatcttttaaaacttgttccgcgttaacaagaccactagttgcaccttttggtaaatcaatttgtgtcatatcaccgttgacaatcattttagagtcataaccaagacgtgttaaaaacattttcatttgagcaatggtagtgttttgcgcctcatctaggataacaaaagcatgatccagtgtacgtcccctcatataagccagaggagctatctcgataacgccacgatccattaaccttgttgtatgctctgtaccaaaaatatcgtatagcgcgtcgtatacaggtcgtaaataaggatctactttttcttttagatcgcctggtagaaaacctaagctttcacctgcttcaacggccggtctagtcaaaatgattttgctaacttttccttttttccatgcgtctactgccattacaacggcaagataggtttttcctgttcctgctggtccgacaccaaaaacgatatcatgtttttttatcatttgaatataagttctttggccaaatgttttaggtctaataggtgttcctttggcgtttttagtgatttcttcttcaaaaagagtatggaagtatatgagtgtgccatttctttgcatttttactgcttgagctatatcacggccatcaatatgaatgccgcgttttacagttaagataagttcgtttaaaacagcaatagtgtgctggacagcttcttcttctccagtgatagaaagtgcttctccccgtgtaataatttttacttgaagcaattcttctaaaagatcgatattcttattattattgccgaataaatcttggatgtttgtgtcatcagataattcgactacttcattaaattcatttagcattggctaaccccttcacctgttataagtgccttgattagttatattatacacgaaattgccttgcttgaaaaacgaagcgatgaatagctttaatttctgccaaaagtatgtataaaaaaaacaggatttccttcataaaatatgaagaaaccctgttttttaatgttttcaaaactagtttgaattagtttatgaaagatatttttttacgaattggttaacagcaccgccgtcagctttgccttttactttaggcataattgcggacattactttgccgaaatcagctttactagatgcgccaacttcttcgatagttgctttcacaatgttctcaagctcttcaggagtcaattgtttaggagcatagtcctcaacaatgacaatctcggaacggactttatcagaaaggtcgctacgtcctgctttgtcaaactcggctagagaatctctgcgttgtttgagttcgcgggaaatcacggttacttcatcatccggagtaagatctttcacaccttggtgaattgcttcgttttgtaaagctgcttttaacatgcgaataacggaaagtttttctttttctttatcgcgcatcgcttgcttcatatcttcatttaacttgtcaagcagtgtcaacgaaatcatcgccttttaattagaatttgcgttttcttgctgcttcggattttttcttacgttttacgcttggtttttcataaaattcgcgctttctggattcttgcaaagttccacttttggaaacagtacgtttaaagcgacgaagagcatcttcaagcgattcgtttttacgaactactgtttttgacatctctctttccctccctccggcacttacatgcactcacttaaatccttcatttaagttccagaataggacataacggaaaataaattatgaattattctgaagtaatgcagataagcattcactcattaaaaattatatacgaaacatcgggcatcgtcaacatgaaatcgttaactttcgcataaaactttgaaatgttaacgatttttatttttgtaaaggtcaaaatagaaagaagcagctgataatacatagagcggagcagtttctgttcttaaaattcttgggccgagtccggcaagtttggcatttacttcttgaagaagcaacagctctttttcactaatgccgccttctggtccaaaaatacacaaaacagactgtccaggcttcattgtttggaataagttagtaagcacactatcctcgccttctcgggcgctctcttcatatgcggcgataacatagtcatagtgaacatggtcaaacattaattctttgaaactagcagcataatgaacttctggaatgacagtccggtgcgattgttcagccgcttcttgcgcaattttttgaaggcgctcgatttttttgatgacttttttatcatcccatttcactacagaacgttcggctttataagggatgaatttatgtgcaccgagttctgtacttttttgaatgatgagttctagtttgtcgcctttcggtaggccgctcgcaatagtgatttcaatgggcaattcggtatcttcttctagccatttcactagatttaataatacctcttcctcatttattgccgtaatagccgcgatacaagtttttttgctcggaaaaacaatgaaaacttggtcggattctttcatccgcataacacgtgcaatatgatgaaaattttctcctgtaatgcttagtgtatcgttatcgttttctagctcataatttacaaaataacgttgcatttattccactcctcgtttggaaatgatcgcaacccagtccccttgttgctcgattttttcgatgataagcccagcgtttttcagcgcttcttctactactttggctttgtcttcaataattcctgaagcaatgaaaattccgcctggtttaagtgctttataaacatcttctgggaaaagtaaaatcacttctgctaaaatgttggctacgacaatatctacatcggatttattaatatcttgaaggagattattttgcttcacagtaatgatattttctgttttatttaaacgaatattttcttctgcagctcgagtagcaatttcgtcgaggtctgttgctaaaatggattttgctccaagtttggcgctagcaatacttaacacaccggaacccgtgccaacatcaatgagttcatcacctggttgtaaataatcacttagcgcgcggatacaaagttgtgttgtcggatgtgtcccagtaccgaaagccattcctggatctagctcaatgattatttcgttagcagatggtgtataagattcccaacttggtacaatcgtgatacggtctgtgatttgaacaggatgatagtattttttccaagcagttgcccattcttcatcgtctacatcgttcacaacaaattgaaatttaccaagaggaatatcaaaggttgtaaggttcttcaaagtttgttcgatttctgggatttgctcgacaaattccgtggtttttaagaagtaagctttgatgataacgccatcttctggataatcttctcgttttaatgcataaatttcaccgaatttatcttctcgttcgcgtaaaaagtctgctacatcttcaatagaaactcccgctgccccgaactccgttaaaacatttgcaactggctccactgcttcgtttgttgtatggacttctacttctgaccattccatttttcaacactcctttagtatgtagaaaaggtcgatggttgcttctcgcacaactatcgacctctacgttcatcaatcgcctttaaaagctcgtttcattttgtcaaaaaatccagatgtttgttcgtctactttgtctcctgtagttgaagcaaattctcgtaagatttctttttgtttatcatctagttttttcggaacgattactttgacgattacatgttgatcacctgttccgtttccacgaagatgcggaacacctttacctcgtaagcggaaggttgtccctgtttgtgtaccactagggattttgaggcgaactttaccgtgcacagttggtacatcgatttcgtcacctagggtagcttgtacgaacgtgattggcacttccacataaatgtcgtcagcttctcgttcgaaaaactcatctggaatcacaacgaatactacatataaatcgccgttaggtccgccattaataccagcttccccttcgccagatacgcgcatttgttgtccgtcattcacaccagccggaactttcactttgatttttttcgttttagttacgcggcctttaccgtgacaagttggacatttttctttgatttctttaccagtaccattacagtattgacatgtgcgtttattgactacgcgaccgaatggggtattttgttccacgttaatagaacctttacctccacaatggctacatttttctggtgtagttccaggttttgcgccagagccgtgacaagtatcacagttttcttcgcgaggaatttcgatttccgcatctttaccaaaaatagcctctttgaatttaagacgcattgtatattgtaaatcgctaccttgtcttggtgcgttagggtcttgttgacgtcctcctccaccgaagaatgtgtcaaagatgtcttcaaatccggagaatccgcctccgccaaagccaccacctgcaccgccgccgaagccttggtttggatctacgtgtccatattgatcatattgcgcacgtttttgtgggtcacttaaagcttcataagcctctgatatttctttaaatttttcatcagcgcctgcttctttatttatgtccggatgatactgtttggacagtttccggtaagctttttttatttcgtccgctgaggcgcttttggaaataccaagcacttcatagtaatctcgttttgccatccgccatcactcctgtccatgatagatttttatagtcctaacgtattgtaacatttgaaagagatgttgtaaaaactttatttcagataaaaagccaaagccacagtagactttgactcattatccttacctttaaaaaagattatttgttttctttgtcgtcgtcatttacttcttcaaattcagcatctactacatcgtcattttgaggagcttcttgaccttctgcaccacctgctgcttgttgttctgctgcagcttgttcgtataatttaacagataggttttgaacgatttcgtttaagctatctgttttttctttgatagcatcgaaattttcgcctttaagcgcttcttgtagttcatcgcgagctgcttctgcttttttcacttcttcttcttcaactttgccttctagttctttcaaagttttatcgacagtgaatactaattggtctgcattgttgcgaagttcagcgttttctttgttctttttatcttcttcagcattagcttcagcgtcttgaaccattttttcaatttcttcatcagttaggcctgaagaagatttaataacgatgttttgttctttaccagttccaagatcttttgcacgaactgttacgataccatttttatcgatgtcaaaagatacttcgatttgtggaattccgcgtggtgctggtggaatatccgctaattggaaacgacctaatgttttgttgtcttttgccattggacgttcaccttgaagtacatgaatatctactgctggttggttatcagctgctgtagagaaagtttgtgatttagatgttgggatagttgtattacgttcgataagtgtagtcataacgccacccattgtttcaataccaagggataatggagttacgtcaagtagtacaacgtcttttacatcaccagtgattacgccaccttgaattgcagcacccattgctacaacttcatccgggtttacacctttatgaggttctttgcctaattcttttttgattgtttcttgaactgcagggatacgagtagatccaccaactaagattacttggtcaatatcgcttgcagataggtttgcatcttttaatgcttgacgagttggcgcaatagtacgttcaactaagtcatgtgttaattcatcaaatttagcacgagtaagggttacttctaagtgaagtggaccagcttctccagctgtgataaatggtaaggagatttgtgtgcttgttacgccagaaagatcttttttcgctttttcagctgcatctttcaaacgttgaagcgccattttatcttggcttaagtcaataccattgtcttttttgaattctgctactaggtagtcgatgatttttttatcgaagtcatctccacctaattcgttatcaccagcagttgagtgtacttcaaatacgccgtcacctaattcaagaatagatacgtcaaaagtaccaccaccaaggtcaaatactaggattgtttggtctgtttctgttttatccataccgtaagcaagagctgctgctgttggttcgttgataatacgttctacttcaagaccagcgattttaccagcatcttttgttgcttgacgttgtgcatcgttgaagtaagctggaactgtaataacagctttatctacagtttcaccaaggtagtcttctgcatagctttttagatattgtaaaatgattgcactgatttcttgtggtgagtaatcttttccttcgattgtttctttatagttagtacccatgtgacgtttaatagaactaattgtatttgggtttgtgattgcagcacgtttcgctacttcaccaacttggcgttcgccgtttttgaaaccaacgacagaaggtgttgtacgtgcgccttctgggttagggataattttagcttctccgccttctaatactgctactgcagagtttgttgttcctaagtcaattccgataattttactcattgttatttcctcctgttattcagtaattattttttattgattcacttttaccatcgatgggcgaataacccggtcttttaatttataacctttttgaagttcagcagtgatttcattactacctgcattttcatcactatcttgcatcacggcttgatggaagttcgggtcaaattgttcgccgacagccggaattacctcaataccttctttttcaaaagcaacaagaatttggttgtaaaccatttccattccttttagaatttgtttcacttcttcttgatcagaagtcgttgcaagagctttttcaaaactatctagtgcaggaagtaaatcttgcgctaggctttgcgaacggtatttttggctagcatcgcggtcagcaatatgtctttttttgacattttcaaaatccgcttgcatgcgaagataacgattttcaacttcatctagtttgttttcaagctctaaaattttggcttgttcttctgttaaagtttcttctgtcgcttcttcttccactgtttctactgattcatctaaactatttaattcttcttgttcgatttcctcagctagtttttcttttttgttctttttctcagacactgtagccacctcctgaaaaaacttatgctttttcagccttcctaattttggttatcacgataaagtttggttaacacatcggttaaatctcgactcattacatcaactaagcccatcattctgctatattccattcttgttggacctaggagcacaataccgccaacacgttcgccagcaatattgtatgttgctgtaatgatactacaatcttccattagactattattgttttcacggccaattttaacttgtaggccatcgggaatatccctaaacaattcatatacatcttgttcttcttccatcaaatggagcatctcacggactttattaatatcatgaaattctggttgatttaagatgttcgtttttccgccaaaatacactttttgctggctggcctgggcaaaagaatcagaaaagacatgcataaagctttcatagtttctaacatgctttccaagtagttcttttacttccattggtatttgtacttttaaatcatccagtgaaagcccaactaaccgttcgtttaaaatgttgaccattcgttcaatatcagaaagcgttgtgccctcgggtattgtcacaagatggttatcaacatgcccttgatcggtaattaaaatgagcattgcctgaaaattatttattggtacaaatctaaagccacttaaatgatttttcgttgcttctggaccaagcaagatggacgtgtaattggttaaatcggataacattaatgctgaattttggatgagtccttccatttcgtaataattctctgaaaagaaagaacgaatcatttgtctgtcggatttgtctagcttcttgggctggagcaaataatcgacatagaagcggtaccctttctcagaaggaactcgtccggacgaagaatgtgttttttcaataaaaccgtattcttcaaggacacccatctcattacggatagtcgctgaactataaggcaaacttttttctttcagcaaatttttcgatccaaccggctgaatagtccaagtgaaatgatcgatgatggcacggaaaatcagaagttgtctttctgttaacatatctatcacctcttttagcactcaataacgtcaagtgctaaatacaagtataaatttaccaaacaattctagcttagtcaaccgaaaacactcgatttcagactaaagtaggattgtttggtcaaaaaaggtcaaatgatgcggttttagagaaattcttgaaaaacattatttcctaaaaatcttccgcttcttgtaagtgccacattttcttcgttattttcaagccagccttttgcagtagttttttgaatagcatgcgcaaaagtcgtatctaaatcttgaccgaatttttgcttgaagtgaattttattaactccgtctacttttctaagacctaaaaacatttcttcttccattttttcttttaaggtaagttctttttgttggaatgtaggaagtttattttcttgtaatggttccatgtatttttttattggaccaaaattgctataacgggtgttgccgacatatccatgtgctccggcgccaaacccgtaataatgctcattgctccagtaagtaatattgtgtttgctttgaaagccttctttcgcgaaattactaatctcatattgtttccgaccgtgtttttccatttctgttagtaataaatcatacatgtttgcttcggcatcttggccaggtaggaatagttttcctttttgcataaggttgtaaaaaatcgtttttggttcaataattagtgagtatgctgaatagtgaggtaagtctaaatcaagtgcttgttttaaagtgtctttaaagtcagcctcggtttgacctggcaagctaaaaatcaaatcaatacttacattttcaaaaccaactttgcgcatgttttcaacagattggtatacatctttcacggtatgaatgcgaccaatttttttaagaagctcgttattgaaactttgaacgcccatactaatgcgattgacaccatgatcttgcatcgcttgtaatttggatatagaaagatctcctggatttgcttcaaaggaaaactcaatttcatttttgagtggtaatatttctcggatagctgtgcaaagtcttgcaatttgcgcctcatttaaggtcgtaggtgttccgccgcccacaaaaaccgtgtcaaccggagcgatgggaccttttgcagcagtcatttccatttcttttattagtaaatctacgtattcatcgactggttgcccttctaagaatactttattaaaatcgcagtaatagcaaatgtgttcgcaaaacggaatatggatatataccgctgaactttcattactcgatagattcgtatttatcatttttatcaattccttgcacttaaaatttgcttcgttgtccactagtcagtttaacatattttctagtgcatatgtggaggtttcgcttttaacataaaaagattgtgctatgaacatattcgctcttagcacaatctttgttattatttcgattcgtccattttcaagattgccatgaaagcttcttgcggcacttccacagaaccgatttgtttcattcgttttttaccttctttttgtttctctaagagttttcgtttacgcgatacgtccccaccataacatttagcaagtacgtttttacgtagagctttaatagtggaacgagaaacaatttttgttgcaattgctgcttgaataggtacttcaaattgttgtcttggaataagttcttttaatttctcgacaatgatttttccacgctcgtaggcaaaatcacggtgaacgataaagctaagtgcatccactttttctgcatttaaaagaatatccattttcacaagtttagaagctttatagccaattaattcataatcaaaggacgcatagccttttgtagaagattttaattggtcgaagaagtcgtaaactatttcagatagtggaatttcgtacacaatactaacgcgaatatcatccaagtactccattgtaatgaagttcccccgtttgttttgtgcaagttccattaccgcaccaacataatcatttggaaccatgacagttgctttaacgtatggttcttccacgctttcaattacgccaggttcaggcatatcagctgggttatcgaccacaatattagatccatctgttaaattcacgtggtaaataacacttggggccgtagtaattaaatcgatattaaattcgcgctcaattctttcttgaataatttccatgtgtagtagacctaaaaatccacaacggaatccaaaacctaatgcttgagaagtctctgcttcaaattgtaaagctgaatcattgagttctaatttttcaagtgcatcacgtaaatcgttatatttggaagagtcaattggataaagtccgcaataaaccattggatttaatttgcggtatccgtcaagagcttcttcagcaggattgttcgcaagtgtgattgtatcacccactcgagtatctccaacatttttgattgcagctgttaagtaaccaacgtcaccaacaagaagctcatcacgtggtgttgcttttggagagaaaacaccaacttctgtaacttcaaactctttgccgtttgacatcatcttaattctgtcgccagcttttacaacaccatccataatacggatattagctattacgccacgatacgcatcaaaaacagaatcaaaaataagtgctttaagtggtttatcaacgtcaccagatggttctggtactttttcaactatttgttcaaggatgtcttcaatcccgatgcctgattttgcagaagcaaggacagtatctgatgcatccaagccaataacatcttcaatttcagcacgaactctttctggatctgctgctggcaaatcaatcttattaattacaggtaaaatttctaaatcattatctagagctaaataaacgtttgccagtgtttgcgcttcgataccttgtgcagcgtctactactaaaatagcaccttcacatgcggctaaacttctagatacttcataagtgaaatcgacgtgtcccggtgtatcgattaaatgaaagatatacgtttctccgtcttttgctttatattttaattgtacagcatttaattttatggttatcccgcgttcacgttctaaatccatcgaatctagtagctgatttttcatttcacgatgcgtcaaagcacctgtttgttctaaaatccgatcagcgagtgtagatttaccatgatctatgtgcgcgataatcgaaaagtttctaattttcttttgtcttgcattcatttcttctttgttcatttccccagctcctgattagaactcatcgcataaatccgatggcaagctatccttgattatatcagtagaacgcttaacattcaatgacttctttattaattacggataaatttaaaataaaatagaaagtattattgcaatatggctgtgttttcggtataatagcatttgttctgatataatttaaaaaggtatgttatatgaaataaatactacctcattagtttggacggaggtgaatggaatgccaaatattaaatctgcaattaaacgtgtaaaaactgctgaaactcgcaacagccgtaatgcatctcaacgttctgcaatgcgtactgctatcaaaaaatttgatgaagcagctgcaaacaacgcggacaacgcgaaagatctttacgtagaagcatcgaaaaaattagatagcgctgtgagcaaaggattgattcacaaaaacaatgctgctcgcaacaaatctcgcttagctgctaaattagctaaataataccgtttaggtataaaacatcacaccttgtgtggtgttttttgtttttaaaatagctttgtcttctggagacaaagctattttttatacagttttttggcgattatcctgtaattcaaataaaaaccattctaacttctgttctttatcaccgaagcctgttttcatttcaagatctatttcagccaatcgttttaaagcttgatttaattgtagctctgagaaattctttgcttgtttagacgctaatttcacacgaaacggatgtacttttaatttagatgcagcttgttgttgtgaataaccttgttgctcaagtaactttaattgatttaacaagcgaaattggctagaaattaaagctaatatcttgataggttcttctttttgttttaacaagtcgtaataaattctaagtgccccaccaatatccatcgcaatcatcttatctagcaataagaaaatattttgctcgagggaacgaacgactaaagattcgacgtcttgcaccgtgatttctttagtgtcaaaacaatacaacataagtttttgtaattcattcattgctgtcgttaattgaccacttgtaagttcaataagccgagtaatcgcctcttgagacatctgcatattgttttcgtttagttttgcttcaagccatttcttcagttcattttcattaggtcgtttcgcttctattactgtggctgtttttttgagtagtttggtaagttttttacgttcatctaatttttctacccgtgccacaaaacataatacagaataatcaacgggctcattcaaataagcttctaactttgcagcgtcgtgttctactttgtttttacttttttcggtggttaagaaaatcggattatttgccattactaggcgcttatcgccaaaaaacggcatactttcggcttcttgaatgactacttcaattggcatttcttctaaatctaaattagcataattaaactcgacttcttccccatctaaaatattatctattaaaagttgctttgtctcgttaataatataatcttctgtcccgatgattaaatacacaggagttattttttttgagcgtatctgtttccattctggcagcattcatttcgcctcgcttcactcttatttctctttctatggtaaaacatgaaataagagatagcaagttttatttcaaagtggtttcgaagccctttccaaatgtgtagattatttctccttgtagatcagttcgtaaaatctttacttctgcttcctctaacgtgtctatcgtttctttatgaggatgaccaaaacggttttttaaaccacaagaaataattgcataagctggttttacttgctcgacaaatgctttagaggttgaggtcttacttccatgatgcccaacttttaaaatatcgcccttaatcgatttatctaaaagcgccttttctccgcttgcttctaaatctcctgtgaaaatccatgttttattatccaatattgcttttaaaacaatagaatcatcgtttccgccttctcccatttcatttggatacaaacattcaaatttattttgaccaacttgccactgtgctccggctaaaataatcgtttgttttacttttagcatagtcttaagagcttctctcataatggctttattttctgccccttttgcaaaaatcagttcttttatggcaatatttttttgcagttcatcgagcccttccatgtgatccgcgtcgctatgtgtaatgatgactttatctaaactactaattccttttgattttaaaacgggtgtgagagtacttccaccgattgtgaatggttttcgtttttttgtccaagcttctttctctaccagaagctcgccaccagtatctataaggtaattgcctttgtttttcggtaattgtattaatatgctatctccttgcccgacgtcaataaaactaacctttccagtaacattaaaactagaaaaataacataataaacaaaagcaaataaagattccgattggaaattgtttcttttgccactgataaaaaaatagtagtattgtagcgataattagcacgagcataatagtgtttggtctgccagtaataatagtttgatgcggtatctttgcaaagagattagttaaactttccattaattgaatcaaaaaagtaagcatatattcaggaattttcattaatgttggggaaataatagatagtaaaaaaacacctaaacaacctggtaatacaatgattgtaaaaagtggaacatataatagattaaagaaaatccctacccaagaaaacgagtaaaaatgatacatcataacaacagaagacatcatcgttgagataaaggaaatagtcaatgatttaacaaaaggactttgttgccttactaatatttgacgggatgacaaaattatcccaaaagatacaacataagaaagttgaaaacccacttcataaatgacatgaggttgtattataaaaaacaggataaaagatatacaaataacagaaaaagaactccatttagtagcatatttttctgaaagtaaaagtaaagcagtcattgtcgctgctcgaattacaggcggacttgctcctgtgaggataacgtaaaaaggtaataatacaaggagagaaatagtgactcgctcccttgttatacctagctttaacaataaaaaataaattgatccgattaataaattaacatgaagccctgatatagctaataaatgaacaacgcccatttgttgatatacttcatacatttcaggtgaaaagccatttttctcaccagtgattaacgctagtagataaggagttatttttggagagatgttttcggttagatgattcattatcaataaacgtgtattttgaatgcgcattagtatggacggagcagattgtccagaaatatagagtgtatttacttgtaatatatagttaatgtttttacctttaagatactctttataattaaattgagcttgattacgatttgtttgagggggctctaacttagcggatacagaaataaattggccataagtgagctttttaagattttgttgctctttttcagttgatattttgtaactcaattggaatttttctttctggcagcgtactacagcttggaaactatcaccatctacttttaagtcattgattatttggcaatttccgttaaattcagtagctgtataagaagacacatttgatttttccacaaaaaataaaaaacaacaagttaggagataaacgaggacaaacagaagaataattttggattttttaataaaagcaacgatgccgagcaaacaaatacatatgggaacgatagagcttgtaaaagtagtacagataatagctaaaatgatgatagctaaatatcgctcgataacgttccctccttatttaattcaatttatttgaaatgttttgatagagttgttctgctttttctggatcgatattcacttccactgctgcttcttttactaaagtatgcattttttctgcattccaattattaacttgaagaacagattcatcaaattctactttttgtaattcaactccagcaatattaaatagttctaaagcgtatggatggtttttgtagtctttagcgaaatacactttctttattcctgcttgaatgattgatttcgtacaagcgagacaagggaaatgtgttacgtataattctgctttatctgtcgaagcgccaaatttagcacactgtaaaatcgcattcatttctgcgtgaatagtccggatacagtggccatcaacaacgtaacaaccatgttctgcgcagtgatctccgccagctattgacccattatatccgcccgcaataatacgtttatcacgtactatggttgcacctaccattaatcttgtacacgtgctccttgatgaaattagatgactttgcgccataaaaaactgatcccatgcgattctttgcacattaaaaactcccttatgatttgataaatattagtataggtgtttataaggaagttcgtcaaccacttttattaattaacatccaaatattcttttaatttttcaactgttttttcgcctatgccagtaacattttttaagtcttctattgtctgaaacagtccttctttttcacgatattcgataatagctgttgcttttgaatctccaattcctggcacttgttgcaagtctatcttcgttgcgctattaatattaacttttttgtctgtgtcagatgattctatatcatcttttactacttcctctgatcctgcttctccttttttataaacatagatactcatttcgtcttttagtttttcggctaagtttaatttgctgttgtccgcatcttctgtgagtcctcctgctactttcacaacatcttgcactctggcatctactggtaatttatacacaccaggagttcggactgcccctttgatgtcaatatagatatgtgtagcattctttttttcctctttttgtggtttttcttcagtatttagcgcttggtttgctgtaaccttatctgtttgagaagttgggatacttatataaattactccagcacaaagaatggcaattcctattaaaaaatagtttttgtgtttcttcagtagttccatcatccatttcaccgcctttaattatattattcgccaaacgaacaaaaattccttttcgattatttagagcaaaaacgcataaaaaaagaaagtaatcttggaaaattactttcttgctacgaaaaagattctttcgctgctgtttgttggattttcatgactgaaatcagcgtaaacatcaattttcgaaaaaccgtatttttttaataattctttatatgtggtgattggataggtcctttctttatgtaattcatcgacccgattatacatgttatcctcccctaaaatgtaaaaggttagctcatgttcgactgaatggggatattcaccaggaaacgaattccaaattatcgaaatttcctcatcgctatcaccataagaataatctttaaagccttgatctattttaaatacagaatgcacatcaaataaaaataagccatttggtgttaagtgatcagataccgctttaatagtattctcaagtgcttgttcggtttctaaataattaagagaatcacagaaacatgtaattacatcgaaggtttgatttaaagctaactttgacatgtcttgctctagaattgatagatttatttcagctgccgcgactttttctttagcaactgccaccatttctttcgacaaatccacaccagtaacttgatgtcctaaaaagcttaatcgtagagcgaattcagctgtaccgcatgctaaatcgagtactttttttgatgtgtcaccaataaagtccgctgaaaactccaaccattcatcataaagctcagaatccatgagtctatcatagaatcccggaaaatattcataactcattatcgatttctccttaaaaaaaacagacggatttttttcccgcctgttttttgttagttattaagaaataaacgcagcagaaacgtccacgagcggcgcgtctccccatagtttttctaaattatagtaagaacgctcttctttgtggaatacatggataataacatctcctaaatcgattaaaatccactgagccgcatcaaagccttctaaacgttttacatctacttggttttcaagcgctttttctttaatttcacgagcaattgcttggacttgtttgtctgaattaccatggcagataacaaaataatccgcgaaacttgataaccccttcatgtctagtgctaatatatcctctgctcttttatcgtctgctgcctttgcggtcagcattaatgtatcataactgttcaaattattaatagtctccttccaaatttaaattaacaaaataattataggcatccagtgtatctggaaaaaccgattgttgctttttaatcaaatacgttattgtattggataaagcaaacaacattgctgcatcaagtgatttcagtgctagtctgcgtgctttatatacaccaggaaatgttcttccaggttccgtataatccgctaaatagatgagtttatcgaaatcggacatcgctccgcttcctgtcgtatgaagacgaatagcttccaagatttctggatcagtaatgccaaactctttttctgctaaatatgcgccaactggagcgtgccaaagcgagcgatgaaactgcaataaacgtggatcaaatccctcgtcttcaatgatttttctcgctttatcatcttcatagtatttcgcataatcgtgtaacagggcggttattctcgccttttctatatccatgtgataatgttctgcgagttctattgctgctttttcaacgcctaaagtgtgtttgaatcttgcagttggcatagcttcttctactttttttagcacttcatttctttccataaagttgatgctcctttatatatgaccatactttttctggtaaaaaggcttctgcgtgttcaatatcatttctaatttcagttgaagaaatagctgtttccggcatattgattttaacaatatcgtacggaacttctttttgatatagtgggcggttaaccccaacgaatgtcaccatttttactaagtcatctatatgataccactttggcaaatattctaccatgtccccgccgataataaaataaaaatccgtattcggctgttcgcttatcatatcacgcattgtatcatacgtataggactttccagttcgcataagctcgcgagtgtcaatttcaaaagaatccctatcttctatcatcaattgaagcatttccactcgttcctcatttgaagccataccactaatctgtttatgtggaggaactttattggggagaaaaaggattttttcaagaccgagttgcgcttttgcttcttctgccatatggaggtgcgctaaatgtggtggatcaaatgtgccgcctaagataccgactttatgtttcatgacaggtttcctccaaatttaaggcaacttaatttgttgcttatttacggattgtttgtaaagaataattgttctgccaataacttgaacgatgtctgctcctgcacgtgtgctaattttctcagcaactgtttgtttgtcttcttcgcaattttgcaaaatggagattttaattaattctctagcttcaagtgcttctttaacttggataattaaatttggtgacacacttccttttcctacttggaaaattggttgaattgtgtgtgcttcttttcttaaaaaacgtttttgtgtagctgttaacattagtttcctcctaattgttcgagtactgcttctttcatcattgatcgctctggcttaatgccagtccatatttcaaaggctagtgccccttgattaacaaacattggtaaaccattttgtgtaatagccccatttttctttgcttcttttaaaaaggctgtttcggctggattataaataatatcagaacaaattgttccttttgttaaattagaaagcgaaattgggcttttattcttagaagcttctagaccgatagaagtagtttggataataattgtaaaatcagccagttctttttcagcttgttctagtgtcatggcatgatgattatcattatctttcgtcatttctatcgctttttccgttgttcgattggcaacggttattttcgcctcagtatggcttttaagtgcaagataaattgctttactagctccacctgctcctgtgattaaaatagaatcgtcttttgtaattgaacgaatttcttctaagccttctaaataacctttgccatctgtgttgaagccataccacttgccatcttttctaagcactgtattcactgcgcctgatgctgctgccaaatcctctaattcatctaaaaatggtagaatacgctctttaaatggtgtcgtgatattaaatccgcgcactccagaatccattaatttttttatttctgtctcaaaagtatcttcttctatcaaaacagagttatactccgcgttcattccaagttcttggaaaatccgattttgcatagctggtgataacgagtgacgaataggatttccgataacaacatatttttccaaatgccaggcctccttagttttacacgagtgatgtccggattgttgcgctaacgccttcaggaacccaagcagtgacttttgcgccgccttcaggtattgtcacccatccaagtccagaaaacacaatatccgctttatctttcacggtaaaggtatacggtacgagcttaggaagtgtcttcatcccttcttctgttggaggttgaagaacaaaaccggcttgtttttcatataatgcatctgctttttctaattttgttcggtgaattggtaaattattagatacatagacaactaatgattttcttccacctgacacgtaatctaaacgagcaagcgcgcctaaaaataaggtttgttcttcatttaattggaagacagcaggttttacttcttttttaggtgtgatagcttttaaagttgttgtatcgataaaatgcgccatttgatggtgatttataattccaggtgtgtcaacaagtacattgccatcagcaagcggaatttcgattttatcaagtgttgttcctgggaattgcgacgtagtaatcacattgttttcacctgaagcttgtttgatgatacggttgataagcgttgatttaccaacatttgtacaaccaacaacatacacatcttgcccatttcgtaattcttctatcttttctaaaagagtatcaaaaccgtgccctttttcagcgctgactaaaacaacatctgttgccgccaaaccttgttcttttgcacgagttctcatccagcgagttaatttatcacgttttaatgattttggtaaaacgtcttctttgtttccgacaagtaatacaggattgcttcctgcaaaacgaggaagtccaggcaaccaactgccatcaaaatcaaaaatatctactacatagacgattaaagcttgcttcgaactaatttgatttaaaatacgtaaaaaatcgtcgtctgtcagcgccacatcttgaatttcattgtaatgctttagacgaaaacatcttttacaaataacttgttcattatttagcgatgacttaggagcatagccgattttatcaggatcttctgtttgaataatggccccacaaccaatacatcttatttcttctgtcaaagtgattcctcccacttaatttggtttttctttgctaaccgttttaaaataatactttccatcattcgatttaattttgtcgccataccgtctgtttgttttacaggacgaacaaaaatagttgttaatttttgacgattaccaccgaatatatctgtcataatttggtcaccaatcatcacagtttcttctggtgttgcgttcatttcttttagcgcccagcgaaaattagcgcctaagggtttttttgcccgcgctaaataagggacatcaattgcttttgccacacgagcaactcgttcttcattattgttagaaaaaatcataactttgattccttcttctttcaatatagtaaaccagttgattacttcatccgttgcatctagttgatcccaagcaagcagcgtattatcgagatcagttaaaatagtagtctttcccattttacgaagctgatctgctgttattccaaatggagtattcaacattttatctggtgagaattgctttaacacgtattggcacctcattcttttatttagtacagtctattctatcatacattcaattagactaataatctataaattttaccatctttctgcttattttacaaaaaaaccttagaaaaatgctataatatgaaaggaaatgttatttttttaaggaggtagacgaatgtcaaaagattatgcattaacttgggatttagaaaatatatatgttggcggtagtggttctgaagaattacagcaaacacttcaagaggtaaaagctgatttggatagctttgtcgtgaatgtagctgagtgggaagttcccgaaaccgtcgaagcttcagtagaatttctactattggttaatcaaaatgcggacatctcaaaagttttattaactgctggttcttttttagaatgtcttgcttcagccgatgttaatgatactcgtgcaaatgaactttctgcgttaatttatcaatatgtggctaccctatcgacggcagaagatgaatggcatgacaaatttgctcaaatatctgaccgtgtttgggatgaactaatgcagcaaaatggtttgtcacaaattagttttattttaagtgaagcacgtacaaaccgtcgtaaaaaaggcagtaaagaacaagaagcagcgattaattctttagctgttgatggttatcgtggttggtcagaccattatgatacaatcgttggtaaactacggatgcacattactactgacggggaagaaaagtccgtatctgctggacaagctctgaacttattaaatcaccctgatcgcgcagtccgtcaggcagttttcaaagaatatactcgtgtttggcaagaagaatctcatctctttagcgatactctaaatcatttatcaggcttccgtttagctacatacgaaattcgtaaatgggataatattttagaagaaccacttgctattaatcgtttggatgaacaaacattaaaatctatgtggaacgtcattcaaacgaacaagccgacttttgtccgattcttagatagaaaagctaaattgcttgggcttgaaaaattaagcttttatgatgtcgaagctcctcttgtattctcaagcgaaccaaaaaaatatacttatcaagaaggcgcagattttatcatcgaacaatttaataaattcagcccgaaaatggcaaacttcgcgaaatccgctttcgaaaaaggttggattgaagcagaagatcgtgataataaacgtcctggtggcttttgcacggatttcccggtcgaaaaagaaagccggattttcatgacatatgacggagctcctggtactgttgcaactcttgcacatgaactcggacacgccttccattctcatgttattcgggaagagccatttgaaaacactgattacgcaatgaatgttgcggaaactgcttctacttttgctgaaatgattattgccgatgcttctgtaaaagatgccaaaacaaaagaagaaaaaatcaccttactagaagataaaattggtcgtagtattgctttctttatgaatattcatgctagatttatttttgaatgcaatttctatgaagcacgcaaacaaggtgtagtgtcagttgatagacttaattctttaatggaggaagcgcaacgtgaagcttacttagatgctttagatgaatatcatccacaattttgggcttctaaactacatttttatattgctgatgtaccattttacaatttcccatatacttttggttacttattctcgcttggtatttatcacaaagcacaagcggaaggtgctagctacgaagataaatatattgcgcttctaaaagatacgggttcgatgacaacagaacaacttgcagaaaaacatcttggagtcgacttgcgtaaagctgatttctgggaagaagcagttgccctagccgctaaagatgtagaagattttcttactttaacggaagaatacgtaaaataaaaaaatccaggagaatctctctcctggattttttatattgtttttaataattcgatgatacaaatagctgattgttttgcagctaaatgaataaactcatcaaaagacattgtcgcctcttgattggctaaatccgatatagctcggatgataagaaatggaatatcaaattgataggctacttgcgcaatggcagcagcttccatttccacagctttaacatccgggaaaaatgttcgaataatttcatgttgatctggacgcataataaatgaatcatttgtaattacaagaccatatacagctttattttcgctatctgcaaaataatcacgataaatagtctcagcttttttcaaaagaacagcatcgccttgataaaaagctggcatacgtggaacttggccatatgtataaccaaattcagtaacatcaacatcaccatatgctaagcgatcagatataatgacatcgccaattgctaagccttcacctatacctccagctgaaccagtgttaataataatttctggtttaaaacggtctgctagaagcgtggtaccaagggcagcattaactttccctatacctgattctaaaagcacaacttctttaccagcaatttcaccgatataaaattttgctccgccgataataacttcttctatgctgggcatggtgttttttaacagttcaacttcttcttccattgctccaataatgcctattgtcattatgtaacctccaaaaaaagcacagtcgttaacaactaacttctgtgcttttatcttttgtcgtttgtttttagctcttctacttttgttggttgccatccttcaccgtctacccatgtaatataaacacggtaagctttatcaggatttgctttagtagaaagtgtaccaattgcttgagtagcagggtcagccccttgctctacaaaccaaagtgatgtatttgagattgggatatctgtcgctgctgaaaaagctttgcgtttttcttgccagtctacacttgtagagctgtaggaattcacatgatcaccagtttgctcagttccaattggtttccagtcttttgtaataacttttgccacattaggatcatcacttttagtcgtttctgttgttttttcatccgaagaagtcgattttttttcggaagttttatttgatttagcggcatcttcttttttcgcattggaagatgccgttttgttttcttgctgagttggatcgctttctgttttaaacagtacaaaatatagactaccaatgataagtaagcttaccacgataattaaaagatttaaaactagattcgttttttttcgttttgtattttgtcttgagcgagatccttcgactaagttttgtttaatgcgacggttatttgattgtcgattatctgccatttgctttcaccaccttataagtaaccgctgtataaaaacagataaaattaagatgcagtgattttttcgatcttaacactcatgtcgccagcaggggtttggatagttacttcttccccttctttatgaccaagtaaacctttagcaattggagaatcgttagaaatcttaccttcaaaaggatcagcttctgcgctccctacaatcgtgtatgtttcttcttctccgtctggtaattcaataaatgtaacggtgtttccaagtgttactaaaccattatgagcttctgctgcatcaatgatttgagcattacgaatcatattttcaatagtagtgatacgaccttcaacaaaagcttgttcgtcttttgcggaatcatactcggagttctcagataaatcgccaaagctacgggcaattttaatccgttctactacttctttccgttttactgtcttaagttcttgtaattcattttctaattttgctttcccatctagggtcattggaaatactttttctgtcgccaatcgttttcgctccttttgtttgttcattattgtatagaaaagcacggagatatcgctccgcaccttcataaaaaaacattactactcgtgagaaagattaacatgccacgctagaaatagcaagcaattgtctctctttttactaggaaaattttaccttaaattaatctgtttgacaagtgttacctgttacttatacatgtttttgcaagattgattcaatttttgttgtcatcaaatcaattgccacatgattttctccaccttctggaataattatatcggcaaattttttcgttggttcaataaattcgttatgcattggttttactacagaaagatattgatcgataacagaatccatcgttcgacctcgctctttcatgtctcttaataacctacgaataaaacgaatatcgtcatctgtatcaacatatactttaatatccatcaagtcgcgtaatcgcttatcttctaagattaaaataccttctaaaataattacttctctaggttcttgaatttctacttcttgtttccgcgtatatttttcataatcgtaaattggtttttctattgtttcataacggcgtagtgctgctatatgggaaataagtaagtccgtatcaaatgctaacggatgatcgtagtttacttttaaacgctcttcaaaactaatatctgcttgatcatgatagtagacatcttgcgcaatcattaaaatagaatgcccgctaaaatgatcacaaattgctttagttacactggtttttcctgaacctgaaccaccagttacaccgactacgattggtttttttgtcatgatatgcctccagttttctttctttttgaaatagataaaccatctccgagtggaatagttgtagtatcaaaatcaggatgcgtcactaaaaaatcattaaaatggcgcattttacgagcaactcgaagtttacgctgtttttctggtgacatatcaagcgcaagtcctttgaaaagaacattatcactataaatcacaccatctggagcaagggaatctgtataaatatggaaaaatttttcatattgcgctttggcagcatcaataaatatggcatcaaacggaccatacgttaaaatttcttctgatccttcaattgcatccgtaagcaagacttttattctgtcagaagccccgtaacgctctatattatgtaaagcttctttatatcgttcttcatcacgttcgactgtgataatttccgtttttggaagtttatctgccatttttaaagcagagtatccgattgctgttccaagttctaaaatacgttccggcttttgaatatctaaaatttgcaataaacaatgtaacgaatctggctccataatcggcacttcatgttcctttgcgtatacttctaattcttcaaaaaaaggcgtgctctttggaatatgttttaataaataatcatgaattatatcattcactgctaaatcccctcattttaacaaacaaagcacctgccaaaaacatgcaatacacgtttctgacaagtggttcattttaattatttttcgtaatatgctcttcttttagtttattgtgctcttctaatgttttagagaaataaactttaccagttttcgtattcgctaaaaagtatagataatcacttttttctgggtaaagagctgcttccatagatgtgtcaccgctattagaaatcggtcctggtggcagtccattgtttttgtatgtgttatacggcgaatctacttctaaatctttataggttgttttgcttttatgttcaccaagcgcataaagaacagtaggatcagtttgtaaacgcatatcttttgctaaacgattataaaaaacgctagcaatcattttgcgatccacatcggcagttgcttctttttcaataatggaagacattgttaggaatttatgcacggacattttttgtttcgttagttcgtcgcggtacttagcaatattaacgtctgttgctttcaccatttctttaattatcgtttcagctgatacatccgagcctttaaaagtatatgtcgctggatataaatagccttctaacggatgttttatagatttattcaaaacatcatttgtgacagtctctgggaatgctttaataatagaagcaacaaactctggattatccattattttaagaacatcggctttttttaatttaggttgataagcgacgattctatcagcaatttgatcgagtgtatatccttctggaatgactagttttgccggtgcgacagtctttccttcttgcattttcttcacgatttgatctgtgttcatagcttgcgtgaattcataattcccagcttttaaattcgtatcattattgtattttacataaaaagagaaaatagaagcgttattaatgacttttttatcttctaaaatagtagatatatctgaaatactagatcctgctggaatttcaacagcgatcttctctttgcttgcttcatctcttggctctagctgtgacttcacataataataccctgcaaaagttgcgattactaaaattagaatgataatagaaataataattgtaattttcttaccttttgtattcttcattatagacctcatttcattgaaaacaattcctatctattataccgattatctaaaaaaaatgctattcaatacggaaaattttcttaaaaagtgacgtttttatgttttttcggtataataaacagcgtgattaaacgaacaagacagaatcggtcaaggacttgcttctgccaattaaataaagattgaaggagtcttttggatgttacatacgttaatacaaagtttgcaagatttcacgatgtggttagtagactcacttggtcactggggaattttcctcggaatgcttatcgaaagtgtctgcattccgcttccaagtgaagttatcatgctgtttggcggatttatggcggaagctgggaaactgaatttctggctcgttgtatttgctggtatcgctggtaacttagttggttcactgattgcttactacattggtaaattcggtggtagagctttagtattgaaattcggaaagtatatattcttaaatgtgaagcacttggataaagcagaattatggtttggtcgatacggcgcaagagctgtatttttcggccgtgttttgccagttatccgaacatttatctctttaccagctggaattgccaaaatgaatgtctggaaatttgttatatatacgattttaggctgcattccgtggaatatttttctgacatggctcggttattcattaggttccaattggagcgttgtggaaaaatatacacgaccaattagctatttaatgttagctctagtagttgcaattgttgtctaccttgcttacaaagtatggaataaacgcgctagaaacgcaaaataaaaagcatgtcttgacagtttttgtcaggacatgctttttttatattattcttcgtcttcgtcagctaggaaagttgcaagtatttcttcaatcatatcccactcttcgtctgtttcaacaggtttaagttgaccttgtttaccttcttcatcttgaatgtaactagatgcaagaatttcgatttcttcgtcttccccttttcctgctgggaaatataatacgtaagatttgtcaaagtcttcggaatcaaagtcaaaaagaatttcgtaagcttcttcttttccttcttcatttgtaatccaaataatattttcttcttcatgattatggttatgttcttctgccattaaattcacctcaaattaattagtagtgtccaaataggactgtaaaatcattactgcagctaacttatcaattacttcttttcgttttttacgcgaaacgtctgcttcaatcaaagttctttcagcggcagaagtggtcaaacgttcatcccaaagtacaacaggaagtccaattcttgactcaagtacttcagcatatattttggaactttcagcacgaggtccgatggtattattcatattcttaggtagcccaacaacgactttttcaacttcgtattcgagcacgagctcttttactctgtcgtagccaaattgttttctgctctcgtcaatctgaatggtttcaacaccttgtgcggtccaaccaagtggatcacttatcgctacgccgactgttttcgagccgacatctaaacccattattctcatttctcaccaatttcgttatttttcagatacgctttaacaagttcctcgataatttcatctcgttctaaacggcgtatcatgctccgggcatccttgtgacgaggtatataggcagggtcacctgagagtaaatagccaacgatttgattaacgggattatagcctttttcttcaagagcaacgtagacttgtttcattaatttttttacatcttcttcaattgaatcatcgccgaagttgtaaaacattgtttgatcttttgaatccataatcgaagcacctcattccttcatgtatctctattcattttacaccatgtgaacggaaataacaaagaaaaatgaagtgctttaacgaaaatttatgcttgttgttctttcacccatgtagaaacataatcaagagctgttcctagttcagctggatttttaccgccagcttgcgccatatcaggacgtccgccaccatttccgccgcatcgtgtcgcaacttcttttaaaagtttaccagcatgatagccagctttgattgcatcttctgaaactgcagaaatcaagtttactttatcaccttgaactgctcctagaacaagaacgccaccaatttttttatctttccagttatcaacaaactgacgtaattggttcatatctttcgcatttacttgtttagcaattacttttacgccaccgatttcttctggtgattcaaaaatatcggcacttgcagcacttgctaatttacttaataatgattcgttttcacgtcttacttcacgtaaatcagcttgcagttgctctactttttgcggcgtttcttttgtagttgtttttagtaggttagcagtttgttttagtgtattttcttgttcagtcacaaagcgatatgcttcttttccggtaactgcttcaatacgtcgagttcccgctccgatacctgtttcagaaacgattttaaatagaccaatgtctgctgtattacgaacgtgaacgccaccgcaaagttcaatactatatttaccaacttgaaccacacgaacgacctcgccatatttttcaccaaaaagggccatagctccaagttctttcgcttctgcaatcggcatttcttcaataataacattgatttgttcccagattttttcattgacgatttcttccatttttgttaattcttcttctgtaatttgaccaaaatgagagaagtcaaaacgtaagcgatctggggaaacgagtgaacctgcttggttaacatgttcgcctaatgtatctttgagtgcacgatgtaaaagatgggttgctgtatgatttttgattgtttcacgacgttttactttgtcaacagcaagtttcactgtatcgcctgtttttaatacgccttcttttacagaaatacggtgtaagttttgtttattaggagctttttgaacatcttctacgtaagcaactcctgtttcgctttctatcgttcctttgtcagcaacttgtccgccgctttctgcataaaatggtgtttctttgaaaataacttgtgcctcgcttccagaagctacttcatcaacaagcgtatcatcttgaattaaatacaatatttcagaaacatgttctgttgtattataaccaacgaattcacttttatctgttaaattagctagcagttcgccttgaacttgcattgatttcacgtctgctctggcggaacgagcacggtcgcgttgttctttcatttcagcttcaaatccagcatgatcgacttttaagccatggtcttctgcgtattcttccgttaattccactgggaaaccaaatgtatcatataatttgaaaatatctgcgcctttgatagtttgttcgtttgtttctttggcatttttaaggattgtttcaaggattgccagaccttcatttaatgtttcgtggaatcgttcttcttccgtacgaattactttttgaataaagtcggtttgattttctacttctggatagaaactattcatgattttaccaacgactggtactaatttgtacataaatggttcattgattgtaagtactttcgcgtaacgaactgcacggcgaagtaaacgacgcaaaatatatccgcgtccttcgttggatggcaatgcgccgtcgccaattgcaaatgctacggtacgaatatggtcagcgattactttaaacgcaacatcattttcttgtgaatgaccgtatttcacgccagaaatttgttctacttcacgaataatcggcataaataaatctgtttcaaagttcgttggcgcgtcttggatgatagaaaccatgcgttctagacccatcccagtatcaatgttttgtttaggaagtggtgtgtatgttccatctggattatggttaaactgagaaaatacaaggttccaaatttctaagtaacgttcattttcgccacctggatataattctgggtcactttcgtcatctccaaaagcaggtccacgatcatagaaaatttcgctatccgggccacttggtccaatacctatatcccaaaaattatcttcaatttcaacgatatgatcttcacttaagccaattttttcgcgccataaagttttcgcttcttcgtcttcaggataaacagtgacatataatttatcaggatcaaagccaatccatttaggacttgttaggaattcccaagcaaaaagaattgcgccttctttaaagtaatcaccaatcgaaaagtttcctagcatttcaaagaaagtatggtgacgggctgttttacctacgttttcaatgtcattcgtacggattgatttttgtgcattagccattcttggattatccggaataaccgaaccatcaaagtattttttcattgttgctacaccactattaatccaaagaatcgtcggatcgttgtttggtacaagtggtgcactaggttcgattgtatgccctttttctttaaagaaatctaaaaatagctgtcttacttctgcgcttgataattgtttcattttttatttcctccttttggttttttacaacaaaaaaagcctatatgattgctcacagggacgattttggtaaatcgcggtaccaccctgtttgcaatgatatagactttgtatcattacctcttcaattatctgttaacgtggataagacggaccatctaatgggagagcaacttcggcacaagcgtggctttccttccagccaagggaaaactctctaatcacgtggaaaccaaaatcatattcctatcatgtatcaatatttattcaacaataaactaaattataaagaacggatggctaaatgtcaactgtttattaagctattcgttgattgtttcttttcaacaaagcttccgtttttaagagttagttttacatctgacactttcgcaatttctgggtcatgcgttaccataatgacacattttccttctttatgcgctaaatcttggaataacgtaactacttctttacttgttcgttcgtctaagtttccggtaggttcatcagcaacgattaattctgtttcacaacataacgcccgtgcgatggaaaccctttgctgctgtccgccacttaaagtcagcactttttggcgcgccattttctcagtaatgcccactttttcaagcatgcttagtgcaaaagcttttttgtctggctggttgacatgggtaatttccattgcagttgttacgttttgaagagcagtcatatatgttaataaattataactttggaatacaatggatacatatctatttctaaattgttgtaagccaatgcttttgagtgaactacctttatagtagatgtctccttctttttgcgtatccagtcctcctgcaagcgataagaaagtcgttttcccagagcctgaacttcctactacagtgtaaaaaacaccagcttcaaaatcataatttatatcacttaaaatcgattcatcttttgttttataccaataagagatattttcaaacgtcaatactttggtcatatcgtcacctactcctgtttagttagaattgtttttggattcatacgaagaacaagtgctgctggtaaaagaacggatataaaggcgattcctataccaattccacccattttaagcatatcttctaaagttacttggatgttgagttctttaatttgttctgtatttttcgttaagttactaacacttcccgcaaatccacctggacctcctggaccaccgccacctgggccgcgattttctgaagtagttgattcacttgtagtagatgaattttgctgtgctagtaattggtttccagctaattgagctacataatgactacttgcagctgctaaaccaaaggaaacgagcgctactattaaaatttctacaaagaactgagcgattaatttaccacgtttttctccaatagctaatagcacacccatttcgtatttacgatcacgtacttgcatcattacaagtaagcctaggattaaggctcccgcaatactaactatataaactacatttttagaaaacgaagctacactattaattggaccaatcatttgttgataaagtgtatcgttagcatctaatttaaatgtatcccagtcaatgctatcaactttttttgcttctttctcaaaagcagaaatattagccgcatcatccatagtgtaaacggcggagtctactgtgtctttataatcagaacctttaatagtattggctactgtataaggaacgtatactttgttataagggtttaggaaggagaagttttgcgccatatcactgcctgaatctgttgttttataaataccaacaatttttagtgttacttttgtatttccatcacttgaagtaacggtaaaagagtcgccaactttccagtcattttgttctgctaagttttcttctaccattgcaacatttttatctttatcattagctgtaatagctacaccacttgttaatttacttgttcctgcatcaaaatcggtacttgttgcggaatcaagtagaccgctaatacttaagtctgcatctaccatttgcggaccgccatttccaccgcctggacctcctgtttgattagaactcgaggaatcatcactgctagaggaagtgtcacctgaagattcaatagggtcaaatccagacgctaatgcttgcgtacttgaatagtaattgtaatttttcacatgatctaatgatgctaattcgttcgcatcgcttacatcaattgggttactttgaaattttggttttgagtctgtcgaactgctatcactatttgcagcctcttctttcattgcagccatttgcttttcttggtcaacagttaatgttactgtacctcctagctgttccctcgctaattcgcttgctttatctgcagcggattgaatggtaaagcctgataaaataagcacacacactactgtgaaaataattagttgtaaaacagatctaccttttcttgctttcatgctgagccatgctctcttaaaaaaattcatgtgatttcctccatttctgtttctaccccactaagattactgggcatttatgaagaaagtatgaacaaactatgatgcatattttaaactttcgcgaaaaaaataatttggcttgattattgggtctaattagtctagttttaatgtaagaggagtgaatacaaaatatgaaactacttatgatagaagataatgtcagcgtttgtgaaatgatagaaatgttctttatgaaagaagaaattgatgctacgtttgtgcatgatggcaaacttggttatgaaacattttttaaggatgattttgatattgcaattattgatttaatgctgccaaatatggacggaatgacaatttgccgtaaaatccgtgaagttagtgatgttccgattattattttaacggcaaaagagtctgaatctgatcaagtgcttggtcttgaaatgggcgctgatgattatgttacgaaaccatttagcccacttacattaatggcgcgtatcaaagctgttactcgtcgaaaaaacaatcatacgacgactgaaaatgatgaagacattctagaaacaacttattttaaaattagtaagcgcacccgggaaattttttatcaaggtgagctgcttgatgccttgactccgaaagaatttgatttgctttactttctaatgcaacatccgcgtcaagttttttcaagagaacagttactcgagcaagtctggggttatcaattttacggggatgagcgtacagtggatgttcatatcaaacgtttacgccaaaaaatcgcaacagacacgaagccatttttacacactgtttggggtgtaggctataaatttgatgaaacggaatgaagcgaatgaaatttaaatatgcctaccaactttttttcacacaatttatcattttacttattgcttgtattatgattggcgtgcttgtttctcactcactaaaagactatttttatcaaagccaagtagatgatttaactagttatggtgaaacgatttcgatggacattcgccactcgccgcaagatgcaaccattcaagttcttaatacgtatcagcgcattttagatgttaaaaagatccattacaccatcaaaaatgcagatgacgaaacgatttaccctactcagctcaatcaaccattaccaaaagatttttcaatttcaaaagatgataagaaaaaattaaaaagtggcgaaacagttagtaaaaaaatcgacaatcgttttaatcgtgaaatgactattgtttatgtaccaattatggatggcgataaatttgttggatccatcgtcttaaattctccaattagcgggactgaacaagtgattggaacaattaatcgttatatgttctatactattttactatcgataacgattgcgcttattttgagtgctattctgtccaaactacaagtcaatcggattaataaattgcgttcagcaacaaaagatgtgatccaaggcaattataaggcgcggctaaaagagaataattttgatgaaattggcgcacttgccattgatttcaacaaaatgacggaaacgcttgaaacatctcaagaagaaattgaacgacaagaaaaacgtcggcgccagtttatcgcggatgtttcccatgaaatgcgtaccccactcacaacaattagtggcttaacagaaggtctagtaaacgatattattccaaaaagtgaaacagatcgctgtattgctttaatagacacagaagcaaaacgattaacaaaattggttaatgaaaaccttgattatgaaaaaatacgcagcaataaaatcaaactacaaaaaactcgctttaatggtcgtgaatttttagagctaattaaagaacaactagattatgtagccactgaaaaaggcaataagattacagtcgatattgataaagatatgtatatttacgctgattatgaccgtttaactcaagtatttattaatattgttaaaaatggtgtccagtttactgaaaatggcctgattaccttaactgggactcaagattataaggaatctgtattaacgattacggatactggcatcggcatgaacacagaagaactagaacagatttgggaacgattttataaagcagatatgtcccgcacgaatacagctttcggggaatctggaattggtctttctatcgtgaaacagttaattgaataccatgatggaaccattagcgttactagcgagccaaataaaggcacgacatttacgattcgtttaccgtttttccaagataatgagcaataaaaaaacacccacttgcgagtgggtgtttttcatcctgccataaattgttctggagtaattccttccatcccaatcaacggatcaatctccgtaatgttttcggcagttaatattcgtttatttgtcatttgttcgagcatcacatcttcactcattaaacgttccgatagcgttgtattccgcttattttcatctacacgttctacacccattcggaaagcttcttcttctccgcaaagaattaggaattgtttacttcttgtaacgccggtatataacaaatctctacgcaacatccggtaataactacgcacaattggcattataacaatcggaaattcactaccctgcgctttatgaatcgaacaacaatacgcatgggtcaattgattaaattcttgccgataataagaaacctccgtttggtcaaattgaacgacaattaaatcttgtttttccgtattttctttggcataaataatggatacgatttcgccaatgtcaccgttaaaaacatttttttctggttggttgattagttgcaacactttgtcgtgaacccggtatttgatttcgccaaattgtacttcttttcgtcgaccagtatcgtttggattaaagatttcttgtagttttttatttaatatatcaattccagctggaccgcgatacattggagccaacacttgaatatcctttgcacgaaaacctttatttttagcatttttcacgacttgttccacaacgtcaccaatttgatttacagtacagtggaaaaatgaccgatcggcactatttttcgcaaaatcagctggcagcattccttctttgatataatgagccatttcaatgatggaagaaccatctttttgccgataaatatctgaaagtgcaaccgtcggaaattgttctgattgaagaatatcttttaatacttgaccaggtccaacagatggaagctggtcttggtcgccaacgagcactacttgcatatgagcaggtaaagcgcggaataattgattcgcaagccaaatatccaccattgacatttcatccacaattaacaaacgtccatcaattaatcgttctgcatcgtcatccatctgttcttggccattcattccaagtaaccggtgaatcgtcattgctggaaggccagtggattcagacattcgtttagccgcacgacctgttggagctgcgagtaacactggaaaagtcgcaccatctttataggcatgtggatcaagactaacaccatttaactcggcatataattctacaattcctttaataacagtcgttttccctgttcctggtcctccagtaagaacaagcatcggtgacattaaagcttgttctaatgccgcacgttgagattccccgtaatgcacgccaatgcgctcttcaagttccccaagcgctaataaaaactccgattgcggaaattgttcttgatactctgtttgctttaacattcgttttacatggtaagcaaaaccgctttctgaataataaagtgacggcatatagacgcgcgtgttttcggtaattattttttgttcttctgcaagtttttctatttgttgcagtaaaattgcctgatcaatcctaatgccttcactttcttctagcagataagttacttccccgagcaaaacctcttgttccatatagacatgaccttgctgcatacaaacggaatctagcataaataaaattcctgctctaagtcgttctggatggtttccgccaagtccaagcttacgtccaagctcatcagcacgctggaaaccaattcctttaacatcttcaattaatttataaggattattttctagcacttcgatcgcattttgtttatatacctgaaaaattttcatggataattgcgggccaaagccatattcatttaaaccaaccatcacatgctctaaaccttgattttctctaagggaagcaagcaaactttccgctgttccagaaggcagtttaggaacagtatttagtaaacttgggtcagatagtattttcgtaatcgcgtcatcaccaattgtatcgacaatgttttccgctgttactttaccaatccctttgaaaagttcccctgaaagatagttaatcaagccagcgcgagattgaggcatttcttttcgaaaccggtccgctttaaattgctgaccaaatttagcatgttcctgcatttttccgtaaaaagtatacacttcttgttcatgaagtgctgggaaaaaaccagttacaataatatccttttcatcccaaatcgcattcgtctcttttactagaattcttaccacagaaaagaggttttcggcattataaaaaatggtagacaacatcgtccccttcatgaaaagttcttctggggtatcattaaataaggcgagagattcttgttcagccatctttagccgtctcctttctatatttttattccgcttcgttttctaaatcttgaatagcatttaaagcattctcagcaagttcatgcggtattccagttgcaagcgcgcgttcaaagtaattttttgcaagtacaatgtcgccttgccatgccagataagcagctccgatattataaagtgcatctggatcttcttgtttaataagaagtactctttcaagcatattaatcgcatcttcgtaaaatccgctgcgagcaagaacgataccatattgaaataacgcttcactatcttctggatttaattcgacacttctaagtaaataaggcatagctagcgttaactcttccatttgaacaaaactcattcctaacatgaaaaataaatcgccattttccattccttgttttgttgcattttgaaagctatccgcagcttcttgataacgttctaattcgtaatataaattacctaagctataataagccgccggaaccgtgtcatctagttcaagcgctcttttgaaaaataattctgcgcgttcaaaatcatccattgatagtaaaacattaccaaaattaatataaccaactggatcactaggatgttcttcaattacttccgtaaatagtttaactgcttcttctaagtttccttcttgcatttgtttgattcctaattgatttttatccattttaaattctcctctatctttcttggttttttacagacgtatttaaccatgctatcagagcgtttgaaacttgatcagtttgttccgcctcactaatagtagctttcccgtcgccatgctgggctccgtatgacccgaattgcgcatgatttccaccctcaatagatacaaatgtagtatctttaggcaagtattttttatttttatcataagcatctttatttaaaacatcatcttttgtcccagttatggaaagcgctgggaaagaggcatttttcagcgaaccttttttatcaggataactcgctaagaaaaatacgccttcgatttcactctcgttttcatgtgcaaatcgggaagacataacgcctccaagcgaatgaccgccaatcacaaacttttcatcaggtgcttcatcaataatatcagccgcacgatttttaccaaatacagctaaattaagaggcatttcagcaatgtatgttttataaccactcgaagctagtttgttcgcaagtggcgcatagctcagtgcgtccacaaaggctcctggatacaaaataacactaattcctgcatccgactttcgcggagtaaaaacaagtatatcattttcctcaagcacatcaaccgtttttgttgagtttgcagcttcttcagctacatttgatggctcagaattaaaataaaaatatccccaaattagaagacaaaataaaactattacactcccgaaaatcgctaactttttcataaaggacctcttttccttgtatcgtttaatattttaccataaaatcgccttaaaataactcatttaaacaggaaaaaaccggagtctcgtagaaaacaagattctccggttctaattttaaccaacatagtttaactttgcgccttttttccaaacggtatcaatagttcccccgcctaagcaaatgtcgccatcatagaaaacaactgcttgaccaggagtaattgcacgcactggatccgcaaaaactacttctgctgtgccatcttcacgcatgtttacagttacttttgtatctgtttgacggtaacgaaattttgctgtgcaaacaaaagtttttggtttttctgaattggtagtaaaggaaatatctgttgcaattaatgaatctgagtacaaggaatcatgatggaaaccttgttctacaaataaaacattattttttaaatctttaccaacaacaaaccaaggttcaccgtctccaccaatccctagaccgtggcgttgaccaattgtgtaatacattaggccatcatgtttaccaagcacttcgccgttcaaggttctcatatcaccaggttgcgccggaagatattcacttaaaaattgcttaaagtttctttcaccaataaaacaaatccctgtgctatcttttttgttggcagtagcaagtccagcttttgtcgcaatttcacgaacttctgttttttccataccacctagcggaaacattacttttttcaattgatcttgggaaagttgatttaaaaaataggtttggtctttattattatcgactccacgaagtaattcgatttcgtcgcctactttttttacttgtgcatagtgacctgtagccacatagtctgcaccaaggctttctgcatgttccaaaaacgccttaaatttaatttctttattacacataacatctgggtttggcgtacggcccagtttatattcatctaagaaataggtaaatactttatcccaatattctttttcgaaattcactgcataatacgggattccaatttggttcgctactcgaatgacatcatcatagtcttccgtcgctgtacaaacaccaaattcatcagtatcgtcccaatttttcatgaaaataccaatgacatcataaccttgttcttttaatatatgagcagtgactgatgaatctactccgcctgacatgccgacaactacacgaatgtcactattatttgtactcaaagctagctcctcaccttcttaatttttcattaaacgcgccacgacttcactaactttcgtagccgccgcttctatttcttccaaatggttccccagcccaaaactaatccgaactgtttcttggattgccgggtgattttctccaaaaagagctactaaaacatgagaaggatcaacagttcccgctgtacatgctgaaccactagaaacagcaatgccttccatatctaaattcattagtaattgctcaatggagactcctgggaaacgcacgctaaaaacatgtggtaatgtattcgcttctaaaccgttcacttcaaaatctaagcccgctgcacgccaaatttccgccatgcgctttttaaaggaaacatactcctcatttttaagttcacgttcatttgtcataatggtagaagctgcactaaaaccacagattcctgctaagttttcagtcccagcgcgacgttttcgttcttgttccccgccgtgcatttgataagcaagacgtgtgccatttttgacgtataaaaagcctacgccacgtggtccatttattttatgagaagaagtagttaataaatctactccaagttctattacatttatatttaatagcccgtaagcttgtactgcatctgtgtggaaaacggcttgatggtcaagaagtacagcgccaatttctgcaatcggctggatagtaccaatttcattattaccatacataatagaaacaagaattgtatcagggcgtaaagctttttgcacgctctcactagacactatcccatgctcatctactggtaaataagtgacttcaaaaccttgcgtttcaagatattcacatgtttttaaaacagcatgatgctcaatctgtgaggtgataatatgttttccattctctttatgtgctaaagctgttccaataagagccaagttatctccttctgtaccaccgctagtgaaaacaatttctttttcttcagcttgaatactttgggcaatagtatgacgtgcttcatcaagcgcttttcttgcctctcgcccagcataatggatactggatggattgccgtacgtattagtaattgcgccaagcattgtttggataacttctggatgaatcggacttgtcgcagcatggtctaagtaaattctgttttccattttttatcgcgtccttttttggtgacgaattcctgttcgtcgttaatcgtttcttattgtaacagcaatactcctgtaaagtaaagaggaataactcctatttacacgcaaaaaagaaaccccaatcgtaccgtttaggattcccttcctttgaacccgctctcaattaaagcaggtgggtgctctgtctaacggtttgcacttcctcgtgtgaaggcatgtgcgccgcgccggaactccaagctccctaggtataaaaaattgttcggttcaaaaatatcaggaactatatcgaatacattagggtttcttttcttaacttagaataccatatgaaagacgaaatttcaatgttagcgacttttcagtttggtaattttttattcttttttcgctttattttcattaattttttggtacacaccagcgattgtttgttcgaattttgaagtgaatttcgggtcataatataatttatttttgagtcgatcaggtaaatattgttgatccacccatgcattatcgtaattatgcggatacttgtaatccattgctcgaccaagttttttggcacctgaataatgaccatcacgtaaatgatcgggcacttcgccactatttccctggcgaatatcagctaatgccgcgtcaattgccataatagcagaatttgatttcggtgaaagacaaagttcaataacagcatttgcaagtggaattctcgcctcaggaaaacctactttttctgcagtttgaatcgcagcaagtgtgtgtgcaccggcttgtggatttgcgagaccaatatcctcataagccataacaagcattctcctactaatactcactaaatcccctgcttcaattaaacgccccatataatggagtgctgcattaacgtcgctaccacgaactgatttttgaaaagcacttaaaacatcgtaatgagcatcgccgtctttatcatgtgcaagacttttcttttgcaaacactcttccgccacatcaagagtaatatgaataatcccgtcctcatttggttcagaagaaataacagcaagctccagtgcattaagagcactacgtacatcaccattactcgccgtggcaaaatgttttttcgcaaattcatctatttccacttcataattgccaagtccacgttctttatcaagaagagctcggtccattgttatcataatatcttctaccgttaaaggttttaattcaaaaatttgcgttctacttcgaatcgcaggattgatcgcgatataagggttactcgtcgttgcaccaattaaaataatcgcaccactttcaagtaaaggaagtaaaaaatcctgctttgctttatctaaacgatgtacttcatccaatagaagaataactgtgccactcattttcgcctcggctgctactacttccatatcttttttgttatttgttactgcgtttaatgtccggaaagcatatttagtactaccagcaatcgcgctagcaatcgaagtttttccaattccaggaggcccgtataatatcatagaagataattgtttcgctttgaccatccgataaataattttatctttaccgactaaatgcgtttgtcctacaatttcatcaagtgcttttggacgcattcggtaagctaaaggttgaattgccatataaccgctccttctcatttgcttgttttctattataccataagaacacctgtacgttcacttgcttgtttccattgccttctgacagtaattccgatataatagatgcgatatgagtgttttttgaaattactggaggttatataaaaatgaaaattacaacaaaaggccgttatggcttaacaataacacttgaacttgcgaaaagaattggtgatgggcctatctctcttcgcagtattgcgcaagataaaaatttatccgagcattacttagaacaattaatcggaccgcttcgtaatgcaggaattgtcaaaagcatccgcggtgcacacggtggatatgtattaaacggcgaccctgaaaaaatcactgccggggacattatccgcacactggaaggtcctattgtactcgttgaaagtatggaagatgaagaagctgcccagagagaactttggactcgaatgcgcaatgctgtccgcgacgtgttagatcaaaccaccctctctgacttactaaaacattctactgattctgaactaacagatggttacatgttttatatttaatggaaaaagcctattaaaaaataggctttttatctaccatttttacggaaactaacctattcatttgtctgattattctgaaataaatctaaaaagcacccaattgaaaacgctgtatgttagataacctaaccaaattgattgaattgataaaatattcttgcctttatttgaatatagtgtattataaacgcataaataaaatattacatgttagtttatctaacaaaaaggagagttgagtatggaatcagtatttatgttcttttgtactttattggtttggttgatgacaccagggattgcattattttatggtggtatggttcgccgcaaaaacgtgttaagtacagcaatgtatagttttagctctatggcaattatttctattctttgggtgattgttggctactcgttagcttttgcacctggaaatggctttatcggcagtttcgactggactttccttcataatgtcggttttgcggcaaatgacacttactcagatgcaattccacacattctgtttatgatgttccaaatgactttcgctattttaacagtagctatcatttctggggcatttgctgaacggatgaacttctctgcttacttgatttttattattttatggtcgttactagtatattcccctgttgcacactgggtttggggcgacggtggttggttacgcgagctaggagcacttgatttcgctggtggaaatgttgttcatatcagttcaggtgtaacgggtcttgtcttagctataatgattggccgcagaaaagaagctgattctgcttcacctcataacctcccgcttgctcttattggtgggattctagtctggtttggttggtatgggtttaatgtcggtagcgccctcacgattgataatgtagcgatgactgcatttgttaatacgaatacagcggctgcagctggaattattggctggggattggttgaatggttaatcaataaaaaaccgactatgcttggaacaatttctggcgctatcgctggtttagtgtccattacacctgctgccggtttcgttacagtacctagctctttgattatcggctttcttggcggagcactttgcttctgggcagtattctggttgaaaggaaaagtgaaatatgatgatgcgcttgacgcgtttggcttacacggaattggcggaatttggggcggcatcgctactggactttttgccacaacgaaggtaaatgaagctggagcagatggtctcttttacggtaatgcttccttagttgtaaaacaattaatcgcaattggctctactgtcgcatatgttgcagtagtcacagctctaattgtcgtagtaatcaaactatttttaccaattcgcgtaaacgaagaacaagaatacaaaggacttgatttgacgctacacggcgaaaaagcatatcaagaataagggggcttacaatatgtcaggattaactaaaatcgaaattattacacgtccaaaccgcttccatttatttcaaaaagaacttgcaaaaattggcgtaagtggactaactgttacaaaagcacttgggactggcttagaaaaaggatttattgaattataccgcggtactaaaaaagaaagtaatgttcacgaacgaatgaaaattgaaattgttgtttctactgttccggttgaagatgtccttcgcgtcgttaaagaaactcttcgaactggcgaacctggtgatggaaaagtatttatttatccccttgccgaggtcgttaaaatcagcacaggtgaaaccggcatcgatgctttacaagataaaccagcaaaatgaatagttaaaatggtgaattaattaaaaatggggcctctattctaaaaaatcaatgagaaatggcgtttaccccttccgcttcttagcttttacacttataatggaaaaggaagaacgtttagaacagataaggaggcgcgaaattccctatgcgtaaaatccccattttcacccttctagcagccatactactttttggcggttattacctttatcaacatgcttcgtcaaaagtagatgttacatttaactttgtggtggatcaaaaagataaaaataataccgtcaccggcaaaattgatggtgctggaaacaaatcaattactttaccgctttctaaggagagttgggatacagtagaaaaagggaatcgctacaatgtggaagccactttttataataaaaataaaatcagctccagtgaagcgaaggaacttgacggaccattttggtccaatgattccaatcaaggattattagttaataaagtgcacgtcgaaaatattcaagaattaagtgatgatttttaaaaaagaagctgagcgcggtcgctcagcttctttttttagttagtttcttttttcactgtttctagttttaattctgctaattgtgctgcactaacttcacctggtgcatttgttagtggatctactgcacttcctgttttagggaatgcgatagtgtcgcgcaagttatttcttccagccagaatcattacaatacggtctaaaccaagtgcaattcctccgtgtggcggtgttccatattctaaagcctccattaggaaaccaaattgctctttcgctgactcgtctgtgaaaccaagcgcgcggaacatcgattcttgtacttcttttttgtaaatacgaagcgaaccaccgccaatttcataaccatttaaaactatatcatatgcttctgccattactttggaagaatctgtttcaagaaatggaatatcttcttcttttggtaaagtgaatggatgatgtgcagatacataacgccctgcttcttcatcatactcaaagagcggccaatctgttacccataggaaagcaagttcatcttcattaattaaatctaagtcttttcctagcttgttacgaagcgctccaagcgatgctgcaacaatatccgctttatcagctgcaaatagcaataagtcaccatcttcagcttggagtgctgcttgtaattctgctgctttatcttccgggaagaatttagcaattggtccttttaattcaccagcttctattttcagccaagctagccctttagccccgtaattagcaacaaaaacgcctagtgcatctaaatctttacgagagaaattagttgcagcagcttttgcattaatcgcttttacttcgccgccgttttcaatagctgattggaatactttaaaatcaacatcttttacaacttctgaaacgttttgtaattctaaaccgaaacgaatatctggtttatcgctaccaaaacggtccattgcttctttataagtcatgcgtgggaatggtttttcgatagtaatgtttttcgcttctttaacaacatccaccaacatgtcttctgtaatcgcttgaatctcttcttttgttaaaaagcttgtttctaaatcgatttgcgtaaattccggttgacggtcaccgcgcaaatcttcatcacggaaacaacgtacgatttgataatatttatcaaaaccggcagtcattaataactgtttcaaaatttgcggagattgcggcagcgcatagaaattacctggatagacccggcttggtactagataatcacgcgctccttctggtgtactttttgttaagtaaggtgtttcaatatcaaagaaaccaagtgcatctagtttgtttcggaaagttcttgttactgtatggcgcattttgaaaatattgttcatttccgggcgacgtaagtctaagtagcgatattttaagcgaagttcatcagaaacatttacgccgtcttcaatgtaaaatggcggtgttttagaagtatttaaaatagtaatttcttctgctaaaacttctactttacctgttgctaacttatcgttaattgctttttccccgcgagcatgaacttttcctttgatagtaacaacaaattcatttctaacgctatctgcaatttccaatgcttcttttgaaaattcaggattgaaaaccacttggacaattccttcacggtcgcgcaaatcaatgaaaataagtccacctaagtcgcgacgcttttgcacccaaccatgaaggataacactttgaccaatatgtgtttcgtttaattcaccgcagtaacttgtacgtttttccattttatttctcctccttggtgtttgttagtttttcgataatagttgtttccgaaacagcttcttgttcgcctgtttccatattttttaattgataattacctgtttgtaactcttcttcacctagaattacggtatatattgctttttttctattagcatcttttaattgtgcttttaattttcgttttaaataatctttttctgcgctaattccattttgtcttaatttatttacaagtgtcactgcttttaattcagcttctggctgtgcagtaattacatatacttctaacggttttgtttctggaatattgatttcggctttttctaaggcaagtaaaattcgttctacgccaattccaaaaccaatccctggtgtatcaggtccaccgaattcttttactaaaccgtgatatctaccgccaccgcaaagtgttgttttcgctccaaagccttcttctacactcataatttcaaacgttgtatgattataataatctaaaccacgaaccattgttggatcaatttcaaatggaatttctaatgcagttaggtattttttaacattttcaaaataagcaactgattcttcatttaagaaatccaaaatagatggtgctgattgaataagcggattatcatgatcttttttacaatctaaaatgcgcagtggatttttgtgtagacgcacctgacattctgcacaaaattcatcaatatgtggttcaaaatgtgcaactagtgcttctcggtgttttaaacgactttctttatcaccaagactgttaatgactagtttaatattagttaaaccaatttttctgaagaactccattgcaagcgagataacttctacatcaatggaaggatcatcactaccaagtgcttcgattcccatttgagtaaattggcgttgtcttccgccttgtggacgttcatagcggaacattggctcattgtagtacattttaataggttggctaacttcgccgtataatttatgttcgacaaaagcgcgcacgaccgaagcagttccctctggtcttaatgtaagacttctgccacctttatctagaaaagtatacatttctttagatacgatgtctgttgaatcgcccacgcctcgttcaaataactcagtgtgttcaaaaataggcgtcctaatttcttcgtattgatagttttcgcaaactttattaaacgctgattctaaaaaatgccatttactaacttcttctggcaaaatatctcgtgtccctcttggtaattgcaaatccatcaccatacccctccttaaaaatataaagaaaaacccccgtcacttgttataaaaacaagggacgagagtttatttacacccgtggtaccaccctaattagaactattaataagtcctcacttaagtcagttaacgcctgaatacgttcttgtttactgttttcaacaagaaacctcgagagtgtcttttcggaaaatatgactatctttatcctttcagccaaatgggataaattctctgtatagcatggattttcttacttttctctgtcgctagttttaaatatgaattattctaagattactaaaaacacactgaaaagtcaacattttgtcagtttttttataaaaatccactttctagttccatgaaagcgcattttatggtaacattttactgtcagataaaagtttatgagtatatgggtggtgttagctttaaatgaagaacaaattcatttttatcaccgttgtctccattttattgattgcagcaggtatttttacaaccatagcaatggcgaacgcgaattccgttgtcgtcaaagcagaagtcttaaatgtccgcagcggtcctggtttagcctatgatgtaacaagccaagccagaaaaaatgaagtactccgggtagttggtgaagaaaatcaatggtacaaagttcaattagataacggaaatagcggctgggttgctagctggttagtagaaaatacagatgtcagcgcagcaagtaacagtattgctattgtctcttctgatggtggactcaatgtacgtgaaaaacctagtacttcaagcacatcacttggattactaaataacggtgatcaagtaaccgttacaagccaacaaaatggttgggcgcaaattcagtataacggtaaaagcgcatgggttagttctcagtacttaactatacgtgaatccgtaacaaaagtagatgaaagcgaacttcaaacagtaacgattcgcgatgactccacaaacataagaaataaaccaggacgagatggcgctgttattgaaaaagccaattctggtcaaggtttcgccattcaaggagttcaaggtgactggtataaaattcgtaccacaagcggcgaagaaggttatgttgctaactgggtagttgatgtgtccgacaaaggccaaacttccagcccacgaagtaaaacaactaaattatccgaagcgaccattgttattgaccccggtcatggcggcaatgatccaggagcaaaaggcgctaatggtactatagaaaaagaaatgacattaaaaacagctaaaaaactgaaagaaaaattagaatcaagaggcgctaaagtaattttaacgagaaatagtgataaatatgtttccttaaaatctcggactaatgtagcggcagaaaataaagcagacgtctttattagtattcattttgatagcttagaagatagtagcaaaggtgttagcggacaaactacttattattatgataatagtgataaatcgctcgctgaaagtataaatactacacttggaaatgatctccctactactaaccgcggctcaagagttggcgattattatgtagtaagagaaaattctcaaccagctgtccttctagaacttggttacttgagttctgcaaaagacgaacgaaacattaattcggcatcttatagaagccaaattgctgattcagtaactgatggattatctaattatttttctaactaaaaaaagcaatcattccagtgatgaaatttcaccagaatgattgcttttttattttcgcatttcttcagagtcgagcataatagtaactgggccattattgacaattttcacgtccataaatgcaccaaatacaccagtttcaactataaatcctgcatcggaaagtttgttattaaataaattgtacaatccttccgccttttctcctggagcagattttgtaaagcttgggcgtttgcctctactaacatccgcatataaggtgaattgtgaaacgctgagaatcgcgcctccccgttcggctaaagaaatattcattttctctgattcatcttcaaaaactcgtaacccaataattttttttgccatgtattctactgtttcttcagtatcactatgagtaaacccaactaatagacatagacctccagcaatttcactaataatttccccttcaacacggacggaagcttcataacatctttgtagtagcacacgcacttcttttccactcctttaattcattaatcttctaactgtataaacatctggaatttgttttatcttatccacaactcgctgtaagtgattaatattatgaatttgtagtgtgacaacgagggttgccattttattattgtctactttggcattgactccattaatattggacgtcaagctattaataacttgaagaatatcatttagcaagccgttacgattataaccataaatttcaatatcaacattataatcattttttgcttgcgaatctgtatcttcccagtctacttctattaaacgttctggttcaatcgcttggacgttcgggcagtcttggcggtgaatggaaataccgcgcccttttgtaatataaccaacaatatcatcaccaggcactggattacagcatctagaaagacgaattaataagtttcctaccccttgaactacgacaccggcattatgtttaatcttcagcttctcgttattagcatctgaattagacggtttattttctgcttgtgttaatagtttttccgtttcagcttcaagttcccgctctttccgcagtttctctgttaagcgattagcaacctgtaaagcagtaatgccattataaccaaccgctgcaaaaaggtcatcttcatgagaaaagttcaacttatcagctaacttgcgaagattttcagtcaccatgatttttttcggttcaaatccaagctgtctaatttctttttcaactaaatcgcggcctttttcaacattttcttcttttgcttgtcgtttgaaaaattgcttgattttgttgcgggcttgtgaagtttgaactaattttaaccagtcacggcttggtccataagaatgtttggatgttaaaatatcaataatatcgcctgtttttaatttataatctagtgtgacaatttttccgttgatttttgcaccgattgttttgtttccaatttcggtatggacacgataagcaaaatcaagtggaactgagccatttggtaattcgtatacatctccttttggcgtgaagacataaacaacatcagaaaataaatcgagttttaagctttccatgaactcttccgcattatccgattcattttgatattccaaaatttcacggaaccaagtaagcttgttatcaaaagaagtttttgaattaacgactttaccttctttataagcccagtgagcagcgaccccatattcagcgatttggtgcatttcatgggttctgatttgcacttcgagtggttcgccctgtggtccaataaccgtcgtatgaatggattgatacatattagattttggcattgcaatatagtctttaaaacgacctggcatcggtttccagcgcgtatgaataatcccaagcacagcataacaatctttaatactactaacaacaatgcggactgcaagcaaatcataaatttcgttaaattgcttattttgctccgacattttccggtaaatagaatagatatgtttcggtcttcctgaaatatcagcttgaatatttaattcgtccaggttttcatttaccccgtctataacatcatgcaaatagcgctctctagcatctcttttttgcttcattaaatggacaatacggtaatattgttgtggatttaaataacgtaacgcggtatcttctaattcccatttaactcgtgaaatccctaaacgatgcgctagtggagcgaatatttctaaggtttcattcgcaattctacgttgcttctcgactggtaaatgttttaaggtacgcatattgtgtaatcgatcggcaagttttattaaaatgacacgaatatcttgcgccattgcaataaacattttccggtggttttcagcttgttgctcttcatgcgatttatatttaattttacctagttttgtaacgccatccactagcatggcaacttcctcgccaaaaacttcttctaaatcagctagtgtaacgggtgtatcttctacgacatcatgtagaaaccctgaagcaacagtcgatggatccattttcagttctactaaaataccagcgacttgaattggatgaataatatacggctcacctgatttacgaaattgttctttatgagaatcgcgcgcaaattcatacgctttttttacaagcgcaagatgttcctgattcatataatgagaagccatatcgatgacttgctcagctgtcagattttgttctttcgccatttacattcaccctcttatttctttgtcatatatccaacttaaaaacacccaataactgagtgttcctaaaaagattcttgtataatattatagcatgccgcttgtttgtttataaagcacttttccttgtttttccacattttctagtggtttagagatttttatgaaaaaaactactcctaaaatatcaggagtagttcgttttttataatttcatcaggattaaacgatcgtaaccatttaattttttatgtccttctaattcttttagttcgattaggaaagcacagccagcaacaataccacctagttcttctactagtttgattgtagcttcaatcgttccaccagttgctagtaaatcatctgtgattaaaacgcgttgaccaggtttgatggcatcactatgcatggataatttatttgttccatattctaaatcatattccatttcaatcgtttcacgtggaagtttacctggtttacgaactggagcaaaacctattccaagcgcataagccacaggacaaccaataataaagccacgtgcttccggtcctacaataatatcgatttttaattcttttgcatattccacgattttatccgtagcaaaacgatatgcctcgccgtcattcataagtggcgtaatgtctttaaaaacaataccttttttcggccaatcgttcacaatcgctacgtaatcttgtaaatctttaatttccattttctagttcctccgcattcgggtaaattgatgtttccatcattgatttcatccaactatgaagctcagtataattggagtataacagtttttttctagtagttatttcttctaccttttgttgataaactatggattcgtccaaattacgtttttcaacaacttggttaataataatctgaccactatccattttagcaaattctaaatcaaaaaacacctttgacatgaaatctatttgttctttgttccagccaaacttttgtataagcctaggagtgtatttttcgattggaaatggttggaatttttttattaagctatatagttcagcaaatgctccccggtcaggtattgctgggatttgattaccttcagaagcatcaaaatgaacaaagattcgctctggttttgtttcgcgcacaatttcttctattagctctactttcgccggcatatcagcaaaaactaattcctcagtttgaaaatctgctgtaaaacctttcgtttcatcgactaatatatatttttggtccgcgagggttgtaactgttctttcttcaaagcaaacaaaaagtcgctgctcatttcgttcttgtaaaattctagaccattcagctttattccgcacatcaaaaagttgccagtgcgggatgtgaatatccatcattcgaagttgtggctttttaatattattccactcattaatagacagctcaccgacaacatctactgctgcatgaggcgatattttctccactaagtctcctacaccaaaaccaatagcatctaaagttacatcactatcttcatttgcaagcatcgtttttaaatgggttttatctgccccaattcttttagtaccttttaaattcatctcttctaaaaggaaaattggttttggattatccattccaaacggcgctaatttttctaattgcgctataaaagaaacggaaatatctgcaaggtttattttttcttctattttcaaagccggtcggaaatcttcatcggaaaggtgactagcttcttcttgtagcttgttatcaagttcagctaagttttctgctggtaaagtaagacccgcagccattggatggccaccgaaagctgtcattaatgaacgatgcttatctaacgcttgatacaagtgaaaagcttctacactacgtcctgatccttttgctacaccagtcactggatcaatgccaagtacgatagccggtcgagaataaacactgactaattttgaagcgacaatccctaaaataccagtattccagccttctccggagacaacaatgatatttccgagggattcttttgcctcgattgcagccatcgctaatttcgtcacatctacgaccacttgtttccgttctttattagcatcatcaatctcttccgctaagaaaagtgcttcttctgggtcctcggttaaaagtaaatccgcggcaggatcagcaggaccaagccggccgacagcattaagtcgtggcgcaagtccaaatccgattgtttcttctgtagcttcttctaatttcaaacttgcttttttcgctaaaacagcaagtcctaagttagcattttcacgtaattggcgtaaccctaattgaactaaaagtcggttttcatccgttaaagaaactaaatccgctactgtcccaactgctactagatccagtaattctttcggttcctcaccaagaagggcatgagataatttataagcaacaccgactccagcaagttcatcaaatggatacgcagatttaggatgctttggatgaattactgcaatagcatctggcatgacttcacgcggttcatggtgatccgtaacaatgacatctagcccgatttccttcgcatgcgtcatcacttctagtgcggcaattccgttatccaccgtaatgatgagatcaacaccttggtttttcgccatatcaaatgctgcaatatttggtccatatccttctgtaaaacgatttggaatataaaattcggcatttgctcctaaatgtcgtagtgtcttcattaaaacagcaatacttgtcacaccatcagcatcataatctccgtagactaaaatctgctcatttaagtcaattgcttgtttaattcgagcaacagcaaggtccatttctgcaagtaaaaatgggtcgtaactttcatatttctctgggtggaaaaatttatcgaattgtccttgcgttgtaatttttcttttccaaagcaattttgcaagtggaagcgagatttttaattgttcggctagttggctagctttctcgtcgcttgcttcctcgatattccataagtattttgaatgaatcactttaccccacctctcaaccttcctattatatctaaaattgctagaaaaaccaagaggaatcttccaaacaaaaacgctaactaagtaagttagcgtcttctttattatttaattggctctactgtattttcagcatcgcgtttttctacattagatgaatgtgttttcatcgattttgcagctgctaattgacgttctagctctgttttttcagcagttaattgctttactcttttcttcatgccacgtgatttggcaatgtttaagaaaaagataattaaacaaccaactagtacagaacctataataattaaaattaacggccactcagcttgagcaaataaaaagttgacttcaactgggtctacattaataactgcaaatatcgcaataataagtgctagaataatccccacaatcacttgccattgaactttgttttctttcatcctctctctcctcctcgcaacaattatcttattatttacccgtttcaagtctattaaaaacagccgaacttcattttatgaaattcggctgtttttttaaactacaggttgaccattattacgtggttttttctttttaaccgtactaatcggaccttttttacgtaactgtcttgctttaaatacgtaccataattgcattgccatgaagatggatgagaatacacttgaaaccaatccaactagtaaagcaatggagaagttaagaattgattcactaccaaataatacaagtgcaagtacagtgaagataactgttagaattgtattaatggaacgagtgaatgtttgacgtaatgctttattaacagcatctgcaatctcttcttttgttttaaagcgttgcatcttcatgctaatatctcgtatccggtcggcggtgactatcgtatcatttatggaataaccgataaccgtcagaaccgctgcaataaatgttaagtcaacctcaagtcttgtaacactaaagaagatgaagataataaaggcgtcgaatagcagtgaaagtatcgctgcaatccccatatagaattcaaaacgaacagcgatatataacacgattaagacagaagccacaccaagggcccagaagccatttttagcaagttctttcccaactgtcggggaaactgtactaatgcttggttcgtgcttatacttatcttcaaagtaatctttaaatttagctacatcattttgcgataatgttcctttgtaagacacaacagctgttttcgatcctgagccttggaacacaatatcattcgatggcatatcaatcgcatctaaatctttcttaatttgcgtctcagtcaatgtttgattagctgtaacttccgctcgagtcccgctggcaaagtcaatgccaagatttaatttaaagatggatagtataacaataccaacgataactattgcagcaaatatagataaaaatagacgatgatgttttacaaagtcataacgatcaaagtgcgtttttaagctaaagctgttaataccttcatgtaagttatgaatatcttttcgtttaactgcaaagaaacctggtttgttgttaagccaattgcttttcacgagtaatcctagtaagaatcttgaaccccaaacagctgttaggaagctgactagaatactaatgattagaactgtagcaaaccctttgatagagcttgtaccgaagtagaaaagaactgcagcaacaatcagtgtcgttaagttaccatctaaaatcgcacggaatgcttcttttccaccgacttcaaatgctgcttttgtcgaccttccgaccttgatttcttcttttattcgctcgtatgttataacgtttgcgtcaacagccatacctatacccagaatcaagcctgcaatccctggtaaagtaagtgtggcattgagtaagcttagtattaatagaactaaataagtgtaagcaactaatgtaatagatgcgataacacccggtagacggtaaacagccatcatgaaaataaagatagccataacgccgataataccagctaaaatagtttcttgtaatgcatcttgaccaaactgtgcgccaacagatgtagagtaaacttcagtcatttttacaggaagtgcgccagagtttaacaattcagctaaatcttttgcttcttcagttgtaaagcttccggaaatttctactttatctgtatcaagaacactacttacatttggtgcagataagtaagctggatttttcttttcacgttctgttttgtatttttgtccttctttccagtctaaccaaataactaattgattgtcaggtgcttctgctagaatagtttttgttacgctagcaaatttatctgcgctttttagttttaaagtaacgatcggattattgctagcatcgaaagcttgtttagcgccacctgcaaccaagtcactaccattcatcatcattttgtcatttgcatctctaaatgataactgggcagtagttgataacatttttcgtgcttctgcttggtcagttaccccagcaagttggacacggatgcggttatttccttcgatttgaatacttggttccgcaacacctaatgaattgacccgtttatcaagtgaagtaactgtatctgttaatgtttgcttagaaacagttcctttaccatcagctggagacacttcatatagaacttcaaatcccccttgaagatctaagccaagattaatattttgcataaccattttcgcggtaccaaatacagcaccgaagataattgcaactactagaaagaaaataactatcttactcttttttaccatttctgtttcgttcctccctcatctaaaccataacaaatcccagtctaacaactaatacttaatgattttatgtacttaacttactatttaagtattcgtcagcaggctgttaatcttccacatttggttgaagcgaattttccgcttgagcaacatggttattagattcttgttcagctgttgtcataataaactgcattaattgtccaattttcatttgcatgacatcatttattctttcatgcaatgctggggctgggttattcttccacttttcctctgttaaaaacgcccaaatgtgactagccttgatttctcggtagcctagaatatgaaaatcttccactttaattaaaatcgctggttctaaatcctcataccaagccgaaaatgtatccgtcatcaagtcatcccctttcttaaacaataagcatattcccattttatctaaaaaaagcttaaatggaaagtataagctctatttttatgtttaaaaaatgccactccaccgtttaaagggaaatggcatttttatttcaagtattatttgttgtcttctacaacttcagtgtcatcagaagttgtttctgctacaactggattagaaactgtattacctttttcaagtacagttctgattgcattacggtcaaaagttaatttgctgtttccgcatttcaaaatgactgtgccatcttcaattgcttcaacaataccgtgaagtccaccaatagtaataattttatcaccttttgctaaactactttgcatattttgtacttctttttgacgtttttgttgaggtctgattaataagaagtaaaacaaaacgatcatcaagataattggtataaatgttacgataccgccacccatattttccaactcctttcgatactatatatatatttagaaattttttgcatcaggacgattgaatccatattgctcaaaaaattcttccctaaaatcagcaagacgatcttccataatagcgctacggacttgcttcattaagtttaacagaaaatgaagattatgataagttgtaagtctaattccaaatgtttcttcacaacgaatcaagtgtctaatgtatgcacgtgagtaatttttacatgtataacaatcacaattttcatcgataggacggaaatcatgtgtgaacttagcgtttttaataactaagcgaccactagatgtcatacaagtaccattacgtgcaatacgtgtgggaagaacacagtcaaacatgtccactcctcgaattacgccatcaattaatgagtcaggcgaacctacgcccattagataacgcggtttattagctggtaatagtggtgtagtgtgttccaaaacgcgattcatcacgtcttttggttcaccgacagacaatccaccaatggagtatccagggaagtctagagataccagatctttagcactttgagcgcgtaagtcttcgtaagctccaccttggacgataccaaataaaccttggtcttctggtctttcgtgtgcttttaagccacgttcagcccagcgtgatgttctttctactgattttttcatatattcatgagacgctggatacggcggacattcatcaaagctcatcataatgtccgatccaagcgcattttgaatttggattgctttttctggtgataagaaaagtttatctccgtttaaatggttgcgaaaatgaacgccctcttctttaatatcacgcattttactcaaactaaacacctgaaaaccgcctgaatccgttaagattggttggtcccagttcataaacttatgtagcccgcccgcttctcgaattaattcttctccgggacgtaaccataaatgataggtgttacttaaaataatacctgcgcccatcgcttttaattcttcgggcgacattgtttttaccgttgcaagtgttccaactggcataaacatgggtgtatcaaatgtgccgtgtggtgtatgaattttaccaagacgagcaccagtttgtttatctgtttttattagttcataacgaatggcagacatgtgttacctctttctaatttactctattcactagcataacgaaaattaccgatgaaaacaagcttttctgttatttttttcgcaaattaatgaataaacattgcatcgccaaaactaaagaagcgatattgttgttctaccgcatggttataggctgctaatattttagtgcgatcagataaagcggatacaagcataatcaatgtcgattttggtaaatggaaattagtaattaacgcatctactgcctggaattcatatcctggagaaatgaaaatatctgtccaacctgattctgcaattagttttccatcatgacgactcgcaatcgtttctaaagtacgaatggaagttgttccgaccgcaaccacttttccaccagccgatttgattttattaatccgatcagcagattcttcggttaaacgataaaattcagaatgcattttgtggttttgagtatcttccacgtctactgggcggaatgtaccaaggccaacatgcagagttacaaatattatttctacacctttagcactaatttgcgctaataactcttcggtgaaatgaagtccggcagttggcgcagcagcagaaccattttctttcgcgtaaactgtttgataacgatcttgatctgcaagttgctctttaatgtatggaggcagtggcatttcaccaagttgctccaatacttcataaaaaataccttcataagaaaattcaagaattcgaccgccgtgctcaagttcttctaaacaagtagcttttaacgccccatccccaaaggtaatagtagcgcctttacgaattctttttgcaggttttactaaagtttcccaagcattgccttctttttgttttaaaagtaatacttcaatatgagcgccagtttcatctttaattccatgaagcctagctggaagaacacgcgtatcgtttaatactagtgcatctcctttatttaaataactaattatatcagtaaaatgttgatcttttatctcacctgattctttatcaagtaccattagtcggcttgaagtccggtcaagtaatggggtttgcgcaattaattcttctggtaaatcaaaatcgaaatcttctactttcattctttatacctctttttcataacttattcctaaatggttgtatgctgtttccgtcgcgattcgtcctcgcggggttctttgtagaaaaccgatttgtagtaaatagggttcttgcatatcttcaatggtttcgcgctcttcgccaatgcttgctgcgattgtatctaaaccaacaggaccacctctaaatgattgaataattgtatgaagtagcttttggtcaatcgtatcaagtcctcttggatccacttgaagtagtgtcagtgcctcttttgccaatttttcagtaactgtaccgttccctctaacttgcgcaaagtcacgaacacgtttcaatagccgattagcaatccgcggggttcccctagatcgtcttgcaatttcacgtgcaccaaggtcatcgattttcgtatccaatatcccagacgttctaaggacaatttcggttaactgctcttccgtgtaaaattccaaatggtcaattacaccaaagcggtctctaagtggtgccgataaaagtcccgcccgagttgtcgctccaatcagcgtaaatggcggcaaatctaagcgaacagaacgcgcggtaggtcctgttccaataacaatatccaaacaataatcttccattgctggatataaaatttcttcaattgctcgcgataaacggtggatttcatcaataaataaaacatcacctggttctaaacttgtcaaaatagtcgccaagtcacctgggcgttcaatcgcaggtccactcgttgtcttaatttcgctccccatttcagaagcaatgaccatcgcaagggttgttttaccgagtccaggaggtccatataaaagcacatgatccagcgcttcatttcggagtgtggcagcttcaataaagacagttaagttattctttactttgtcttgcccaatatattgtgaaagggtctgtggccgcaaactagtttcaaaagatacttcttctgcgtctaccgtttcacttgaaataattcgttcatccatgccacaagctcctctctattttgtcattaatcgcagtgctagcttgatgtatgcatcgcttgttaagtcgttttcttttgccatttttggtataactttttttagttctctcgtactgtaaccaagtgcttcgagcgctaaaactgcttcttctagttgcggtgaaagcccagtaacaatatcgttttctgcagctttatagacgatttcacttgcaactacatctgctagtttaccttttaaatcaaggataatttgacgtgctgtttttttaccgacacttggaaatttagtcaaataaacatcatcttctgattcgattgcagtaataagtggtactacatctccagaagctataatagctagcgcactttttggcccaatacccgaaacgcttaataattttttgaacagataacgttcttctgttgactggaaaccaaacaaggaaatgttgtcttcccgaacatgttgatacaaaaagacttgcgcttcagtaccttctaatcgttgaaaggaaaatgggtttcctgtaattatttgatagccgatttgtcctgtttcgacaacaatatattctggtgtaatcgtttttactattccttttatgtaatcgtacaatttattcgtcctctcttcgtttcacgtcatacattatatgatagcataaaaaggaacatctgtactagtttttgttcataaaaggaaatcgttttttagtttacataataatattattgacttcttatatagattttatattttccttgattacagcagctgaatggtcaaatgcttgttgctcttgttcgtttaattttaaggaaataatttcttttacaccattttggcttaaaactgccggaacgccgattgctaaaccagtttgaccatattcgccgtcaagaacacaagaaacagttagagcacgctgactaccgctgaaaatatgacggcaaatctctacaatagttccagcaatcccgtattcagtgcagcctttttgatgatatatttcaaagccagtatcacgggcagtttcaccaattaattttaaatcaagggattctccgagtttttccatactatattcatttactggtttaccgtatatcgaggaatgtgaccagacaggaaactgtgaatcgccgtgttcgcctaaaataaatgcatcgatactttgagcagcaatatctaatttctctgctaataaacggcgtaatcttgttgtatcaagccaaactccagttccaagcacctgctctcttggtagtcctgataatttccaaacttgatacgtaatgatgtcacaaggattcgtggcaattaagaaaatccccttaaacccgcctttcatcatttctgggacaatactcgctactattcttgatgtgcttcttagttcgtctaaacgtgtttgcccttcttttaatggtcccgctgtcactgtaattactgcaatatcgacatctgcgcaatcacttgcttcacgaactgaaatatccattttcccagacataaatgcagctgcatctgccaagtctttccgatttccttccacacgttctttatttaaatcaacaaggattaactcctctacaaatttttggttaacaaatgcgtgagccgcagccgaccctacattacctgccccaatgatcataactttacgtggtttcatttttatttcctcctcttgattcatataaaacaccccattcagattgcacaaaaggggtgttttgacttaatttatctcagcgtttgtataaacttcttgtacatcatcgtcatcttctaatgcttccatcattttatcaaattgtgtttggttgttttctgcaatttcgttgtagacagttggaaacatcgaaagttctgctgtagcaaaagtataaccagcttgttgtaatgcatctttgacatcagaaaatgctccgggttcagtaaatacttcaaagacgtcatcacttacctctacatcatctgccccagcttcaatcgcttctagcataaactcctcttcatcaacggttaagccttcccttagaatgactaagtagcccttacgatcaaacatatagctgacacttcccgtttccccgaggctaccaccgttcttattgaaagccacacggacatttgtacttgtacgatttttattatctgtaagcgcatggacaagcactgcaatcccacctggcgcatatccttcatacgttacttcatcataattttcgccgctagtatttccagcagctttatctatagcacgtttgatgttgtcattcggcatattgactgcttttgctttatccattactaatcgaagtgacgggttcagattcggatcagggcctttttttgctgcaacgaaaatttctcttgctaacttttgaaatactttagaacgcttggaatcttgcgcattttttcgaccttgaatattgttccattttgaatgtcctgccatctgtttcactccttcaagttttagtaaagcttttctcctacaaattttaacgtaaaaaataactattcgcaaataaaaaaagttaccgcaataaaatacgataactcattatttaagtagtttgtaagcgatgcacatggtaagttccaagtttgttcgccttacctcctaaaagcctaatttcatcaagagcgttcgttacaagtgtttctttaccttctgaaagcacatctattaagaaaaaatattctcctaatgacgttttaagtggtctcgactcaattttacttaagtcaatgtcgcgccaagcaaatgtagacaatactttatgtaacgctcccggcatattgttaggtaaaatgaccgaaatcgaagttttttcttcttcttttggtaataaaatggaaactggcttacgacttaaaacaaaaaatctcgtttggttcaattctaaatcttgggcattttcttgaacgatttctagtccatactcactggctgccatccgaggagcaattgctgctacaagttcagttggattattgctaacccattttgccgcataagctgtcgaaggtgttacttcacgctctaccccgtaaagttctgcctgaaggaacgtatggcactgggcaagggcttgcggatgagacattactttttgcacggatttccaagttgctttatgagctggatgaaccattaaatgttgcgcaatcggtagaacaatttccgccacaacagggacacttgaaaaatgaaataaatagtctagcgtaatattgacgcttccttcaatagtattttcaattgggacaaccgccacgtccacatcttctttttcgattgccataatgcaatcaggaatagtgcttttagcaaccatctcttcttttggaaaagctttcgctgctgctgcatgagtaaaagatgctgctgggcctaaataagcaattttcattttcaactctcctttttattgtagctaggaaaaaagcgtgcgccaattgattggcgcagcactttttttaatccataaattcaaattcataatcaagtaagcgaacaatgtctccgtctttagctccacgttttctaagtgcttcatcaacacccattgcacgaagttgacgcgcaaaacggctaatagaagcatcacgttcgaagttagtcatagtgaataagcgttcaattttggcaccgctaagtacgaatgtaccatctggctctcttgtaatttcaaagtcaggttcttcagcaacatacttgtaaagaactgtatcttcatcttcttgttccagaatttcattgagtgggaattctggggttgtttctaatttatctgcaattgcaagaagtaattcacgtagacccgtttttgttactgcggaaatcgggaataccggaatatcttcagcgattttagttttaaactcttttagattttcttccgcgtctggcatatccattttgttcgctacgatgatttgtggacgttccattaagcgtaagttatattgttctagttcattattgattgccatataatcttcataaggtacgcgaccttctgaaccagacatatcaattacatgtacgataactcgagttctttcgatatggcgtaggaattgatgtcctagaccaacaccttggctagccccttcaattagacctggtaaatcagccataacaaaactacgtccatctcccgcatcaaccattcctaaattaggaacaatcgtcgtgaaatggtaagcagcgatttttggtcttgctgcagatacaacagataataaggtagatttaccaacacttgggaaaccaactaaaccaacatctgctaatactttaagttctaattgtacatttcgttcttgccctggctccccgttttcagagagttctggagctggattggctggtgttgcaaaacgtttgttaccacgtccgccacgtccggcttttgcaataactgcgcgctgaccatgtgctactaaatcagcaataatctctccagtatcaatatctttcacaatcgttccttgtggtactttgacaactaaatcttctgcaccgcgtccatgcatacttttactcatgccatggtcgccgtgttctgctttaaagattcgtttaaagcgaaaatctactagtgtgcgcaaaccttcatctactacgaatacaacgtctgctcctttaccgccgtcaccgccagcaggaccaccgtttggtacaaatttttcgcgacggaatgctaccataccgtccccaccattaccagcttttacatatattttaacctgatctacaaacataatttttatattctcccgttccttaaaagtcttatctttcattataacgaacaaactatacatctgtcactatatttatttctatttccagatatttatttgttttacatcacaaaaatgcgccaaatgcttttacacatttggcgcatcttttaacaattatttgaaagcttgtgcagctttgactgctttatgccaaccttcatataaatcttctctttgatcatctttcatttctacttcaaaacgtttgtctagtttccaatgttttttaatttcgtttttatctttccaaacgcctactgcaagtcctgctaagaaagctgctccaagaacagttgtttctttgttttctggacgttctacaggaactcctagaatatcggattggaattgcattaagaagttattagcagaagccccgccatccacacgtaacgtttttaagctaataccagaatcttgttccattgcatacagtacatcacgagtttgataagcaagagattccaatgtcgcacggataaattgttctttttcagtaccgcgagttaatccaaagacagcaccacgaacgtcggaatcccagtaaggtgcgcctaaaccaacgaatgctggtacaacatatacaccatcactagattcaatccggctcgcatagttttcagaatcacttgattgacgaaccatacgtaagccatcacgtaaccactgaatagcggaaccagcaacgaaaatactaccttcaagcgcatattccactttaccatcgagtccccaagctagcgtagttaatagtccattttcagaacgtactgctttttcgcctgtgttcattagtaagaaacaaccagttccgtaagtgtttttcgccatacctttttcaaaacaaccttgaccaaataatgcggcttgttggtcaccggcaatacctgcaacaggaacttcttcaccaaagaagtgataaggcactgtgtccgcgtatacttcagaggaaggacgaacttcaggtaacattgctcttgggatattaagcatttttagaagctcatcatcccattctaaatcataaatattataaagaagtgtccgggaagcattggaataatcggtaatatgagcacgaccaccagttaatttccaaactaaccaagtatcaattgtaccgaaaagaagttctcctttttcagcacgttcttgtgcgccatctacatgatcaagaatccagcgagcttttgtacctgcaaagtatggatcaatcaaaagaccagtttttgatctaatcgtatcttcgtaaccatctttacgaagttgcttacaaatatcttcagtttgacgagattgccaaacaatcgcattataaattggatttccgctttctttatcccaaataacagtagtttcacgttggtttgtaataccaatcccagcaatttctttagaagaaatatttgttttgagtaatacgcctgcaattactgctaaaatcgaagcccagatttcattggcactatgttcaacccaacctggcttaggaaaaatttgatcaaattcttcttgcgcaacgccaataacttctccttcttcgtcaataatcatcgctcttgaacttgttgttccttgatccagtgctaaaatatatttcttttccatgtaaaattcctcctctagttttaagtacaacgaaagcccagagactttcgtttagagctagttattattctagcttatgctaaatcttttttcttgtcgagttgcattgttaaaataagaattaaaacaaataatactgcgaacacccagaaccacattcctagttcgccattaataattgcattataccctaaagcacctaatgcaccacccataattggtccaataaccggaacccatgagtaaccccaatcagatccacctttgccagaaatcggccaaacaaaatgcgcaattcttggtccaaggtcacgtgctgggttgattgcataaccagtagttccaccaagagacatcccgatagctacgattaatgcgccaacaacaagtggatttaatccgtctgaaaaggaatttgcacctagtgatagtaatccaaacactaacataaaagtacctaatgcttcaccaaaaaagttagatgtaaaatggcgaatagctggcgccgttgcaaaaacacctagttttgttggtttatcttctgttttcttccagtgcgggtagtaatgtaaccatacgagtgttgccccaatgaatgctccgataaactgagcaacaatatacggcaatacatagttccacgggaaagcacctgcaagcgccataccgattgttacagccgggttaagatgggccatactcatatatcctgaaacatatacacccattgtaacacctagcccccaagctaaagtaacaacgacccagccgccattctctgccttggatttcttcagtgaaacacccgctacgacaccagcacctaaaataattaggatggcagtaccaattacttcacctagaaattgtgttgctaaacttgtgtcaatcatcttttccaactccttcttcttgcttatttgtagcaccggaattttaacacttactagtccccttacattccgattatcaattaacttcaaaaaaagaatgacaatcaaaacgtaggcacactagtacccttgcatcgtttcgattgtcatctcttctcctgacatgttaattaacttgagtctatttaatcacatcaagaaaacgctgtcaatcaaacgacttgtcctatttttcacaatgtctcttcatctgcctctttacttttaccccaatttaggagagttataaccctttttaaaagaaattaattcacaaagaagaaaacacaaaaaaaccgccacaagtgacggtttttaattttgtatttaagcttcttgtacttcaggataaacgctaacttttttcttgtcgcgtcccatacgttcgaaacgtacaacgccgtcagttttagcgaatagagtatcatcgccgccacgaccaacgttagttcctggatagattttagtaccacgttgacggtaaaggatagatccaccagtaacaaattgtccgtccgcacgttttgcacctaaacgttttgattcagagtcacgtccgttagaagtcgaaccgccaccctttttgtgcgcaaaatgttgaatatcaaattttaacatgaaattccacctcctatttggagttaatttttatatgatcaggatagctgtacgctaatgaccttagttgattttccatccctgtaagcaagatttgtaccacatcatctccaacaaaatcagcaggcacagaatagtaaaggtaaccctccgactcttcaaacacaggctcaaagtcacgtacttctgaaatagcattaaccatcccaaaggcaattgacgaagctcctgcacaaaccaaatcactgccatgttcggcaaaatcggcatgtccactcattgtaaaagaaactatttggttgttttctcgcataacatcgacttgaatcatttttttcgtcctttcaaattaagcattgattgcatcaatagttaattttgtgtaaggttgacgatgaccttgttttttgtggtagttctttttcggtttatatttataaactgtcaatttcttcgcacggccttgtttttcaactttagctgttacagttgctccgtccacgaatggaacgccaactttagcggaatctccgcctacgaatagaactttgtcaaaagtaacaacatcaccaacttcacctgctaatttctcaacatagatttcttggcctgcttctactttgatttgtttcccacctgtttcaataattgcgtacatacttgcacctcctcatatactaagactcgccattacaggggacttacacaaggtaaatacttaacccagctctgtgcggttgtagcttggtgcgctacaaacataacagtaaaatgatagcatagagaagctgtctatgtcaatcacttgttaattttaattttcaacacgagcaatttgataaaatggaactcgttcgtctgccacttcccaatcaattggagcgttattaaaggtattcaaatctaagaacgcatctaacacatcctctgtggtgatgacttggatgctacttggatctcccatcataatcccacttaattctctttctagttgaaaagcaagtgtatcttttgaagcaacgtgtcctgtcccgtaacaaaccggacaaggaattgttgtcacctctaaaaaggattgttgtttctttcgtctcgttagctgcaagagccctgactgcgttaaagcggccacttgtgtcgtaatgtattcttcaagactttctttctctatcgcctcacgcagctctccttgcccctcctctgacataccaccaataaaatcaacaagaatcatcccactcatattccgaagacgaatttgcctaaaaatctcgggaaccgcttttatattaacagcttctaccgttttttctttagcacttgtacctttaaaacgactagaattcacgtccactacccacatagcttctgttttttcaataaaaagagaagatccatttgaaagatgaacgacgggtctgctaagacgatccatctgttgcttaatacctaaatcagcaaataagtccgcacttttctttaaactaacttctttatcagtaaaattagcttccactatcttcgcaaattcaaaatcatcagtaataatttctattggcatatagcgctggataaattgcttcgtactcaagaaaacgcctgaagcagcagataaaagcaagccaggtttctttcttgtttcggcttctttaactaatgtttgatatttttctcttgcttggtttaatgctaattctaattgctctttcgttgcagtttctgcgctagagcgaataattattgcttcattctcttctaaaagcgactccattattattttcagaggttctttatcctgaattcttttggaaatggaaatatattcttttccgtgcaaataaatcagcaaatctcctgaaaattcaagaacagctgataaaagtggaagttttgtagcactgccttctcgaacaatttgaacaggtatttttgcgccttgtgttttttcatagctagctggaatatcttttaaatgtataaaacctttattttgattacctaaatcaacaaaagctgcgtccatttttcggtctattttttgaataaagccataaaaaatgtcacctacttgaattttgttagatgggcgaataatttcaacatcaattagcacgtcgtcttctagtactgctacacgtttttctatgttagctgcatttattactagttttttcatccaatcaccttttataaagacccttcatccaaaagataaagggtctaattttttattttccgccaaaaagttgttttaagcgcgtgaaaaatcctggttttttcgcttcaatcgacattaatggaatagattcaccaagaatacgtcgtgcaatattgcggtatccttgagaggcgcgattattcggtaacatcgcaaccggatctccgctattagatgaacgaataacttcatcatcatcaataattataccaagtaattcaatagataaatgcgtagtgatttcatcgatgtccatcacatctccatttaccatcatttgtgtacgaatacgattgataataagttttggtggctcaatatcttctttttcaagcaagccaataattctgtccgcatctcgaacagctgaaatctctggagtagtcacaacaattgctttatcagctccagcaaccgcatttttatatcctgtttcaattcctgctgggcaatcaattagaatataatcgtaatcaggacgtagttgattaattagctctatcatttgttctcccgaaacagcatttttatccgtagtttgtgctgctggaagtaagaaaagtaaatcatcaaaacgcttatctttaatcatagcttgatggattttgcagcgtccttcaacaacatctactaaatcataaataatccgattttcaaggcctagaacaacatctaaattacgaagaccgatatccatatcaatcaagcacactttcttaccttgaagagcaagtgccgttcctaagttagcagttgaagtagtttttcctactccacctttcccagaagtaatgactatagcttctcccatgtttaacgccctccttgaaaattagaaatttccggtctaatttttcttatcttatgtatttcatcaattactatttcacccgcgtcatttacaaacgcagaaaataaatctgtatccgcaacttctttataatcttcactatcaaatccatacactttgccagctattctaacttgtgacggataaagaaatttcccagcaacaacagcattttcatcgccttcaaaaccagcatgaatgattcccttaatattaccaagaacaaatacatttccattagaacgaatttgtccaccaggattcacatcgccaattaacaagaaatctccaggaacttgaacaacttgtccagaacgaataatcgttgccatggaaaaaatttgatcattttccttccattttttagcctcatctttagacataacattactataaaatgcgctaatcttcatttgactattgttatgaataatagttgaaatttcgcgttcttcttcctctgaaaacagtcgattcccaatttgaacttgtacctctaatttttcaccagagtatgggttttgcttttgatctgctagtaattgcgataattcttgttgcagctccgatatacttgccttatcactaagaaaaatactgatgccactttttgtgcctttaatttgaacattcttcttcatataccatttcaccccgcaacatttatactctagactttagtatacactaactcaaattaaatgataataaaaaaatactttttctgaaaaaaacagcttgaaatcgcaaactgtggatatactccacagtcatacttttacaagtaatagcgaattcaaactgataaaattactatagttattctgatttaaccaaacgatcaaggaataatcggaatgggaaaaagataactaaaaagaatgctagattaaacaaaatcgttgtccaaagacgctgatcaataaataccggaatggtcattgtggtcgaaccaattaaataataaaaagcatataccaaactctcagtaaggataatattaaatacagtgattaaacctaccaagaagatattattctgtaaaactttcataaatttatcggtaatgtaaaccgtaaacggaaagattgcaaaataaatccccatgacacctgtataataaatatcaaacaataaccctaatataaaagcatatactaaagtagtattacgtttataaaagcaagtcattattgttagcattacaagtaaaaagtgtggaataaacagatgcttatcattgaaaagaccattaccaaactggaggctaatgacaccttctaaaataaatgttccgaccataattgcaggaagcgcaatatttttctttacattcatggttacctgcctccagtcgtgtccgaactggatgtatcatctgccgttgttcctgcttcagctgaacgctttagaacagtaacatgatttagatcatacatatcagcacccggcttaataaacgcagtctgagataatcccatcttatcagtttctactttttcaatagtaccaataaaaatacctgccgggaatttccctccgagtccagaagtaacaactttttgtccttttttaaacttcatatcataaggtaattgttttaattcaagcaacttcgtatcactgtcatatccattaataattccaaatgcattttcgtctccctgtactttagcagaaacacgatttttaacatccgatgaagttaacaattcaaccgtagcagattttgcacctgttgttgtcaccctaccaataagaccactcggcgtagttactgccatatctggttttactccatcgcttgagcctttgtcaatctcaacttgatcattccaattagtaggatttctagaaataacagaggcgttcagtggatcatagtcccggatactatcagtaatatctagactttcttttaaatctttattttctttttttaagtctgcaacttcactttcaagttgtgccaattcttctaaacgttctttcagatgttgattttcagtatatgtgttttttaagtctgcaactccaccaaacacacctgagacaaatgaagtaggcttagctacaatattctcgccaaatccaacaacatctttcacaaattgttctggccacgaagcattttcacgatcgcgtaaagaaaaaccaactaacgcgacaagaacaataatggatattaacaagataatcaaacgtttattaagaaaaaattgtggcataacgacacctcatctcgttagtactcttttttcatttttttgcagcgaattcatcttgttatatgacataaatgagtgtgtccatttagttcatttttttgcgtttatacatgtccatgttttctagcgctttaccagtaccaatggcaacacaatcaagtggttcttcagcaataattacaggcatttttgtttcttcagaaataactgtatctaaattgcgaagaagtgcgcccccacctgttaatacaattcctttatccataatatcagcagataattctggtggcgtattttcaagtgttccttttacagcatcaataattgctgcaacggtatcagaaagtgcttcactgatttcttccggagtaacttcaattgtttttggaagaccagttactaaatcacgaccacgaatactaaatggagataagtccaatccttttggactagctgaaccgatttccattttaattgcttctgcagtacgatcaccgattaataaattatattttttgcggatataattaataataacttcatccaaatcgtcgccagcagtccttacagagcggcttgttacgatgccacctagagaaattacagcgacttctgttgtaccaccaccaatatcaactaccatgctaccagttggttcccctacaggaagaccagcaccaatagctgcagcgaaaggttcttcaatagtgaaggcatctttagcccctgcttgacgagttgcatcaatcactgcgcgtttttcaacaccagtaatgcctgatggtacacatatcattacacgtggtttgctagcattaacacttttaccagctttttgtatgtaatatttcatcattgctgctgttgtatcataatcagcaataacgccatctttcattggtcgaatagcaacaatatttcctggtgttctaccaatcatattttttgcatcgctaccaactgcaactatttcttgtgtgtcttttttcattgccacaacggaaggctcacgaaggacaataccttttcccttcatatagacaagtgtgttcgctgttcctaagtcaattccaatatctttattaccaaatccaaacatctgtattctccttttccttcgtaatattctacaggatacattaagtttccttattcgtccattaaattaatgttaccttatccctttatgtcaatgtttctgtatagacacataaacaaccatcttattataacataagtaagagtatcagacattaatttttcatgagaaggaaaaaattttaacttttctttaaaaatatgttttttgcatttttaattttatcgaaattaaactttttaaagtaattatttttattttgaaaattccataatacaaagaaaaactggaataataaacatccccacaactatagaaaaaacaataatattatctttatatactttccatcgttttagcataataagtcaccttctgctttttaattgatactcactttaacacaaggaaataaatgctgtctgtagataatttgtgaacacttttttggtttaaaagtagcctttttcttttaaactaatgtatttgtttttcccaataataatgtggtctaaaagcgttattccaacaatatttccagcctccgctaaacgtttagtcacaagtaaatcttcgcttgaaggcgcgggatcaccagacggatggttatgaaaacacattatagaagctgatgattttcttaatgccagtctaaaaacttctctaggatgaacaatggaagcattcaaaccaccgacaaagattgtttgcctataaatcacttgattcttggtgtttaaaaaaatacagtggaaatgttcttgaaaaaggaaagctaactcaggcattactagtttcacggcatcttccggacatctaatgacaatttctttttgttccgtaactaaactgatgcgttttccaagttcgactgctgccataatttttgaggctttagcaattccaattccattcactaattgaaattcttcaatagacgcgtactgcatttcagctatatgtttaaatttcatcataattcgattagcaattgttaaaactgattccgttttcgttccagtttcaataattaatgccactaactccgaagtcgaaagcgcctctatcccataattttgtaatttttctcgtggcttctcattttccgagatttcatttactagcataaatcccaaccctcatttcattaaaatactaactatgataaatgatataaaaatgtaaggtacaaaaggcacttgtttatttttctccactttttttaaaactaaagcacttaaaaggatgattgcacctagaacaatggagagaaaaaagacaatatatcccatttcaaaacctaaaaaagaacttaaaataataagtattttaatgtcgcctaacccaataccttttcgaaataaaataaaaaatagtaagtagaaacaattacttataagactagagtagattaaagatacagctggttgttgaaaggaaatataacatgtcaacaatactaaaaagaatagaatcattacagaattaggaacatgcaaatataaaatatctgtcacgaagaaaaaggcgagaaaataataaataatacagcctataacaaaacgataagaaaaagaaaattgataatgcagaagaaggatgtaaattggtgtcgttaattctaataaaaagtagttaagcggaataggagtttgacagcatttagatttcccttttaaaaataggaatgaataaattggtatcatttgagagaacgataacgttttttgacaatgattacattctgaaaaacgaaatagaaatgatttttttattggaaagcattcccctgcgacttgaataaaagaaataaaaatagaactatagattattagtaaaaagtaaaccatccgccacctcctagttgttacaaacagaatagcaaagaagatttatttttgcacattgataaaatgatgttttcactgggtagactaactaaaaaacacctattttctactaagagaaaataggtgtttttatttacttttagcatacgaaaatactattttagtagtttgcgcttttttatttttctaagtatactcactttattcaaaaatttagttgtgcgatgtaagcaaatacttacggacttcagaaatgaaataaagcgagcctgtaacgaaaaacttagtatcatttttgatttcctttatatcatctaatgcttgcttccagtttggattagtagaaataccttctatagttccaatttgtgtgacttcgtaatcactcattgcccgaggataatcaaaggttgtcaataaaatttcagtatcaggaattgtctttaataaagctatcatttcttgataatttttatctttaagtatgctaactattatttttttatgcccaggatatgtttttattgaattagcaaaggttgttacaccttcaggattgtgtgctccgtccagcataataaatggtttcacatcaagcaattccattcttcctggccaaaaagctttctttaatccctgtttaattgctgattgattaatttcataggatgaaaatgtgtttagatactgtagtacttttattgcaactgctgcattatttaactgatgtattcctaacaagccaatggttatgtccggtatttcgtctccatgggatgttctaaatgtgatttcatcgcctctattttgaatgcagaaatctttgtttagccatgcaacattcgaattgtttctaacagcattatttattattacttcttgcgcttctttttgaataactccagaaataacaggtatacctggttttataatccctgctttttcaccagctatttgttcgatactatttcccaaaaactccatatgatccatcccaatggttgtaattacagagattaaaggcgttaaaacatttgtggaatctagtcttcctccaagcccgacttctatgatgccaatatcgattgactcatattctgcaaaacacaagaacatcattgctgtaataatttcaaattcagatgggggaccgtatacagttttttcaagttcttcagctataggttttattctatttgctaaatctacaatcatttgatcactaacaggaataccatttacactaattcgttcattaaaagtttcaatataaggagaagtaaaagttcctgttttatatcctgcttcttctaaactacttctaataaatgttagagtagaccctttcccattagtgccagctatatgtacccacttattagccttttccggatggttaagcttttccattatatattccattcgagctaagccgggttttattcctaaacgaagcgttccatgaatccaatccaaagcttcctgatacgattttaatgccatctttttaaccaccttaaaaaatgaccttaccacacgattttatgataaggtcaaatcattttattaaacttctttcaatgtttcaatcctttcaagaactgaagcttttttctctagataatctttttcttttaaacgttcttctgctacaacattttcaggagctttactaatgaaacgttcgttatttagtttaccttgaactctagctacttctttattccatttttccaattctttttcaaggcgagcgatttctaagtctaaatcaattaatgcctctaatggaataaatatttcagcgccagatacaacagctgtcattgcagtcttagaaggctcgatgtcaaatgcaatagtaactttttctggattacaaaaacgttctatataagagatgttttgttctaaaatttctttataagtttcatcttttggttttatttcgagcacgattgatttgctaagaggcgtattcacttctgcacggatatttcgtacagctcgaattacttcaactaatgttcgcattgcagttgatgcttttgagtccatttgttgctcattaacttcaggccagttggaaatggtgatagattcaccttcatgaggcaagttttgccaaatttcttctgttacaaatggcatgaaaggatgtagcaatcgcattgtagtatttaaagtatatgcaagtactgatcttgtagtttgtttagcaacttcatcttctccgtataatggaattttagcaatttcaatataccaatcacagaaatcatcccaaataaagttatacaaagttcggccaacttcaccaaattcatatttttcacctagagaagtaactgcttgaatggtttcatttagtcttgttaagatccacttatcactaacttcagtcacattagataggtcgatttcatcatatttcataccatcaagattcattaatacaaatcgtgatgcattccaaatcttattaatgaaattccaagtagactctactttttcaaaactaaatttcaagtcttgaccaggtgaggaaccagtggcaagtgtgtagcgtaatgaatcggctccatacttatcaataacttcaattggatctactccgttaccaagtgatttagacatcttgcgcccttctgaatcacgtaccaaaccatgaattaaagtatctttaaaaggtctttctcctgtaaattcaacagattggaaaatcattcttgatacccagaaaaagatgatatcgtaaccagttactaatgtattagttgggaagaaatgtttgtaatcaggattttcagtgtcaggccaacccatagtagaaaatggccataaagcagaactaaaccaagtatccagaacatcttcatcttgctcccattgatctaggttttcaggctcattctccccaacgtagatttcaccagtttctttgtgataccaagcagggattctatgtccccaccataattggcgagaaatacaccaatcgtgaatattatccatccaagtttcatatgttttttcaaatctagcaggtacaaaatttactttgtcttctgttttttgaagtgctaatgcttcagctgcaagaggttccattttaacgaaccattgcaatgaaagatacggttctactacagcacctgttctttcagaatgtcctactgaatgaagatgaggttcttgttttataaataagcctaaatctttaaagtcttgaataatagcttttcttgcaacaaaacgatctaaaccatcatatttaccagcattatcattcattgttccatcttcgtgcatgacaattattcttggtaaatcatgacgattacccacttcaaagtcgtttggatcatgcgcgggagtgattttcactgctcctgaaccaaattctctttctacgtattcatcagcaacgatgggaatttctctgtttaaaataggcaacataatcgttttaccaattaagtgttggtatctttcatcttttggatgtacagcaactgcagtatctccaggaattgtttctggtctggttgttgcaacttctaaatatcctgatccatcagtaagtggatattttagatgataaaaacttccttctatatctttatgaataacttcaatatctgataatgctgtttttgcttctgggtcccagtttataatgtactgtccacgataaataagccctttattgtatagcgtaacaaatactttttttactgcatcagataagccggcatctaaagtaaaacgttctctggaataatctaaacctagacctaatttttcccactgttctcgaataaaatcagcatattcttctttccattcccatgttttatcaacgaatttttctcgacctaaatcataacgagaaatattttcttcttttaatttagcttctacttttgcttgtgtagctataccggcatggtccatccctggtaaataaagtgtatcaaagccttgcattcttttcatacgagtaattatatcttgtaatgttgtatcccaagcatgccccagatgaagttttccggttacatttggtggcgggattacaatgctataaggctttttatcactattaccttctgctttaaaaaactctttttctaaccaccatttatatttcccggcctctacattactaggttcgtatttggtaggcatatttatttcgttttgttctgtcataacgatccctcctttttaagcaaaataaaaaactcttctcatcctaataaaaggacgaaaagagtattattcgcggtaccacctttttacctacaataagaaatgtaggcacttcattgtgttaacgatagacgagatctaccggttattccctactattatttcaggaaaactgctccaaggctaccttcagacattatttttgaaagcttacaccgaccgctttctctcttagaaaaataaatgacctactcttcctcttcatcgcatttagttctatatactaaaaataattttaacaaatgtttgtagattcgtcaattagcctcgaagcattttacatgtaacgtcaaaagcttctaaagtcgcatcaatttctttttcagtatgcattgtagaaataaaaacgccttcaaactgagatggtggtagaaaaataccttgcgctaacatttctcggtagtagtttctgaaaaattctaaatcacttgttttagcagtatcaaagttagtgactttttgatcagtgaagaaaaagccgaacatcgagcctgctttgtttattgatagtggtacttcatgtctatttgaaatttcggttaagccttcttccatgcgcttaatcagggaacggaatacatcataatgttgtggtgttaattggcgaaccgtttcaaatccagcattcattgctaacggattacctgataaagtaccagcttggtagatagagccggctggagcaatttgttccatgatttcttttttaccaccataagcaccaactggtagtccaccaccaatcacttttcctaaacaagtaatatcaggggttacaacatagtatccttgggcagaataatagtccacacggaagcctgtcataacttcatcaaaaattagtagcgcaccgtattcggttgttagttctcgtaatccttctaagaaaccatcaattggagggacaacacccatgtttcctgcaactggctccacgataacagctgctatttcttcaccaaatttttcaaaagctagtttggcgccttctacatcattgtatggaacagtaattgtatcagcagcaagaccttttgtaactccaggcgagtcaggtaatcctaatgttgcaacccctgaaccagctttgattaataaagaatctccgtgaccatggtaacttccttcaaatttcaagattttttctcttttcgtgtatccacgagctaaacgaatagcgctcattgttgcttctgttcccgaagaaaccatacgcactatttcgatagatggaacgcgctcaatcacgagttttgcaagttctgtctcaatttctgtaggtgtaccaaagctagttcctttcatagctgagtttgttatcgcattaacaacagaaggatccgcatgtcctaaaataagtggtccccatgataaaacgtaatcaatatattcatttccatcgacgtcagtaatataggcacctttcccgtggtccataaaaactggtgaagcatcgactgagttaaaggcgcgtactgggctgtttacgccaccaggtaaaactttttttgcttctttaaatgctttttcagactttatatagttttgcaaaattcccgcctcctatttgtttaagtatgttgctacatcttttgcaaagtaagtaataattaatgtcgctccagctcgtttcatactagtcagcatttctaaaacaattcgctcttcatcaatccaaccattttgagctgctgctttcaccattgcatattcaccgctaacattataggctacaacaggtaaattcgtatgattctttacatctcgcattatatcaaggtacgaaagagatggcttcactattagaaagtctgcgccttcttgctcatccgattgagcctcccgtaatgcttcttcgcgattcgctggatccatttgataggattttctatctccaaattgcggtgcactaccagcggcatcacggaaaggtccataaaatgcagaagcgtattttactgcataagacataattggtatatcgtagaacccagcttcatcaaggccttctctgattacttgaacaaaaccatccatcatgtttgaaggtgcaatgatgtccgcacctgcagcagcttgactgacagctgtttgtttcagtaattctagtgattcatcgtttagaatttgaccattctcgattacaccacaatgtccatgatctgtgaattcacataaacatgtatctgctaccacaattatttcaggaaatttgctttttattaatctagttgcttcttggataatgccatggtcatgataagcttgtgtgccaacagcatctttttcagcaggtattccaaataaaataacagctttaattccaaggctcgcaacagcgttcatttccgcttctaattcatgtagaggaaattgaaaaacgcctggcatggaaactacttctgtttttggttctgtaccatctttgacaaaaatcggatagattaaatcatctgtatgtaaaactgtttccctcactaaatcacgcattgtttttgtctttcttaaacgacgatgtctatcaaattgattactcatttaaattcctcctgtattatcaaatcagctaagtgcttcatggtgaaggtttttggttggtatgtaacttcccaaccatctgctaaaattgcttcggtagttatattaccgattgatgcaatgcgccagttttcatttttaatagaaaattgtttcgcaatcgtataaaagttcttccaagcagaggggctagcgaaaataattattcgtttttcatctagttgcaattgttcgattaatattgtttgagaattttctgggaagcttgtttcatataattcaatcggaaaaactaggtggccgttttgcgtcagtgtatcttctattatcgttcgacttaagttgctttgtggaagtaaaatacttgtttggctagtattttcacttaaccactcagacaaaaatacttctgattggtaaacggacggtacaaaattaggcttatatccatattctgctaacttttcttttgttttctctccaataacggctattttgtaatttaatttaccagcttgttcattgaagaaatattctactgcattcgcacttgttaaaaaaagccagtctgcctctttttgatttagactcagactaatttttttaggatccgtttcaattagtggaattgattcaacgtcgaaaccattttgcgaaaaataatcttgccatggtttatttttgctcgcttctcttgttaaaacaatttttttaatcatatatttctcagctctttgataatggtatctgcaccttcactcagcaattcttcagctacttgattgccaatttcagctgggctcgcaccagttcgttcagattcaagaataatggaaccatctgcgttaccaaccaaacctttaaagtgaactgaatcgcctgtttttgtcgcaaatccagcaattgggatttcgcagccgccatttagttttttcaagaaaacgcgctctgcttctacacagattcccgtttcttcatggtgaatagaagctagcatatcgcaaatttgaagatcggtttctctacattcgatagcaagagccccttgccctacagcaggtaaacataattcaggagatatatcttctagttttaaactcgtattttcaagccaacccattcgtgcaagtccagcttttgctaaaatgattgcatcaaagttttcagcatgtaatttttgaagccgagtatcaatattgccacgaattggcttaacgacaaaatcaggacgatgttttaagagttgtgccgcgcgacgtagactacttgtgccgattactgcaccttttggtaagtcatctagcgtgcttacctcattaaaaacaaaacaatctaatggggattcacgttttggaattgctccaatgactagtccatctttcaaacttgaaggcacatctttcatactatgtaccgcgaaatctattacttcatcgctcaaagcttgctcaacttcagaaacaaatagaccttttccaccgactttactcaaagtaacatctaaaatacggtcgccctttgtaacaatttcttttatttcaaaatcgatttcaggatagttttctttgagtttttttatcacccagttagactgtgttaaagctaatttactacgtcttgaaccaacaattattttccgtttcatgcattaactcctcgtttcagcttgttctttttctattatagctacatctgtttccgttaaaccaaatatccgtttaaaatgttcaatgcttgtatctgcattttcttccacagacatttcctttaattctgagataggttgttttagcatttgattaatgatacttttcatatgtttcccgatttggatgtattcacgttctgttaatccaggaagtttattttctaagctagtcatagtaacttcttgcatatctaacgctttttcgcgcaaagctcggatgacaggaacgacgccgagttgtttttcccattcaaaaaagcttcgaacttctgtctcaatggtgttttcaagttcttgaacgatcctttgacgttctaaagagttagcacttaccactccagctaaatcatcaatatcatataaatggaaattgggaatatatgaacaatcatgttcaacatttcttggtaagccgatgtcaattacaagcatagagctcgctttttgttccatcaattcttgcatagctacctgtttaataatcggctcttcagcacttgttgagacgagaacaatatctgcttctaacaaatgatccgacatattttcatatgcaccaacttttgcttgaaattggtgcgctaatatttctgcgttagattttgtgcgattgatgatagtaatatctgcaatgccacttccagcaagattttgtaaagcaagttcgctcatttcccctgctccaataaggacgatttttttattatctaatgaaccatatagttttttggcaacttctacagctgcataactgaccgaaacggcattttcgttaattttcgtatgatgatgcactttttttgcaaaagtaactacttcccgaaaaagtttatttaagagtgtgcctgttgttccagtctgtttcgcgatttcgaatgcatgttttacttgtccgagaatttgcgtttctccgagtacaagtgaatcgagtcccgcagttactttatataaatgattgacggcctctgcttcttcatgaaaaaacaaataaggctcgattttttccatatccatttgaaaccaattggccataaagcgttttaagtaatatctgcctgtatgtatttgatcgacaactgccacaatctccgtacgattgcatgtcgaaataataacattttcgaggatacttttttcctgcagtaatgttactaaggccatttcttcttccgtttctttaaaaactaatttttcgcggatgtcgattggtgctgtgtgatgattcagccccatggtgagaataaacattcgataatcctcctaaaattaaattgaactctaatacattctaccacttttcgatgtggacaccaaatagtccgtttatgtatttagacggaaaaaagagctggatttttcattccaactctctctattattccattccttctttgataaactgccatgcttcgtcttttcccatctttgtttcagaagaaaataagacaaatttgtcgtcaggatcaaaatctagtgtttcgcgaacaattttagcatttttttgccatttgctgcgtgggattttgtcggcttttgttgctacgacaatgacaggaatatcataatactttagaaattcatacatcattcggtcgtcttctgtaggtttatgacgcaaatctacaatttgaataacaccacgaagttgctcacgagaagtaatataagtttcaatcatcacgccccatttttcgcgttcggttttcgaaactttggcaaaaccgtagcctggtacatcgacaaagaaaagtgcttcttcaattttataaaaatttagcgtttgtgtttttcctggtttttgtgaaattcttgccatacttttacggcgaatcatcgtattaataaacgatgactttccgacgttggatcgacctgcaagtgcatattctggaaggtctgtttcagggtattgctctggtcgaacagcgcttattactagttctacattatttacatccataattgtccatcctgttctattcattatcttttactagtataacggaaaaagaggaaaaaagcaccatgaaaaaatactgccccatttgagacagtatttttcagattagtatttacttacttctgctactacttgtgcaatgaaggcatctagatccattgtttctgaatccttagagccgtagcgacgaacgtttacagaaccagcttctacttcttggtccccaagcactaatgcgtatgggattttcttagtttgcgcttcacggattttatatcctagtttttcgttacggtcatctacttccgcgcgaagtccagcgcgttgtaatttatcttggactccttttgcataatctaaatgtgcatctgcgttaactgggataagttccatttgtactggagctaaccaagttgggaaagcacccttatattcttcaattaggtaagcaacaaagcgttccattgtcgatacaacaccgcggtgaataactactgggcgatgtttttcaccatcttcgccgatgtaagttaaatcaaagcgttctggaagtaagaagtcaagttgtacagtagaaagagtttcttcttttcctatagcagtttttacttgaacatctagttttggaccataaaacgcagcttcaccctctgcttcaaagtaatccatattcatttcatccattgcggatttaagcattgcttgggctttttcccacatcgcatcatcgtcaaaatatttttcagtatttttcggatcgcgatagcttaggcggaaggagtaatctttaatatcaaagtctttatatacttctaaaattagctccacaacgcgtttgaattcatctttaatttgatctggtcgaacaaatacatgtgcatcatttagagtcataccacgaacacgttgtagtccagaaagtgctccactcatttcatagcggtgcatcatgccaagttctgcaatacggattggcagttcacgataactatgaatgtcatttttataaatcatcatgtgatgtgggcagttcattgggcgtaacacaagttcttcgttatccattttcatagttgggaacatatcttcatggtagtgatcccagtgaccacttgttttgtaaagttccacgtttgccataattggagtataaacgtgattgtaacctaggcgttcttctttatccacgatgtaacgttcaataacgcggcggatagttgcaccttttggtaaccaaagaggtaatccttgaccgacttcgatactgttcgcaaataaatctaattctttccctaatttacgatggtcacgttcttttgcttctttttgcatttggataaattcttttaagccatttttgtcaaagaaagctgtgccgtaaatacgttgaagcattttgttgttgctgtcgccgcgccagtatgcaccagccacgcttaacagtttaaacacttgaattttaccagtagaaggaacatggacaccgcgacaaaggtcgaaaaactcgccttgagtataaattgtcactgtttcatcttcaggaattgcttcgattagttctaatttatattgatcgccaatcgcttcaaaacgtttaattgcttcttcacgagaaacaacttcgcgttcgattggtacattttcacgaacgattttttgcatttctttttcgatttcaactaaagattcatcactaataacagcttctgtatcaatatcatagtagaaaccagattcaatcgctggaccaactccaaatttcacatctggataaagtcgttttagcgcttgagccattagatgagcagtactatggcgcaaaataccaagtgcatcttcatggtctggagtaacgatttcaattgccccatcttcatggattggagttactaagtcaagtaattctccgtttaatttacctgcgagtgctttcttttttagacctggactgatggaagccgcgatgtcggctgttgacacgcctggctcaaattcttttacagcgccatctggaaatgtgattttcatactaatctctccttttctttttttaaatgtggttaggagggcaaaataaaaaacccatccctcctgttgtcaagggacgagtttatgctcgtggttccacccaagattcagaaatagctaaaattaactacttcactcttgtcgcctgtaacggagcgatccgtctattattactagtaaaaaacgttcctaatagaagttccaaggtggtccaaatttaagttccaatagaaggttcccagctagcccttcctctctataattttccgttaaattggttgtccttttcatcactttgttttatattacttcacattataagcccgatgagatatatttgcaagtactttttagaagcggcgattttttccttctaagtttacttctttggataaataacgcacccgttccatgattcggcgagcttttagtttttcttccgtaccattttgagcaaacattaaatgattttcaagttgatccatattgtaattagacgagaagaatgttggtaattcttcttgcatccggaattgtaaaatcgcacccagcacttcatcgcgtgtccacgctgtcatcgattctgcgccaatatcatcaagcattaatacttcagtttctttggcaaattggattttttcgccaacagtattatccgaaatagactgcttcacttcccgcataaattctggtaaataaactaaagttgtcgaaataccttttaaagctaactcttttgcaagtgctccaagcaagtaggattttccagtcccaaaactaccatgaataaataaccccttcacacgctcaccattttgaggtggatagttatttaaaaattgataagcttcaacaagcgccaatttacgcgattcttcatccgtataaaagtctgctaaattagcatccaccacttgttttggcatgtaaagcgaacgaattctccgctcgacagcacgacgtttatcttcttcaattttttcttttgttggataataggtgacagtaatgaattccccgttaaggacaagttttggagcataaccaggcattaatgtctcttcttgctctgtgaattttttatgttgcgtcataaattcgtacaaattagacaagttttgattaattaattgttccgtaatatcttctttattttccttgaaaaaatcttgaattggttgataatggagaacttgttgttttaaaccttggtattctttttcaaaatctcgcccttcaaaaagctgtcctaatgttctttcgatgttatccatattcttcacctaccttttatttagtcgttctttaatttcacgaacttgttcttcaagcgtttgtttttctttatctgtcatcttgttttctgctggagcaacttgttctttatcaaaccaatccggtaaaatttcttttctagtggatttttggtaatttcggttgtaattattatttttcggtgtggctggttcttcttgtaatcgtttatatttttcgtgctcttgccacgcgagatccatagcttcttttgccgtttttacattttttcgtttccagtgggccgcaatagtcatcatgtaatttttagaaagcttccggtcaaggcgaagtaagacatattcaattagcacattcatcacaggaaccggtagattttgttgattcatcacttcttctacaacgcgtaaatcggtttctgccgggatcgcgccgtctgaaatatccactaataattggaatggcgtgatgctctctaaataaacttgaagggcttcttcatcatttaaagcttcttctggttctttttttccaggtgtttcctgcttcatttgcaattttggtggagcgccattttcaatcgtgtagccttcgcgaacgatttttcgtaaataaacgatgtcaatctcgccatttgcatcaagcgcacgatacaaataactcggcatatctttttcagaaacttggtaaattccgtgtaattttaaaatcgtttggcgcacttcttttgttattttttccctggcaatcatacctggtgaaagtaaacttaagaataaattaaagtcaaaactcgcgtcatcaaattcgatttcttttggcacgattttatccactaaaacctggctagattctgatggaactgcactactgccacctttaaacggctcaaaaacatcttggaacgaacgagtaatttcactgtatgtatctgtttcaaaagtttcatctgcaaaaaaacgacgcaaacgctgaaactgcgcattgccaattttactatataaataaatatttaaaagaccatctgaaaaaaacttttcgggcgataacggcggtaaaatttcgtaaatataaaagcgttggtcattttctgttttcacataactttttaaaagacctaagccttctagtttcaatcgcgcctcgaataacgctttcaaactaatatcaagcatatttaaaagttggacgtgcgaatgcgcttctgaccaaagtctgttttcttccacttctgtgaacagggtttggtataaagcaagacattctgcccccattaacggttgatacaacatcgtaattatttttctatcggcacctgtcaaaatcccacttgccttcacttgatagctatctaccgcctgaagctccatccaaaattccgtcaatttactcacctatctttatttttttccatcaaatcttttagttcttctacaaacacactaatatctttaaattggcgataaaccgatgcaaagcgcacgtaggcaacttcatcaagactcgctaatttattcattactttttcaccgattaaatcagaagcgatttcgctgtcaccaatgtttcttagttcgcgctctacttcattcacgatttcttcaatttgttccgcactaactgggcgtttctcacaagctcttattaaaccacgtcttactttttcacgagcaaattcttctcttgccccgtcttttttcacaactattaaaggactctcttctaccttttcaaaagtagtaaaacggaatccgcatttttcacattcacgccttcttcggatggagttaccatcgtctgccggtcttgagtctacaacacgcgtgccattatatttacaagtaggacatctcacaaaaaatcactcctatctctagcattctttatctgtttatttgtatgcctcattataccatgtgaaagtaagggtggctatttgttattaacaaaacgctcgataaatgtaaggacttgcttttgtgttttttcaagtgactcattattatctatcacaaaatcggcttttttcgccttttcatcaattcccatttggctattaattcttgctaatgcctcttctttagttaggttatttcgttccattaaacgctttaactctgtttccggtgtcgtccaaaccacgataatttgatccactaaagattctaaatgactttcaaaaagtagcggaatatcaaaaaatacaactttttctcctgcttcaaaaaagcgttctctttcattcaacatatagtctttcacgcgaggatgggtaatttcatttaatttctcccgtttttctttatcttgaaaaataatttctcctaatttagcccggtttaaagtaccgtcttcaagtaaaatgtcttttccaaagtatgcaacaatttccgctaggccatctgttcctttttcaactacttttctagctgcaatatcagcatcaactagcggaattccagcttgctgaatcaggttactcacagttgactttcctgttgccacacttcctgttaatccaattgttttacccatgatttcagctcgctttctatttttgacagtgcgggcaaaaatgcgtcccgcgtccatttagtttaattttttcaatgggtgtcccgcaaataacgcacggttccccagtttttccgtacacttttaatttatcttgatattgtcctagtttaccttgtgaattcacgtaagttctaacagtggaaccaccaagggcaactgcttcagtcatgatactttttgtcgcttcaaatatgcgattaatttctttatcagatagcgagttggcggctctctctggatgcacttttgcttcaaaacaaatttcatccgcataaatattcccaacaccagcaactaatttttgatcaagtaaggctgttttgatagctctactcgtttttttcacaccagttgcaaaatcagctaatgtaaatgcaggggttaaaggttctggacctagtttttttatcgattttgtttctgactcgccgtatttattcgtcacttccattgtcccaaacttccgcacatctaaaaagcgcaattcagtatgatcttcaaaatgaaaaatgatatgcgtgtgcttagtaacttcctcgttctcatccattaaacggaatttaccttccatacgcaaatgggataaaatcgtacaatttgttaagtcaaatagtaaaaatttaccgcgacgacgtactgcttctatttcttgcccgacaagcatatggacaaactcgtcgggtggtgttgctactatcattttgggaacgcggacaatcacttgatctatttttttacctgggactaattcttgtaatgttgcgcggacattttctacttccggcatttctggcatatataaactccccgtttctctatttatttcgcatcataccaagtgtcgccaaatgcgctatcaactttaagtggcacagaaagttctaccgcattttccattacatcaggtacaatctcttctaattttgcaatttctgcttcaggtgcttcaaagataagctcatcgtgcacttgaagtaataattttgcttctaaattctcagattttaagcgttcgctcatgagaatcattgctttttttataatatccgcggcactaccctgaataggtgtattcattgccgttctttccgcaaatcctcttacattgaaattgcggctgacgatttccggaatataccgacgacgatgtaaaatagtttctacgtagcctttttctttcgcaaaacgaacaatatcttgcatatattcttttacagctggataactcacaaaataacgatcaataaagtctttcgcttcttttctcgtgataccaaggttttgagaaagcccataatcactaatgccgtatacgattccaaagtttactgctttggcttgacgacgcattaaagaatcaacttcatcttgttctacatggaaaacatccatcgctgtttttgtatgaatatcatagtcgtgtttaaacgcataaattaaattctcgtcttcagaaatatgcgctaaaacacgcaattctacttgggagtaatcggcggaaaacattttccaaccaggtttacttggtacgaaaacttgtctgattttccggccttcttcaagtcgaatcgggatgttttgtaagttcggatcaacagaacttaaacgaccagtttgcgttaacgtttggttgaaacgcgtgtgtactttatgcgtttctttgtcagttactttaagcaagccttcaatgtaggtagattgaattttaccaagttgacgatataataaaatttcatcaataatcgcatgttttcctgataagctctctagtacatccgctgcggttgaataaccagtcttggtttttttcactggaggaagttctagtttttcaaataaaatgacacctaattgttttggtgaattgatgttaaattcttcgccagctagtgaatgaatcgattcttctaatgttttcaatctaccagctaattctactttcatattttctaagcgttttgtatctacgctaaccccttgcatttccatttgtgccaagacaaatgtcagtggtaactctaaatcttccatcaaagctaattgctcattttcctctaaatcatctactaatcttttctctaattcagcaattgctactgcttttctggctaagtgggcagcaacaatgttctcttccggcgtgcttcgtttagcaccttttccataaattgcttcgtctgtttctacttctgtataatcatgtctcacagcaacacttgtaaagtcatcaatggaatctgatggatttagtaaataagaagctaacataatatcaaaagtgacaccttttatagcaaaaccaattcggttcatcgctaccattgtttttttcgcatcataaacgacttttgtttcgtcactttccacccaattacggaaaaccgcacttttttctgcagtttccttcgtaaagaagtatgtcccttggctagaatgaacggttaatccaataaagtttgcggtatgataattatcattttccagttccacataaagcgcggttttcccgccaaagtgttgttcttttaattccgttactatttcaaaagatagttcttttaattcttttgcttcttccgctgtatctccttcgatgttttttaaaagcgttgtgaagttcatttcttttaatagtgggatgactttttctgtttgatagccatcatatttcgtactttcgactgtacattcaattggtgaatctacattgattgtcgcaagttctttacttaaaatagctaattctttattttctagtactttttcttttaattttttacctgaaatttcttcagcatgttcaaggacactttcaactgtaccgccaaattcatgcaaaagtttcaaggctgttttttcacctacgccaggaatgccgggaatattatcagatgaatctcccattaaacctttcatatcaatgatttgcgatggtgttaagtcatatttttcttttaaggtttctggagtgtttgtttccatatcagctataccttttttagtaatataaacagtggttttccgagaagcaagttgagttaaatcgcggtctcctgttatgatagcgacttccattccgtctgcttctgcttttttcgttaacgtcccgataatatcatcggcctcgtagttagcaagttcatattgcgggatatcgtaagctgttaagagctctcggataaatggaaattgctcggataattcacttggcgttttttggcgaccacctttatatcctttaaatgtagtgtggcggaaggttgtttttcctgcatcaaaagcaacgagcacatgactaggcttttctttttcaagtacgttcatcagcatcattgcaaatccgtacaccgcatttgtatatacgcctttatcattatttaagagcggcaacgcataaaacgcgcgattcgcaatactatttccatcaattaaaactaatttattcacagggatatcctcctcgatattatcattcacttgtgtctattttaccataggaacataaaaacaaaccacttatccgaatgggattaaatggtttgtttaaaatacgtacatttcctttataaaaagatattacgaactagttttatcgtttaaaatcgacttattttagaagtttttgattaactcgtccgcaaattccgaacatttaacttctgtagctccatccattaatctagcgaaatcatatgttacggtttttgcagcgatagttttttccatagagtggttaatgagtgctgctgcttcaccccagccaatatgttcaagtagtaatgttccagataaaataacagaagatggattgactttatcaagaccagcatattttggagcagtaccatgtgttgcttcaaaaatcgcatgaccagttaaataattaatgttcgctccaggagcaattccaattccacctacttgagcagcaagggcatcagaaatgtaatctccatttaaattcatcgtagctactacatcaaattcagctgggcgagtgaggatttgttgtaagaaaatatctgcaatcgaatcttttactaatattttcccagcagcaagctcttctttttgttttgcatcagcagcttctgtaccttctgcttctttgatacgatcatactcattccaagtaaatactttatcgccgtattcgcgttcacataaatcatagccccagtttttgaaagctccttcagtgaatttcatgatatttcctttgtgtacaagtgttaaagatttacgtccttctttaatcgcatattcaatcgctgaacggactaaacgctctgttccttcttttgaaattggtttaatcccaataccagaagtttccgggaaacgaattttatccacgccaaactccgattttaagaaatcaattaattttttcgattctgcgctaccttctttaaattcaattcccgcataaatatcttctgtattttcacggaaaatgaccatatcagtatcttcaggacgttttactggggaaggaacacctttgaaataacgaactggacgtaaacatacatataaatctaactcttggcgtaaagcgacgtttagagagcgaataccgccaccaattggtgttgtaagcggtcctttgatagcaattaaatactcatcaattgtatctagtgtctcttgtggaagccattcaccagtttgtttaaatgctttttcgccagccagaacttctttccaagcaatttctttttcgccattgtaagctttttttactgccgcatctaaaacgcgttttgcagctgcccagatgtctggacctgttccatctccttcaataaaaggaatgactgggttgttcggtgtttttaaaacaccattttctacttgaattttttgactcataaaacttgttcctcctccattaaattcgttcttctacaggtaaataacttctattttcaggtccaacgtagatagcacgtggacgaataagacgattatcacgatattgttcaaaaatgtgtgctaaccaaccagaaacacggctaacagaaaatactagcgtgaataaatcgcggtcaatcccaagcgcgtggtaaacggaagctgaataaaagtcaacattaggttttaaatgttttaattcccaaacagcttcttctacttgcagtgaaatatcaaaccatttttcttcgcctttttcagcagttaattttctagacatttcacgtaaatgtttagcacgcggatccccacctcgataaactcggtgaccaaagcccatgattttttgtttagtatcgattttttcttggatataattacgtacatcgccagctgcatcgatttcttctaacatatcaaatacacgttcgttcgcaccaccatgaagtgggccttttagcgcaccaatagcagatgttacaccagaataaacgtccgaaagcgttgccacacaaactcgagctgtaaatgtagatgcattaaactcatggtctgcgtgcagtactagcgctttgttcattgcttctaccgataactcatccgcttcttcccctgtaatcatataaaggaaatttgctgccatatttaaatcttctcttggcggaatgggatcaagtccgcgacgaattcttgaaaaagcagcaacaatcgttggcattttcgcttgaagacgtagcccttttcggtacacagcttccccatcatctaattctgcttcggtgtcaaacacacctaacatcgataccgttgttcttaaaacgctcattggatgcaatttttgatgattttgcattcttaaacttgtaataatggtttcagatactgccatattttcttggatttctaatttaaactttttaaattcttctttatttggcaaacgtaaatgccataataagtaaatcacttcttcaaaagaagcattattttccatcaaatcatcaataccgtaaccaacgtacgttaacatatcatcaataatagaactaatggaagtctcagcaacatatacattttccaaccctttagataacgtcatttcgtttcctccttttatccttttttacttatgtatttattttatgaatgcaactaactgcattgccatatacgcaatacccgctgcaattaccggtccagcagcaatccctctaaacagtactactgctaaaatcgttccaaatacaagtgaaacagttacttgtggatcaacggccatatagcctacaccctttttcgctaaaatagaaacagcaattcctgccccaagaccaatccagccagctgctgatttaaaagaatcaattaaatctttaaaaccgatttgaccagtcgcaattggaattaagatagcaacagtaataatcgttacgccccaattaattcctttagcttgaatcagttccattgctttaccatcgacgtgaaataacttcaataaaataacgacagctaccgcaataataagcgaattattttttgctataagtccaagaagtaaaaaaagaagtaaaaacaacatactttccgtaaacatactaagtcacctttcaatatcacgcatctaggaagcgagataacaattattatatcataaacataccttatagtaatactaaaatgccataaggaaaatgaattacccttttttcaactaaacctctatagaaagttttttcccatagaggtttcaattacatatcaaaataataatattgtgtgtgtttcttttggtttccaagccatttcgttaatttaggttttaatagtttacgagaaaacgggataaaaataactagccctaaaatagtggtaataactcctggaataattaataggaaacccgcgataaaaaagcataggctatctaataaatatggtgctactgttcgtccatcacgtaaattccggaaaaggttgcctccaaggcgtttgaaaataaaaataccaaaggcgctcgaagctatttgaataaaaagaagtggccaaaaaccgattacttggaatagccaaacatacataatcaattctattaagccatataaagcccaataaagaataaattttctcataaaatcaactccaatacttaatgactattataacctattttggcgcaatcgaaaaacaatacaagcgtagacacaaaaaaagcgccccgctagcgggacgctttttagaaaggttaattttagtgagttgctgttttgccgttatatacaacaccttgacgagaatcaacagtgatgatttcaccgtcttttacaagggatgttgcgtctttagcgccaacgatgacaggaatgccaaggttgattccaacaactgctgcatggctagttaagccgccttcttccacaacaactgcagcacttttctcgaatgcaggaaggatttctttatcagttgttttaacgattaagattccgccttcttctgctttttgaagagcttctgcattggatttagcaactactgctttaccaataactgatttgctaccaataccttggcctttaactactttttcaccaattaattggattttcataacgtttgttgttccgctttctgtaactggaacaccagcagtgatgatgattaggtcgccttgtttcgcaacacctgaagcaagagattcttttactgcaaggtcaaacatttcgtctgtattgctaactggagtagctagacgaggatatacgccccaagaaagagctaatccgcgatatacatgttcgttgaatgttacagcaacgatatgagattttggacggtatttagaaatcatacgagctgtgtgaccactttgagtcgcagcaacgatagtttgtacatttaggtttttcgcagtatggccaactgcttgaccgatagcttctgtcatatctgtattttcatgaagtttaagtgcaaatttatcttgagcaactagaacttcctcagtacgaacagcgattttcgccatcattttaactgcttctactggataatccccagcagctgtttcaccggataacataatagcatctgttccatcaaaaatcgcattcgctacgtcacttgcttcagcgcgagttggacgtgggttacgttgcatggaatcaagcatttgtgtagcagtaataacaggtttaccaagtttattacattttctgataagttctttttgtacaatcggaacttcttcagctggaatttcaacacctaggtcaccacgagcaaccattaagccttgagatacttgtaagatttcgtcgatgttgtcaacgccttcttggttttcgattttaggaatgatttgtacgtgagttgcgttatgctcttctaaaattttagtaatttcaagaacatctgtagcacgacgtacgaaagatgcagcgataaagtcaataccttgttctaaaccgaagcggatatcagcagcatctttttctgtgattcctggtaggttgatagaaacattcggtacgttaacaccttttttatttttaagtacacctgggttaagtactttagttactagttcgcgattagcttcgtctttttcgattacttcaagaccgattaaaccgtcatcaagtaaaatggaagaaccaatttctacgtcatcataaagttctccgtaagttacagagaatttttcttttgttccttcaacaggagtcatagatacacgtacaacgtcacctgtttggaattctaattttccgccgaccatgtcgtttgtacggatttctggaccttttgtatcaagtaagatagcaacttgtttgccagtttttttcgatgcttcacggatatttacaatacgcgcaccgtgctcttcaaaatctccgtgagagaaattaagacgtgcaacgttcattcctgcttcgatcaactgaactaatgtgtcaactgactcacttgcaggaccaattgtacaaacaattttcgtttttttcatgttattactcctcctagaacttagctattcattcgtattcattataaacatatattacctattttaccagtcacaaccttgcaaaacaagtaagtttgtgaataagagcgcaattgtgaagcatggtaacgataacaagaaaacgttttccagattgttacagcatgcttgattaacaattgacttctcttttttctcaaagtctatttttatacgttactaaaatttttcacaaagaaaggctaccatgctttgtcatggcagccagctcttcagccgttttaaatcgacaaaatagatgcaagatcaaataatttttgatcaagagtgtgtttttcttttaaaatttcaccaatattattttcgacaattctattttcacggattccaacagctaatcctccgcggttttctagcaataattctactgagcgcgcaccaagacgacttgcaagtacacggtcaaatgcagttgggctaccaccacgttgaacatgtccaagaacagttacacgtgcatgataatcgccatattcagctagttgtttggcaaactcgttaccagacataactccttcagcaactacaataatactatgttttttaccacgttcgcgacctttgtttaaacgatccacaacatcgtccatgttaaagctttcttctggaacgatgatagcttcagcgccaccagcaaggccagaccaaagtgcgatatcacctgcgtcacgacccataacttcaataatgaaagtacgttcatgacttgtcgctgtatcgcggattttatcaagtgcatcaagcacagtgtttagcgctgtatcaaaaccaatagtaaaatcagttccagaaatatcattatcaattgttcctgggataccaatagttgggaatccacgttttgtaagtgcttccgcgccgtgataagaaccatctccaccgataacaactaagccatcgatttgatgttttttcaattgttcaattcctttaagttgtccttcttctgtagcgaattcaggatatcttgcagaatagaggaaagttcccccacggtgaagtaaatcaccaactgaacctaattctaatttacgaatatcgccattgactagccctaaaaagccatagttaataccgtaaacttcaagtccttcatagattgctttccgtacaacagcgcgagtggctgcattcattcctggagcgtctcctccacttgttaaaattgcaattcgtttcattttacttaccacctcagacaatgatattgtttttcatcacatgtgtttattctacatgaaaaaaggtcaaatgaaaagctccaacagaacacttttttaaagcgtaaccgcttgcacatgcgctttttcatatcggtctattccatttcacccgcaaaatggctttctacctaaataacactttaattggtctatacttgtgaacttataaactttcttttctacattactatataaaaagaagatgattccttaaaaataagagaatcatcttcttttggactttataaagtttcgtaaacgccgatttttttgaatttatcgtaacgttgctcaattagttgctcttcagaaaaggccattaatgcatgaagggatttcgtgatagttttattaatttcttctgcttgtgctgctaaatcgcgatgagcaccgccttttacttcaggaataatcccatcagtaatacctagttcgtataaatctcctgctgtgattcgcatagactccgctgcttttttggctagacttgcatctttccataaaattgctgcggcgccttctggtgaaataacagagaaaacagcattctctaacatgaaaatttggttaccaaggccaagagctaacgcaccgccacttccaccttcaccaataacaatagaaataattggtactttcatatcgctcatttcataaaggtttctagcaatcgcttcactttgaccacgttcttctgcagcgcgacctggataagcccctttagtatcaatgaagcaaataattggtcgaccaaatttatctgcctgtttcattaaacgaagcgctttgcggaagccttcaggatgcggcataccaaaattacgatgtaaattatctttagtatctttaccgcgttggtgaccaataactgtgactggagtgcctttaaaagtagcaattccaccaactattgcagcgtcatctccaaatgtccggtcgccgtgaagttccataaagtcttcgaataaaagcgagatataatcaagtgttgtaggtcgttctggatgacgagccacttgaaatttgtcccaagcagtcatattactataaatgcttgcttctaatttagctagacgcttctccaacttctcgatttcattcgttaagtctacatctgatgtttcattgtattcttttaagtctgcaattttactttttaattctaaaattggtttctcaaattccatttcattcgccatcagattcacctccagcttcaggtgttttcacatggatttttaaaataaagcttaatttattttttaaatcaagacgtgaaatacagtcatctagttgtccatgttttaataagaattccgctgtttggaaatcttctggtagttcttcacgaacagtttgctcaataactcttcgtcctgcgaaaccaataagtgcgcctggttctgcaaaattatagtctccaagtgatgcgaaactagccgaaacaccacctgttgttggatgtgtcatcacagtaatgacaagaccaccgtgattgctaaaccgtttaaatgctgcagaagtttttgccatttgcattaaggaaagcattccttcctgcatacgcgcgccaccagaagctgtgaaaataacaaatggtttatttgttttatcggcttcttctaccccgcgaaggattttttcgccaactactgaccccatactcgccattctaaagcgcgagtccataacagcaatcacaagcggattaccatcaatggtagcatgaccagtaacaatcgcttcattcaaaccactcttctgcttatctttctcaattcgatccatataattttcaaaaccaagtggatttgccgttgttaaattagcatcaagttcttcaaacgaaccttcgtcaactaacatatcaattctagctgttgctccaattggatggtgaaaaccacaataattacataccataagattcttttgcaattctttggtatacattatttttttgcattctggacattttgtcataataccttctggaacatccgctttcgtcccatcagaaggaattgtggcatattttctcttttttggttttgtaaacaagtctcctagcaaggataaccctccccatttacgctttctattgtggttcataacgattttaatgttatataaatgaaaaatgaataaagacgtgaaacatatttcaaccgcattttcccacaagaagacaaaatgccagtctatccgaatcaaaatggacagactgcgcagtattgttttccacgttaaactataacatactttctataaatatagaaagtctaagattacttaaacaccacattctctttaccaagcaactctactagcgcttcttgcaacccatttgacggtttgacttgaatattttttagttcggttgtttgtttggttatcgcttggtgaataatgactttactatcccctttatgacgcgctaaaatcggttttatttgctccatttgcagtgattccgtgacttttaaaaatagtcttaccggagcttttatttcttttaagtcttgggcttcattgataattaattgaagttcgccattcctcgtatctgccttcactttaagaaaaagaatttctcctttttgagcaaaattcgcgtattttcggtagctttcaggaaacataactgcacttaattcctttgattcatcactaatagtcaaaaaacacatcgtttcaccttttttagttcgaattgatttcacctcatgaacataggctgcaacttgataaattttcccagagctaacacttgctagtcttgtaatagcaaggttttgtaatttattttggtaataagatacgggatgtgccgaaacatattgacctgtatatagtttttctttttctagcttttcatcaatcgaaattggtgcggttttccggtagcgtggtttcatttttttcaaaaaatcgtcatcttccgcaaaaagattcatcccttttgaatcttctccgagtaatgaaatgtattgcagtactgcatctattgttgctaaaatagttgcccggtcttcgccaaattcatcaaaacaaccagaaaaaacaagcgcttctagaacagtttctgaaagcattttatgtggcattctttcacaaaaatcaaagaagtctttaaaaggcgctttttttcgttcattgatgatttctaaaataaatttcgttggtacttttcgaataacgcggaaactataacgaatcgaggtctcgttttccatttgaaagtagtaattactatgattaatgctcggtgccaacatgttgataccgtagttctttgcttctgtgatatattgagaaattttgtcatcatttccaaaaacagaactaagaagtgatgacataaatgctgctggataatgggcttttaaataggccaattgaaaagcgattttcgagtaagcagctgcgtgacttcggttaaacccgtagttcgcgaattggataatcatatcataaacttggttagcactactctctgaataacctttacttctagctccttcaacaaaatgaatccgttcttcgtttaaaacatctgcttttttcttgctgacagctcgtcttaataaatctgcttccccaagtgaaaaaccagccatttgattcgctacttggataatttgttcttgatatacgataacgccgtaagtcacttctaaaataggtgctaaatctggatgcgggtattggattttttctttcccatgttttctggcgatgaaagtatcaatttgctccattggacctgggcgataaagggcatccacggccacaacatcctcaaaagaagtcggctttagtttccgaagtacgcggcgaataccatccgattcaaattggaaaacacctgtcgtgtcaccggtttggaagagttttaaagtttttttatcttccaaagaaatatctgctaaagttaatggcgtttctctattataattaactgattttaaaacacgatctaataaacttagatttctaagtccaagaaaatccattttaagtaagccgattttttctaattcccccatagcaaactgggtcaatctagcatccccactacctaattgaagcgcaacctgttcgacgagtggcttatcgctaataacaatcccggcagcatgcgtcgaaatgtggcgcggtaaaccttcgagttggcaagctacttcccatatcatttcgttttctttggaacttttaatatgattttctaaccgtggactttcttgtaaagctttttgtaaagtaatgcctaattgactcggaattaacttcgaccattctgataaaagtactgaattcaagccaaagcttctggccgtatcacgaatcgccgctttagccgctaatgttccgaatgtgccaatttgggcaacatgcgcctcgccgtatttcgatacaacataagaaattacttcatccctgcgattatctggaaaatctaaatcaatatcgggcatcgttattcgttctgggtttaaaaatcgttcaaatagcaagttataacgaattggatcaacatcggtaattctaagtgcataggaaacaagcgatcctgctgcagaaccccgacctggtccagttaaaattcctgcttctcgagaataacgtataacatcccaaacaattaggaaataatccgcaaatcccatctccgtaataacttttagctcataatctagccgttcttggtattcttttgctaataaattccgctcttttaagccagcataagccgtttctcttaaaacatcaggtgcgttttgttcttcatttaacggaaatcttggcaataaatgctgatctaaggcaatttcaacgtggcagcgttcggctaatttctctgtttcgagacatgcctgtttttcgaaaccagtttgccagtcacgctccatttcagcttgtgaagtaaaataattcgggcctgcgagtggcaatgtcgcccaatccacagtccgattgtcacgtatcgcagtcaaaacttctttagcctgagcatcttttggctccatatattggacatctttcgttgcaacaacaggagccttttcttctgctgaaaaagcttctattttagcaaaaagacgtgggttttctttttgggctgataaataaacggattctttgccaaaaatactgactaagttctcgtaaacttctagtgccccgtcgcgattttcttccataagaagacgctctacttctcctttggcgccgggtgaaatggcaattaaattactgctatacgcacgtagccaactttgcggtaattcgggaccttcttcccgcgtttgaatggcactcgcgatttttaataactcatgatatccagcggttgattccgcaattaatatcaactcatatgaattaattggatttaagtaaccttgtattgtcaccgtcatcccgataattggttttatatccgccgctaaacatttttgataaaactcgactactccgtaaagtacatttttatccgtaattgctaaggctggataatggtattcttttgctttagcgattaacttatcgattgatgctgtactagaaagcaaatcataagcactcgcaacttgtaaatgaacaaaccccactatcctctctcctttcaaaactctctttttccattatatcggttaagctaaaaaaaagaaagtgtgttcgcgtttttatataaaaaataaagccagctagttaaactggctttatttcttgtttatttagccgcacagatgcgcgcaagttttactgtcatttcttttatttcttcttcattatgaagagtcgcgccagaagcaagcggatgtccgcctccaccgtattctttggctagttcattaataactggtccttttgaacgtaaccgcgctctgaaaaccgggccttcttgaatgaacataatccacgccttaattccttccacattttcgatgcaagatacaagtgcggaagcgtcgcgcggatctacttcaaactctctcaaaagcgtatcacttaaataaacggttgcagcgccattttcatccatgacaaagttttgcaaaatataccctgaaagcttcaccgtattttttggtagctcatataattcacggtaaagcgccggacgatcaaacggaaatgttactaaatgcgcggataaacgtagcgtttcttctgtagtacttggatacaggaaccggccagtatcgcccacaatcccagcataaaggagtcttgctgctgtttcattcaaaattaattcatctgaaaaagtttcccaaaaagcaacaatcatttcgctacaagaagaggccgtcgtatcaacccaaagtaaatcaccgtaagcatcgtcatttggatgatgatcgattttaattaatttctgtcctgaggaaaaacgcacatcagaaactcgctcttgattcgcggtatcacacacaattacaagcgcatccttatatacttcatcggctatttcatctactgcacctagaaattggagcgacacttcatcattcccaaccgagtagacttttttctcaggaaaactagctcggataatttctgcaagtcccatttgcgaaccgtatgcatctgggtcaggtcgtacatgcctatgcaaaataatcgtttcatattgttttatttgttgtaaaatctcacttttcattgtttcgcctctgtttctttttaacgttccatcatttgacaagcgactatagcttttccggtcaaaatcccttctaaataaagctctacatctaacttcccagctttacgtcccatttccagaattcgtggtttaataacgattgtcgcatccatttgaacaggttttagaaaatacatcgttacattttcaatcgccacattcctttttttcatagaaaatagtttttgctgcacaacttcgcagaccacttgggtaaatacaccatacgataaagtccctagcgagttagtcatttgtgggctcactttaaattcgtaatctgcctcttcgcccgtatctgctttttcggaaagttgatttgcaatcgtatcgtcaatcgtttcgccgacttgcggttgtttttgaatcatttgcatcgatttcaaaatgtcttgtctactaacgatgccgattaaagttaaatcatctttgacaacggggatgacttcgatactttcccagatcatcatatgtgccactgatgcaacactcatttttggaccaacagttagtggatttttagtcatcactcgttcaatcgaaatgctcggatttttttctaaaatatctttactcgtaaccataccagttagacgcatcgcccgatttacgacaggaaaacgactatgcccggttgcttcttccattttatgccaatcttccactttatctgatgtggacaaataagcagttgtttcaagtggcgttaaaatgtcctctacgaaaacaacttcttttttaatcaattgatcgtaaatcgcccggttaatcatcgtcgcaactgtaaaagtatcataagacgttgataaaattggtaattccttctcatctgccaactgttttacttcgtcgtccgtatcaaaaccaccagtaataagtaccgcagcaccgcgttttaaagcaagttcatgtgcactcaccctatttccgacgattaataagttaccggcatccgtatagcgttccattgcctccacggtcatcgcaccaataacaaacttattgagcgatttatataacccagcacgaccgccaagcacttgcccatcaatcatattaacaatctcagcaaaagttaatttctcgatgctatctttttgtttccgctcaattcgaagcgtacctactcgtttaatagtagaaacaaacccaattatttccgcatctttaattgcccggtaagcagtaccttcacttactgacaggtttttcgcgattttccgcacagatattttttcgccaactgcaagattttcaatgtattttaaaatctgttcatgttttgtggccacgactcgttcacccattcctattttgttagatttcgataccttccccaatttcaagtacttttccggaaataccttcatcaagcgacgcaacaaattgatgtggatcttgctcaatcaacggaaatgtattgtaatgcattggaataactagttttgcttgtaaaaaacgtgccgcaatcgccgcgtcttctggacccatggtaaaattatcgccaatcggtaagaacgcaacatctaacggatttaattctccaattaatttcatatcagaaaacaaaccagtatctccagcaaaataaatatttttaccttctattgtaaaaacgattcctgttggaaaaccaaggttaattatacgcccatcacgcactgtttgcgaaccgtgaaatgcttgtgtcaacttcacttgtccaaaatcaaactgtcttttcccaccaatatgcattggcgcaatgttctcaagcccatcttctaccgctaaaaatgaagctaaatctgcattacagataacagttgctcctgaatttttagcaatttcaactgtatcaccgacatgatcgtcatgcccatgcgacagaacgataaaatctggcatttgctcttctgcttttaaatcacatttttcattaccagaaataaatggatcaactagaatagtcgtattcccagtgataattttaatacaagactgaccatgaaatgaaatcttcatgttaaaaaacttccttcctgattaattattctatgtgtattattgtaccactattattataaactaatatataacacctcgtaaactaggaggtgtttattaccaaaatatttccgttgcatgttatcattgtagagaaatcaattggaaagaaggtacaaaaatggaaaaaaatattgatgtcttacaaaactggctaaaagaccaaggtgccgaagtggcatttatcacagacccagaaaacatcgcttatttttcaggttatcatagtgagcctcatgaacgcgtgctagggctagctgttttcccggaaagcgaaccgtttttattcacgccagcacttgaagtagaagatgtacgcggcggcgattggtcccacccggcatacggttataacgataccgaaaacccattcaaaattattgcagatgaaatcaaaaaacgtgtagcaaatccaagtaaatttgccattgagaaaaaacatatgagtgtcgaccgttacgaacaattagcaggacttttctctggcagctcattcattccgattgaacataaaattgaacaaatccgccttataaaaacagaagctgaacttaagattttaaaagaagctgctttactggctgattacgctgtccaagtcggtgttgatgaaatcgcagaaggtaaaacagaagcagaaatcgttgccaaaatcgaatatgaaatgaagaaaaaaggcgttacagccatgtcatttgatacgatggtactcactggtaaaaacggcgccctaccacacggaactcccggagaaacaaaaatcaaaaaaggcgatttagttttatttgatttaggagtagttcataaaggttattgttcagatattacgcgcacagttgcatttggcgatattactgatgaacagaaaaagatttacgatactgttttagaagctcaagtagctgcggttgataaagtaaaagctggcataaaagcaagcgaaattgatttaactgctagaaatattattcgtgaagcaggtttcggcgattatttcccacatcgtcttggtcacggactaggagctagtgtacacgagttcccttccattacagaaacaaacaacatggaactgcaagaaaatatggtatttacaattgaaccaggtatttacgttccaggagtcgctggggttcgtattgaagatgatttagttgttacaaaagatggtgttcaggtactaactgaattcccgaaaactttacaagttatcaaataacaaaaaagcaaacttccacgcggaagtttgctttttttattaaattaattctgcactatttgtatatggtaagtcgagagaatcagaaacggctttatacgtaatgtgaccttgatacgtatttaaaccacgtagcaagtaaggatcttttttcacagcctcttctaatccatcatttgcaagttttaatccaaacggtaatgttgcatttgttagcgctagcgtagatgtccgcggaactgctcctggcatgttagcaactgcataatgaagcactccatatttttcatatgttggatcatcatgtgtggaaacatggtcggtagtttcaaaaattccgccttgatcaattgcaatatcaacaagaaccgagccaggaatcatctgtttaataacatgttccttaactaattttggtgcttttgcgcctgggattaatactgctcctataactaaatccgcttttttgacagctaattcaatattaaaatcattcgacattaaagtttgtacttggttgccgaaaatgtcatccaattggcgaagtcgttttaaattcatatctagtattgtaacattagcgccaagacctacggcaatttttgctgcatttgttccagcgattccgccgccaataataacgacttcacttttttcaacgccaggaacaccaccaagcaacacgcccatgccgccatttgttctttgtaaaaattgtgcgccaatctgagccgccattcttcctgcaacttcactcatcggagaaagtagtggtagtgtatgatcagcaagttctactgtttcataagccacactgtttactttactctctagcaaagctttcgcaagagttggttcattcgctaaatgtaaatatgtgaaaagtaataagccttctttaaaatatgtatactcggatgcaatgggttcttttacttttacaaccatatctacgtcccaagcttcttttgctgtttcgacaattgttgcccccgcttgcacaaaatcagcgtcttgataattagagccacttcccgcgcctttttccacgtatacagtatgccctgcgtttacataggaaaaaacacttgccggagtcattgccaccctattctcattattttttatctcttttggtacgccgatcaacatcaaaatcactctccttggtataggtataatagactataaaagattttccacacccccatgctaacacaatatacctaaattgtaaaaaattaactaacttaaatttaaacaaaagaattattacaaaagtaaaggattttcatggtttcttaatttattttccaatttatggttcttttaggaaaaaaagggtaaaatataaatatagtagatacatattttgattggaggaattattatgttacaacaatacgaaagagttttagtagcagttgatggatccaaagaagcagaaagagctttccaaaaagcaatacaagtggctaatcgtaatgatgctgcacttggtcttgtacatgttattgatacacgtgctttctcgtccgtagccaattatgatacaagcatggctgacaaagcgactgaatatgcggatgaattacttagcggctataaagaagatgctttaaaagcaggcgtaactaaagtagaaagctatatcgaatacggttcgccaaaaacagccatcacaaaagaagcagcaaaagcattccaagctgacttaattatgtgtggtgctactggtctaaacgctgtagaacgtttattaattggtagtgtatctgaatatattattcgccactccccttgtgatgtgcttgtagttcgtaatgatgttcctgattataaagaataaagctaaataaaaaaactcgctcttgaaattcaagagcgagttttttttattttaatggttttgtttaattgtttctacatcacgagcaatcattaattcttcgtttgtaggaatgatgataacttttactggggagtgtgggtagttaaggaatctttcttctccgcgcacttggttaagtgctggatcccagtatacgcccatgaattcaagtccacgaagtactttttcacggatataagaactattttcaccgataccagctgtgaagataattgcatctacaccgttcatgcgagctgcataagaaccaatgtatttatggatacggtcaacgaaaacttgaagtgcaagttccgcgcggtcgtttccttttgctgcttcatcttctaaatcacgaaggtcacttgaaataccagatacaccaagcataccggattctttgtttaagacatcaagtacttgttctgctgttttgccagttttttccatgatgaaaggaataagcgctgggtcaatgttaccagaacgagttcccatagaaacgccagctagtggtgtgaatcccatggaagtatccattgattttccgccttcgattgcagcgatactagcaccattaccaaggtgacaagttagtaaacgtaattcttctacaggacgacctagaagttctgcagcgcgttcggatacatatttgtgacttgtaccatggaaaccgtatttacggataccataatcttcatagtagctgtacggcaagctgtaaaggtagcttgctggaggcattgtttggtggaatgctgtatcgaaaacagccactgaaacaacgtcaggtaaaattttacggaaagctttaattccagtaacgtttgctggattatgaagtggcgcaagttcagatagtgcttcaatatctttaataacttggtcatcaatataaaccgattcagggaatctttctccaccatgaacaacacggtgaccaattccagtaatttcatcgtaagaaccgataactttgtgattaattaatttttcaagtaacatttgaacggcaatttcatgatcaggaatatcaataatttctttgattttttctccgtctacagtaattgtaaaaatagaatctttcaagccaattctttctacaatacctgctgtaataacacgttcagatggcatatcatataattggaatttcagtgaagaacttccggcgttaattgcaatcgttttttccattttatttttgtcaattccttccattatcgtttccttttgaaccagttctctatttcagctaaaatcggtgcagttacgctcggatctgttagcgaagagagattggccagtaaaacttcttttggcggctttacatctacgtccgctttttgtaaaatcaagatgctttttcgtgcttgttcagacttaaacagtgtttcaggcaatttaataattccctcgatatgaccgtttttcttgataaacttgtccaccttagcaaagtcactagtcccaaacattgcgtcaggtaccaagaagaataaatatcctcctggctttgtgtagcgcattccttgttctataaacaagaaatgtgcaaatgaatgcccttcttcacggcaaagttcaaatgtttttgcattttcgtcatccggataatacccaacaggtaaatcactaattacgacatctacgggatcaactaataaattagccagaccatcttgatgcagcaacgtcattttttgtcgttgtaaatccgctcctactagtgcaagcgaaataagcaaatcatctacatctacaccactcgcatgaacgtctacatcgccttttaatcctagctgattaatcactgttgttaaaaggtttgcagtgccacaggctggatccaaaatagaaacatttttcttcttttgaattactttttcaagcaaatatgccactataaaaccaatggaatctggcgtcatttggtggttcacttgaataccatgtttcatgccttttagtagtgctaattgaagacctttgcggatttcttcatttgagaaattctcaagttcgatactttcgtaagacgcttgtaatttcaattgtttttcagaagacaactcttctttttgtaaaacttctttttgaaacagattttctcctgtttcataaaccgcttccaaatagcttatttcaagctcattttgcaagataatagctgtattatcaagcacttgaaataattcttgcgttgcttcatttgccaaaagtaacacctcgaattttcatcattactaacaccaccaaacattatacagtatttctaaagaatgtgaaaggattttctgtagtaaaagcggaaattaacgctggaaatttttaattataattagtacagtttatttttagtagtaatacagaaaaaagccctcctatttatggcgacactggataaaacagtaatccaaaacatttgactaataccagccgccaacatggattgtctacaaaaaagctagtaacggttttgctttgccgttactagcttttttcatgttctaaattgctacagttttacttatctattccttagaaggggaatcgtccagtaccgaatcaaactccgatgacagaccaattaaacctttattttggcaccttttattaacagtaataaagacgaatacctgttatgtatgaaatgaaaaatttaacgaatctcaaatttatagatggcctcaattaagtcggtttccattttgtgctgaacatcggtgtcaatatattggtagagtgagccgtccgatcggtaagccgttcgcagagagcggcttatgatatatccacgaaattgatttaaaatgtcttgaatagccacgatatcacctgtcttagctgatactaaagtatcaaaatgtatgtattttcctttactcaccgttttgttcctcatatattatccgtagaacccttaatgccgctaaccgacgtttgcgtgttgaagagtcataacttgaaaaagcctctccgatttttctgtctgtccacccaagaaagtatttgagcagaatgatattacgtccctgctctggcagacagtttaatgcgttagccagattattgtcttgtacaataatttcataatccaatacattgaagatagtatcgtcagtaaagtgctgatcaatacgataaaggagacgggtttcttgaaaggatagacttgaaaatgtgattgtatttttccctaaccgcagccgctcatagtaggcggtgagagctgcgtaatgaagggttcttagtgcatatcggtgaaactgccgcatatttctctctataaaatcattcgtcagtttcacatgtatccccctatcatttaaccggtttagttttttctattctatcaaattaagtaaactatactaccctaaaattggttacactttcttaattaatgctgtctctagatttcgtttgactatctcgtctgggtatagcctttgttattccaacgatcaataactgctttatagcgaactggatttttcattgcatgtctgcgaagtcctacatgaaaaacaatagctctcatcacaatttcaagaacagataaagacattgttctttttgctctgaccaaatactgtgcacattttctatctatggttttttcagttgccttgtttaatacctctgaaccgtgattcagcttttttctataatgtccgctaaccgagccaccagaatagtgtataaattcatttagaattttttgtgccttttttccacccgcattctcataagtgataacagagaaacatggtttatttctaagaagttgttcaaaaataaaatacccacgatacattagaatttttaaatacccggatacattgctggtataggttggacttccaagaatcaagccatcgcattgatcgatgagactgcgtaatctttccactccatcatcttgaataaagcaatatccagttttatagcagcccatgcaacccacacacaattttaaattataattgcttaaatcaatgtgcgttatttcaagttccgaatccattgtgcagagtttttcatggatataggttaaaatttttgcggtagcaccacttttgcgaggactgccatttatgatgagtaaatgcaaggtgatatcctccttttctataacatttttttcgtcatccagccaataaaggaatagggcaataatcgagaacataaaactaaaattttattataaagacctggtattatgacagacttgcccttttccatagcacgcaagccggacaacgcaaccttatggggagacataacgaatatcttaaataataatgtgtgttctatttttgctttatgtgcaaattcagtgcgtgttgagccggggcaaagcgttgttactgtgacacctgtgccttttaattcagcatgaaccgcttttgaaagatgaaggatatacgcttttgaagcagcatagacagcatctttagggcaagcaatgtaggagccggttgaaccaacatttaatatatgtccatgactattctgaatcatttcaggaataaacaacttcatcatatcggttacaaaattgatatgtaaatttatcatgccttgttcgcatgtggcatctgtttcagaaaataaccctgcttcattaaagccagcattatttaccaatatgtcaacttgccatccgttctgcttaatagatttatatattatttcagcagcattagtctgttcaaggtcacatgtaatggtatcaatacggttatttccgttttccagcttttgtttttgtgcggatagcttcatagcattccgtgataccaaaatgacatgacactcttttttagcaaaaagctcacttagtgcatagcctataccactggtagtgcctgttattaagacagttctcatttttgctcctccgcttgcttcaacctaaaaagttcagattcctccagaaaggtacggcaaggcttgttctcccctgtatccatcatttcctgatagaaattcactttagcacccagccattttaaagaagtttgcattgccttcatcttttcttctacagattgcttgtactgcgttactaattgatagcgttcagggattgtttcagggcccttcaacaataattgtatgtaagagcgtatttcacgaatcggtacgccaacttcccgcatcaacacaatcatgtaaagccattcaatattctcttctgtgtatattctatttcctacactatttctttttattgatggaagcaaaccagctttttcatagtagtgcagtgtgggaactgtaatgcccaacttctcagccacttcatgcgcaatatattccatattcttcacctcataaataagaatacactataaagtgcgctttaggtcaagctttattttaaagttaataaaatattcaggaagcagagcaagcataggaagtggctatacaccagccaccttccgccataccccttttttaaatcatgttttgtgagtgggcaaaagcctaaaatatttttagtaattattatagctgtatcaacaaaaaatgtgttaagttatccgaaaacagcttttttaagacggtaatatatgaagcaaaatccttctctcccttgtttggagtgtactcacttgttccgacccatcaagcctaaactttgctgactacgtcagggcttgacaggtcgaaaacaagtgagtaagtggtagccaaggggagaaaggatatctatatctccgatacatcttttattatggggtatcgttatcggcttggagaattagtgaaccgtttggctaatttacttgtgctattttaaaacaggaggaaaaacgttgaactatcaagttgatgaaaatggaaaaattatgaaccagcagcctgaacaaatcaccgccctgtattgccgtctatctcgtgatgacgaacttcaaggcgatagcaacagcattgtgaatcagaaatcaattctctcaaagtacgcagaagaacaccgcttactcaacactcgcttctttattgatgatggggtatcaggaactacctttgaccgtcccggactgaatgaaatgcttgctctaattgatgaggaaaaagtatctactgtaatagtcaaggacatgagcaggctcggcagggattatttgaaggttggtctgcttaccgaaatccaactaccggaaaaaggtgttcggtttatcgctatcaatgatggcgttgacagtaatcaaggcgtcagtgagttcatcgcattccgcaatgtgattaatgaatggtacgccaaagataccagtaagaaaatcaaagctgtgtttacagcaaaaggacaatccggcaaaccgcttagcaccttcccgccttatggatatatcaaagacccagaggacaaaaatcgctggattgtagatgaagctgccgccgaggttgttcgtgagatattccggctttgcatggagggtaacggccccactaaaattgctcggatattatctgagcgcagggtgctgataccgtctgcttatgcaaagtcaaacggcagaagcgcacctgctgatgttcccgctgatcgatgtaaatggtgtgacagtaccgtggctcatatccttgaacggaaagagtatctggggcatacggtgaattttaaaacctacaaggaatcctttcggaataagaaacagcggaagaacccgaaagaaaaccaaatggtatttgaaaacacccatcagcctatcattgaacaggatgtatgggataccgtccagcagctgcgttagaacaagcgtaggccatctaagactggtaaaaccaatatgttcagcggcattgcccattgtgctgattgcgggagcaagctgtattactgcacaaccagatactttgagacaaggcatgaccatttccggtgttctgcttcgcaaaaagcggttgacccgtgtacatcccatttcatccgtgctgttgtgctggaagaaatggtactggcgcacatgcgctatgtgattggctttgtacagcggtatgaggacagctttcgggtgtccatcgaagcagaacgttccacggaaatccaaaaagagttaagtgccaagcggaaacaaatagcacagtctcagaagcgtgtagatgatctggatgtattattccgtaaagtctatgaggacaacgctagtgggaagctgacggatgaacgcttcatgcagttgtcaagaggatatgatctggaacagaaaacactgcggcaaatgattacaatgctagaaaaagagattgatcagcaggaacaaaagaccacacaggtagaagatttcattgccaagtgcaagcggtactctagcctagaaacattgacccctgccatcctcaatgaccttgtgatcaaggtatttgtggaagcaccggacaaaagcactggcaagcgcagacaggggattcatatcagttacaatcttgtggggatactgccaccactggaacgcttccagcctgttgtagttgagcgaccaaacaaagaaaaagcagaaacggcgtagccgtaaggctacaccgtctctgcataacatattactgttttatccagcccctgcataaaggaatgcttttaagatttaagcttttttggctgcttctatcgctgcttcgtaatttggatggtcgctaccttctggaactacttccgtgtagacgatttctccttttgcatttacaacaaaaacagaacgagctagtaagcgaagttctttcatgattacaccgtatgcttcgccaaaagaaagatcgcggtgatcagataaagtaatcgcatttggtaaaccttctgctgcacaccatttcttttgagcaaatggtaaatcaacggagatagttaagacaactgtattatctaaattgcttgcttcttcattaaatttacgcgtttgtgtggaacaaacacttgtatcaatggaaggaacaacgctgataagtctcactttcccgtcataatcgtgcaatgttacttcttctaaatctctattcaccactgtgaagttcggcgctttgtcgccaacttttctttcggtacctacgagtgtaactggattatgtttaaatgttacttgagtcattttttcttcctcctttaatgtacgcttctattccattttaaagaagaagtttgctataagctatttttttgctccatttacccatttttcatctagttctaagtaccccgtgtggacgacagatgtggattcaaagaagtccgcaatgccttgtttgtttggtgtaaaggcacaaaccacatataacggccaaatggtttttaagacaaaacgcatcgcaccttctcgaaataaaacggttaaccaagttaattttccaccatcaagtttcactacgcgaagaccaaataacattttcccaagcgtttgtccaaaaaacttagtaagcaaaataaagtaagctaaaaagataatcgttgtcattccccaataaaatgtgaagaaactgtcatccatccccattccagagacgcggaaaatcggattaataataattccctttaaggctgcgatgacaactaaatcgactaaataagctaaaaaccggatccaaaagccagcaaagtactgtttaggaatggcttcttctttctgaattggtggttcataatgatagacttggcgtttgttttcaaaagcaacattttcattagccatttgcgcctctcctctcacattattctccatataaatacatcattcttggcgctttaagtgtgccagttaatttgattagttgggaaatatctgcattttgaccagagattttttgtgcagctacagagaataacgagctaaagtcttctggtacatcatattgaatgactgtcgcatcagctaacccttgttcttttttcaaagcttctagggcatcttcttgataaccaaactcatcaatcaacccgttctcttttgcttggcggccgtcgtatatgcgtccatctgcaattttacgtactttttctgcggacattccacggccttttgcaacgactttaacgaactcattgtaagaatcatcaatcattgactgcataattttcttctcgtcttccgtcattggtcttgtcccgctcataatgtctttatattcgccgcttttaatagtattatctgaaacacctaattttttcatgagttcactatagtcatacccttgcataataaccccaagtgaaccagtcaatgtttctttacttgcaaaaattttgtcggctggtgcggaaatataatatccacctgatgctgccatactccccatggaaacatagaatggaatattgcgttctttttgaatttgtaaaattttatcgcgaatttgcgcggactccataacaccgccacctggtgaattaacatacagcagtacgccttggatatagtcatcatttctcacttgttctaattgttgcatgaaaaatgaatgatcatagcccgcgtccccaaataaagaaccagaatctcccgtatcttgaatagtaccatctacagataatacagcaattgtatcatccccaccttcttcaattactgtttcggttagttcgccggtatccgcgaacagactttcgacaaatgtcggactactctcttccgttgaagcgatttgacttgaagtaaactttgctaacgcactaactatcaaaagtgcaaaaacaatccctagtgcaacccatcttttagcgttcattaatttctcccctttttctatttagataatgtaataataacagtctcttttattttgtacaatctttctcttaaattgtgttccatttcacttttttacggatgaagaaagaaattgcccttaagtcatgttataataagtttgttgattaaaattggattctggagggacaactaacatggcaaaaactattttttatttttcctatcgaaaaacagaagagttacatgcaaaagcaaaagaattgaagaaaattacgactgattatggatatgaattaactgatgactatcaaaaagcaaacgttattatcagcattggtggtgatggtgcttttcttaaatctgtaagagaaactggcttccgtcaagattgtttatatgcagggattgcgctaacagagcaattaggtcaatactgtgacttccatattaatcaattggatgaaatcatcaaggcagctattgaagatcgttggttagtacgtcgttacccaactatttatggaacagtgaataataccaaagcattttatgtactaaatgagtttaatattcgttcctctatcattagaacacttacgatggatctttatattaatgattctcacttcgaaactttccgcggcgacggaatggtaatttccacaccaacaggaagtactgcttataataaatcagtgaacggttccatcgtggacccacttcttccatctatgcaagtaagtgaactagcttctattaacaacaataaattccgtacgctaggatcatcgttcatccttagtccaaaacgcaaactacgtattgaaattgcgtctgaagaaggaaataacgaattcccaatgattggaatggacagcgaagcacttagtatccaacacgtgcatgaagttaatttagaagtaggcgatcgttttatcaatattatcaaactacctaaaaattctttctgggataaagtgaaacgtaatttcttataataaaaaagtctggcgtaagtgccagactttttttatttcgcttctaaaatggctgctagcaacgctttttgcgcatgaagtctatttcctgcttgttgataaataaccgagtgattgccatcaatgatctcagctgtcacttcttcttctcggtgcgctggtaaacaatgtaagaaatgataatctggcttagcaatgctagctaactctgcgttcacttgatatttttcgccaaaatccgctaaacgtttcgcattttcctcttcttgccccatgcttgtccaaacatctgtataaataaagtccgcatctgtcactgcatgttttgggtcttccgtaacgaaaatcttggcaccactttccttcgccagattctccgccgttgctaaaattgtttcatcgacttcgtacccttttggcattgcaagacgtatatctagtccaaccatggcacctgctaacagtaaagaatggcatacattgttaccatcaccaatataagctagtttgacaccttccaactgatctttccattcataaatagtcattaaatccgctaacgcctggcatggatgatgcaaatcagttaagccattaataatcggaatttctgcatgatacgccaattcttctactttttcatgactaaatgttcggatcataattgcatcaatatattctgacatcacatgcgctgtgtccttaattggctcaccgcggccgatttgaagttccttagaactcattacaatcgcctgaccacccaattgcaaaatccccgcttcaaaagaaacccgtgttctagtggaaggtttatcaaaaatcattcctaaaatttttccacttaaaatatgactataatgggctggatttgttttcatcgcaacagctagcttaataatatcgatcaactcttctttattccattcaagtaaacttaacatatcttttcctgtcgtattactttttacgtacatcgtcatctcactcacttccaatcaattgtttttccaaaacgctttttagtatgctaattgcttgatctatttctgcatagctgacagttaaaggcggtaaaatccgtaatatattgggcccggctgttagtattaataaacccttatcgcgtaattctgtaacaactggcgccgcgctactacccagttctatgccaatgagaaagccttcaccgcgaatcgccacaacattttctaactgctcaaaatgttcttctaataaatttctaaaataagctgctttagcattcacttcttctaaaaatccggtttgcttcattgttaataaaatttctttcgcagcagcgagtgccagtttatttccgccaaaagtagatccatgacttcccggaccaaaagcactgcttaagtgttcttttccgaccattgctccaattggcaagccgttcccaagcccttttgctaaagtaaaaatatctggatctaagaacgtttgctgaaaaccaaaaagcgttcccgttcgaccaagtcctgtttgaacctcatcaataattagtaatgcgcccgcttttttacatagcatttgaacttccattagccaggctgcattccctggtatgacgccgccttcaccttggattacctctaacatgacagccgctgtattttcgtcaagctcggttttgaaagactctatgtcgttatagggaacgtatgtaaagccgggaacaagtcttccgaaaccttgatggattttagcttgtccggtagctgacatcgaaccaaaagtacgtccatggaaagatttttcaaacgttattattttttctttgcctgtatattttctcgctaatttaagagcagcctcatttgcttctgttccgctattgcaaaaaaatactagtttgtctgtcccatcagtaattaattccgccacgctatcttgcagtgcacattcatataaattcgaagtatgccaaatatttgctaattgggattgaatcgcctctgtaacattctccggacaatgacctaagttgcaaactgcaatcccgctagtaaaatcaagatatgttttacctgttgcgtctttaacaactgtaccgttacctttaactatatcaaccgggaatctattatacgtcggaaaaacatgtttcatctaatcgccaccttacttttaatttttgttccaggattttccagtgaatttgtaataattacttgcccgacaccattttcagcagcaaaagcggcacttgctaattttggaatcattccgccttttattatgtcggtagtttgtaatttgtttatttcatccgtagctatttcgtcgataatttttgctccatttttcacacctgggacatctgttagtaagtaaagtgcttctgcatttagcgcacttgctacttcacatgccgctgtatcagcattgacatttagccaatcatgcgcgctattgataccaagcggcgcaatcacagtgataatattttcagcaagtaattgttcgattaaagcggttttcactttagtaatttttccaacgaaaccgaggtcagaatcattgatttgatccgcttctaacaaaccagtgtcgcctgcgtttaatccaataacagaaatatttcttttttgaaaagctgtagtgatggctggttggacttggccaattaaaaccatttttgtgacttcaagcgcttgtttattagtaacgcgcaagccttttttcgtctctacaggaatatcaagtgctttcatcatcttcgttatataatgaccgccgccgtgaactagtacgattttctttttctctgcctgccatttgataatttgctggaagaaatcgtctgtcaaattatcacttgcaacgccgcctaattttatcactatcgtatttttcattctattcactccttacgtccggtaacatgcattgattttgacgtattcataacttaaatcgcatccccacgccgttcctgactcaaggccaatatgaaggtcgacttcaataacgatatgttcttcttctaaataggcatctaatgcttgttgattaaaaattgtttggctactatgatttagtatttctatgccgccaattttaatagtaatgttatctggtgcaaaacgaccacctgagtaaccaattgcgcaaataatgcgtccccagttgccatccccaccaaatgccgctgttttcacgagactagaagaaacgatttttttagctatcattctggcatcttctgttttagtcgcgccttttacttgaacctcaattaatttagtcgcaccctcaccgtctcgagcaatacttttagcaaggtgttctgttactgcttgaaacatagctgcaaatttttcgaaatcagctgttccttcttgaataagcgggttttctgcgcatccatttgccataacaacgaccatatcattagtagaagtatcgccatcaaccgttatttgattgaaagttttatctacttttatttttagtaatttttgcaataattcagctggaatggcagcatctgttgtaataaaagcgagcatggtagccatattagggtgaatcattcctgaacctttcgctacccctgacatcgtgactgtcttaccgcctatttccgtttgaaaactaatctgtttttgaaaagtatctgttgttaaaatagcttcttcaaaatcagctgcgtttcctgtttgtttttctaataaatcgattccagtcattattttatccattgggagcatttcaccaattattcctgtcgaagcaactgcgactgtatccattggaatcgctaatttttctgccgtttttgctcgcattgaaagcgcatctaacattccttgatttcctgtcaccgcattggcattgccactattcacaataatcgcctgtaacttcgcgctatttttaaaagaatcttttgtgacaaaaatgggtgcggcttgcatttggttcatcgtgtaaactgccgcagaatttgctggtacttctgagtaaatccaaccaatatcatttcgttttcttttcagcccagcatgttttccgtctgcataaaagccttttggtgaggcgatatttcctttaataagctccattttttctttcccctttcacggatacactggaataaatcccaatccgtcactctcagcaaaattcgccattatatttaaattttgaattgcttgaccagccgctcccttaactaaattatcgattacggaaacgatggtgattacattcgttttttcattataagcaaggccaatatcacaataattagaagccgttacttgttttacagttgggtaagtattttctgcttgaattcggacaaatgaagcatgctcgtaggtggattcgtataattgatgtaattcttgctgggtaattggatttttaggtttaacgtagatggttgtgaagattcctcgtgtgatgggaattaatgaagtggaaaattgaattgcagggatactcttatcccattttgttagttgttgcataatttccggaatgtgttgatgggaattcattttatatagtgtcatattttcatttgtttctgtaaaatgggtgcttttagatggcacttttcccgctccggaaatacctgatttggcatctacaataatggatgtgggatcaattagctgctttttcacgagtggagctaaccctaacaaagtcgccgttgcgtaacatcctggattagcaataaaagtcgcaagttcattatcgcgaaattctgctaaaccatattccgccttagctaagtaatcctcaggtgctgcttttttcccgtaccatttctcgtaaagctggttatcttttagtcgaaagtctccggataaatcaatcacattaagcccggcatcgatgtacggtaaggccacatctttcgcgattcccgatggagtagcaataaaaactgtatcgcttttttcgataatttctgctggatttatcttctctaaggggctagcttctaaaccttttaaatgcggataaaagtttgccaatgtttctgattgtgcggaaaaactatgtaacgtcgctatgtcgaccgaagaatgctggtgcagcaagcggattagctcaagccctccgtatcctgtcgccccaataatagaaactttcatcctaacccctcccgttaattattaaatgatacttttcattatagtgatgtatatttataatgtcaaatggttttttattaatatttaaaactattttatgcatttttagttattcattatgtatattatatacaaaaaaccgtttaccctaaaaaggataaacggtttatcttaaaataagtcagcaaactcatcttttatttctgcattctcggcaacattaacagcaatcgtttctacattctctaatgcctttaaaattaaggcatcaaaatctgtgaaactttcgtaatgctcgattttatcaagttttggctttgtttttggagaaggcggcgtgaaaatcgtacagcaatcttcaaatggttggacagataaattatacgtatcgattttttgtgcgatttgaataatttcatttttatccattgcaacaactgggcgaataatcggtgtagctgttacagcgttaattgctagcatactttcgagtgtttggctggcaacttggcccaaactttcaccattaacaatcgctaatccatttctcttacggcgaagttcatccgtaattcgaagcatcattcggcgtgtaacagtcataatcacgctctcaggaatttgctgtttgattacttcttgaatttctgtaaatggaacgatatgcatttgaacttgtccgctatacttagccaatttccctgctaaatcgattgctttttgtttagcttgttcgctcgtatatggcgggctgtgaaaatgaaccgcttcaatctccacaccacgtttttgtgctaaatacccagcaactggactgtcgataccaccagaaagcatcagcatcgcgcgaccagaagaaccaaccggaagaccagctgccccaagaatcgtccgacatgataaaaagacgccttctttacgaacatcaatcgttagttttacatctggattttttacattgacagtcaggtcctcgatattttgtaacacatgtgcgccgatttcctgattgatttcattagaatcaagcggaaactcacggtggctacgtcttgccgctactttaaacgtgccattttcctcgtgcgcatcttgaactaaagagagagcagccgctttgacctcatctaaatctaaattaacacgaactgctggactaaatgattgaatcccaaaaatcggttttaaacgttcctctgcaagttgataatccgccccatttaaaataatatacatccggtcgcgttccccgtgaatacggacttccggtaaatctttcattgcgcgtttcacattttgtgccagtctagtcacaaactgctttctgttttttcctttagtagatagttctccgtatctaattaacatacgatcaaattccaatttatttcaccactttatttagattttcaataatttcttgcaacttttgaataaaaattttcgcttcagataaacggttttcgtaggatagacttactcgcacagcaccagttgcttcttcgtcagtcacgcccattgcttttaatgtactgcttgctaatttttgtttagatgagcaagcactcgtcgtcgaaatgtatatatcttctttttctaatgcatgaactagaatttcaccgcgatgaccttttgcagaaaaacaaacgatatgcggtgcggctacgcttttcttcgtatggacagtcatatcaggcatttgagtgatttccgttaataaataatcacggatttcgattagttctgctctctttgattcattttctagcgtcaaccttaatgccttagcaagtgccactccaccagctaaattttctgtcccactacggtagcccatttcctggccgccaccaataatttccggatgcaaatgaacattttttcgtttaacaagtgctcctgtgccgcgtaaagcatgaaacttatgacctgaaaaagttagtaaatcaatcgcatgcttatcgatttcgagcggaatttttccaatcccttgaacgaaatcgacatgaaagaaagtatgttcccgactagcaagaatctcgccaatttcttgcagtggttgaatactcccgacttcattattcacgcccattatagatactaaaattgtttcatccgtaagtgccgcttttaattcatctaactggataacgccatttttatcaacttttaaatacgtcactgtaaaaccattttcctcaagctcttccattactaaacgtacagaaggatgttcgatactagaagtaattatatgttttccgcggtttttgtagctataggccagccctttaatcgctaaattattcccttccgttccaccagatgtaaagataatttcttctggcaaaacgtctaacatagtggcgatttgttttctggatgtgtctagcaattctttagacttagcgccaaaacgatgaagtgaagatggattagcgaagtaattacttgctactttcgtatatgtttcaagcacggcagcatttggcttagtcgtcgcgctattatcgaaataaatcataaaaaatagactctcctcccaaatattccactctccattttatcataattccaacactttccaactactaatttagaaaaaaacaaggattcctattattataatagaaatccttgttttttaggctttattcaatatcatctacgcttacttttgattcataagctttttctacttttttaaatgcgcccgtttctactttttcgagtgcagttacagcaatctcaagcgcttttttatattggtagtcgttataaaaatggttttctgcttgaactaactcatctgccaactccttgttgcgcaaacgatagcggttcgcatattgaatgacgtgctcaactaagcgaacattttccatcatttcttctgctttttccgttaaatgagttaaatcttcttccgcaatccgccagtcttgactaacagctttcatgtttaaaggcttttcttctaaacgtttttcaagtgcatcaatagattctcccatgtgtgctcgcagtgatagatactcttctggaagacctggcaagcgttctcgttccattttacgatcaagcgtgataattgctcgtctcatccgttctgcatcatcgcgagcttctaattcgtctttacgcagcgaacgcaattcctctgcaaaattatcttgttctgaactaatagaaagtaaagctgcatcgatttctttcagtgtatcttgtgctgcagaataagcaatttctccgctagcaattaatgctgtcaactgctcaaagttttctttagcttcacttaatttagcacttgttttaaggtaaacggctaaatcatcttctgccacatgatacgtttgttttacttccgtgatttgttcagcaagtgcatcagaaacagtattttgtcgttttaatttatcagaagtaggactgtgattttctttcacgaaatgacgcgcttctgcttcgtgttcaagcgtatcgtaaaacaattcgatttcattatgtaattcttcaattccttcttcagcttcatctaaatcaagattgattacattttgtttcattttttcaatttgcgttttcatacgagaaatttctttatctaactccatttgggctaaataataaccttttcgaaccatttcttcataaccagcacgcaatttattcatttcttccggtaaaattgtatctgtttcatgtagtaatgaaggaatgcgttccatttgtgcttcaataactgccatttctttttggacggatataacgatttcacgagcttctaagtgatctgcttggtctgttagtgaatcatagcgatttaaattttcagcaaggctgtttagttttgcttccacataaggtagtgtttctcctagtttaaatcctcgtgtcaaaacttcccgacgaagttccgcaaatttttctttcgtcattctactttctttcgcgttcttttcttcactaataagcaattcttttaaaccgccgagaatttggtccatttgtttttcaattacaacaagcatttgctcaatatcgttttctgtatttgttgcagaacggaatctgtatcgatctgcattcatttctgcttctaacaaaacttcttctaaatcaggaaataatctagtttcaatttcgtcccaagaggagcgccatgattcaaaaagcgcttctgtttgacctgttagctttaatttttttacttttgaaagttcatcaataaccggccgttctctgagtttgattttcgtctcttctaattcgtttattctttggtaatgttttctttttaaaatgtagcctgcactaatgactgcaattactacgataataaagccgattaacatgtagtacatccaaaatcctcccatcaacgttaacttgtgaaagaaaaacagccacactcgtgctgtccatacactttttccattatgtacatctttccatatgtagtctttaattccttattttcagttcattatacacatcttttattttaccacgatttgcgcagaattacttgcgtttagcgaaaaaattttcaaagcaactttatctcaaaacaaatttccgaaaatccattttatttcatgctatactataaacattatttgaaaagaaatgtggggataaaaatgattgaaatccaaaaaatgactggtacaaaagaagaaaattacgctcttgctttaaaacaagtacaagcaatgattgctggtgaaccaaatctcattgcaaatttaagtaatgtttcttctatattaaatcaagcactttccgatattaattgggttgggttttatttacttgaaaaagaaacaaatcaattagtactcggcccctttcaaggtctacctgcgtgcattcgcattccactaggtaaaggtgtctgcggttctgctgcctctgaccaaaaaacatatatagtagaaaatgtgcatgatttccctggacatatcgcctgtgatgctgcctctaattcagaaatcgttctacccattgtaaaaaataatcagttgtttggtgtgcttgatattgatagtcccctctttaatcgttttgatgaagtggaccagttgtggctagaaaaaatccgtgatgcgattactcaagaaataaattgacaaagaactagtaactatactatactggaagatgtgtaaaatgcagcttgagtaaaatgaatgagtgtgttgtttacccccagatgtaattctgtggtatatcgcgtaaccggcggctgctatggtgatggtatatgaaggtaaactgccctgatttggttttacgtcacgtttgttttataccaaaaacaaataaaaggaggagtctcttatggctcgttatacaggtccaagctggaaagtttcccgtcgtttaggaatttcactttctggaacaggtaaagaattagagcgtcgtccgtatgctccaggtcaacacggcccaactcaacgtaaaaaaatctcagaatatggtttgcaacaagctgaaaagcaaaaattgcgtcatatgtatggattaactgaacgtcaattcaaaaacacgttcaacaaagctggtaaattacaaggtaaacacggtgagaacttcatgatcttactagaacaacgccttgataacatcgtttaccgtcttggtcttgctcgcactcgtcgtgcagctcgtcaactagtaaaccatggccacatcactgtagatggcaaacgcgtagatatcccttcttaccaagtttctgttggtcaagtgatctctgttcgtgaaaaatctgctaaaaactctgcaatcgctgaaagcttagaagtttcgagcttcgtgcctgaatacgtaactttcgatgcagaaactctaactggttctcttaaccgtctaccagaacgttctgaactcgctgctgaaatcaacgaagcatttatcgtagaattctacagccgttaattagaactaaaaaccttacaattcatgacttcggttgtggttgtaaggtttttttatgcacaaaaaagcactcgcctttaaaaacaagtgcttttcttcttatttataagaaactaagaagtattttttcttcccgcgtctcacaattgtaaatttattttcaatccggtcacttgcatcaattactttttccacgttttgctgacgttcaccgttaatgtaaattgctccgttagttacatcttcacgagcctggcgttttgacggttcaatcccaagtgttactaaccaatctactaggtttacttctgcatcctccgctacaaatgttggcacatctttgaaaccttgttcaatttcatccgcagttagagctgttacatccccactgaataatgcttttgaaattttaagcgcttgttctaacgcttcttcactatgcacaaatttagtcatttcagcagctaacgttttttgtgcagctcgtaaatgtggttcttcttccacttgtttcgctaactcatcaatttcagcttcagtcaagaatgtaaagtacttcaagtatttcactacatcgcgatcatccgtattaatccaaaattggtaaaattcgtatggcgttgttttttccggatttaaccaaatcgcgccaccttctgatttcccaaatttagttccatcagcttttgttaaaagtggaattgttagaccgaaagctttggcattctcaccttgttttttacgaattaagtctagtccagcagtaatatttccccactggtcactaccaccaatttgcagacgacaatcattaaattcatataagtgattaaagtccatcgcttgtaaaatttggtaagcaaattctgtaaacgaaatccctacttccaaacggctagcgacaatatcttttgaaagcatcgtgtttacattgaattcttttccgtaatcacgtaagaaatcaagaatactcacatctttcgtccagtcatagttgtttaccatgctagcagccgaatcaccctcaaaatcaaaaatctttccaagttggacgcgtaagctttcgacgtttttgctaatttgttccatcgactgcaacttgcgctcttcttttttaccacttgggtcaccaattgttcctgtcgctccaccaactaaaataatcggacggtgcccagcgttttggaaacggcgtaaaatcataaatggaattaaatgaccgatatgcatcgaatctccagatggatcaatcccgcagtacaaagaaatctgtttttcttctacccatttgcgtaatccttcttcatctgtttgctggtaaatagctccgcgccactctaattcatcaataatattcattttcatcattctccttttatttttggacataaaaaacgcccctccgctaaacagtttagcgaagggacgtattaattaacgtggtaccaccctacttttaggaaaaaatcctacttcaaaaaataacggctcaacaccggccgcaccattatcctgtgcagcgtgactccgggatgtaattcgtctacttatctctactagtttccaccaaccactagctctctaggaataagaataagcaactacttcgtccgttcatagtcattttcgttatgaaaagtatacatacatttataacataccgctaaaaatgctgtcaacttattttttttcttttgtagtcccacgtagtttttcactatgtggtagaataactgttttttcgtctacttcttcattcgtcattaattttgttaataaacgcattgctactgcaccaatgtcgtataaaggttgtacgattgtagaaagttgtggacgtgacattaatgttaattttgtattgttacttgtcatgacttctaattcttcaggaactttaataccagcatctaatgccgcatttaaaattccgattgctagttcgtcatccgcgacaacaacagcatttggtttcttagataatgcacttaattcttcccaaacttttacaccagcattgtaattgtattttgcttcaataatgtagtcttcttggtaagtaataccagcttcttctagcgcttctttataaccagccaatttcatttcacggtttacaggctcatttaaggaaccactaacaaaagcgatttgcttatgtccattatctacaaaacgtttcacagcttcttttgtcgcttctttgtaatcgatattaacagaagctaatttgttttccatatctaccgctccagctaaaactactggtgcaggagaacggtcaaattcttcttgtaattgttcagaaattcgttcacccatataaataataccatctacttgtttaccaagcagtgtatttagcacttgaagttctttatcctcattttcgtccgaattactaaggataatattgtatttgtacattgtagcaatatcttcaattccgcgcgcaagctctgcataaaaaacgttagaaatatcaggaataattacaccgacagtcgttgtacgtttacttgcaagacctctagctactgcattaggacgataacctaattgattaataacatccaatactttctttcttgttactggtttaacattcggattgccgttaactacccgagataccgtcgccatagaaacattcgcttcacgagcaacatcataaattgttacattcatccctattcactctccatattcattattttaatggctctatataccattgtaaacggaaacaaacttgccttcccttaataatacgataacttttttcgatatgcaattgtttttactctttattttcatttattttcataccgaaacggcattgaatattagtattaaataccaattatgcattattagttttgaccaaaataaaaaaccctggcgtaccagggcttttcgagattatttgattttgtgaggaactaggttactagctaaaattgcattccagaactcttcaaattcaggaatatccatttgttgcgcagagtcagataaagcaacagctggatccggatgaacctcagccattacgccgtcagcttcaatagcaagggcagctttagcacatggaagtaataaatcttttcggccagtagaatgtgttacatcgaccattactggtaaatgcgtttcttttttcaagattggcacggcagaaatatcaagtgtatttcttgttgctttttcatatgtgcgaataccgcgttcacataaaataattttaccgttaccttgtgacataatatattcagcagcaccgataaattcttcaatcgttgcagataagccacgtttaagtaaaatcggtttatcaacacgacctgctgctttaagtaattcaaagttttgcatgtttcttgcaccgatttgaataacatctacataatcaagtgcaacttcaatatcagctggagttacgatttcactaataacagctaaaccatactcatctgatacacgtttaagaatttttaagccttctaagcctaatccttggaagtcatatgggctagtacgtggtttaaatgctccaccgcgaataagttttaaaccttttgctttaatagactcagcaactgcagccacttgttcgtaagattctacggaacaaggcccaaaaacgaatacgggttcgccgtttccgattggtaaacctttaacagtaacaatcgtatcttcttttttattttttctagaaacaagtaatgcttttgaatgatcctcttcttgaagttctagtcccgctttaaaaatttctttaaataatttttgaaccgtgctatcctcaaaaggtcctttatttgctgcaagaatcgtattaagcatctctctttcacgtaatggatcgaaacgtagagaaccttgtgttcctttgattttaccgatttcttgtaccaaattggcacgtttgctgattaattcaagcaaatcaatatttaattgatccacctctgttctaagttcctctaaatttgtattgaccattttacttccacccttctaaaaatctgctccaagattatttctcattatagaggaaaacagataatttgtcacgaatccacttttatacttaatcgcttttaagcattaaagtgaataatgtaaaactaatgttaacacgttttaaaataaattacaagcggatattgctttttttgtataaaaaaaacagcctcgcaaggctgttttttaacttaatcttattttacttcttttttcacatcagaagcaatttttttcgcttcatctttgccatcatctaatgatttttttgcttctttttttgctttatctgctgctttttctacatcgcttgcagcatctttcgcttcattttttactgtttctgccgcttttttagcagcttcttggttttcttctttattttgtgaaacaacttctttcacagctttactttgtttagaaactgtatcagctaatttgcctgatttgtctttaacaacatcaacaaacccgccagcggaatctactaatttatcttttgttccttttgctacaccactgatttcgatacctttttcataagcaacgtctttccattggttgcctttttctttaattgtatctacctgtgtatttaaatcttcgcgtagttctttacctgatttaggtgcaaatagaagtgctgcggctgaaccaacgattgcaccaattaaaccaccgattagaaaatcttttgtattaataccatctttttctgccattgtaaatccctccaaattatattagaaattagattgctctcgagcttcttttgcggcttctttcgctgctttattcgctttcatcttttctctaaaagaaagaattgaattgctaattgagacagcttgagaaatttttgcttcattttgttctactttgttagttgcgagtgttgctagttcgcgaacagattgacttaatcctagtaaagaagtcccaatatcaccaactgcatcaaaaactggatcaactttcgcaactttgccatttacatcttctagaagtgtattggtcttatcaagcaatttttgtgattgtcctgtaatcccttgtacttctactgttattttttctaacgatttagctacctcatccattgtttgggaagttgattttaacgtttttcccaaatagatggcaataactaaaagcgcaattgcggcaatgagtgctgcaatatacaaaattactatcatctatccacacctccatattcttttttctataccctgagtattcccctctaaaactttcttctctaatgaatctatgtacaaaatgtaaaaaagaaaaggtattagcttcattttagcaagtaactgctgaaaaataaactaatatgaaagaaacccgctaatttgttatagaaggttgcttttagcgtaatttggagtaaaatagaaacaggcttgttttttaggcttattttgttaaattttagggagggtacaatatgaaagatgcaagaatcgaaaaattagcacataatttaatcaactattccgtcaaacttggcgctggggaaaaagtattaatcgaaaacttcggtgtgcaaaaagaactagtaatggctttagtagaagaagcatataaagctggaggattcccgttcgtttctttaaaagaaccacaaatcgaccgtgcgatgatgctcggtgctgatagtgctcaatatgaaaaaattgccgagttcgaaggtaatgttatgaaagaaatggatgcttacataggtttacgtgctggtgataatatcaacgaaacatctgatgtacccgcagataaattaaaaattcacggtgagactgttggtaaaatgcattctgacattcgtgtaaaacaaactaaatgggtcgtgctccgttacccaagctcctccatggcacaacttgcaaaaatgagcacggttggttttgaagatttctattttgacgtatgtaatttagattacggtaaaatgagcactgcaatggatggtttagtagaacttatgaataaaacagataaagtgcacttagttggaccaggaacagatttaacatttagtattaaagatattccggcaattaaatgcgcgggcgaaatgaacattccagatggcgaagtatttactgctccagttcgtgattctatcaatggaacacttacgtataacaccccttcaccataccaaggcttcacatttgaaaatgtctctttcacttttaaagacggaaaaattattaaagcaactgccaatgatacagatcgcattaataaagttttagatactgatgaaggtgctcgttttgttggggaatttgctatcggtgtcaatccgtttatccacgaaccgatgcaagatattctttttgatgagaaaattgaaggaagtttccatttcactcctggccagtgctacgatgaagcatttaatggcaatcaatcagccattcactgggatttagtaaatattcaacgcgctgattatggtggcggcgaaatttactttgatgatgtgcttattcgtaaagatggcattttcgttcttccagaattagctcctcttaatccagaaaacttagtataagaaaagcgcttaggatatgctcctaagcgcttttatagtttaaacaattgttttttcgcctggttgccagttaatcgggcaaagtccaccagtttgcaaagcttgaagtactcttaacacttcgtcaacttcacgaccaatattgttatgatgaaccacttcgtattgaatttcaccttttggattaataatgaaaagcccgcgtagtgccacgccttcttcttcaattagtaccccgtaatcacttgctacttgatgattagtatccgcagcaagaggataggttaattttccaattccgccttctttgattggtgtattcgtccatgcaagatgggaatggatcgtatctgttgaagcaccaattatccgcgcatttaatgcatcaaattcatctgaccgagcggaaatcgctacaatttcagtcggacaaacaaaggtaaagtccattggatagaaaaagagaactgtccatttatcgtcttctatatttttctctagacttacttttccgaaagtctgatttggcataacagcttccatttcaaatcttggagcttgtgtgcctactaaacgttctgccacttttatccctccattaatctatgtagttgtattttgtatcacatggtatattttaatacacctatcaaatcgtgtaaagctttatttatagtaattataaacaagcaaaaagcatgccaaataaatgacacgctttactgaaagttaattaatcgcacttttctttagaacttcattagccacgatttcgttatctagaactttttcataggcagcttggaatttttggacatcccctgctcccataaacaaaataactgcttctggatattgtaataattcttctgtgtgctcttctttaataatatgatttcctttggttttatgcgctaaatcagcaatagttaaattacccgttttttcacgcgcagaaccgaaaatgtcacaaagatatacttcatccgctaaattcaagctatccgcaaaaccttgtaagaaggtgcgtgttcttgtaaatgtatgcggctgaaatacagcaacgatttttttatttggatatttttgtctagcagcattaacagtcgcacgaatttctgaaggatggtgcgcatagtcatctactaaaacttgatttcctttttcagtaatgctaaatcttctttttacgccttcaaaagtttttaattcttttttcacttcgtctactggtaatccctcatagtcacaaagcgcaataacacttaaggcatttaaaacattatgatctccgtaagcaggaatttcaaatgaagctaaaaactcgtcgcgatgatagacgtcgaatttagttccagtagtttcttttttaacatttttagcttgaaattcgttttctgaaccaaagccaaagtaaataatcggaacgtctaacgataatttgcgtagttcaacatcgtctcctaaggcaaaaactgcttttttcacttgtttaccaagcgtttcaaatgcattaaatacatcatctacgctcttgaaataatctgggtgatcccagtcaatgttggtcataattgcataagttggtttgtacgcaaggaaatggcgttgatactcacaagcttctaacgcaaaatatttagcatcttttgtgccactaccagttccatcaccaatcaaatatgaagtgggacgaatggcaccgaccacatgagaaagaagaccagttgtcgatgttttaccatgagaaccagttattgcaatacttgtatagccatctattaattgacctaaaaatttatgatatcgaatcacgggaagattaagctcattagcacgctcaatttcttcatgtgtatctggaaatgcattaccagcaataattgttaggccttcttttatattatccgctgaaaacgtcataattggaatttgtttttcttccaatgctttctgcgtgaaaaaatatttgtctacatcgctgccttgcacttgaaaacctttatcgtgcaggatctgagcaagtgcactcattcccgacccttttattccaacaaaatgatagatagtcattatttgaacccccattaatttatcttgaagagggtgcctaaaaaaaacatgttaactgttaagcaccaagtcttaactttgaaaacagtataaagtctccgttttctagacatcatcttacgttccaattgtgttttatgcttgatttcatagttgagtcaataattcaccagcttattatatcactttccatgtaattagaaaaatctttcagcaaatataagcgaaattactcatgaaaatacaggtgatttgtaaaactaattaagtatcgtgttattttagtactataaaattaagtttctttgtttctgagtttagccaattggtccttcgtgatgataacatctcgtggcttagaaccattaattcctgaaactatttgatgattctcaagagattccattaatctagccgctcggttgtaaccaatcctaaaatgtctttgcagtaaagaggtagatgcggcattttggcttaaaacaaagtcacatgcctcttcaaataattcatcagtgttttctttaaccgattcttttacaagtaactcttgttcttcaaagatgtaatctgcctccccttggctacgaacatgagctacgacagcatcgatttcttcatcactaacaaatgtcccttggagacgcactggtttgcttgcaccacttggtaagaaaagcatgtccccttttccaagaagtttttcagcaccgcttgcatcaaggatggttctagaatcgatttgtgaagacacagagaaagaaacgcgtgtcggaatgttagctttaataagaccggtaattacgtctacagatggtctctgcgtcgctacaatcatatggataccacatgcccgcgctttttgtgcaatacgactaatagattcttctacatcattcggcgcaaccatcattaaatcagctaattcatcaataactattaaaatatatggtagtttttcgccggtatgatcaggatgacttgcatattcattatatttttccatatttctaacgccggtatgactaaagagttgatagcgacgttccatttcttctacagcccatttgagtgcaactgttgctgcttttgcatctgtaattaccggactgacgagatgcggaatacgattatatggagcgagttcaaccatttttggatcaattaaaagcaatttcaattggtcgggagtcgctttatagagcaaacttacgagtaatgagttgatacaaacacttttaccggagcctgtagcaccagcaattaagccatgaggcattttttgcaggtctgtaataatcggtgttccagaaatatcaagaccaagtgcggcagttaacggcgacttagatgattgaaacgcttctgtgttcattaactcagaaagcatcactggacgacttgtttggtttggaatctcgataccaactgtgcttttccctggaattggagcttctattcgaatatcttttgcagctaagtttagcttaatatcgtctgttaaattagtgattttacttactttgacccctttttctggttggacttcaaatctagttacagcgggaccttgtgttctattaacaacgctcgcatgaacattgaaattttctaatgtttcatctagcatttcttgttgcatttgtaaccatgaatcgtcttctcgtttcgatacgggcggatgtagcaacccgaacgacggaaattgataattgcttggatattctggtgctacttgtctttcttctgttatagcaacaggttgaatattttcagtaattacttctttctcttgaacgatttcagctgctggttctttttgaagtgcttgtttatctttttttaccatcataacgttaaatggaattctgcttttcaacatttgttcttgtctacttgcttcgacttgtttcttttgtttaggtacttgcgtcgtttcttcttgaataagggtcacgcgttttggagctggttcaactggagtagcttcattactagctaaaactggttcttctactacttcctcaattccaacttcttctgggtaagtgtcttctatttgtttttcaatttctgtatcaaaagcaattgtttctgcttctgctaattctggtaaatccactggaggaatagttaaatcttcttgaatttctgcaatttcgtctggttcagacactgcaaactcaaatttactcggtcttttattaaatgcataaaccggagacggaacatctgtcgcagcaaaaggacgttttcttgtttcttcttttacaacaggtttgtcgctcgtttgatgcatagctctagttggttgtttttgtgtttgtttttgtgtttgaattggttggctgactggcttatcaggtattagcggaaagcggaattcaccttttggatattgatataccatttgtgttttcacttgccgtttcactggttgcaggtgtttttgctttggcactacactttttggtgtaggtcgtacagttcttgtatttcgttcttttgttttaattgccgtaacttttgatttcggctctacttcaggagcatacgttactttcttttctacttttttagtaggtgtattttcatatgtatctatttcttcgtccatatcgccaaagaaaaaatctttaaaccatcccattcattatcaccctaaatttaattttcttgtttgattttaacagacaaaatcaaaataatctatgacaaaattgtgaattcgctatttttcgagccgtattcgttataataccttgatacaactaggtttaaacccgatataagtttttattataccttgaaaattatctttattttgtacgatttatgcatatattgtatacaattaaagttatattgttctacattttaatcattttcacaaagtagcaaatttagcaagcaaaaaagcgcccgatatagcatcaggcgcttaaaaaaatcaattatttaaaaatttaccggaaattcttcacccggtgtagcggaatcttctaaaacaaggatacctttttcagttggcgcattaggaattgccaattcacgcgcggcacataccatgccgaaagaatcttcgcctcgtaaattagacggtttaatgattaaaccactaggcattactgcgccgattttcgcaaccactactttttgtccagcatcgatatttggggcgccacaaacaatttgcaacacttccccacccacattaatctggcatacatttaatttatccgcattcgggtgtttttctttcgactccacgtacccaactacaaatttcggggttaaatcagctacgatttcaggttcaaatcccgctttttcgataacttgattcattaacgcaacaagttcttcagttaaatccactttgccatttgcagtaatgtcaaagtatttggagctattaaaaatattgaaacctgcaacttgctttgtttcgcggtcaaaaattcgtgcgacatccccacggcgctcccactcgcgattttcaaatgttacttcgcctgtttcaattagtagagtgtcccctacccctttttcattataaaatgcgtttactatcacgtcttctactcctttaatctgttttttgccattataaatatcggttcaagtttaccattattatagacaaatggcaaagaggttattggcacaagtccatctgcgaaaaagtccatcgtcatatgcgccagaacgtcataaccggtattatctttgatagcgccaataattaaaacatcttgatgcggcacagcgagcaccatttccccagttagcttttcgcgcatttgctgaagaaaactaacatttagtaaacgactcgcatcatagccgtcatttgtacgcacgaaataaaaatcattcccattaaccgagtctttttttagcggaatttctagttttcccagattatcgaaggctgcttttctgacttcttcatgggaaagcccttctttttccagcatgtttttttcgatgaaacggtaggattttcctaaatcaaacgcatagaaaattttcgtttcagcggtatgttcatctgttaaaagcacttctcccgctttggtggtatcaggaaaagaagtcgctctaacaacgggataaatattcgctgtattgtttttgagttcaatgtttccggatgcagccagaaaaccttcttcgacatagtaaataatcttttcaatcgcagcttcaccatcgttttcataatttgcgatgatttgtgggatagccaaagttacttttttgccattttgggtaaccgaaagtgtgtcactatctcgttcgtaagcaaactgccgattaggtttattcagttccttctctagtcgttctttcatttttaatgtcgtcatttttgccataggtgcctccccttccataaaaagcagtcactttttatattgcagctagaaaatcattaatttcttcttttgtttttctatctttactaacaaaacgccctacttcttcaccatcttcaaaagcaaggaaactagggattccaaaaatcgctaaatcagcacataaatcaataaattcatctcgatctacatgataaaaagtgaaatcctcattttcagcttcaatttccggcattacaggttcaatatatttacaatcgccgcaccaatcagcgctaaacataaaaacagatttaccttccgcttttatctcattgaattgttctacagattctaagtttttcattttttgttcgctccttcttctttcatactagttaaatcctaacgccttagctaactttcgtccagaataacgctcatgaaaaaagtccggctccgttataagagccaaacttttcaccgtactttagatcgcgtttttttcttttctatataaagattaaaataaccaacgattaacgtcatcactcccgctattagagtggtaatgatccagccgatttcagcatcgcgaaggtaaggtatccctgtagcgtaacctactaagaatactagacttgctgctaaaagtagaaatccaaccaagaatactggttttttcattattttacgcattatttttaatggtttcaaaagtcgttttatcgagaccgcggataagggttgtaatcatttctttcgccgctgcatagtcgtctacgtgtaaaatcgagttagatgagtgaatatatctagccggaacaccaattactgcactcggaataccactaagtgacgtgtgaacttttccagcatctgttccaccaggtgaaacaaaatattgatatggaattttatttgattccgcagtatcaagtaaaaattcacgcataccacggtgcataatcatcgtccggtcaaaaatacgcagtaagaaaccttggccaatttgaccgaattgcgatttattcccagtcgtatcattggcaggactagcatctaacgcgaaaaataaatctggttgaatcatattcgcacttacacccgcaccacgaagaccgacttcttcttgcacattcgcaccagcaaaaagcgtatttggtaaagattccccttttaattctttcataagctcaattgcaagaccgacaccataacggttatcccacgctttagctaaaattttctttggatttgcaagtggagtgaattcagcgacagggacgataaattgccctggtttgataccgattttttcagcgtccgctttatcatctgcaccaatatcaataagtaagtttttcgggtcagttggtttgctacgttccgcttccgatagtaaatgcggaggaacagaggctacaacgccaattacaggaccatttggcgccataatttgcacacgttgcgcttgtaaaacttgcggattccaaccaccaattgtttggaaacgaatcaaaccattgtctgtaatttgcgttaccataaagccaacttcatccatatgggctgcaactaatacgcgcggaccatcagttgctccgtgtcgcacgccaaaaatgccacctaagccatcttggataatttcatcggaaaccggttcaagttcttttcgcataaatgctcgaattctatgttcatcacccgaagtaccttgaagttccgttaattctttaaacattgctaacgtttctttttccattaataatcatctctttccgtgtgaaatctattttattatagcaaataaaagatgtttccgctcgccatacttctccattttatcgaaagcgcgttcaaaaatccttttataatcaaaaatttgtagtataatggttaaaagagatgttcgtaagacgtcttttaaaaagaatagcaaacactagggaggaaaagcgatgaactggaaagctttcattgccggcgttggagcaggagcagcagctggacaccttgtttatcattatttacttagcgataaaacaatttcaggggacgtcatcttagaaaatgtaaaaaatgcgttcaaacaagaaggacctattgaaggttcttggattcaactaaaaaagcaacactataaaaaattcgccattgatacattcgtataccacggtggtatcacttgcattcgtgagggcgagaaaaaacaattcgaatttatcgcagacgctaacacaggaacaatcattgatgtgtatttagcctaaaaattaaaacgactacccacttggggagtcgtttttttaacgaataaaactatcaattttctttttaataacagcttcgtccaccacgccttgctcaatcagttctttcatttgttctgtataaatcactttcgcagctgcatccattgcttttttcacagctgctatttgttgcataattgtttctaaatcgcgttcttcctctgtcatatttttgattgaacgtacgtgaccttcaatcttcgcaaatcttgttactagtgctttcttttgttcgtttttcatatatacccccttatagtatattagataggaaccccctacccaggttgttgttttggctttaaataatgctttataggttatataataacacaaaataaaaataccctcaaaaaaagaagcggaatcccacttcttaatttcgattttctatttttagttcagcgtcaatttctccatttccgccgattttaactgctcggaatctagcatcatggtacgataaaaaccaataatttttcccaaaagttcgcttgaaaatatcttgttttgccgcgatggatgtcataggataatcatcatatgccgttacccataaaacattttggtgagcgaatgtcggaaaaatatctgccatatgaatcgctacttctccaccggactcaaaccaaacggcagaatgtccagcactatgtcctccagtatgagtcattttaatcgcatcattaaatcgtttttctttcgtaaatgtgtggacttgcccttttattgcttgccagttttcttgccaataagttgcttttgaacgaatattcgggtgttgcatttcgtcccattcaatttcagaagtccagatttccgcatttggaaaaatagaataataaccctcttctgaacaaccagtcaaacctaacacatggtcaaaatgtaaatgagtcattaaacagtagtctatatcctcaggggcaatatttagttttgctaaatcttctaatacaaaagactcttcggttaccccgtaattacgcttttgtttttctgttagtcgcccgttccctagcccgctatcaattagataatttttccctaaatactgaaaaaacatcggatcggttacattagctaattgatttttttcatttgctggatattttttctcccataaaggttttggaactaccccaaacattgccccgccgtcaaaatgagtatagcctccgcgcaaccaataaatttttatttctccaatttgaatggaatccatttttaacgcctccaattaaaaataaaaaccagatgcagcaagtgcacctggtttatcctagtcaatctctatcaaattttgcttcaagacgatagattgggaatcctttagctgaaaatttttcttcgtattcagtttttatattcccttcgtaatcgctattatgcaaatcaagtgatacaaaagttagtaacatattatattctgaaaaagctactaatgaatattcaaacaagctgcggttatccgttttgaaatgaatctcccctgcttttggtaatagtcgctcataaatagttaagaaggttggattcgttaatctacgttttgtgtggcgttttttcggccacggatccgagaaattcaaataaatttgtgctatttctcctttttcaaaagattcttccagtaatttggcatctcttgcaacaaggcgcaaattaggtacttctgcttcaatcgctttatcaagcgcagaaactaggacactttcaatcatttcaatgccgatataattaatttccggattcgcttttgccataccactaatgaactggcctttaccggaaccgatttcgatatgaataggattattatttccaaatacttcttgccagcgccccttaaaatcttctgggtttttaatgtaaattgctggaaattcttccaatcgatcttttgcccatggtttatgttttacacgcatctttctttacacctcatcatcttctattgcattttgaaaaatttgttttgctcgttcgtacgcttcttctgattggttggtcgtaagttgcatgacggtttggcaaagtgtataccattttaatttacgatgtaattcgctagttagtgttgttccataattagaaagccattcatcccagccttcccgtgggatatattggtataatatcattcctaaatcatttgccgcatcagcaagcattgcgccgtcccaatctacaaggaataattcattttcttctgatattatccaattattatggtttacatccccgtgacaaacgacgtaatctgctttctcgacagctgtaatatttcgctctaaatactcgattgctgtctgcattacattattagcttcattttttgctttcatttctgcttttagacgagctagtaattgatgggcagaaaaataacagttttcgattttttcgagcatatggcgtaagttttccgaatggtgaattttcgctaagagtttcgccactctaggaccaaccatttcctcacgagttaaaatatggcaattcacccatttttgcgcagtgataacatctccgttttctactcttcttgtccagacgagttttggaacaatgttctctaccgaaagcgctgctaaaaaaggcgaagaatttctttttaaaaagaatttttcgtcttcatgtgttgcaacaaatgcttggccagtttcccctccagccggcgctatgtcatattctctcccaaaaaaattatctttcatttacatgcacaccttttattagctctttgcaacttcattatcccctgtttttaacttccgaacaaataggtaactattcatgattttacttctcttaagagctctcgtcaagtcaacatatgttcgttccgcgtatttttttatataacggactattttgcataaaaaaagcgcattctcattaaatggaatgcgcttttaaattaattttttatttcttctgttttagtgacgattggatccattgcgcttctatttttttgaataaataatgctaaaatacaagctactacagaaagaattcctgcgactaaaaaggctgtttcaattccgtgaataagcacatggttagcaacttctgttttcgtttttccaattacatcagctggaccaagtttatctgcaaaactcgcggcactttttgacattaccgtaataagtgcagctgtaccaatcgagccagctacttgtctcatcgtattaaacatcgctgaaccgtgagaagctaattttagtggtagcgaattgagtgcagctgtttgaagtggcatcattaccatcgccatacccgcagaacgaatagtttgaacgataataataaaagttaacgtggttgattcatctagatttgtaaacatgaaggttgaacctgccataataattaagcctactagcgataaatatttagccccaaaccggtcaaacataaccccagtcaccggcgatagtatagctgtaacaagcgcaccaggtaaaaggactaaaccagattcaagcggtgaaaaacctcgaacagtttgtaagaaaatcggtagtaacaacataccgccaaaaagccccatcacaacgaagaaactaattgctgttgtaagtgcaaatgttggatatttaaacactttaaaattaagaagtggcgctttgttgcttgattgataacggataaagatacctaatactactaaaccaagaataataaatccagctactttccacgttaaccagtcgtggtctccggcgttactaaatccaagtaataaactaccgaacccaacagtcgacataataactccgagtatatcgagtttcgggaaagttcttttaccgacatttttaagtaagaagattgctactacaatatcaagtattgcaaatggaataataataaagaataaattgcgccaatcatattgctgaacaatccaacctgagagtgtcggaccaattgctggggcaaagttcatagctagaccaattaagcccatcgcccgtcctcttcgttccatcgggaataagtttaatacgacaacggttagaagtggcataactatcccagcgccaattgcttgtaccatacgaccagcaataagcattgtataatctgttgcaaatccgccaatcgctgtaccaattgcaaaagtaatcatcgcaaataaataaagctggcgagtcgtaaacctttcaattaagaaggctgtcatcgggatcatgacaccatttactaacataaaaccagtagacaaccattgtccttgactggcagtaatcccaaaatctttcataatacttggtagcgcgacattcatcaacgtttggttgagaatcgtaacaaaggcgcccataagcataacaattaaaataccattacgcttcactgatgtacttgctgctttcatattcaatctcgtgcaccttccctttctaaaatagtaattatctcctgatgcatttctaacatttcttttaacctttcttcgccaatttctaaaataggttctaaacggttaaaaaatacatgatacgtttctgcagctttcgtcgctcctttttcggttaattctaagctaagcgcgcgtcgattgctttcatttcttgttcgttttaaaaatccggcttttactaagcgatcaacaatgcccgaaacagtactttttccaagtttcatgcgttctgctagttcaccaagtgttaaatctgactctttctgtagttctctgattgcaagcaattgtgtcgttgtgatttcacggttagcagcttcttccgctagcacgtgatgcgtttttcgttgtacttcacgaaaagagaaaataacctcttttactaacttctcatccattaacttccctccgtactgttcgcccacaaatatttcgcatacgaactattagccttttgaattatacaccttcaaaaaaatttgtcaattgctttaaaacagttgttttcgtctgaaagcggagccaaatgagtcgtttcaacgcataaaaaagttatataaatttttacataggttgctaaacataaaaaaaccttccttaaaaaaggaaggttaggatttattattttgcatattctaattcgccacaagcgcgaacgatttcttctacaaagtaattatgaagttgagcggtaattggaccacgttttccatcagcaacttgtactccatcaatgtgagtaattggtgtgatttcaattgtagtactggaaataaacacttcatctgcttctcgtaaatctgttaaagtgaaatcggcttcttttacaggaataccgttctttttcgctacatcaataataacttgacgagtaataccatttaaaattaggttgtcggcagcatgtgtccataaaaccccatctttaataatggatacgttagaagcagaacactcggtaacttgctccccgcgatgtaaaatagcttcaagcgcgttttgttgatgtgctttgtttttcgctaaaatatttccaagtaagtttaagcttttaatatcacaacgtaaccagcgtacatcttcttcggtaattgctgagccgccttctatgaattgacgctcatttcttggtacttcacgagctgctgcagttaatactccttctaaggggaaatcatctggaagaacgtgattacgaggattttgaactcctcttgttacttgtaaatatacatttccggtattgatattattttcagctactaatttgtctaataacgctcgtaatgtttctttggaataaggaataactaagtcaatttttgctgcactagcgtataaacgatcgatatgctcgttataagtaaaaaatttaccattatataaacgaacaacttcatatactccatcaccaaattggtatccacggtcttctacgtcaactgtagcatcatttctttctactaaacggtcatttactagtactttcatgtcgagtctctccttgcatagttaatttttggaactatctaaaaacttaatgaaacaaagaaactgccacaaaactaagctttgcagcagttaattttttcaattataacccttacttcgctaatttgtaaagtgcttctgcgtaaattgcagtagcttttaataaatcatcaaaatagctgaattcgtctttttggtgcattgtatcttcgcggcctgggaacagtgcgccgaacgctactcctgtttccatatgacgtgcataagttcccccaccaatcgctagcaaggtagcttcttcacctgtttgttttgtataaacttcttgtaaagtttgaataagtgggtgatcttttggtacgaaaagcggtttggaatcatcgtaatgtgtatattgagcgttgtactcatatacaactgtttgcattttattttttagtttatccatattagctgtcactgggtaacggaaattaagaccgtatttaccaccttctgctacatcataacgaataacaccgacgttcattgttaattcgccactttctacgtcttcatagctaataccaagttttacagcacgagaatcaccgaataagtaatcgcgaccaaatgtcacaaaatcatttgcagcgccagttaatttaaatttacctaggaaagctactaagtgaagaccagcatttatgccattatttggttccatcgcatgagcggattttccgacgatattgattttaactgttttgccgttttcttctaatgagccttcaactggatgatttgctaagaacgctttaaattcacttgctactttatcaaagtcttttacgtcttcaataatagctgttgcgtggtcaggaaccatgttatagcgttcgcctgattctacactaagtaaacggaatgctgcttctccacttgcttctccgtctttaaaagatacatctagttctgagatacctttttcagcgtgaatgattgggaattctgcatctggaacgaaacctagtgttggttgttcttctgtttcaaaataacgttctacacagctcataccactttcttcatcagaaccaacaatgattctaacgcggcgagaaagaggtaaacctagttctttaataatttttaacgcatagtaaccggcaattgttgggcctttatcatctgcaactccgcgcgcatataatttaccatcacgtaatgttggttcaaatggtccattagtccagccatcaccaactggcactacatcaacgtgtcctaatacgccaacaagttcttctccttgaccgtattcaaggtgtccagcaacattaccaacttctttagcggtaaagccatcttttttacctagttcaatcatatagtcgagagcgcgtttaacgtctggtccaaacggcgcatcttctgtttttttactatcatcgcgaacactcggaatgcgaagaagcccttttaaatcttctaagaaatcatctttacgtgattccacttctttttgccaattaatttctgtcataattattattccctccttcaaacttatcttctctattgtaaactgttttcacgccgcttggaagtcggaactactattttctcataaaacctttaattgcttcaaaatcccaacgttccatccgcgtagaaaatacgacatccattatgttcagactttctttttcaagtggtaagaagcgatattcttcgtgttcatcagacaacactacttccccttcttcaggcatttccactaaataaataacgcctgtaatttgatagtcttcatgaaaaaactcccatgtgtcatataagataaatggttggacttgtaatttagtttcttcataaacttctctaaaaagcgcttctccgtgagtttcaccgtagttcatacggcctcccggaagttcaaatacttcgccttctacgcctctttttttaagagctaaaaatttaccatcttttacgataactgcttttacggcaggatatataggtttcattttacaaaagcctccttatcatttaagataaacatgatttatctgttctttattttacccggttgagtagataaaagccagtgtcataaggaggttttacaaaagtgaagaaaattacaccgaaagcaatgtgcgcgtggattccaaaacgtgaagatgaaacacataaaggtgattacgggcgcgttttaattgtcgctggaaataaacaatttggtggggccgcgattatggctgcagaggcttgtgttaaaagtggtgctggtttaacaacggtggcctcagatagtgttaatcgccctgcgcttcaaacacgaattcctgaatgtatgtttattgactatgaaaacatcacaagtctaagtgaacaaattaatcattttgataccattttaattggtcctggacttggattagatgcctatgccgaagaaatttttcgattagtattacaaaattcaacagaacatcaacaacttattattgacggagatggcattactatttatgcaaaaggagaaaatcctcatcctgccgccaagcttacctttacaccacatgcaggtgaatgggaacgactgaaagcactagcacctgaagcagaaacgccaactgatgtcgcacttcatattgacgcaacgattgttctaaaagggcatcgtacaaaagtttattcaggtgaatcagcatggcaaaatatgtacggcactcccgcaatggcaacaggtggcatgggcgatactctcgctggaacgatatgtggcttgatggcacaaacagagaagccgcttaccggaacactagctgctgtttttcttcatagctatattggagaaattttagctaaaaaacgctatgttgtgttgccgactgaaattgctgaagagttaccgacctatttgaaaatttttagcgaaacagacgaacatgcttaataaaaaatcctctctttatctaaagagaggatttttttacgatttattaaatttattagcccataaaactaattttttattccaaataaagtaacaaccaattccgctgtaaataacagcatttccaattaagaatcctgctacaacatcacttgggaaatgtactcctaaataaacgcgggaatacataataaacaatacaagccctagcgcaagaatactaatcgcaaaacgaagccatttatgactaacatataaaattaaaaagaacgctagcattccataaaaaacagttgaaccagtcgcatgaccacttggaaaactaaatccaccttgttcgattaatttataggttggtcttgggcgctgaacgatatttttaatgattgatggaataagcgccccgccaactaggacaatcccaccaaaccaaattgccgtatccacttttttcattagaacaagcgcaataataacaacaacggttaaaatacaaatggtcgctaccccgccaatatcagttaaataagaaatcagtgtagtttttgtatccgttattccgacccgaataatactattccagtactggtcaaacctgtgaatccattttgccccagtcataacgcctatcataaagaaaacaaatccaaggagagcaatgccactaattataaatggtgtttttttcataaaatcctcctagcgaattcttaatttctcacgtaatctagtaccacgtgggccaaataatttatcagacaagtgaagtttgaatgccatataaccgtagaaaacagcacccgttcctccgcaaataagtgtcaatactagcgcagacattttacgatctggactaataaagttagcaagtcccatgtacagtccgatgacaataacccccatcaaagctgtcataaagaagaaaagcaccgttcgccgcaaaataactttaaacgagaaacgaacatattttttaataataaataacatgaacagacaagatactgcataaccaataccagttgcaatgattgacccaggcgcttcaaacatcataatgagcggcatttgtaataccgattttgctagtagccctaacagtaagcctagcactgtgaatcgttgttcatcaatcccttgaagaacagctgcggaaacactaaacaatgaaaataaaatggcgattggtgcaaataattgtaatagcgctgtcccattatcactaggtgcgaaaaacactgtgaataaaggtctcgctagcatagcaattccaaaacaagctggaatcgttaagaataataaaatttggaaaacatcattgagttgacgcttcacttgcgcgtactctttccttacataagcaccagtaacaagtggaacaagtgccatcgaaaacgcaattgccaacgtccctggaatcataattaatttttgtacatcaaagttaataattgctacaaaagaattgaccaaatcaggagcagttccaatatattctaacactcttcctaaagtgaattggtcaattaattgataaagcgaagtagcagacccaactataataaaaggaattgccgaaagaataatatctttatatagtgtcggaatggaaatttttacagtgcctctatcttctaaaagcattcggtccagtccaggttttcgtttataaaagtaccaaagtagtaatagtaaactcgcaaaagctccaacaaaagctgaaaaagtagcgatactaattgctgtaactacattcccgtcaagtacatacattacaatgaaagtcccagcaagcaagaacacaatacggacaacttgttctaacacttgagatacagcagacggccccatcgaattatatccttggaaaaagccacgaagcaagctcattactggaatgataagtagcgcgaaactaactgcacgaataacttgaataccatccgctaaactatatccgccttccaactgctgcattcgagcgagcgttggagcaagtccatacatcgcaaggaaacaaacaatcccggaaaaaatcattaaatatacaccggttttaaataatcgacggccaacagcatattcttccatggcattatatttcgctatatatttggcaacagctaacggtatcccagcagttgcaatgcttaagaataattgatacggtacataaccgaaattatacagaagcgctggttcatctcctccaataatcgcataaaacggaatcacatacaatattccgagcactttagagattaatgtccctagcgtcagaataaatgttcctctgagcagttttgaacccatcgtctaacttcctttacattaaattatatatccttgtttactttaccattaactcttttaaaaaaaaagaacaaacccaaataaatatcggcttgctctttacaaaaagcttaaatcaaatgaagttttttacgaattttatacatccggtcacctagaatatagtttaatagccctacttttgcagctaaaaaggcataaatataagcccccactccagctgatataaaaacaattactaatgcagtaaatcgtgcatgcggatttaagaataatgcaagcccatgataaatgagccaaacactaactaacatcacaaaacttattccaagaattaacaccagacgtctaataatatacttaaatgaataatgagcatattttttaataataaaaatggtgaacagcacagaaacaatgtaaccaagtccggtcgcaagtgcgccaccttttgcaccaagaagtaaaattagcggcatttgtagtacggattttgttagtaacccgagaagtaaactaagtactgtataacgttgctcgtcaatcccttgtagaatcgcagcagtgacactaaatagcgagaagaaaattgcaaatggagcgaaaaagcttagcaacatggatccatcagcgttataaccataaaatatcgtatagagcggatcggccaagagtgctattcctaaacaagctggcacgactaaaaatagcaatacttggaaaacagctgttagatgatgatgcacttcgcgaatccgacctttatgaaatgaagcagccacgagcggaacgagcgtcatcgaaaacgccaaagccaatgtccccggaatcataatgattttttgaacagaaaagttgaaaatagaaagtaaatcttccgctgccttcccgggcatgccatcgtatgtcaaaacacgcgcaaaggtgaataaatcaatttgttgatatagtgacatcgccattcctactataatgaaaggcactgctgagattgagatttcttttaataaatgtaacgtcgacacttgtaatttattttcactaccggcaatcattttctgaataccgggtttacgttttcggtaataccacagtaaacaaattaaactgaagaaagctccgacaaaagccgcaaatgtcgctaagctcattgctgttacaagacttccaccaataagatgaagcacaatatacgtacttgcaagcaggaaaacgattcttgctacttgttcaattacttgcgatacagcagagggtcccattgaatgaaacccctggaaataaccgcgaagtaagctcattactggaataataagtaacgcaaaactcactgcacgaataacggttgtaatatcttgaatgctcgttccgccactaacctcttgcatcccagctaaaagcggtgcaaaaatatacataattaaaaaactaataatcccggtaaatatcatcaaatatgtactagacctatataatctttggcttaaagcatattcatttagcgaattatatttagaaatgtacttagcaactgctaatggaactccagctgtcgcaatatttaagaagatttggtagggaacatatccgtattgataaagaatcgttgcctgttccctgccagcaatccagtaaaatggaataacatataaaatccctaaaattttcgataataaagttcccgcagtaagtacggccgttcctcgcattaattttgaactcataatttctattacctcaattgattttttcttttaagtctgtctgttatatatgtttatgtaaaaatcattcttacattactacttttaacgcattcttctaagatttaaaatacaagttacactcaaggcaagtagcactgctggtaaaataagcgaaacaaagttcacaccactattaatcattgataaaacgacaccaagaatggtaaacgcaccatataaataaaaaacaagcggtgtaattataatgccttttctaagtttgttataagaaagaaatagcataatcgtaaatgcgatacaaataacagccattatcgttgtcgtcataatcgtattttgaacgacagcggttgcatttgcattagcaagtacttcttttctttgttgtagagcaataagtcccacaatagaaacgctacttaatacggcttggatagtagatacaatcgctatcccaagtgttacatttttcgtgttattgagcattcttgcatgctctggttttacttcaacagacatccttacaactcctctttaacattctatacaccagactttaccatatttaaagagaaattgtaagtagtaattagttttcgatttgaacttctgctgcattttgtaaaaacgtacctagctccctcgtttccccgtcatgcaacatttgtacgaccttacttccaataatcacaccatcacaaacacgcgcaaatttttccacatgttctatagaagaaactccaaaacctgcaagaacaggaacagggctaatactttttaaataagctaaatgggtatcaatatgcgtattaaattcatttcttacgcccgttgttccgttgactgttacggcataaataaaaccttctgcttggttagctatttcttctaagcgctctttcggactggttaatgaaacaagcgggataagcgcaatatctgttccttttagttcgggtgtaataagcgtacgatgttcataaggtaaatcaggaataataagtccttttacaggtgttttttgaaccatttcgataaattttggaatacctaaatgaaaaatcggattaatatagctcataataattagtggaatttgcaccttacttgtggctaatttagttaaaattgcttctaaactaactcgttcttttaatgcgcgtaaaccagcaagttgaataacagggccgtcagcaactggatcagaaaaaggaatcccaatttcaatcgcgcttacgcctgatttttctaggaataatagttgttcttctagattatctaaaccaccatcgccgcccataatataagttactacagaagcatggtctttattcgccaatttttttgttaatgttttagtcattagtttgcccctccaatcgttcttttagttgattaacatctttatccccgcgaccagataggcatacaaccatactttcatccggacgcatctggcttgcaagtttcacagcataactaatggcatgcgaactttcaagtgctggaataatcccttctgtccggcataaaagttgaaaagcttcgactgcttcatcatctgtaacagaatgatactcagcgcgacctaaatcacggaaaaaactatgttccggcccaataccaggataatctaatcccgcggaaatcgagaaagcttcaaggatttgtccattttcgtcttgtaaaacatccatcattgccccgtgcaaaatgccaatctcgcctttagaaatcgtggctgcatggaactctgtttcaagaccatgaccagcagcttctacgccgtgcatttgaacagaagaatcatccacaaacggataaaataagcccatcgcattactgccaccacctacacaagccacaatcgcctcaggtaacttaccttctttctctagatgttgtttacgtgcttctgtcccaatgacactttggtaatcacgaacaatttctgggaacggatggggcccaagaacagatcccataatataatgcgtatcttccacattcgccacccagaaccgcagtgcttcatttacggcatctttcaaagtacggctgccagctttcacgctgacaacttttgcgccaagtaactccattctaaatacattaagcgattgacgtttaacatcttcttctcccatgaaaatagtacattccatgttaaaaagtgctgctactgtcgctgtagctacaccatgttgccctgctccagtttctgccactactttttgtttgcccatttgccgcgcaagtaatgcttgaccaatcgtattattgattttatgcgcaccagtatgatttaaatcttctcgttttaaataaattttagccccgccagcataggcagtaagttgttccgcaaaataaagcggcgtttcccggcctacatattcttttaaatagtaatttaattctttttgaaaagctgcatctgttttagaagctcggtaagcttcatctaattctttcactgctttcattaaagtttcaggcacaaatctgccaccaaattttccgtaaaaaccattttcatcaggtgcttgatatgtcattattttccaactccttttgctgttttaatgaagattttaattttttcaggatctttttcaccattcgtttctacgccggaagaaatatcaacggcatatggttcaaagcggttaatagcttctttcacgttttcgacatttaagccaccagcaataatcaatttattttttataagtaaatcactatttactttatcccaatcaaaagttttcccgctgccgccctcgtattcttctgccggagcatcaagtaagatataggcatttgaataatcatttatattgttaggaagtttgccctctttaactggaaaagctttaattacttcggcatcggtgcggtctgcttgctcggtcggttcttgtccatggagttgcacgatgtctagtggtacgcctttaatagcagcagtcaactcatcttcagtcgggttaacaaaaacgccaactttcttaatattaggtgggatgtttttagctaactggtgtgcttgttcaatcgtaacttggcgtttacttttcgcaaaaacgaaaccaatcatatccgcaccattctcaactgctgcttttacatcgacactttttttcaatccacaaatttttacaatcatcgtttcaccttcaaactttctgctgctttttgtggagttttgtctcgcataagcgcttctccaacaagtaccgcattaaattctttactcactcgattaacatcatctgccgttttaaaacccgattcactaatgaaacatgcctccgttgaaaaatcattcgcaaccatttcgcttaccgcaatatctacttcaaacgtgtgcaaattccgattattcactccaattaatttagctccaattttttgcgcgagagctaattcgtcccggtcatgaacttctactaatacttccaaatcaagggcactcgcttgtttaaaaagtaaggctagctcatcttctgtaagagctgaaattattagtaacacaaccgttgctccagcatttcgagcgcgaattaattgtttttcactaataataaaatctttacacagtactggaattgctacgtttttcgctacttctcgtaaatcttcaatcgatcctttaaagaaaatcgggtcggttaatacagaaatcatacctgctccagctgcctcatacgattttgcttgagcgactgggttcacatccatatttatttcaccttttgaaggcgaggcgcgttttacttccgcaataagttgcatttgttccgtattttcttttaaaaaatcataaaacgaataagttttccgtttttctgctacttgttctaatggcatttcagctacctctactgctttttgagctaaaatttcttctaaaaatgtcatttcgctagcacctctttttgataagtaattaaatcttgcaatttttgtttagctagaccacttctaactaggtcgcgggctaaatcaacgccttcttttactgtttttactttgccatttgcgaataaaccaaatccggcatttagcaaaacagtgtctaaataggcaccaggttcgccgtcaagtacactacgaagaattgctgcattttcttttgcatccccgcccctaattgcttctagtgggtagctagctaaaccgacttcttcaggttttagtgtatataagtgaacttccccgctttcatataatgcgtaatgattttcaccggctagagaagcttcatccataaagcccgccccatttaaaactacggcccgttttcgtccaagttgtcctaaaacttccgcagtttgtctgattaaatcacgacgataaatacccattaattgtgtttcgagatgaaccgggtttgttaaaggtccaatcaagttaaaaatggttggcgtcccaagttctttccgaacgtccatcacgtatttcatattagggtggacatgtggtgcgaataaaaaggcaatccctactttttcaagtaaataagtcatatcttcaggacgcatattaatatcaatccctaattcctgacaaacatccgcactacctgaacgactagaaatacttcgattcccatgtttcgccactggaattcctgctgctgcaaggacgaatgccgacgttgtactgatattaaaactattcgatttatctccaccagttccgcaattatccatcgcagttccagctgggaaatccacttgaatcgcaacttgctgcatcgcttctgctattccagccatttcttctgcagtttctcctttgactttaagtgccattagaaaggcagcaattttcgtttttgaaagtcgtccttcaaaaatttctgttgcaacgatattcatttctgcttttgatagatttttttggtcatatactttttgtaataagatttccattttctcccgccctttctactatgtgaataaagttttccatcatttgttttccgtcattcgtgccgattgattctggatgaaattgcaatccataaaccggataatttttcagtttcatcgccattacttccgcatcatccgtcgccactgctaatacttctaagcaatctggtaaagtatttttatctactattaaagagtgatagcgcatcacaggtatttcttttggcaagttagtaaaaatggctccactcgtttgctgcatcagcgaaactttaccatgacgaatgtgctttgctcgttttacttctccgccaaatacctcaccgatcgcttggtgtcctaaacaaatcccaagtaaaggtttttctttcgcaaatttgaaaaccacttcttccaaaagtccggcttcactaggttttcctggccctggtgaaagaacaatcccatctgccaaagccgcatattccattaaatccacggcatcatttcgttttactacgacatcactgaactctgccaaatactgctctaggttatacgtaaaagaatcatagttatcaattaataaaatcattctcccacctccaaaagggctttcgctttttgtattgtttccaagtattcactctcaggttctgaatcataaacaattcccgcaccagcttgcacataagcttttccatcatggagtaccatcgttctaatcgaaagagcaaaatcagaatcaccatttttcgttaagtaacctaccgcaccagcatatggtccacgttttacattttcccattcatagattcgctccatggctcttatttttggtgctccgctaactgtaccagccggcagcgtcgaccgaagagcatccatcgcacttaatcctggttttaatgtaccttcgacaacggaaactaaatgcatcaagaatcggtaacgttcgattgttagatatactggtacatgaaccgaacccgtttctgcaatttttccaatatcattacgtcctaaatccactaacattctgtgctctgcaagttctttttcatcggataataattccgctgccagcatttcatcttcttgttttgttgccccgcgacgccttgtaccagcaattggatttgtcgtaacagtccgccctttcgttttaattaaactctctggtgaagaaccaattaagaccgtatcgccaaaatcaatgaaaaagagataaggcgaaggatttaacaatcgtaattttcggtaataatcaaacggctccactgtaaaatctgcctctaaccgctgagaaagtactatttgaaagaaatcgccatcttgaatataggttttcgcttttttgactaagttcatatactcctcttttgtataattacttttgtaagtcattttcggaacttgaactgctttgtgttcatctttttttggtgttgtaagttctaaaaacatcgcttcaagtgcctcatccagctctgcttcacttctcccagagtagcaattatcttgcactaaaataagttcttccgcttgatgatccatgatgataaaactttcatatatataaaaacgaatatctggcatgtcccgcgtttcgactggaatgtcacctaaattttcataaagtgcaataacgtcataaccaacataaccaattgcccctgaatctaaaggcaagctttcttcctccgcctttgctttttcaataaatagttcaatttcttttaaagggtctgtcactatttgaagtgccccgtctatataatattcatgttgatatactttaatttcatgtacaggattgatagcaataatagaatatctccctgcctctgcatcttttgcagctccttcaagtaagcttttgcctgttccggaaagacgttgaaaggctaaaatcgcggttaatgtatctgcatccattcttttcatttttctcatttaaatcatcccttcttcattaaaataaaaaaagccctctgaaaaagcctactatcatgctttttcagaggacgagttatcgcggtgccacctcattttaggggaatccccctatctcagtgctgcttttttgcagctgctctataacgggagctcccgttcacccctacttcagttcaaggtatcacgcacaaggcccattcctatttcatctatttattagctcgcaccaaacgctaactctctttgaaaatcgatgaaaagtactattcttgtttcatgttttcgttttataaaattaaaaaagggcctctctccaagcctagcaaatatactagacaaggacgagagacccgtggtaccaccttgattaactgcaaaaacagttcacttaatccatccaaattccgaatgggcgccttgtgtaacgataaggcctaatcgctgcatcctactaaggaaattccttttcaaaccagagctcagaagtccattcacatcatgtccgctactgactttcaccaaccgtcagctctctaaaaactttcatcatgctacttactcttcatcaaagctatcattttttacttgtattcatcttacataagaacaaacggaaagtcaagaaaataaaaccacataaatcaaaatagcagttaataaacaactaagtaaaaagaactatcatagaaaatccctctatccccctattaatacaggacattattaatagtaaaaaaaaatcattatcttaattaccttttatttacgagtcaactagagatgaaaatccccttaaaactatatgataaaaccactcatacaaactatgccttatagactaaaaattgctttcccagaaggactatccgctcattttcgtctatttgtgaatattttcacgtgaaacactggacaaacttttattgatggcttatactaacggtgtaatcaaataaaacaaaagaatatggcacagcaacaagtcaaatttttttggattatcagggacgtcaaaagtctactatggacatttagagtcccgcacaaatattaggaggttctggaaaatggcaattaaagaaaatgcggcccaagaagtattagaagttcaaaaagtgattgacagattagcagacaatggacaaaaagcattgaaagcatttgaaagttacaaccaagaacaagtagataatatcgtacacgcaatggcgcttgccggacttgaccaacatatgccccttgcaaaattagcagtagaagaaacaggacgtggattatacgaagataaatgtattaaaaacatcttcgcaacagaatatatttggaacaacattaaaaacaacaaaacagtcggagttattaacgaagatactcaaactggtgttatcgaaattgctgaaccagtcggagtagttgccggggttacaccagtaactaacccaacttcaacaacacttttcaaagcaattatcgcgattaaaacgcgtaacccaatcatcttcgctttccatccaagtgcgcaacgttgttcatctgaagcagcaaaagttgtttatgatgcagcagttgcagctggagcaccagaacattgtattcaatgggtagaaaaaccttccctagaagcaacaaaacaattaatgaaccacgataaagtagcacttgtacttgcaactggtggtgctggaatggttaaatcagcatactctactggtaaacctgcactaggtgttggaccaggtaacgtaccagcttacattgacaaaacagctaaaatcaaacgttctgttaatgacatcattctttctaaatcttttgaccaaggtatgatttgtgcttctgaacaagcagttatcgtggacaaagaagttgctaaagaagtaaaagcagaaatggaagcaaacaaatgctacttcgttaaaggtgctgaattcaaaaaactagaaagctatgtaatcaaccctgaaaaaggaacacttaacccagatgtagttggtaaatcccctgcatggattgcaaaccaagctggtttcaaagttccagaagatacaaaaattcttgtagctgaaattaaaggtgttggcgacaaatacccactatctcacgaaaaattaagcccagttcttgcatttatcgaagctgctaaccaagcagaagcattcgatcgttgtgaagaaatgttagtatacggcggacttggacactcagcagttattcactctactgataaagaagttcaaaaagcatttggtatccgtatgaaagcttgccgtatcatcgtaaatgcaccaagcgctcaaggcggtatcggtgacatttataacggcttcatcccttccctaactcttggttgtggatcttatggtaaaaactctgtatcacaaaatgtaagtgcgactaacttgctgaacgttaaacgtatcgcggatcggagaaataatatgcaatggttcaaacttccaccaaaaattttctttgaaaaatattctactcaataccttcaaaaaatggaaggcgttgaacgcgtatttatcgtaactgacccaggtatggttcaattcaaatacgttgatgtagtaatcgaacacctgaaaaaacgtggtaacgacgtagcttatcaagtattcgctgatgttgaaccagatccatctgatgtaacagtttacaaaggtgcagaactaatgaaagacttcaaaccagatacaattatcgctcttggtggtggttccgcaatggatgctgccaaaggtatgtggttattctatgaacacccagaagcttcattcttcggcttgaaacaaaaattcttagatatccgtaaacgtactttcaaatatcctaaacttggtggaaaagcgaaattcgttgcgattccaacaacaagtggtacaggttctgaagtaactccatttgcggttattacagacaaagaaaacaacattaaataccctcttgctgactatgaactaactccagacgttgcgattgtcgatgcacaatatgtaacaactgttccagcacacattactgctgatactggtatggacgttctaactcacgcaattgaatcttatgtatccgtaatggcaagcgattatacacgtggattgtctatccgtgcaatcgaacttgtttttgaaaacttacgtgaatctgttcttactggtgatcctgatgcgcgtgaaaaaatgcataatgcttctgccctagctggtatggcatttgcgaatgcgttcctaggaattaaccacagcttggcacacaaaattggacctgaattccacattcctcacggtcgtgcgaatgcaatccttatgccacacgttatccgttataacgcacttaaacctaaaaaacatgcgttattcccaagatatgaaagcttccgtgctgatgaagattatgctcgtatctctcgtattatcggcttccctgctgcaactacagaagaaggcgttaaatcacttgtagatgaaatcatcaaacttggtaaagatgttggtatcgacatgagtcttaaaggacaaaatgttgctaaaaaagacttggatgcagttgtagatacacttgcagatcgcgcattcatggaccaatgtactactgccaaccctaaacaaccacttgtaagcgaactaaaagaaatttaccttgaagcttacaaaggtgtttaaaaactagctaacttgtccaccattaatatataaagttagaagaaagcgcaagtccatcccagggcttgcgctttcgctttagtactaaaattagtataatgaaacaagaatggagttgatttaatgatacgagcaactgtgccctacttcacttttaacggggaagcccaagaagcactagaattttataaaaaagtgtttcaagcagaaattacaaaaactcgtttttttcacgagatggaaggattctctggagatgaaaaattaggcgaacgaatccttcatgctaggcttacgaaagacgataaagatttgttttacttctcagatacactagaaggcgaaacagatgcgggaaatcgtttatcacttgcagttaattttgaaactgaagaaagttttgtacatgcattcgtactactttctaaaacagggaccgttgaaatccctattcaaaaaactttttgggatgcaaaatacgcaaaagttatcgatcattacagcatagattggcaccttaacttagaaaatgagtctactactaaagtatgattttttcccgtcctctagccgaatgtaattagaactaaaaaatagtacaattttagtagtgagagaaaaaaaggagtgagttcatgactgagacagttttaaaattagaacatgtcacgaaaaaaatcggacaaaaaaatattgtccacgatatcagctttgacatacataaaggagaagtatttggtttacttggtccaaatggtgccggtaaaacaactattatccgctcgattgtaggcttaattcgccgctcagaaggtacagtttatattaatggtaaaaatattgataccgactttaaagcagcaatttctgaagtaggagcaattattgaaaatccggaattttatatgtatatgtctggatgggctaacttaaagcaatttgcacggatgagtcaaaaaaatattacagacgatcatattcgtgaaattgtagaacttgtaaaactttcagatgccatcaatcaaaaagtaaaaacatattccttaggtatgcgtcaacgtttaggcgttgcacaagccttacttcacaaccccgccctacttattttagatgagccaaccaatggacttgatccacaagggatggcagaattcagagcattaattcgtgatttagcaacaaacggtacttctgttttaatttctagccatttacttagcgaaattcaacaaattaccgatcgttttgctattattaataaaggtgtcttaactcatacggaaaaaatgagtgacgtacttgaaaatcatgtggctgtttatcaacttaaagtcactgatagcgtagcagcaaaaactgttcttgctacacttccagtaaaacttgttgctgagaaagaaaattcatttaaaatcgaagtggctcacgaagatgtccatttaattgcccgcgcgattattcaagcaaatatcgatttattggaaatggttccacttcaagcctcccttgaagaacgattcctagaattaacaaatggcggaggtgtaaaagcatgatagcattaataaaaaatgaattcactaaattattttctagaaaatctagttggattatgcaaattgtcttatttgcagcagttttaactttggcactacttatgtttttcgttagtaagattgatacaagcggtgttgaaggtggcaatgcaagtaatgctggaattacagcttattacgatgataaaggaactccggtaagtgaggaggaatactggaattcagcggataaagatggtaacccaacatataaaaccgaaacactatcactaacagattccgttgcttacttaaaaactcaaaaacaagcagctcaaacgaaagatgaaaaagaatcagttcaaaaacaaattgatttctatcaagcttatgtagatgcagatgaaaaacctgctagcaattcagcgggaatttcaagtgctgacttctttgcatcactcggtagctctggggcagtcgcaacgatgctagtagtaattgtggcaagtattattgttgcaacagagttttctggcggaacaattaagttattactcgcacgaccttattctagaagtcaaattcttttctctaaatattttatgtgtattgtttatagcatcattagttccatcacgctattattagctagttttatcttctcgtttattcttccgaagcaatcgattttcatgccgctctccccttcatcaggcgcaatgacagcgtgggatcatgcttggatgttactcggaacaaacttcttactgatgattgtgtatgcaactatcgcattcttcttctcatccgttgttcgttcacaagcattagcagttggtgttggtgtcggcgtactattctctggtggaattattcgtcaactactaccactcgctatcgaaaaatacgactggatgaaatggattattttcaacttgcttagcttaaatgatacagttggcggtcaaaaaatcgctggcggtttagcagattggcaaattattgctggccttggcgtatatacagcgatcatcctcttctttacattcttcattttcaaaaaacgagatgtcgcgttaagttaatccaaaaaagaggttgtccgttatggacaacctctttttttaatgtttgataatctcaattttatttactgcatttgtatcaattcttgctgttccgccaattgggaaagtagcaagtggttgcgtatggccaaaatccgcgcctgaaataactgggattttttgtaaagctgttttcgtttctatgataaaagcaagtttttcttttgtcattgccgtttttgtttggaagcgaccaataaccaaaccttttatttcatctgcacctggttgattaagaagtgactccaaatcacgatcaaacgtttctggaacagtcataaaatcatcttccagaaataaaatagcaccagataaatcaggcatatattcggttccttgtagtaaattaagcgtgcagagattcccgccgataatggttccttctgcttctccatcttgaagaacaactagcccttcatttggcttgaagtccctgttttcttgatccaagtaccattcatcatcactccacgaagtacttgccgttagcgcaaatggttctttatctactaagcaagcgctaaatgaatcaagtacgtagtctaggccttttttcattgaaaaggtagagaaatgtgcgccggaataagtaacgagttcggtttgggtataaatagccgttcctagcgctgtaatatcagagaatccgcataaaatcttagggttctcagcaattaaatcataatctaaatatggtagtaattgattgctattaaaaccaccgataaccgttaaaatcgctttcacattcgaatcattgaacgcttcatgaatgtcagctactcttgagcgaatactagagcttaacatacaatccatttctgaaacatgctctccaaaagtgactttgaaacccatctcatttatgcgtttaacagcgaaatcgacttgattttctgccattataccaagagatcggcttggagcaatgatgcgaatttcatcaccttgttttaattttgcgggaatcatcatttgatcgcctccctatttagcgtatggaatggacatgaacgtaaatgatcgtccaggatgccaatagcttgtaaataagaatagataatcacaggcccaacgaacttaaagcctcgtttcttcaaatctttacttattttttcggatagttccgtcttagctggcacttctcccattccctgccattcattaataattcgctctccatttgtaaaactccaaatataattagcgaatgagccgaattctgcttggactttttgtgtagctagggcattggtgcgaactgctttgactttcaaacggttcttcacaatggccgcttctgaaacgatccgcgctaaatcttcatctgttaaccgagcacacttatcaatatcaaaatgaaaaaaagcttcttgataggcttttcttttatgtaaaattaatttccatgacaggccagcttgtgccccttctaaattcaacatttcaaataaataagtatcatccttactcgggacgcaccactcgccatcatggtatgctagttcaaacgggtcattaatcgaccatggacaacgtaattcttcggacaaattgagttcctcctatatagttaaaatataatacacactaattaatacggctacaaacaaaccaatacaactccaaattatccgtttctctctccactgactaactgcaactgcgatactcaatgctaaaaataaaaataatagccagttcggaacatctgggtgatactcgcttttgaaaataagataaccaactactgctgcaattattcctgttacaaccaaacttatcttttgatacctcattcgctcaagcctcctatttaccaatcataaaacatacgttccctttttgcaagtgaaaataaaaaaagaagcgaacttatttgctcgcttctttttttggtaattattttaatttgccacgaaggaccattggtaaaatcccaccatgacggtaatagtcaatttctacttctgagtcaaatcgtgcaagtgcatcaaaggtgaagctagtgccgtcttcgcgaacagctgttactttgacaatatctcttggcgctacaccttcactgatttccacttgtaaactttctgaaccagtaaggcctagtgtatctgcatcttctcctggtaggaattgaagtggtaaaacacccatcattacaaggttagaacgatgaatccgttcataactttttgcaattacagttttaattccaagtaaattagttcctttggcagcccagtcacgtgaagatcccattccgtaatcatcgccagcaagaatcactaagccagtgttgttttcgatatattttctagatgcgtcataaatggacattacatccccagttggccagtatgttgtgtaaccaccttctgttccaggagcgatttggtttttgattcgaatattggcgaatgtaccgcgcatcataacatcatgatgaccacgacgagagccatacgagttgaaatcacgaatcgctacgccttcttcttgcaggaattttccggctggtgtatctttaccgattgcaccagctggtgaaatgtggtcggttgtaacagaatcaccaaatttaccaataatacgaagaccagataaagcttctactttgccagcttcttttgctaaattatcaaagaatggcgggttggcaatatacgtcgaattttcatcccatttgtataaagcatcttctgtagtttcaatcgcattccaagcttcattttcatcaaatacatgggcatattgctcacggaaaagttctggcgttacggtttcttctacaagcgccttcacttcttctgaacttggccaaatatcgtttaagaagacatcttcgccattattaccacgtccgattggttctgttaacatatctacgttcgttgtcccagcaagcgcataagcaacgacaagtggtggtgaagctaagaagtttgctttcacaagtgcatgaattcgtccttcaaagttacggttaccactgagaactgcggaaactagtaaatcactctcttgaatcgcttcttcaatttcttcttttaatggacctgagttaccgatacaagttgtacaaccataaccaactaggtcaaagccaagtttttctaaatatggaagtaaaccagctttttccaggtagcctgtaacaactttggaacctggcgctaaggaagttttgacgaatttgggtacttctaagcctttttcaacagcttttttagcgaccaaaccggcgcttagcattacgtatgggttagaggtattcgtacagcttgtaattgctgcaatagcaacggaaccagttttcattgttgattggtcactattgccaaatgtaacagttacttctttgtctaaagctgatttatcaagaccgaaaccttggttgcctgctttcgctgtaatggattcacggaatgtttctttcattttcgaaagcggaatcaaatcttgtggacgttttggcccagctagatttggctcaatagcagaaagatcgatttccactgtttgtgtataatttggttctactttttctggtgtaaagaataaatcgtttgcttctaaataagcttctactaattcgatttgttctttgtcacgaccagttagttttaaatagttaagtgcttctttgtctaccgggaaaaatccgcaagttgcgccgtattcaggagccatattggcaacagtcgcgcggtcagctagtggaagggttgcaacgcctggaccataaaattcaacaaatttccctactactttttgttcccgcaaaacttgtgttactttcaaagcaaaatcggtggcagttgcgccgtttggtaaagcacctaataatttcacaccgataacttccggaattgggaaataagatggttgtccgagcattccagcttcagcttcaataccgccaacgccccaacctaaaacgccaataccattaatcattgtcgtatggctatctgtcccgacaagggaatctggaaacgctacaaattcgccgtcagaaacttcattcgcgatgacgacgtttgctaaatactctaagttaacttggtgaacgataccagttgcaggtggcacagcacgataattatcaaatgctttttgcgcccagtttaaaaattgataacgctccatattgcgtttgaactctagctccatgttgatttttagcgcttctggattcgcataactatcaacttgtaccgagtgatcgactactaaatcaactgggatttctggattgattttttctgggtcgccgcctaggtcagccattgctttccgtaatgaagctaagtcaacaactgctggaacaccggtgaaatcttgtaaaataacacgcgctggtttaaatggaacttctccttcgttaccattttttgaccaatgagctaggtcttctacatgtgaatccttaattactctgccatcagcttgtcttaatacggattcaagtaaaacacgtacagaataaggtaatttctcgatgtttgtgattttgtcctcttctaaggttttaattttgtagtaatgatacgttttgtcattaagtttaaatgatgcttttgctttttctttccaattagtcatccacgtttcctccttcaattcttgaaacgactggtctctctcatctattgtacttaaaaataagcgataagtaaacaaagagaattcgctataattcaataactttttcttataacaaaaaaatgaatgacaacgaagtgccattcacctttttttatagacctaaattggttaatgcttgttctagggagccaaatgattggagtttcgaaatattcgaaccaacctgaattgtgcgctgggcaaagcttggttgcataccagaaagtatcgggattaatccaatcaatttaaatgattgaatcatatcttccatgtgttttgttgcaaaatcatcttttaacacggcgctagaaaaatctattacgatgaagtctaaatttaacttatccgcagattcgattgctttttctttcataaaatagcctcgatcatcatctaaacttccaactattggcaacactccgatggaatcagtaatcggaataatacgcgtcgataattggataatctctttgcgctgagccataacttgatttctattttcttgcataaatccttcaagaagctgctgttgaatggatgcgagtgtgtcttttatttctaacataaactgaataatatcagcatccgtataaaaaacatcttcagtttctttccatttaagtaagctgtttataataaatttatcaatttcgctcatatgttgatggatttttctaatgtccgttttgtcattgaagcgtcttttaccgatgttttcaaaatctcgttctttcactcccgtaatgacatcaataatcatgccacacgatgcggtacttagtgagcgaatagattgttcatcctcaccagcactaagcctcaacttatactcatccgtttgagtataataattatcgtaaaaattgttaactacctctgaacgacgactaatcaaaaattctttaatttgcataaacttctcctttttcaccgatactatctcgcaaaaattaagatgttatctgcatgtaaattttcaatcattttatcaacctgttcttctgttaagtcgaaatcttctagaagttttttaacagatttatcgtctgtttttgagaaccatttagcaaaaggtcctgccgcatatagggcgccgtatttcggattataagcttgtggaataacaattgcgccactaagtgattgcagtattccagagataatgccaaacgcctcttcattaactggacgttcgatttcaatattttctttttccgctaatgtttcgagatttttattatgtttagatttagctaaaacagaaatatcttctttttcatagccctcacttactaacttgttgataatttcctctgctgcgcctacattttgaactgcgaatacttcccactttttcattatttgtcatcccttccattatccaattgtaaaatttgtttaatttcttctgtgtttaacttacctagcatttgttcccctggttggataagttcatccacgagcgcttgttttttcttttgtaagtcaaaaattcgttcttcaatcgttccttttgtaatcattcggaacacttgaacgacacgtttttgaccgattctgtgagcacgtcctgtcgcttgttcttctacagctggattccaccataagtcgtataatatcaccgtatctgcacccacaagatttagcccggttcctcctgcttttaaagagattaggaaaatatcattctcaccttcattaaaagcattaaccatatctaatcttgttttagcaggcgttttaccatccatatagaaaaggggttgaccatcttcttctaatttccggcgaataatcgcaagcataccagtgaactgagaaaaaatcagtattcgtttgccgttttctcttgctgtctgtattgtatcaaataactgtagtaatttaccagattcaccttgataattttcgacaaaaaggctcggatcacagcaaatttggcgtaaacgggttaatcccgcgagtaatttgattcgttcttccgaagcattgccattactttcttctaaatcagcttgaattttctctaaataagctaagtagattgttttttgctcatcggttaattcagaataaaggtttgtttcaattttatcgggtagttcttttactacgtcttgttttaatctgcgcagtaagaacggacgaatcattttggcaatgttttcgtatggtatttctttgaatttgcgtagcgatgggaaaaatcctggcattaatgtttggaaaatcgcccataattcatcaatactattttcaagcggcgttccacttaacgcaaatacatgatttcgtttaagcgctcgcaccgcttgagatgcttttgtatggtagtttttaatggcttgcgattcatcaataatgacacttgaaaaagctacatcagcgaaatgaataatatcttgacgtaaagatggataagaaatcaaataaacatgaccgtgttttatctcttccatttctgccatacgagcctgtttcgttccatgtaaaacagtcacagggatttctggcgcaaatttttctaattcactttgccagttgtagagcagtgaggctggtgtaactattaagaccggttttaagttcggattctcttctaattctgatgccaagaagctaatcgtttgtacagttttaccgagtcccatatcatctgccaaaataccaccaagattatatttagcaagtgatttcatccattcaaaacctgttaactgataatcacgcaactctgcttttaatccttttggtaaactaaaactgtcttctgattgagtagttatgtctgtcagtagttcacggaaagaacggctgaatttatgatgttcatcttgcgttcccgcccctaaaatatcgtaaatttgcatacctcgataaagcggaacttgcatattcggctggacatcttttttacgcacttctaacatttgtagtacgtcttccatttgtttatagttttccgattcaagcgataagaaacgtccatttttcagacgatgatagctacgtttttctcgcaatgattctaggacattttggacttcttcttccgggatgcctttgaaatcaaacgaaacagaaagataatcattatctgaagaaacatctagcgttgtcacagggcgcacgttgtcttctaccatttcttctaaaccatcttccatataaatctccgcatactcggcaagttttggaatggttcgatagtaaaattgatataaatccttttcttgtttattaacaaccatttttgttcctgaaaaatgaacaggagcgctttcgataatattcatcacgcgtgcttctttttccacatcacgaatcatgattttttcgttttcttcttccgtaattgcaaatggatcaaataattgattgccataatgatattcaaggcgtaatgtatgctctccgtattccaatgcaataaataatttacaatcaagtggttgctgtgtaatccggtcttcaatcgagtcgtccagtttcaacttaccacttttttgtaaagctggtaaaacataggaaatcacttcactcaattgcgactccgaaaactgcaccacttcatttttcgtaactttgtgaaactcaattaacggttttaaagattcccaaacttctttaacaggaatgaaaaaagtaccatcaaagaaaagtaactgataagcttcgaaaaagattgcttgttgtaagtcttccatttctagttggtatttgtcatccgcactttttttaagttcaaaaataaagtctaggttatcgcggcgaacgttgatgccgcggtatttaatatcttctacgcgttctttcataataatacaagtcgtgtcgcgctcagttaagagttctaatagttcaccagccatactaggtggaatagttagatttttctcttccgcataggattttgaccagtagaaagaatctgtatcatacatcttggcaatttcactgatttgaagtaatttgtccaaaatttgtttgtcttcttccaaaaagaaatgctcgtttggatcataagcaaaattcttagtaaatacaagccactgccgatcacgaatcgcagctaaaaacgtattcatattttttactacatatgttcgctctgtccctactttgacttcaattgtcataatataactagaatcatcgggttttaagcgaatgatatattgtgtttgaagtggtattttattagtaatatcctcttccacttcaagttgttgcgccatattttgttgaaaaagggaaagaagtgtatttgattcttgtgtgagaattcgatttttaaaatcttgtttggctgctttttgtttttctttttccatttttaaatgtgtcgcgtagatatgtttgcaaatagcatttagctgaaaatcggcacagctacaagcataattttcactaccagcatcttctacgacattttgatcaataaaataggttaaaaaatggtctgatgcgtctttttcacgaaactgaatgatttctccgtcttccatcagtttttttccagcctgtttcacactatatggaatcattttattttgaattgctgtaaagtgctccattactttcttcctcccaaaaccgtccattactctaaactactattatataggaaaagacgagtgacggcaacgcaagcggtcttttagctattagcagtaataaatttagttgtacttccgtgattagttgcagttacttctaaccttgctgaaatgcgttcttttagctctggcacatgggaaataatcccgactaagcggccgttttcttgtgtttccagtaaacattctacggcgacctctaatgactctggatcaagcgttccaaatccttcatcaataaacatggtttccagtgaaattccaccagccatttcttggacaacttctgcaagcgacaaagcaagtgctagcgaggttttaaagctttctccacctgaaagtgtttttacatgacgcgtcagccccgtatattcatcaaaaacttcaagttctaacccactttggacattcccttttgctttttcgatttttcgcttgagttcaaaacgtccgctagtcattttagataaacgatgattagctcggtggataatagtatctaaaaacatcgctaaaatataacgttcaaatgttagccttctagcatttttaccacgagctgagtctgctaataagccaatgtccgcataattttcttctgctttttctactgcttgaatactgttttgatagttttcggcaagttcttttcgtttcaaaacaaagtcgcgttgtttaattgtgttttcttctgactgagcaagttctaattgtttttcggtcataaatgattctagttgttcgatatttggtttttgtttgtttttcagtttttctgttaaatcagcttggcgtgatatagctaaatggcgtttccgctcaaagtcagctagttgttcttctttactttttagttcttctactgacattaaagcttgtttataagcctcataagtaggaaaatcattttgtttcattgactctttaaaaacttcgcgttggacttgtaatgcttctttagcgtccagtgttgtgttctcggcagattgcaatgttgattccagcctagttgtttctttttcagcttctctaaatattttatccacttgttcggcttgttccagatgcgttttaatgctgttacttaattcattctttttcttatcaaaaatagttttatctcgtaaatcggctggaattgcttgttctaaatagcttagttttccagatgagagttggacttcttgatgaaaactttctacttgaagagccgtattatttttttctgtttctagctctttttgtttgttttttaatgtttcaagtgcgccttgaatattttctttttgcgccacgttagtttgcaattgatttatttgatctgttaggtttttagctaattggcggttttctgctaataacttttctactgcaactaagtccacatctgctatatccgcccattcagctaattgccattcaagttggctgattgatttttcaacctcattaatcgctaattgtttttcatgtagtttagcttttgcctcttctagcgttgtgaggctggctgattccccgtattctgccaattgtggatgtgacacagatccgcagacaggacaagcgtcaccctcgtgcaaatgagctgcgagtgttgcagcttgttcttgttgtaaatttgattcttcttgtttaatcattgtttctatagctaatttttctgttaaaagttgttttagcgtttgttcttctgtttgtttttgtttattccatagatccattttcattcgtttattaacaagttcttgatttttttcaatgagagcttcggcagttgttcgtttattaatagcctctaaaatcgctagttctgcttggttaatttctcctaaacgagtttccattgactgtagttctgctgcgatttcctgctctgttttcatcactttttctaaacgatccgctgcttctttccaattaatttctgcgcgtcttttttgaatcgttactgtttctaattcaatgatttttggttccatttcttctaattgaaaaagtgtgcgtttgttagcttctagtactgcttcttgttcggcgagtgcttctttttgtttttttgcatttgaaaattggtttgttatcaactctacttcatgcgctacttgtttttcagtatttactgctgtttctaattgttcttttaaacggatacaaagcgcatcctgagaacgcaggttactggctcttttagctgcttcaattcggtttgctatcacttgataaaaatctttttcagcttctaatttagctacttcttctatatataaatctaaattttgccaatcaagcagttgttctttcgcaagagtcactttttcaaccgcttcacttgtttctttacgaatgatgcttaaagcactttctaactctgctaaaattgcttgttcttgcttgatagcttctgtttgcagcaaactaatttcagttgttgtcttgccggttatttctattcctggcaagctgagttcggcaagctcggcgactttttttctcgcttcgacaactaaaatttctgcttctttttgtttttcccacagcaaattttcaactttttcatagtacacggtatgcgctaatcgttgcaaaatcacttctttttctttactatccgatacgagtagttctctaaattccccttgaggaatcattaaaatttgtctaaattgatccacattaagttgaattaattcttccattttcgtattaacatcactaacggaactcgcaaggagcttcatttcatcacctatgagttcgtataattcagctttttgaggagaagttgtcgttccatttcctcgttgtttagcaatttcttgttgaggaatacgactgatctgataaattttgtctttcaatctaaacacaagcgttacttccgttatttctttgtccgtcgcaaaatggctgcgcatggaaaaactttcccgatcgaatgtgtttgcttttccaaaaatcgcaaagctaattgcatcaaaaatagtggatttccccgcccctgttttaccagaaatcacgaaaatttgttccgttcctagtttttcaaagtcaattacttcttttttggcataagctccaaaagcttgcatagttaattttatcggtctcattcagtatcctcctttcgcgcttcttcaaacacatctgctaatttttgtcgttgcgtctccgttaatttcgtaccatttacatattcaaaaaattgcccaaataactctaaatcatcttttttcatcatttcttcaaagttatcttgcgtttcttttaaggtttgctttttacgttctaaatgtaaaatattgggataaaattggcgcaatttccccattggatcaattaaagcaccttcatccattaaattaacttgaaagaaatcatttggattttccactaagttttctgtaagttccgccagtgttccagaaataatgcgcatatcatgtttcggcgttagaaatcgctcttttacactaataagttcatttccctcaatttctacaatgcgcacacttttattatcctttgtttctgaaaaagaatattttaacggcgatccgctataaaaaatagcaggatgattaatcgcatgcgggtgatgcaaatgaccaagcgcggtataagtaaatccatcaaaacagttcgttgaaactcggtccacatttcctatcgcaagttggcgttctgactcgctaggaatcccgccagaaacaaacgcatgtcctactaaaatttgcgccttagctgggttccattttgttcgaatttgtttcgtcacggcttgcatagcgtcctcaaagctacgaatagaactatcagccaagacttcacgaataattgccggctcatgataaggcacaagccacacttccgcatccataaacgaaattggttcaaactgcgaagtacatttccctttcatatatagcttgctgctttcgtaccactgactgccaaaagctagtcgctctgcactatcatgattaccactaatcgcaaatatcggaatacctagttctacattccatttcactaaaatatcatttagcactttcaccgcatccgcaggcggtacagcacggtcatataaatctccagccaaaataagcgcatcaacttgttcttcctcggcaatcttcgttatttgtgccaaaatatattcttgctcagctagcatcgatacgccagatacaattttccctaaatgcaaatcagctgtatgtaaaaatttcatcgttttcctcttttctttttctcagagattatttatttttaatgcaaaactcgtcatttttaagtatactagatatagtttaaaaaaataactagcaatattgggagtgaagaagttgttttatcatttcgcaaaaaacctcgttcattttattttaattattattggtggacgatttcaagtacaaaacaaagagaaaattatcgaagcgccttatgttgtagtttccactcatacgtcttggattgagatcttatatcttggtttcgctttgtcgccaacaccagtacattatatggcgaaacaagagcttttcaaaggaaaattcctcaactggctaatgacgcaccttaacgctttcccagtcaatcgtgataatcctggaccaagtgccattaaagctcccattcggatgcttaaatctggtaaagtagttggtattttccctagtggtacaagaaaaacaaccaaccttcatttaaaacgtggtgctgtaactatcgctcataaagcaaaagttccaatgctacctgctgtttatgatggacccaaaacatttggagaaattttaaaacgcaaaaaaatcattattcgttttggcgatccggtattattcaatgataccgaacttgaccaaaaagagctactagaagttaagtctcaagaattaatggcgacatttgaacaacttcaaaatgaaattaaccaaacaaaaaacaaataataaaaaagacagcttccatttggaaactgtcttttttattatcaggaagctgtatcagttgtaatgcttgaaggattaagtccagcatcttttaatacgccagcaattgcttcgtccgcttttgccatcgcttcgtctgcttttgttgtgtcacgaccactagctttaagtgcatctgcttctaatttataagcatcacttaattgtttcacagctgctttgaaatcatctgtgtatttacctaggtctggtgttttttcactagcaagtgtttcagatactttaagtgctgattcactagctggttttgcaagagcagcaaggtctgcttcagatggtttaggatctgcgccaaccgctcctacataagcgttgtaatcgccattgttttcattaataacgtctactaagtccatgtaataatttaatacgtcgtccttaacgtttgatgtttctttttttgtgtcttcttttttgtcggaactattagaaccggaacaagccgcaagcgacaatcctagtgctaaagttaaaactactaataaccattttttcaagatgatgtcctcctttttttcaagccaaactcggaagcccttttgtaactggccgcgtcagtctcggatatgcttcacccatccggcaagtaacattactcacgatgtaacattattcattataagctattcatactagataattcaagctgttttggaaaatgctttcactattattcgtactcgccactaacttctactttacctagctgtttttccgtatttttatattggaaatacataacgattcgccaaggcacaatcattgcaaacgccataatccagaacataccagataattcgcctacttccaaactgccgctaatccaatatttaatgaaaatccgaataagcaataatcccatcaaaataaccggaaaagctttcgtgcgtttaataaatacgtatttatgacgaacttcgaattttgtagtccaaattaaaataacagaaaacactagccccatggcaattgcttctaaaatatctactaccgaaacacggaaaaaaggaataacaaacatgagtgcgcctgtcgacatcataattggcggtatgataatccctttcacacttgctggacgcttcgatgctttcattcttatcatgataattccagccccaaaaacaagtgtaatgataattgaaatgactaatgacacgattaattccccctacttatctgctgtaacacttcgctcctcattatattccttttaccgcttgaaataaacttctctgcttaaagcgcttcgtctaaatccattccgctattttgtaattgatacattgagtgatatacaccttgttctgcaattaatgaatcatgtgtaccacgctcaataattcgccctttagataaaactaaaattaaatcggcatccttaattgtcgaaagtcgatgcgcaatcgcaatcgttgtacgtccttctctcattcgttttaacccagtttgaattaagctttctgtttctgtatcaatatttgccgtcgcttcatctaacacaagaatttgtgggttcgtcacaactgttctagcaaaagaaatcaactgcctttgcccacttgaaaatgaagcacctcgctcaataactttatgttgatattgatcggataacgtttgaataaaaccatctgcttgaacaaatttcgcggcatccacaatttgctcatccgtaatgtttttatcataaagacgaatattcgtgttaatatcgccataaaacataaaactatcttgtaagacaagtcccgtcttcttacgcaattcagcaatttcatgggatttaatcgacttaccatcaattaaaatatcgccacgctcgaattcataaaagcgcatcattaaattgataatcgaacttttaccactccctgtatgaccaactaaagccaccgtttgaccaggttctgctgtaaagctaatatttttaagtacatcacgtccgccttcatacgcaaacgaaacatctttaaactcaatttttgcacgagtaatttttgcttctggatcatttaattgagctgggacttcttctgtttcatccataatacgaaatactctagacgctgctgtgatggcttcttgatacatagccaaacgttccattacgttataaatcgcttctaaaaaccgatcaaaataactaacaaacgcataaattgtcccgatagctacaggaccagttaaagattcagccccgaaaaagctaagaataatcacaactgctagcgcgtaaatcaagtcaatggctggcccaagtaatagcgcattaaatttaatgtttttcattccaacatcataatagtctttgttgatgtgctcgaattcttttactaaacggcgctcttgattaaattgttgcacaatcgacatccctgaaatcgactcagcaattttcgcatttaattggcttaatttttctcgtcttgcccggtaaaactgggaactatatttccggtaaacaaaaataataaagacaataagtgggaataacagcaagctataaagcgctaactgaacattgagcgcaaacatcgccgcataaatccctacgagcataaacaaactttgaatcgcagttgaaagcacattaataaacatatctttcacagcttccgtatcatttgtcacacgcgaaacgatactcccagcaggcgttttatcaaaataacgcatgccgagtgaatgaagcttcgtaaaaatgtcaatccgcatttgctgcacaatttcaagcgcgattttttggaaataaagcaattggaagtaccacacaatggatttcccaattgtcagccctaaataccccgctcctaaaattaacaaagcttgcatttctaaattcattggcgttaaataatcatccaagaatattttaattaaaattggcgcgaatacatctgcaagcgttacaagaagaacaagaattccagtccaaatcaaacttggaatatgatattttgtgtaactaagcattcgctttaatactgcacggtgttctttaccggacatcactaacatttcgtcttgttcattcatcacttccatcagccgcacccccttctcctaaagcttcctctagttgttgctcatggaacatttctgcataccagccatctagcgtcattagctcactatgcgttcctcgttccacaattctccctttatcaataacaataatcaaattagcatgttccacagagctaagtcggtgtgcgctaatgatggttgtcttatcagaacgattctcttttaaattagatagaatctgttcttccgtttttgcatctaccgccgaaagtgcatcatccaaaatcagcaattctggattcataattaaggcacgtgcgatggcaagccgctgtttttgcccaccagaaagtgaaactccgcgctcgccgacaatcgtatcatacccatgttcaaacccaagaatatcttcatcaacggatacaagttgcgcgattttgctcacttcttcttgaggtgcttctggtttcccaaaacgaatattatcacgcacggttgttgagaataaaaactgatcttgtggcacataaccgattgcttctctcaaagctcgtacagtgtaatcttgaatttttacatcagcaaaagaaatttcgccatcgtacgtatcatattctcgcattaataattttaataacgatgttttcccagaaccagttcgcccaacaattccaagcgtttcaccagattttaagtcaaaaccaatctctgacaatacgggttcactttcatctggatacgtaaatgcattaatttccacatgtaaattaccttctggcgtaacatctactgcatctgcgtgatcaattacatcttctttttccgcaagcaaatgctgcacacggtcgtaagaagcatttccgcgctgaatgatattgtataaaaatccaaatgctaacatcggccaaatgagtaagaataaatagtttgaaaaagcaatcacttgtccaatagtcaattctccgtcaacaacgaatttagctccaaaccctaaggaaagcacaaaggaaatccctacaataatcgaaatcattggatcgaacatcgcatccactttagcaaccgaaatatttttttgaactacttcttttgtttgtttggcaaaatcttgaatatcttctttttcttgcccaaatgttcgtgtgactttaattcctgaaatactttcttgtgttttatcatttaacatcgaaaaagcagcttgagccccatggaaacgatcatgtaattttttacctaaaatcgaacttccgagtaccataaacggcattggaagtaatgcaatcaaagtaaggcgccagtcaatcgtaatcgccatggttgcaataaccgttcctcctgttaacacagaatccgataatgtcaaaacaccaattcccgccacttgttgaatagcggtaatatcattcgtcgcatgtgccattaaatccccagtacgataacgttggaagaaaaatggtgacatcttcgtaaaatgttcgaacagtcgtaagcgtaacgtccgttgtaatttgttatcagaaccgaaaatcaacatccgccaaacgtaacgtccaacgtaagcaagaacagctgctacaacgagaataagcatccatttaatcaatttttcttttgtcagtgagtcatttgtgactgcatccaccgtgtagccaattatttgcggcggtactaactgcaaaagcgcaattgtaaataaaattgttaccccaaacgcataagacttccaattttctttaaaaaaccagcttaatgctttaaaaattttcaaacaactatccctcccttttttccttaaatttggacaaataaaaataatggacctatttctgcccattattacccgaaaaaatatatttatttgtcaccactttgtataaaataaaaccaacttaaaggagagttcccatgctcgcgaaatggtccggtgaaataaattctatttttaagcgcaataatgccatgtttgaagtcgtaatataattattcatcgtccattcctcctttgttttattatgcaacgatattagtttaaccgatttcatttgaaagcgcaacaaataattgcaaattgtttaaaaattatttgtatttcgggattacttttaagaaaaaatacagctatatacaataaaagcataacgatacttagtaagcaccgttatgctttttgatcatttctatttagttttcttctattttcacttggttttctacggcattttcatatgtttcatattcttctgtttgcgtaacttcttttgctgtatcgatattttttgttttttcatcgaatgctattgtagagttaccacctgaaataagtaatgaaccatcatcttgcgtataagcagtaaaaatataaatttttcctacatctggcagtatgtcatcttcaaatatatcataggcagaaccgtcctctcgaataccaccttgtttggctatcgcaagttctttatccgttgccagttcattttttaaattagaaataactttgattttataatttgtgtaggcttctccgatatattttaccgaaccatcttcttgttcgattggcgttttatttttataaatagttccgctctctcctgttacttttccgacaaacacataatccgcatcaccaacaacttcatttggattatcgatatttagtgtatagtctgaatgaatggcataagttggaacatcttttttctttggttctgttttttctgcatatgtacttactgttagcaagcaaccgatacctaaaattgttactgttgaagcaattattcccatagttgtctttttcatcttaagtacccctttttaatattttttatatgctgcatcataagatcttttgtcgttcgtagataagctcgtcttggaagtactatattggtacatcacatcagaggatgcattatgagctaatcgcaaaccatgacctaattcgtgtgttgctacattttgcttaccagcattattttttttatccatattttttttgttaaaagtaatttttccattgctataagtagtagcattaacattgttattgacggaaacatcactgcaataaacatcagatttattctgcgcagaagctggtctaattactccctttttataggcgttccaagtattggcccctgatcttataaaagacatatacttcgaattacccgagtaatctaaatgcttactactatctactaaatcccatgtaataattttagctgccgcactcgcttccacacttggcataaccatactccatacgcaaataaatgctactaacaatgataaaattttcttcattctgtgtcgctcctctttgtaagtaatttttcaagtgaaacagtaaacatattagttaatacgtatacctttttttcttcctaacgtgatgaatactcccccttttctctcaaactatatcataaaaataggaaatccctatttaaataataacaagctttcgtacgtactaaatttttaaaattggctcgagtttctgggcttttgtgctctaaataccttttttatacaacagtaaactccgaatccaacgaaaaatccgatgatatataatagcaaatcggttacatcaaacatccccacttttaatatagattgcaagctttcgattactaaaatcaaagtaaaaaaggcaataaagcgctttagaaaatcatccaaaaatggaacaaagcttagcagaaaatacataggagtgaataacactaaattaattaaaagtacggaccacgaagcttcattaacgcgtaaatcttccaaaataagcatcacattgacattaaaataggactctaaagatacactatcatcaggtcttaataagccgatagttaaaacgaataaatacaataagagtaataaatatccatcccatttattttgaagcttaaaaaccattttgagtaaaatgtatagtgtgaataccacaatcccaaaagctaaaacatttttattcaagctctccatattgccaaagtacatgggtaagatattataaaatatacggaaatatacaataaaagctactagcaaactaagtaaaaataaaagtaatttataaatatttcttttaatgttcgtcatccctttttccaaccttgaacgcctcatttctaaactttataccctccaaaaaaattgtaacatggatagcgaatgtataaccaaaaatgtaatgaaatagccgattcttgtcatgaacgactaaaatcaggcttaaattagaattattattacactttttgaaacgaatcgtctatttggtctattatttcaccttattttgagtgtatttcactattttatgcaaccaacgttccaaatatgacaaattgttcaaggaactggatttcgtggttaagaaccaataccaaaatccctttatatatataaattcttatatataaaatgtataaatattcatccgtagtatattaaaattctcaaaaaaaagcctcgataattaaatcgagactttttgtttataaagtgataataatacttgctatcataatcataactccaaataaaaatgcgataaaaaaaccgaaccacttttctttataggcaccaattgcagaaactagataagctaataaataaacaatttgtagccaaagaggtgaatctaatccgtcttttgtttgaatcattgtccataaacaatctactaaaaataaaataaataaagtaacaaaaataaacttgatgatttttttcatgctgttctcccttagttttattgtaccttctaagtatagcaaaaaacacacgcaggataaactatctaaataaatttaaaataaaaaaactcctgcattccatatagggttgcaggagtttgatattcataaaatattacttattttttcacttggaacataagaagtttttaaacatgttggtacaacaacaattttggagttgcactagtttttatcccacaaaaatcccacaacgctttttattgatatgatactatatgacattatatgacgagtttcttctataatatatagataaatcatcacgccttttatcacaatcaaaaatactgatctaagtattctttataaattgtttttaaatcaatatcattcttttctactttcttacaaaacgcttttaactttttcgtttcaagtatttcagaaaaaattttctctaccgcacttttcttcccctcaatatagcaaatgtatttaaaatcattaaagctatatattctcatgacataatctcacaactaataatatcgtctaaattaatatcaattattcgctcgtcaaagcgttcaagtgatacaatgtgttttttgttgtcgatgtatacaggaactacatacttgtaacgcacatgatgattattctttaaaaacagtacttctattgaacaatttctttttaacgcatctactaacactattgaatgttctaaaatatcatcaattaaattatacatgttcttcacctcttgttaacattataggaacaaacgttcttgaaatcaagtggaaaagtaattttttagtcttgtaaatttaaaacgcttatgtaataatattcacatgaacgatactatcgttcactcaattatttcattcatctcatttagctgtttgacatccctttaaaaataaatgaaaataacagcaacctcgaataatttttcggggtatttttttattttaaaataaatttaataaaaccattgactactacggttattcgtagtataatatgtatatagtaaaggaacgggaggaatacacaatgtttaacaaggcagaaattatgaaacaagcttggaactggttcactgatagcaatgtttggttaagtgatatcgaatgggtaagttacacagacaaagaaaaaactttctccgtatgtttaaaggccgcgtggtctaaagcaaaagaagaatttaaagaagtagaaaaagaaatcaaacacatctctaaaagcgaagaacttaaagcgtggaattgggctgaacgaaaattaggcttacactttaatatttcagatgatgaaaaattcactagtgtgaaaaatgaaactaaaatgaatttcggtttaagtgtttgggcttgtgcaatgaaagcagtcaaactacacaatgacttgtttccacaaactgcagcttaaaaaattataatatagaaaaggaatgtgattaaaatgacagtaacaacagcacaaaaaagatattatgacgcgatgaatgaatttgaagcaattaccagtaaagaattagaacaaacaccagaattttcgcaggatttacttaatgactctgactacttagctgttacaaaaaatgaagcgtatgcagtagcactttgcctgctcgatgatgacaagctatatttagatgaaactttagttcactcgacacgtttggatattgaagatgaaacttattatattaactttgtagtaactaatgaagatgattttaaactagctacagatgaagataaggaaaaacacgataaacaagaagtaattataaaaagtgagttgaactaaaaatatgtcaataaaactattagatgaattcttaaaaaaacacgatttaacgaggtatcagttaagcaaattaactggtatctcgcaaaacactttaaaagaccagaacgaaaaaacgttaaataaatacactgtttcaatattacgagcgctagcgcttatcaccggtatgcccatttcggatgttttgtttgaattagaggacttagaaaaaaacgcggatgatctcgccggttttaagcagctgttagatacgcataaactctcctttcctgcgcatgaattcgaattatactgcttaatcaaagagtttgagtccgtaaatatagaggtgcttccttttacgtttaaccgatttgaaagtgaaactcatgtagatatagaaaaagatgtccgaaaagcgctggaaaacgctattacagtgctgaaagaaaagaaaaacgaatttatataacaaaaaaagaccccctagcgctaagctaagaggtctttaaatttatttcaagaagtaattcgctgtgtagtaccagccgtctttttcgtaccagagttccaaataacctttaccgttattgtaccaagataatttcgtattaggcgcataccatttgattttacctgagtttaattttgtgttattccaaactggaatgcgtagatctttcgcgcttttaattcgaactttgatgcgaccttttgcgtcttttttagctacaacatcgcaaaaactcttatacatgtagtataatttgtcatcaatataagtcttgtaccaatactgattgtgctcatatactaagaactcagttcccgatttatacatccgcgccggatttgatttaaaatccgtcttcggcaatagtggcgcactgccaacgacctgtccgctgtgcctattcggatttttagatgtaatacgattgtactcatctataattgcttgttgcactgctggccatcgtttatcatcaaggatacgatgtggacaatacttaccggaccagtcttgatgttttttaatagtatcttttgaggcgataatatcttgttgcacgcacaatccagcgacatatttaatagtatttttttcagctgctatatatttagctcctccagacttactgtaacacgtctctacaccgattgtatttctgttaccgaaaccattggcaccatctccgcagtgccaggcattacgattgaaaggcacgacttgaatagcttctttatcatcaactgcgacgtggaaactaacttcattattgttgttcttacagtaatcggtctcgttttgcgatgaagcattattatacgtattgtgaatagtgacttttttgggcttcatagtattaggtgctttgatgttatactttgaacttgagactaaattttgcctaaagagtaccccgttaactgtagtcattcttactccaccccttcgatttcattttctcggaatccttgcgttattctttcgtcattaatataaaaagagacaaagaataaatctttatctccttcaccacgaactgtctttgtgattattcctttgtacttacttttatcaatgatgtttttagctgtttcatctagctgtttatcattctttacgctatctgtatcaactacttttactctttgccctttactaaatttcattattcctcatcctttctatttctattaagaacaagctcgctatcagctgtcccttctgtggtagggtcgttaactacacctaagacacctagtagcaagaacactgaatttacaaaatctaatgcttgcttgttgactgtatctgcgggaattgtcacaccaaaccagccgagcaattgctgcgctaagactagcacaagtgggataaccgatacccaaaacactttcgatttcattcgtactttccaattgattttcatgatattcctcctataaaactaattcttgcccaacttttaatttataagaatctagtttgtttttttctgctaattcaccaacagatacaccatgttttgtagctatccctgctaatttttcatcttgttttactacataagttttttcagtttgaacttcgttatttgtagtttcttcatgtaacactgatgcagatttaacttttttttgcttttgctccgacatttagttcacctccctcaatcatttaaatataaattgtccccaatcccagcttagaattccgcctaaaattatccctataagagctaaaacagaagttataatttgcacattactaaacttcttatgtttctcctcagactcttcatcacttatactttttaaagtattatcgattgagtgcttcacgccggcgatttctaagtcatgttcgtgcaactgctttgttgttgatcgcgtatatcgttcaagtgtgtccgccatcttctgcgtgttttgagctgtctcttttgatgacgtgaccatcggaatcaccagaactttcagttctactacttcctcaccgattttatctactttgctctcaactttatcgacttttcttgacatctctttttttatatcaattccatgctcaaataactctgctctggacacataatctattttttccttttcgttttccataattccaagccccccattaccgcaacaaatagattaaaacatgcgcttagagcatagcggctgggcaataaatttgtaacagcactctctgagctcgctgctgaatataagaacagcactatcgcacctattcccccgccaatcatcaaatttataaatcttgcatttgattcttgaaaagatgcaattagtatcagtgcagcacttaaaataaacaacaacccccatgtgtcaattgtcataagattgtccatcagttgatatgtcttgcttttttcaacaattttatcaccagacgtcatcaaaaaaaaaccagtcagaatattataaaatgaaactgataacaagaaaaacaacgcaaaaacttctttgtaattagtttcaagcatttgatctataaactttcgccattttgttttcattaccccatcgaccccttcgttacaacgattattactctgctaattcagcgcaatctgcgtcaattaacaatgcttttacttgcgcttgcagtaagcgtggtacttctttgaatgttttcttaccgttgagaatcaaattcaaataaatcacagccatttttttcacctccttcaataaaaatttacctataaattcgcttcgtacatgtctaccatcgccagctgtgtgtcaatcaactgctgttctaatttagtattttgctcgtataattcaactagtgcttcttgggtcgttagtaattgctcttcagtgcttaacattgcctcttgtagcgtcttttcatactgaaactctttttctttattttcgtcaaatataagttgattcgctttatatttataactggcaaaacctcgttggaaaaaggcatcgttttcgtctatatcaatttttttaccaggcgtacattcgcttgttgaatagccagttaaataaccttcgttatttgtagtaatgtatatttccatcttattcacactcctatgatatagcgtaaaatagcatcattcgcatttaagccacttgagtttaaatcgtgcccagcaaaagttgtatctgtaagatataatgttttaattgtgatttgagcgacttgagcattgaaatttgtagcgactggcacatttatgtttgctccggcatgcttatcaacaaaaaatttagggataaatgtaaagtcaaagttataattatttgcaacacttgctgatccaggtattacgtcataatcactccaaatgaaaatcaagcctaaattttgatcagaaactttttgactgttggcgaatttgtacgtatttccggaaggccaggctgcaccttcgaaaaggatattttgcgtattaaatcgctcttttattgctgctaacacactcgcaggagtcattagtttgttactggcaatacccgctttagcttcatccagagatgcaattccaaaattttctacatcacttaaaccaagttgagcttttgttacactgtgtggattatttgtatttcctgtatgatttattaaatctgcatttaatgcagcaagttcttgtagctccttcaatgctgtatatgtgctattaaaataccagttaaaccaatcggccggcggcttagtccccgccaaccatccgttttgaatggtactgtctggtggctttgttcccgttgcttcccagggtgctaaattcgcattaaatcgtgacataattatcgcctctctatcttttaaattggtaacttaaagtcatctgctggtgtaaataaaccacctaaagttcctcccagaatttgatcaagctccgaaaaaccgtcgtcgcttatctcttccgttgctccttttgcaaaagaaaaagaaccttctaaattgatgtatgctactctaacaccaccagatttcagactgtttactatctgtaaaaattgattagtacttaagccgactgcattcagagcagaaagaggaatctttttaataattatcgctgccggctcatgttcatctgatgaattagaatcgttagcattgattatttgaatatctttataattgcaatctaatgattttgcgattgcatggatgattttatttgtggttccgtcacttgcgtttcttgcaacttttccacggattaaaacacgatatacctcatcagtagctcgtcctctgttctggccaacattttcaccaaggttattcagtaccttcccttgcgcattatcaatatctcgccacgcctctgttttttcaagagccgtagttaatgcggaaatttgctgatctacaataataaataatttccctatgttactcttttctgactttgtaaaagcatctgttaatttccctaaaaaatctttaacggacatttattgtcacctcaatatcttcccagcgaatagaagcagcttcatcaatgttagccaccacatctgatgaagctaaagtatctgcactttttccgatttttacacttgcaatctttataccagctattttgtataattcaggataaatatatgaatgtattactgattctcccatgtttaaagaatttatataattaagcaccgcttgcttaatatcattttcgccgctttcttcaaattttgagtttacaataacatcaatacctgcataaatttgtagtgcagtagccctatcgtaataaactacatgctcaaaatctgataaatctttgactttgacagcaatattaccaactgtttgaacaccagctgccacgctgttaaaaatcgcttccccaatttcttcttcaattcctccaaaggcataaatatgcacagactttgcaggattatttgatgaatctacggtcatgctattattctcgactactgaaacacttcgaacacctggaacttggtttagtgctgttataattccattgattggaggaccaggacttgcttgcatcgctactttaatccttgctctataagtagtgtcattttctttcttcgatccaccagtagctcccagtgggttattaacttttaaaatatcctcactcggctcagcaactactgttattgtatttgcagctacattagctttatccgaataaatttgagatattgcttgtcctgaaccacggccattttcatcaagaatgatcacatcaatcatttcaaaaactatgtcattattagttttaaactggactccttcttcaataacataaccaggatttccttctatttccaaaacaactactgcaggcattgcaggatcacgcataatactattattactgcctaaccggtccaattgcactccaccagctgtaccgataaaaccagagttataaacacgttcagctaattcatttgatagtgctaagaaccaggcaatgattcttaaaaaaacacctaacgccgaatgtgcactcaaattgacgtcttctccataaagttcagttgctttaatttccatgtcggtcaacagctcatcaaaagtctttcttttaaagccattttcatcaagcatttaaaatcacctcttctatacttacaggaatatcatctgcagtcatttttatacttacgaatagcttcctatcagatttattaaaattaaaaagaacgctatctacactagatacacgctcttcttgttctgttatcgcagtaacaatatcttgcttaatatagtcaaagtttggcagttttgaaaacaagttttcataaaccaatccagaatcttgatcaaaataaaactcacctttacgagtcagcaaaatcaaacgtacagattgaataatatcttcaatgccatccgtcatcattatctcattttgttcaataagtaaatcaccatctgaacttattagtaaatctttcatacatcccacactcctacgacaacggcatcattgatgctgtgttgcctagcgctgtcagtcatgaaatctgcagagccattgatgttatctaattcgcaatcgcaaaatactacagctactatctttccttgtgcaatatcttcttcggtatgctttaatactaaagcatctaaaatcattgctcgttttgctccgttgggctttaaattcaatggttgcacatccgctcgtttgttacttgcatcataattaacgactctacacataagaagtactgatacacttgaatttactaatcgaataaatgaatcaaagaactttgtatcttgtgccacttagaccacctcacactgagttgtaaaagtagaaccatcataactatgtgtcccatttttaaccctaaaagtcccattagctgttttagattttaaagtaataattgatgctgtagcaattcgatgctgtagcaatgactgaaagctccaaccggaatagtcgtcattttccagtcgttctggggaagatatcagccccgtcccagaatttaacaagaatcgctcatcatcacctgttttaattgatctaataatcaagttaccacgtcgataataaattgcagctttacagtctttaacaatctcttcaataattgatagagcatcaccgtcagcggtatatccagatttataaattttatttgccggaagatttatttggtatattttaattcctgctttagaagcgactctttgaataattgattttgcggacgacccttttttaaaggtaatatttacatcttttttgtcttcataatctacaccttcagtgaatttgattgtcgttaatttgtctgttccactcggtacagtagatacttttgagatttttccgcgagataataaacctatatcacccttatatcctgctgtaacagatatagcagaacctttttttattttatttacagatgaaggtgctaaattataaataataacttcgcactctgaaggctttggttcatctgagaaaggtatactaaaattaagtttcaagctaccacttgcttcatttatttctcgaatcgtcgcatattctgatccattatcgatatacacgaatacttctcgcatccattgcattaaacatcgacctcgccttctaacgttggaaaatcaacattcggagctaattcgtcaaaatataaaaacactgtttttgtaaaattatcttttgtaatagatacttcttttcctgattcatctaaaggaacaatatctgctgctggtaatctgtcatctataacatctgcccacagtcgttcgtttaacactaacttttctcctaatacaattgcgttaccttcaatatcaaataaatcaactgaaaaaacgtcctgtgattctgcataattaatgccaaatagataacttctgctatcgaaatcaaattcaaagatttcaggaatattatcaagttccactggtatataacttctaatcgccatcacttaaccctcgctctcgcaccattcggaattctacggtctggccacttattccatttcctaagctgagcgatacttgtaccatatcgcttccaccacttccaataacagtcccctgatttaactgtcacgtagactgctgttgtttttttgaccggttgcttttttggtttcactggttgtttttttcctgaacttttctttttctttcgcacccagggcgtcgatgcgcgccttaaatctctgagcgatatcgtaatttcgaaaccattttttattgtattatagctttttgatagattactaattagtacgtttttgaaatatacacgtccccgaaatgtaactatagtacctttctcagcatagtcttttaaagtagcgtaatctctttcagcagtagctccaagcaaaaagccactaatttctagtgttttcgtttcacgttgaacgtgatcagaaacatttgcacctgtttcaacaggattatccgtaattgtaaacggagaagactcgttttcatttgtatttactaattttactgaacctaacgttgctaccattaatatcacacctctccaggagtataaattccaacaagtttttcgaataatttttccatttccgctcgaacagtttttcgaatagatgactcgctttcgctcgatccaccttcaatagtaatgttaatcgtgggattgaagttgattgttgttcctgaagagcttttatttagcatttgtttcgttttctgtgctgtatgaatcattccagggctatcagtttcaaataattccggaccttcctcaccaacaagaacttgtttgttcagtggtggtcttccgccccgtctgaatgctagacctttcttttccgcaattttagctacatcttccgatccagatgcttttttctttcctccaattgcacttccaggattaacaggagaaccatttgcatttacctgatagtgtacatgcggtccagtcgaacggcctgtgcttcccactaaacctattgtttgacctgctctcacaactgcaccactcgacgttaaaatcttggacaagtgaccataaagtgtttctactccttgtgcaaccttaattttaatcaggtttccaaaacctcctgcaccacctgcgaatgatactatacctgaatgttgcgccggcaacggtgtgcccgtaggtgcgccatagtcgatccctttgtgaaattcagatttaccaaaaaccacacgtggtccgtatccagacgtaaatctgaacggagagccgaagcgtggtccaaatgttcctccagtggaaggtcctaatccagaactagagctcatgtaagaacctattttatcttttacgtagtttgttactccattcccaaaatatttaactatacctccacctagcgcttgtataccttcgccattaaacgtattatttttcgctattaagtctttaacttttccaacgggatcagacatccagtcccacattgccgaggcaccatctcgaattgccccgccagctgcctgaactttatcaacgcttgcagaaacaaaatcgccaattgtgctattcccttttgcgaatccaggaagtatttttcctgctcccatgccaccagccataattttcttagactccgcatgattaaggatctttgttccaggtgctacagtggttatctcaggaccattttcccctagaattctcgcttgtgctgagttcttgttatatgcaatctcgaaaccttcctcaccagccataatttggccacttgcattattagaaccagtatagttcatagctagatttcctgattgggatgtagaatgatacgttttcttatcctttgcagataaactgttttcttgacttgaacctatgctaccgttcccaagcacaggtattgtcttaatgttaaagaacgatagtactttattgactccggtaattacattattaatgactttatacaagtttgtcttaaaactatcaaatactctcaacgctgtatctttcattccactgaaaatattaactgtcgcagaggacaactcgttccattttccgagcgctgcatcttttatactgttaaatgtttcaactgttccttttttaaattgctcccacttatttaatgtttcaccagtttcccaatctacttctcttaaatgtccttttgcttgttgctgagcttctcgcactacattatcgtgcatcttctccgcttctttaactacgccgtttttctttttcttcgcatttttcagcgcatcttgatattcttcttctgaaatttcacctgtgacaaatcgtttttcatcaagtatttttttagtctgtttatactctttattagcttcttttacggatgcatctctagcttttgcggaatttttaacaacacttgctgctgcttttgctgacattttttctttcgagttttctaagtttcctagtattattttttgttctttagctgaagcagtgagtgcaatagcagcttctttcctttgcttttcttcaatctttctaacttctttttcataagaacgtcgttcagaacgacggaactcaagtgttgttgtttccattctttggatttctttttcttcatcttttgttaatttccgtttctctttgctagctttctgtttaatagcattaattctattttcagcatttcgtgtaatctcttcttgccctttatagaattctctttctaaagcttttaattcttcgttattcgctttaatatccgctttatttattgatgcagtttcattattagtgtgtttctttgcgctagctgtatctttagaaacagccccaagtgctactagcttatcccaatctttatttgcttttgctgattttttttcagttgcagctattaactgatcagacattttatcatatgtttttatgttgttttcgagttctttttcagtaatacgacgaccagataccatgatttcgactcgactatcttgcattttctgctcatttcgtaaatactcgttcattgctttagcagagtctttagaaacacctttactgctcgcatcaattttgagcgggtcggcgactattgattttgaagcattccaaacagttttatgcgtgtctccaactgctttaatgcctttctttgccgcatcgatagttttatttattacatttatatttgctcctaaaatcggatgctcttcagcaattttgcttaagcctttccaacctgtcttgaatttatctaatatttttggtccttctttttgaacatatttccctaattctttacctaatgcagttccagcaaaagcgccaattgccccaccaatagctgtacctactccaggagcaatcatagttcctattgcagcaccaccagccataccacctaaagaaccaccaaagccaccagttttttcacctgcattatttttgttcataccaatcaactcagtagcgcttaatcctacacctaaaacacctacaccgctagccaacttaccgaatttacccatgcctttgagtcctgcagtagctttgctgaaaagtttaactttcccttttccttttcccccaggcaatacaactccgccaccgccattgctggttgttcctatagttgacatcgcaacatttgcttctgtcgcaccagccgcagcgctcggtccaatgttcaatagtttgctgttcatttttccaatagcaactgttactttatcgatagtatttttaactaacttaaaccctaaaaatccggctacaccaacagtcgcatacttagcaatccttttcatgctgtccggattttcacgcgtaaacttagtaactgctttaaaagcgggaataacagtagtgtttaatactatgcctaatcctttaaatgctaaaactccaccctcgatgaaaccgggtcccatacttttcgctaattctttcgcacttgggataaggtcttttttgaagaaatctccaactgtttcgaatacctcgaaagccggcttgaatttctccttcatcccctttacagctccaggaatatcagaaagttttttcgtgaaatcactcgcttgtataattagcggtgtaatgattggtagcaagaactgtccagcatttgatgctagctcttttactgattcagaaaatactcggcttgcgtttgcagcttgatcactagtgtttttaaaatctccatgcgcattagtagtctgcttcataacatagttataacgtagacgtactagctcatcttgtttcatgtcttttaaattaacttttgcgccttcgcttgttttagcttgaatttcctgtaatttattttgtgcttcccttgcttctaacgaatttttaccatgttcttttatcgcttcatttaatttcttttgtgctttttcacgtgcaatattttgctttgtaacttcagtgctacttttcgcaacttttccagcgcctgtttccagtgcgaattgttctaggttcgtttgagtcattacaatacctaaactttttaacgcttcagtttcacctgtgaatacgccgtttagggctgtattcgctctatcaatatcaatatttttaaatgacgctaagtttccggccaagtcgaccatggaagtcgacattttttctgcttcctgtgtgctcaatcccattgatgttgacatatcgccgtaagtggcagctaagtccaacgccgtaccttgcgcaagcccgatattatccagagttgttttggaccaccgtttgacactttcagcatttcctttaaatgctacgtccactttatttaatgactcatttgtatctgatgcataattaaacattgctttcccaccagcaaccaccaaagcgctaccaactgcaataatggttgtttttagtgcgctgaatttagaattagcatttttagttgttttatcaatttcattatctaacttattaacgctattctttgctgagtctacggagtttttagttttatcaactgcacccttagcagaattcccaaattgattagccgagttctttgcttctttaaaattcttatcaagcttatctactcgagtcgcactctctctcacttcatttgactgtttatgtatagcacgggtggtgccgtcaacagccctagaagtttgattgaagtttcgttccattttatccgcagaacgaacgatgcgatcagtttcctcatcagctttctgcaacatttgattattgattttccaatcaatttcgattgttgtttttctcaatgcgccttccatatcagacaccacccttcattagttctattttttgtctagcaacctcacataagattgctaattcatatgatgtagcaacttcaacttcttctttcgttgctataccggcaatgataggaagccaaatatcaaactctttattgacttcccgttcagcttggcgagcgttaggaaactcagttaagcaatttaccaagaaagttatccgccgcattcataacctcgcgatacccttcatgttcatcccaataatctaagtccaaacccaaaggctcaacaattacatctttcataattcgctcataatatacagaatccacaatcacgccatagccattcttagactcgtctaagattgcttgtgcagcgcgagttccagggaactggaatgtgtattcaaccttgttgctagctttgaatacttctttttttccaaatttatccaaaggttttttttctactttcggaatcttttgtgctgcttgagctgctgctacatcacttttagttgcattatttttcttctctgccattgttgtttcctcctaaaaaagcgaccaaaaaggtcgcttagtataatatattttatgcagtatgtgtataatctagtactttgaaagtaaatgaccttgtcccaacacttttaccaaaacctgcgtctggtaatttttcgataaaagccatagacccaccaattttttcttttccgttaataacgtaaataggaactttgagctgtctatttgctatatcaatcagctttggataacaaggtgatgtctgagctaaatcaactttgattgtacccattttgtcattattaacagctgctgacgaattaccttgtgcgtctgatttaatttctacattgtttgaatctttagagcatgaaaccatatccccatcagaaaaaccaaaaatagaaattccgttgataattgtcgatactgtatttgcatcatatgttgccattacttcgcccattatcttattcctccttttatacttccacttcgccgtatacatccacggaatgaatagccccggaacgtttgtagcggaatgatagccctttgtaatttcgtttagcaatatcgtcatcatttaaatctgaacgttgaagcgcagtaatagaaaaattgggctcccccgtctcatcattactatcaatgattccgttcgcaaaaccttcatttaagacagtagtcaactcactttgaagcagcgcaatacctcgtgcatcaaaagtaagtttgtctgtttctgtaagcagcttctgaagacgagtttcaattgttgctttgatccaatcatcgccatgaatggagtcgatgaattcgcctgaaacagtttttccttcactagtttgtgcaatacctgctttttcgatatagcacatgcctccagctttttgaattgcatcaatttcagatactttaagctcttctgatgtgattcctgcaagtccatgacggcctttccatgttgcggaaccaaccggcaaacttgctacattcccaattagcgctgcatctagtttttctccagttttgctgtgaacaattgctatagtacgtgtgttttttgcaagtggtgtaatatcagcgacagctgtaacttggaacaccgcaaatttaaatttctgttcttcgatcaagtttgataacgcaagagcatccgcagctttaaactctgcaagcaaagcaaaatgccacgacttcaagaagtacgcttcagcggcttctagtaatttcgtatcctcgtaagtgatgactgccactgtgtcgggtctatctttttgaagaaacactgcttttgctttcgcatagacttctgtattatctgcaaacgtatctttcaattcttcgagagtagtgtattccttgtaacccatcgccgttcctttgacaaaaatcgcaggacgacctaacccaattcgcggagagggatacaatacagaaatgtgtactcttacatctgtaatagtttctaccatttttttatcctcctaaattctcatttgtaaagctgatattatcaatttcttgtatttcacttgaatacgaatcaactacacgcaaccgcaaatcaatgcctgccgagcgctcatattcaatgctaatgaaagtatcgcgcagcccgctgttttgaacactgacaacaacaatacccccattttcttgcataaaaaaacgccctttttgggagcggaaatacttatttgtaatgttggccaagtttaacgcttgatggccggataaggctcgccatgtaagcgagattacaatctcaaattgctccccttcgactatatcaggactgatagcaatgtaaggagatgttatggtgtattggcaaaatggatattctggttgttccccaccactagaactttcgataagttgtaacccgcccgaaagctcattaacagcattaatcaaagttttaacaagttttccatagtcataaccagcagtatcatttggcactaacactcaccgccttacacccatactgagttacatccgaatagtcagtgaaaggaattgcgtcttcaacagaatacgtaatccctttatggatcactttgctttttaacggcagaacttgactagaaaaccaaatcatttcgtatttttcatacctggcagctgtgtaggcagaagtttggggcatttgagtcatgagcgaacttggaatgaagggttcattaacttcaattttagaagtttcgtcaagctgacttactacccactcgccgttaacgaattctccacctttttcttgctttggaaaaactgtcaacggaacaccaaaactatccagtaatgattggaaaatcattttttccattatgacttcatcaccttccaagtaacactatttttcattttaccggtgacaattaaaggattattttttctggggtttctggccaaagtcgctgctgacttggccggagtttgaatctcaacaattttcatttgtatatcgtccacaattttggcgcctaatcgattatatacctgctcggcgcttaactttccatgaataacgtcatctatccatccctcaaacaactctccccatttattgcttttctcatcaaatgtggacctcaaaaaagaacgttccggaatattaacttcggtctttaaatagaacatgaccgtcaatttaccatcaggacctgccacagcaagaatatttttaccttttggtttaaatagaccaggaatatctcgcgctctcctatcaccagcttctggcgttggtatggttagatacttgcctttcgggcgtatggttaaaccgaattcgtgaacaccagcaatcatttgaataaaagaatcatcttcaccaaaaagaccgatttgcaaactatatcggtctagctgatcaagctccctgattgctttgttcattgtagatttatcagtagttaccttcatcaaaccaccaccatgctaattcctgatccgccatttgcttccttaagcaatcttgcatattcttggccatactcggtagacaacagtccagaatctcctttgacttcgtaatattcccgctttaaagaacctactgcttccgacttaacatttttatttgctaatgttgcaagatgtgcagcaaggtacctatttgctctttcttcaaatttttcaggaaatcctttttcttgtacttctaaatatgaatcatcaatgtgtacttgtagagaatcatcagagacgcttgctaatgatgatgccgttaatttgagcttactaacgtctgttttcatgagttaccccctcattcaccaaaatcctcttcaggaacatatcgttcttcttgtggcggattgctaattgattcaatttgcttattaatagcatcgattacagttttccgatttccgtttgtagtctcttctgctaaaaattcgtttaaggctcctaaatcaaaagtatccttgactagcaatgccgctttcgtagcattgaaatcattaaggctagaatcttgttgtaaattgtcgggtacttttaattcatccgactcaatcaagtgtatattaagcggatgtttaagcgcttgttccaattcttcagcatgttcattatcaatattgtttgttcctggaactaatctaacttttcctaaaaaacgtacatagtcgcctttgttttcaataatcattgtttattcctcctagtaattcttaaataccatcgacacgaacaatagcggctgggaatcgaaccactactccagctgtacgctcttcaaacggaactttagtgcgcgggaaagaatattcttctggatgacgtgtaatatccatcggaataattaactccgctgtttcgttcgagtcatgaataaccgcaaaactatcagaacttgcagtaccaataccaactaagtccggcacacgaacaatagcagaaaaccaagcattgtcctgtagaactttcagtacagagcgagaatcttcgttactgtaacgttttttattaattaattcgaactgtttcggtggtaagcatagttttagtgaagctgtaccataccctggtaaaacagtaattttagtatgagcttcgccaatttcatcaataatctgttctgcagttttcttttcccatttggaaacatttcctacaccagttgtcggagatacatcaatctgaatgcctgtagcttcaaatgcccctttgattgcatatttcttttctcctctaaaagcaatagagttttctttttctgcaatagctctgcgaactgttgtcgcttttgcagcgtctactgtagttccttgcatacgagcagcacgcaaatcttggattgtataggacaatccaataccgatagaatagataggtacggacttacgtaccatgtccacatcaacaagtggaaggtcatctgctccgttcgcaattattttagcagctccggaacgtgtcataacatcaaatgaatacgattctgcaccttcgttcacatcgaatttttgcgggaatacgctccgtgcggttaattcttcttgtttcggttcataaataacattgtcaatagcttgtaagtcacgtgcttcaattgttgctgtaatttttccttgcattgttcttcctccttttgcctttaaggcagattaatttctaattttgctaatccgtcgcttgacgttgttgatttaaatactccaataacttcagttttagttgtttttgctgttgtagaaggtaagaaattagaggtagctgtattaacaactgctttttctccagatttcacatcctcatccacaataactgtgattgtcccttgtcgtaacaccggtaccgcttcagaaggtttataaacacctgctttatcatctgtatactcatcaacgtaattctttgccacagcgactccataaaaatcacctgtagtcaatgggctagcctcgtcatcgataacttgaacggcttggccaaagttgatatccttttttactgctgcgctatcaacttgcgaacgttgataagaagcaattttacctaaacctagctcaggcatcatatactcttgtccagttggaatactcattatttgttatctcctttcttaccaaaattttgtcgcgctgcttttttcttttcaatttcttctaactcttttggatcaggtttgcctttattaaagttagcatctgcagtatatcctttagcatctgctgtgactgtcattgcatcataaaaagcattaacatattcatctgatttgtctttagaatcaaatgaatcattcgatgttttaatagcagcttctttaatttcacgagcagttttccctttgaaatcaaatgaatcaccaagcatcactttagcagaatctaataatgcagctcgttctgtgaccgcattttcaatatcttccttcgtcattgtatttttgttagcttcttccagatcactttccgctttatctaactttgtttttaatccgtcacgttctccctctaatgcatcaactttagctgctttagcatttgctgcatccagttttgcttctaatgcgtcaaatcgtgacttaacaactgaatcgacttcatattctttgctatcaatcttgagtactggcattttgtttcctccttgttttttcgtgttttttgaatcaatcataaaagcagctgagtcgcctcgtattgcaatttcaggacccacgcgtccttcatctacaattgctaaatgattaactaatacagatttttgcacggcatcgtacctttcgcctgcataagtaccactttcttttactacttccgattcaaagccaagggacagttcgcgtttaccgtcttgaacagcttgtattgtcttagagtctgtaatagtaaaagatacaaatagcttattatcacttacgcacgcgtctgtatgcgttgttccttttgcatacttttgatgattgcttgcattaactggttcattcggatggtcattagtaactggctttgcattgagcgattgaatagtttcgctagcaaaaaggttttcgggtaatttagcttccagctgaatactgccgtccgctcgttgataaggaaatacccctggtcgagtgactggtgccttaacagttaagtaaccttctttagtaacttgcatatttgaatctgtaataaatgatttatcaaatcgttgcaccttcatttcatattctcaccacctttcaatttttggcataaaaaagacactgaatcatttatcagcgtcttttatcaatcgtttaatttcatcccactgttctttctctgttgcgtcaagtaagaatggcgggtaatgtccataaagttttttataacgttcaaaaagtatttttccgtcttcggtggccatcatgctatcaagccattttttgtagttaatcacttcaattcaccttctaacattttaatgaacgatccgtaaatcatcggaaattgtttttttaccatagcaattgattcttgtttgttcattgctagcatagcaaataaatttgcaaaaatctctttttcaatgctcccttttcgtttccaatatgaagcggcatgtcctgcattaccttttactctattttccgtaagtgccgaacaaatatcgctaaagtaatcatcgtttgcccatttttcatgactgaacaattcatttatctcatcccactttgcaactttcttctctatctgagtggaaatagtaaaacttttattttcccaagatttatatttcgcataatctatcaaatgaccagattcgtgaagcaatatttcttgtttattataatattttaaagctttattacttggattaataattatcttcttgcttgaagggcgataagcatatgcaatattattatctcgtactatctcaaaagaatttgcagtaatgttactacttattaagtccttaacattatccggagctttttgagcagcttgagctacttcgctataagcgttttttaatgttgctttatcttctagctcttgttgtttacgctcatttgttgcagctttaactacagattcatcaaattcaggaccagcagtgcaacgacatctataatcagttccaggaatcggtgcagttggatcatcatatgaataaactttaccatttcttgcgtggtgtgatggtctaaccgctgcatctcctgaatctctccaagtaaagccgggtatgcctgctttcttatgcctctcggctgtcatctgcccaaagattgttccggtctggtcattagcgataaattcagctttattttttgatgtacctacttgcgtaaccagttcatcacgcatatcttttaatgattggccactttttacaccacgcaaaattatttgttctgttttggcgttaaattcgtctgcaattgaaccaatataacttacattttcggcaatcgaagcgtccatgaactcacttaaccatggttcagactgtgtgggctcaattccttgtgagcgcacttgattgcctatttgtgatttattagtcgtatttattgctttaacatgtttacttgcaatagaatacttgtctcgcgggttgaataatccaaaacttagcgcctttactttatttaaaacagcttgaacggcatcacttataccatcttctctgaacgcatcagagcgattttgagacgtttttagaatggcactaatatttgtgtcaaattcatgtaaaaacatgtcagacaaagccgtgctaagttttactagctgtttagtataactcttttctaaattatgtggatagcgagtcgcaggaacgcgtcttttagccatctgcgttcttcttcgcatacgcgtcatagacaagcttagctaatttatcaatttctgcgctatcaccactgaatttagaagaattctctaatccgaaacgtccaaaacgtgtttctttcacttcgtcagggtctaatacaccatttacaatataaatctgatctgcttctgcagttagttttctaacttcggcatctgtcttactgtctaagttccagagcggattaaattcaatagcccattcaaaagaatctggatcaatactcggaccacaatcatcacttgcccacatcagcaatcttgttaaatattccaattgaggtcgaagtctgttttcctggatagacgaaactcgcgcatagtagttcataacatcatattgcgcacctgtaagagtacctgcttcttgaccttttagaactgttttaggcattcgaacagctcctgccaaataatcccatccataatcgagcaaatccttcattcctgacacatttgtcgattctttagtcagctgttcatctcctttgataattgcgagtgcctcagtacgaaacatgaaatctagcattgccgttaaattcgccttatcatccttattcaaagcgtctatgtcatcggttttatacactttaaaagcaaagtcatacaaaatttgacctacagaccaaagcgatgtatccatcacggtaataatatcataaagcgattcaaatatggaccttccttttgtttcgccctcaaaacgcaatccttgctcgtgtattatcctcgaacggtgaatttgttctgaagtagatgctgtcgttccggataatatttcttctcctagttgggacacgcgattaacttcaaaaaactcaacttcaccaaagtgctcactaaacatatcttgattcaaatagagttgagttactttctgtgtattaaaagtattaatatatggaatacttttaattgtttttggatcgatagcagtgctcaaatccgcctgttccctattacttgatactacgccaatacttagaaagccatcgccgtaaagtcgtttatctgcataaagcttctgaaatcgatcctttgtttttaacttacgccattttgactcgatgttctttttcatttctttgttatcagtctttaaagaccaacctgctcgaaccatatcttccgagataatatctacaatattcatagcaatactgttagaagcatataaattctcacatgctttcaaatctaatttttggccgttacctggtgtttgccttgttaacttgtcacgagagtttgcttttccatggccaaccatgaaatcattcctattaactatctttgaatctatctttgcttgttttgctttatcaattgaatacatccgctcaccacctttacattaagtttttatatctatctaacaacgattgttgacctatcattaatttaacaagtgcctgggtcatagcatcaacgtcatcatcatgctccccgttgggaaatgccagcatttcttctattacatcactaatccacggagcgtataaaggatgtggaaaatacacgtttcctgactcaaaaagcggtgtaacggcatacgcccgtgtttctttcccaccttctggttcaacgccaatcattccggttatctctccttttaatgtctgcataacagctggaccattagctttttcttcaatgtacttagcaatagctaacggatgttttatagtaaggcgccttacagcatttaaagtctccggaagccccatcctgtcatgtatgcgatcaataaaaaagaaatcagcttttttacgattccatacatgaccggcgacaaagtcacttttttttgtgtctttaaatgccatatcccacgattgtgccgatttatcaaaaagacgcggcagtattgccacgtcttcacctaaattatatttttttctgaattcttcactagggacatagtacctcaaccatttttctttaaaaattgccccttcagccggacgcggtctttgttggtatagtgaagcccacgttcgactacctactgtcttcttcgttatttcagcccattcttcgttatagccaagctccggacatagcgcttggccaatctcacgtcctagtaaatcattttcctcggcaatagctggtaatcttattctttcccatggtagtgtatttgcctttaacaatctacctattaagtcatcttcatgccaccgagtcataataacgataacactatgacctttatgcaaacgagtaaagaatgtgctctcccactcctggtatatcttatcccgaattgtcttagattccgcttcttctcggtttttaatcgggtcatcgataattaataaatcagcaccacgccccgttgcaccaccgagcatggaagttgagtacatgccgccaccatattggtcaatgctccagtccgtgacacctgagttagcgggattgatgtgtatatcaaaaagctgatcacccgccatttttattttatctctgttttttcgcccaaattgtttggccaaagcgtcagaataagatgttgtgatgactcttttcttaggattcttcatcaagaagtacgatgggaatgtttcggtaattgtcattgatttactatgccgtggtggcatttcgaagatgtaatatttctgttcaccgtcgataatatgttgtaacttctcacatattaattcagtgtgttcaaataactggtaatctccaaagtgcgaataagtcacgtaatcgcgataagaacgtttagcaagttctatatcaagttcttccaacaaggcctcttgttctgttacgtcattttctaaggcttgctgcataactcctcaactcctctgtactcattcccgagaagtcaggcttatttactgcggtacttttatttgcttcatctggtttatatagcttctcgcgatttaggctcgtttgagagcgtataagacctttttttaattcggcttgttctaggtcgctttgttgtttaattgctctgattagttggttagtgacgttattcaacgagttttcaagacttagtattcggtcgattttagcagttaccttttcgcgctcctcaacggttactagctcttgtctgtgaagaacaaccttttttccattcttctcaccaatgtactccttttctcttagctgtttaagcgtgcttctttcaatatcagacattgatttttcaatgtttgcgatgcgttccatcatacgccgttttctaatttctaactcacggatagtttggttaatgtgagttactaaattgccgtccatgctctcatacaactgctgctctctttctgttaaaaactcccaggacaacgtttcaaactcccctgtggtaacagcgttcttattgccaattggtgcgctaccgccaacgttaccaaccgcattaccattccctggtggtgcacctccgcgattaccgattgcgttgctgttcccttttaacttatggtaacgttccttttcattagtaacgttactattcgatttaggaacgctctctatttcgtcatcgatggaccatttttctgttgatttccacttccgtatctgattagaagagcagcctagtttatttgcaatatcaaccagtttcatttttccgccggattcaagccacatatttttcgcttcaattcttcgtgggtcgcgtttccttgccatatcactgtcaccacctgtcttgtgttgagtttgtttttactttacttaacccctgtacactttaaaccaagatgcgccatctttactttcactctccgaattctcatcctctacagccatgccagcaagattatttaatataaacactacgcctcttttttcaccttctccatagtaatcgaatgtaataattttctcgtcaatctctacattttcaactagatcaaattccatctcttgtccatttttagtccaaaatataagggtcatgtttattctccaatctttcaataaaaattaatctcttcttagtaatctatctgcttcgattagtgttttaaggtcatttacagattcaagacgtatattgccttcttgtagattattaagccacttacccagcgtagcgcgaataattttcttgtattcttcatctgtcttaacttcttcaagagccttgctaatctctaaatctaataattcatcatttgcgttttcatcaatcgaacgcctattctgtttcgtcattgccttttcaccagctttctattagaatagaaaaagagatagtgagttctcaaaaccacgcgtggtcatttcactatctcacgccagtgatggcggcatgtggaaggggtgttaacgcacctcttcttttttatcttaaaaacgctgctactgaaagtaatttaggcttttgattatactttttagcaatctctttcgatctagtattaaaagcttccgcgtatggaattatttgtttcttagctgtttctctatcaattaaatttcgatgatatttcattttagctgtgtccgctttatcttttaatcgttgaatatcttctctcatgtacaccactccgtttcctttatgctgatactgtaagggatattcgtttaaatgtcgatagattcaagcgcttcttctaaattatcttccagtacctctaaaatggggaaatgttcttgtatctcatcaggatttcctttgtaaaacactaaaacattctgatgtatccgaactaacttcctgttacgcatatttctgcgagctcttaatgctcctgaacctagtgagtttaacaaaatcaagtcattatagaagtaaataccattcttctcaaaaattgacttagtaagaccggtcaaatctctataaaaaccagctttatctcgtacatctgaaataaccacaatagcaaaccgattatcttttaatttattcgcacccttatctaatatctcggaatacactttaataaattcatcgtattccatgttgctaatgtcttctttattatctgaatatacttctaaatcaaagtaaggtgggcatgtaaataataagtccatcgagttatcttcaatatgtttatccgcgtttaagctattatcggtaatccaattaatgccatctaatccgatttctttagcattaatgcggttagcttctacttgttcttttcttaaatcaattccagtatattcgtggccaagcacttttgccacaataccccgaacagagccgccagcgaatggatcgtatattttggcagattctccaggagtaaaccatctgtaagccaactcgcaaagtacggggtcgaaaatactcgttcctgtcaaacttgctgaccgtaagctagatgcaaacgtgagattaccttctctccctagctcgcttctaatccctaaatttttccattggtccttcctatccctccatcttcttgttttcgaatccaaataagaaaacggcggaaacaaaaaagactcgaacagattcgagtctaacgggttttcttttactttatccacagtagctggaggtaattcgaactctttaattaattcatctatttcaagtgctgagaatcctgttaaatttagcatttcttcatcattaatgctttttagtaattcgcctaatttatcagtattccatccaccttctatcttgtttaacgcaatattcaatgctttctcttgatctatatctaggttaactactgatacagttaagttttccggttttccctcgagtaaaattttataacgctgatggccaccgactaaattaccagttctttcattccaaatcagtgggtcaatatagccaaattcttcaattgatttttttaatttttgatattctggatcgtcgggctgtaaatctatacgcggattatatgcagccggattaattttgcttacttctatttcttggatattcatttgctcgactccttgtataaatcacttaatttcttgcgtatcgtgtgataattccctgttttagaaagagatatttttgctttttgtgaaaatcgataaccatcaacattacccacatcagcaaaatcactctcattcataactcgaaaataccaacgttcgtttaataagataatgtagctttcacggtaatttaattcggtaatataattgctttttgtttttacaaagaagtcgattaagctgttaccatctttcacatttgcaacaacatacacaaaatttttcatgtgttatctccttttctacatagaaaaacctccatatcagaacgtatctgtccttgggtatggaggtattaatgttcaaagcactcggcaaggatttgcaccttgcatgaactaagtaatttttgctataggtttcttaagctaaggcttacgctccttagccatattagttcttacctccaatgcgtctacctgttccgccacgagtgttggatatgatgcgtctcatatcagaccaacgataagatacaatgcctctttctgggcaaactgtatatttttaaattgcgattgatttatgattaaagcataatgccttgccaaaaatatttacctgtagccacgatgatacatatcgttttccgtccatgctatatttagtcatttcatgtttcataattaccagctcctatttcttattttcttgacaataacatcttaccacggaattccttgttttttgtccggtaaaaagccggtaaaaagtcagcaaaaagtttaattttatccggtaaaaagccggtttgttaaatatccttgtcgataacagcctgaattccgacattttcaagaatttcatgtataaataatctccctttttgtgtccacttggtgtttacttttgttcctagacgtccattactatgaactatgctgaccgtttctgatttagtcaaacctaaattcatatgttttttgtataatatccactgcccaccaactttatgctgcacctgctcttcgtataatattttattgagcttatgtgcggtcaagtcatagtcagctgcaatttgcgtaacagttattaatccaggagattttaaaatctgatcataataactcacttttggttcatattcggctatagtttgtgttttcacttcattttctaacattaactgctcatttagttcagcttgttttgctgcaagtgtaagtgcttctgcgtaggttcctggaatataaaaagtttgcatttctttttcttctaacttgttgaacttttgtacaaataaagctgtaaactgaatgccttttgccccagttaatttattggctatcatttcacagcccatttttgtgatttcatagcacttataatctttcccggtgccagcttgataagtagattcactgaaaaaatcatcagaacgcagttttgcgttttgattgatatatctaatataagtttcgatatcacgtagtaaatcagagtgccttttttctaccatttcagcaacttcacgactgtttaatgtattatttttatctaatactgctaaattattcattgtgttccctcctcatttttcaactactatattaagctgataggctaggcgttcaattgcttttctcttttcttctttgtactgcgagtgacttacatgtatggccaacatagcttcataatcactattttcttcaatgaatttagttagtatcacttgcctactccgttcaggaagttggttgatgtgatgatcaatcaatttaacatatgcttttgcttcatttactgcatctacattccatattgcactttcttctgtcgtagaatggaattcattattaaatgatggtggcactatggtcaatgtagaagttaactttggcattcttctctcgccgagtctaactctcataattttatatttttctaaagctcttattacgtttctttttgttctaacattgttaatttgcggtagttcgaacagcgccatcacacgcaacccctccattgtggtataatgattttgtctaggaatcacattccacgccggagcggtcgctctggctttttttatatatttaattcttttacagcatccggacttaaaattattccatcaacgtggtatttgtttttaaacgttaaccatccaatctgatgtgcttctgtgtgcatttctcgagataaacagattaatcttgatttactgtgatcataatttcttctatctcttccagcgcctaaggaatcaacatggtgtatttcgcctctgcgccccgttatagcacattttctgtatttgatacataagaacaaatatctattgatatcatccgtcatttgcagtcctgaagcggataacggtatatcaaattgaaagcaaaactctataatggaacttatgaagtcgcgagcttgtatttttgataacttcgctgtactgaaatcacccggtaaattcgcttcaactgcatacgccacttttaaagtttctttgacaacttgacaatcattgctgaagcttctcggttttgtcgcttcaaaatcgttataagtgtgctttacgatgtcactaatcaaagcatgaatcattttgttttgccgtaatgttcgtttttctgttttatacatgtcatcaccctttaaaacggatattctcgctcatttggtagtgtacccatgactacaattccttctttttgcaagtagtcggtaatataaacaacatcttcccaatactctcggccagtgtattcaccatttacatattcttgcaggataagagtatccccgaccataaaattacggtcattctttcttatttcaaacgcttttacaagtgttctttttttctcgaaaaactcaggtagaatctttaatttgtgtactgtcatttataaatcacctttttatttccggtttctcggttcactatttccattcgatcattaagatttttcaccacgagccaattatccggattaagaccattattttttagcatcgttgcttggtttctagttaactttttaccgtttttcattattatcttcctcacaatcttcacaatcttcacatgttctcggatatcccggatttacatcatcaatgaatactccgcaattcctacacaaaataccctctaaaatcatttcagttgtttcactcatataatcgtcctcctatctcaaattaaatcggaatcaagcagtaaaattttattgttgacagtttcataaaaaccttgttttatttcttcctctgtttcatattcttgcaaagatgacatgaagagttttaacgcttttttctctgttaattcaacggcattgaattctgttattagtccagttcttgcaaattcttcttcgcacttaacaacatcacgccaataaataaaatcagcttgttttttgctttctgctttaattaatgcataaagatagttttctcttcttgtgtattcgaagtatttaatcatgcttggccctccttgatttttttagcgttaatataaagcgaatatgtcgcatctgcctcttttcgccaaccgttcatcccgttttttgattcccttctataattgattcggtgatttcttatatagtttttaactaagcaataagacaaattcatttctgctgagatctctttgattgtgtacccttgatttccaagatgacgaattattttgtcatcttctttagacatgtgtttgtttgtcagtcctaacagtacctttcttcctgctacagaggctttcgttcttcttaatcgttcagcgaattgggcatttgacataataatataatttttttttagtatctcatcttctttttctgtccacggacgcctaataaaagaaactgaagaatctctttttcttaacttcactagtctgtttataactgcatcttttgtacgtcctaaaaattctgcagctttgctaatatcgtcgtcgttttcataaacaaaatactttaaataaatatcctcatcctctgtccactccgagtttttacttattccaagtcgcgtcgctttgttttttattgaatgatatgagcgatttaaaaaattagctattatctcagtgtctacgtattcgtaattattctgtaaaactctgatttcctcatccgtccaattttttcgcatctaatcacctcgctacgcaatttgcattaaaacagacatcattttttgatcatctttcttttgcaactcgtctaaaacatgtgcgtatatttcttgcgtgacacctacatcggcatgccctaatcgcgctgaaatcgtatgaatcgaaacaccttcagcaagcagtacgcttgcatgtgtgtgtcgaagggcgtgtaaacttatcactgttatagttaatgtcttacatttcgcttctaaataattgttcattgttgagttatactgttttttatatgttcctcgttctgtcttctctataaaaatcgggtcattagctggcaaatcttgaattaatggtttgaactgcccaacgatttgccaatcaatagctatttctctatcggaagccgtcgatttagtttttttaaaccctctgtgagttttataatcccaagatttatcaattgttacagtggcatttacccagtcaaaatccgatggagttagcgccaatgcctccgcataacgcatacctgtttttgcaatcagcaggagaaaccaatcattattaatgccactttgtaaatccaaagattgcaataaggttctcaattcttctttctggagaaatttaactttctttttacctggttcttttcctttgataaccgccctataagttggatcgcttttcagtaacccatcgtggtaagcatctaaaatagctgcttttatgtgatggtggaaatctttagcggtttgcttttcatgtgtttttccatattcattcatgattaattgataatctttcctgctaaaatcagacatcaataattttgggcaaatatcgcgtagttgtcttgctgccacataatatttgtttagcgtaacgtcttcaatagctcctaccttgtaagtctcaacccagtcctcataataatcacaaaatagtatttcttttttcttcttagccatcagcaatcaccaaattccatctcagttgcacacttatgacacgttatttttttatgtttaagccaacgtggttccggaccatagttttttttgagttcctcaaaattaaatctgttttcttcccagcaataaggacaccatacttggataattcgcggttcatccgcagcttcttgcctaattctgtaattagctttttttaactcatttaattccggtttcatatttactcctcctcaactatgttgtaatacctttgttttactttttactgatgcagcccagttgtttgcagcctcttgcacatcgtgggttggctcacaattgtgcttacctctcagttggtaaatttggccatttttgtattcaagtgtatacaatgacttttctaagtactgcttatcacgaacaaaaataatcgttgttttcccttcaatgtgttgtttaatataattactaccacccacacaatgacttaatgctttgccttctgttaataaatcagaagcttgtttagggacaataaaagcgtaattatctatcgttttttctaagtcttttatcttctcaaatctcattttatattgttgttcttcaacttcatgtttcatttggtacagtaatttgaccgcgttatcatgagctattactaaatttttaggcataattatgttttcgctatcgattgcaatatttaagtctcgcattaggtttagataatccagatagtagctaaaatccactttattcttaatgatccaattctgaaagcgaactattcctactccttctgggattttgttgatagcacggtaatcaagatatttttcaattccagaaactacctttcctcgccgtttctgtattcttcttgctaattcaaattccataaaacctctgtccgagttcttaaagaaaggcttgttttctttcaaccacttcgcattaattgtccgcatatctaccgtttttctaaacgatccatttgtatattgtgttacgggatacataacttccttggacaattgtcttgctttaattttctgcaaaaattcaatttcaactctatatttatatatagtttcaatttctttaaagtctaagtgcggtatttctaggtacttaagctctgatttacttcgaattttttctttccagtcattttcaaacaatcgaatcattgagtaaggacctccagacatcccaccatatattggaattaaaccaaaccacatcttgccgtcgctgatggcaacctttacgtgttctccatcagcaaattgttcaaaattgactagatcaaattcaatcatttcttttccttccactactcgattccagaacgcgtaactttgtatctcaattcttttcgatgtaactaagacaataccgaacacgttcaatttaccaaaaaatgtcaatctagaattttttcttaacttctgttcaataacactgcagttttttcgattggaagctagaatagtttcttttttgttggaccatttgtaagttggaatttgtgagaaacaccagtcaaaaaaggcttttggtggctttaatttattatcaatataatttcgtgcttctctcttcataagaaatcaagcaaatctaattgctcatacccttcttgcgcagttgtttttttcggtttttccttagctttaaccttcgctttttctggttttgttgcagttgttttaactgtagcctttacactacttttcggcactttttctgatataaaatactttttcacccaggaaaagaccgttttgtcatcaatcatggccacgccttcagcctgatgctttgaagcccttgaggagcagtatttaaccgccccactaatgcttctatcatctttcagaataccttcaaaaatcgcttcttcttcttgagtacagagccaattatgtactgcatcttcagctcctgagtgtttctcattcatttccgttaacattttattgagtgcttgctcttttatgcttaacattccaatagttgtcattatccttcctcctaactatctaactccatccgcatctcgttaaaagtcaaatcgacttctgtatctgtcatttttaatgcttctagcaacgtgcacttctctgtatgcacaagtgaagcaatctgatgttgaacccctattcttctctcactcaatcgttgtagtagctctttttctatcgtctgcattataaaaaacctcctcgtgtacttttccgcgatatttgtatccttttccttcttctgttgaatacaaatggcatttatcgttaatgtagcagcatcctttttctaaattgaatatccatcgaatttctttattaattgggtgatcgtaatatccgcaaactgtagttactttcttacctaaaatccgctctatttcggctcttgctgtaggataatctaatctatcgtttttatgtgttttaatcggttttaaggcttcttcctttcgcttttttttagcagactgctcaggatagtaatccattaaatcgaataaatttaattcttctgatggcatttcctcacctctttacaagggcggtttcccgcccagcattttattcttcggtttcaaactctaaagttgcttgaccatcattttcagattcttgttcttcactatcagctgtttgttcagagttatttttccagtcttgccatgcttttgctttggcagctacgaatttacgatattcatctaaagtgtcttgcatttctttaaccggagttccataaaacctagccaaatcctctatgtcttcaccctctgataatttttgaagtacttctttcccttcaaaaatcccaccaggtattgtcatcgcgattccttcacaagcaagaatatattcatcaatttcggatttattaattacgcttgaacgttcttctgcgggtaattcttctagttctaaatcaagtttttcttgtgagtacatcgccacagttccatccttatggaccatatatttaagaactggctctcgtgtttctgggtcaaccttttcacggtaagatatttggttgctttcgagtgaagtatttacttctctacctactagcttcataagttcttcgttttggccagataattcatctacatctactactagtttaatttccaccgtatcgtttggttttacctgtacatttctaacctctgcgtaacaattaatcatttcttttttcctccaatttttttaaaataattttgtttgaacttctgaaactaattctgttatgctaacttctgttctaggtaagtccgaatatctcttataagcgattaattcaacaatcttgccatcgtcactaaacataattccgttaagcgcatctaaaatggctttaacgtagttgtcaatgtccgggcgtactgagggaaattcttgtcctagcaatgctcgctgtttccaagccttagatttcgacttaggaatagacacaaagaatatcaattttatttgaattggtgtgcttattggcgttcctggcgcatacatttttgccacatttgctattttctttttgtactcttttgacttaggcgggtcgtacgtttgtacgaaattgcctgcatttctaaaacgcggtcgttcttgtggatgtggaggaatattaatcgtgaattttatcattttcttcccaccgttcacgttccacttgttcaactacttttagcgcttctttaggaacttggtaaatactgttgttaattctcacacgtgcatttgctgaacccactcgttctatttcgtatatccctcctaatctaaaaggtgtcccgggaatttttttaatgatttcaacgtactcaattcgtttcaaaattattagctcctctctttggcggttcaaaaatgtaacctacgatatctccctgtaaatgttttattttcttcactttttcttgaggtacctttttttctgcattatcaaatgcttctttgaaagttctagcttctacttcaaagcttctattttgacaaaggccagaaacccagtaaatttttagccaaattttaaaagttttcatctgcattagataagacctcatatccatcaaatttccatgcgtgtagctttagctgctcttcgacttcttcggccgtgtaacataccgttttcgctattttcttgtctaatagcttccagatgattatatttactggcgatggtccatcaaatccgacatatttcggcatttccttagtaagtatcattttttaaatcctcgcaatctataattttctcctgacatttgaattaaatttccatcttccataattctgctaaaattacgttctccatagaaattaaaaagttcatctacgttaaagttcgtagtataaacagtgtgtttcccaacacggccttctacaatttcgaaaatcttttgtactgcaaaatcgttatttgcttctttgatttcacttccaaaatcatctaagaccaggaggtctacgctttcgatttcatttaacaaatctgcttcagtaaactcactcgtcttactaaaagatgatctaatttttgttaataacttaggcgtgttaataaaaatcatcgttggttttctcgtctttaacacgacatcacgttcattgtctctttttagtacaatatctatttcactaatatctcgcataatggaagccgctaaatgacttttgccaacaccatatgcacctgttagtagcaagcttctaggctgattaagattaaacgtttctacaaaccgtctacaaactgctagagcttttgcattctcttcgttctctgcgtgatagttttcaaaactcgcattttcaagctttttattaatcatgctattagaaaatattttgtttaactggtgatttctatcagagtcaagtgctttagctgccagctcggcatcttcttttgcaatctgttttcggattttttgctcatctgcttcggtaagcgtatgtctatcaatccgttcttgtagctccgaaattatattggtcgctgattttaatttcttgttttgctggttctgctcgcgcattctttttagcaccaccattccagtttttttcttgttcatctgcttcagcggtggttttaactccattatctaaccaaccccgcaaaacagtatcaacagttttcattctgcgtctgttcagttcaattgccttcttcatagcatgtaccgttaactcattgccccctagagaaataagtttttttagcaattctctatcgaattccgataatccggtaattgcaacattttcttcccaaaatttataagcagtagtagttggtttttcttttacaattttttcagggagtttttcttgttcgcttactactgctttactttcatttactttactttcctttcctttagtttgtgcacttaatgctggcattaactcttcttgttccgcgttaatgtcatcatttacaacattaatgtttgcaaaaacgattttaggacataaatttattacttctggcctatctagtaacaagtactctagtactactatttgtttttttcttcgaccaattgcagtgaaatatctctcttgaacccctaggcttgtcaatatttgaaactcactaaaaaggttattgtcgaacaaatcgtacttaatgcagtcattaactactgttttcagtgtgttaatgtcaacattaactcttttcgcgaacagtatttgttctgtttctgtccacttatagtaaaagttttgactataaatcttcataaataacttgatcattattgcaaaaccagtcggtccatgtagcgtttcgattaattgaaatttatcatcataatcagcatctacatctaacggaaaataatctaacccctcttttaaaggccttgccatatcatcaccacctatacataaaccggaacgccggtcatagcttgaatttcttttttaaatcgttcaggatcaccatttctctctgaaatgtgtagcaagtgaatttctcttagttgcgataagtcatttgcgttcaaaaactcttttacattttctaagctgaaatgcgattgtaaaacacgctttttttgaacttgatgtataactttatttattacattttcttctaaaatatctgctgaatagttacactcaatcattaaatagttgatgtttttgaatttgtatcttacaaaataactgtctgtaatgaaaagtagtctttcattatggcgttgaatcataaaaccaagcggctcttttgcatcatgttcagtttgaaacggtaaaataatccattctccgatgttttgagcgtctttttcttttaaaatgaattgtcgactgtccggaacatttaaagcagacaaggtgccttctgatgcgtatatcttaatgctggatgtgcgtaacatctttttgacgccagcgacgtgatctccatgctcgtggctgattaaacaggcttccactgccgataaatcaaaatttagtgcttttcttattttgtcgaagtttactccacattcaattagtagttgggagcgcccgctactaataacgtaggcgttccctttgcttccactcgcaattgtcttaatttccatattaataaggtctagctggcggtgtagatggctgctcatcatatatcggtggcatttccacatgctctggctctcttatttctttaaaatctggcacttcaatttgctgtgctggtatatctagcatttctgtattagcattttgtttaatctcttcttgaacacttgtctcattgttttgtagcgacccttgttcttcctctgtatacatggcgcctaagttatccggaaatgcttctctcattgcattaacaactgcggttttacgcatcatcgtaagaggcatagcattccacgttgattgtcttttattaaactctctttcactgattcttacactaactggtctagatctgtcttttctaaaaacctttgcccagccccctagtaatttgtctttatctagagaaactgctccttctatttcaacaacttcaccattacgctcgacgataattcctgcttcaaatccgtcatattgttcatgtgtttcagcacgcttcataaatgcttctttagaaacaattatttgtgcgggtttatctggtccttttgtgtttttaaatttaactaggtaggcttcgttaagaaatggatttaatttttgatatttacataactgcaaaaacatgattatttcctggtctgttacctctgcatttccacttactagataatccctaataatattgccagataactttacttcttctccattcacttcaaatgtcgttatactattgagcaattttccgtttgggtcgctataattctcttttgccattttctatgcctccactctcaaatttttatctgactcagaaacgattaagcttactaattgtgattctgtatcaattagttccgttaccgactccctgttatctacaaatatcgttgccctaacttgaacatgctctgttagtgcgttaataatgtccaaaccaccgttgattctagcggcattgttcaatccggaattgtaaggaacaccgttgtaaatcgtttcacagcactcatcaatcccaccgttaatttgcgttttaaataacttgaatgaaacatatttgaacttgctgttaatcttgtcttcaagaagattacattttgctttattaaatcgttcaatgagatataatcccatttccaattcgtcgtacttagcgcctttttctgctgcttcttcttctaattcctgaatgcgattttcttgtttctgattgctatcaaattttgctaaatcagcttttaaatcacttgcttcagcattcaatttatcaattttgatttgaatctctgctactgcagttatagaagaacctttttcatcacgcagtttttcttcaatcatttccagttcagattgtttctcgatgtaagtagtagagttttcagcttgttccagctgatgttctaaagctgttttttcctgttccaaaatctctaattttgattcaatattattcaattcaagttcattcgctttaatatcaaacgaaagttcagcaatatcaccttctgtttcttcaattactgctttacttgactttcctgcagcttcattttctttaattttttctgccttttcttgattgaatttttcaatcatagaactcaaatgttctgctgggaaatcttgattgcaggtcgggcattttttgcgatgttcgtcaaatttttctacctgcaatacgtcccactctttgcctaatttagttaattcttgctgcttagttgcaatttctccttgtttacgctgaataagaaaagtagattcaccaatccggttatttacatctataagttcatttctttcttcgaaaatttcttcttttttactcattaatagttcttgtgtttctttttgctcatttgctttgatttttgtaagttccagttcaatgttcgctttttgcttattaagctcagtttgtataccaccgtttttcagaacatttttttcttgttcgataaattgaatctgttcttcaattactgataattcacctttaatatcgcttggatttaagccggttacatcttgtttagctttagtagcttcatttacaagttcggggataagttctaatcttttacgcaagttcttgcgctgttcattaatctgaattaatttatcttcaatcgagtgctttccaagaaagatgcttaaatctttcagtgaatcatctgcactcgttacttctgcgtctgttacatcacctgcaattttaattagcattgcacgtctttttttccagtcaaattgctcattaaaataaagagggttagtaattagtttgaaaagttcctcgtctagtagctcgctaataaatgacttatatccattcgctttctttttgatctcgtcgatataatattctgtagtatgacttgttaactcttgttctagttttcctcttgattttgtccacttctccatgtactttttagacaactcaacttgttcgccatcaacatcaatcactgcggttacaacatgattcaacttgtgaataactttaccttccatatctaatgttttaatagcaaagtcttttttatttgtgctgtctttatcgaataaaagccaagtgaacgcatctaagattgttgttttccccgaagcattcgctccgtatattgatgtattatcttgaaaatcaatttctagttccttgatacctttaaaattttctagttgaagctttagcaatttaattgttttcatctgttttctcctttgcatcttgtttgaaattttgaaatccatttaatgccccttctattgcatgttcaatggtttcattcacgttgcacacacaatcatggtctttcataaattcatatacaattgcttcggcgatgtccccatacatctttaagagttcgcttttccctccaattgcagatgacgcactgtgtataccttttccatcattgaagcttacattcacggcacaagttatgctttcattaaatgtagcaattgcttgtaacccagttattaatttttttgcctcttcaaatttcacttcttcaatacttttttgtgtcatcttgaatcctccaatttttaaaatttacaaacttcattttctgattgcttcaattcgtcttctaatttttttattgtttcaatcttcttctcgtgattagcaatcctttcagttagttgcttaggtggcttggtatttacacgtttgtacttgaataagttaatctctaaagctttgattcgttctaatgagtgagttcttgaattctttaaaatttcaatgagctcattagtcttaatttgcataataaagacccctttctaaaaattaatttgtcaaaacggggctaatcgcatatactataagtaattcaattcttatatttagcgaatagctatctatttcagactcgtgttagcgcacgagtttatttttttgtcgttacaatcattactccttctacaatcgtgatgttttgtgtatcaccagtattcattcaattcaccatcccaactttcaaaagcatccatggttttttgaattttttcgcttgcgttgtgcatatttacaatccagctttcaattattccagggctgatggttgatgcaaaagtatcttgagcaaagtgctctccattttcaagtaacatatttacttttacgcctttaaacgtctttcttcctgtggagtcattgattggtgtaattcttacaatatattttttttcgttattaacggtcacaactttctgaattgctcttatttcttccatcgcttgaatcctccttcttcgcttttaaaagctactattaatgctacaaacactgcaaaaccgatgaaaagtaatcctacgctcatttataaatccaactttcataccagttagccaagccaactttttttatcgtcttgcataacttcttaacgcttgatattaacgtcattgttccgagcaacacgagtatccacacaatcgctatccaaatcggtattgacatcggctttctcactccctttctgatatgcatagattgatagatttaacaaaataccaaatccaataacaatatttaccgctaataacataaaatcacctttttcttgaattttcttcaatccacttttctactgctttttttggataacgacgctcattaccttgctggatgaaagggaatgaagcattgtttagataatatttatctgctgtatttttactacatttcaatattcgctggcataattctctagcactaagaagttcttcgtcttcaaaattttgtatgagcgaatcttttaattcctctactaatcttgagaagcagattattgatgtttcttttacgtgattgaaaatttcctcctcattaagaatacttggcattatcttcacctctttcaaatccactttttttgtttccaactctcatcttgttcactcattaattgatacacatcgatatttaaatgatcacttgcatgaaataaaaggttataaccccaaccgagtgcatcaagtaattcttttaaactgtctcttgcagttagccgttcgctttgagttaattggctcgctggctttacaaaaattttcattacctcatcgatattcgcactaaactcgttagcttcttgttcatacataacgagatatgataacgaattattattaattgcaggaccatcaaaaacatctggaattaattcagtaaattcatgcgatagtgctaatttgaataaattactttgtacattatttaatgctgaagttgcaatatcttgctgcatccttcttctacctgtttgcatatggcttacattaggtctacttgtcaaaagtaaatccgctaattgtttttgaggaatatcatccacataacgcataacttttgatgcgttaattgaagatttaattactgtcacttgctctcctttccgatgtatcatttttcttgcgtaggatacaaaatttacgattagtataaagatattagttaatccctaactcttgtatgagtttcttgtactttatttccaaataaaaagctgacatctttatccaagattatagctgtctgaattgctgtgcttatgccgggagaactatacccagtttcccagttagaaactgttgattttcttacttgtaatttttctgctaattcctgttgagttaatcccttttcttttctagcatcagacaaattattgtttttcattctatcaccgcctttgtatgaataacttgtacctcgattatacagtacaagtattttgtatgtcaaccctaaagtaccatatttttgtacttttacattaaaaactagtaataatcttaaaatgatgtacaattatattgtacttcaaggaggagataatatgatttcaaatagaattaagtctgcaaggaagtatagaaagctcactcaagaagaattagcaaaaaaaataaattctactaagagcacaataagtaactatgaaaattcatatagttcaccttcggcagaagttatatctatgcttgcagacgccttagagacaagcacagattatttactagaaaaaacagatgagattgaaattaaacagaaatattatgatcttactaagaaagatgaaaatgatattgaaaaagaattagaaaaaatcctcagtaatttagattcatcagacggtctagcattctcaggggaaccactggatgacgaaacaagagaactactttcaatatcattagaaagatcactcagattcgcaagacaagagtcaaaaagaaaattcactcccaaaaaatttagagataaagattctgattaaaatggagaattgaggtcttataatgacaatgtatgcgtggatgattgaaaaacaagatgacataataaaaaaatggaacactagaaatccttttgaaattgccgaattcctcgaaattgctatcttttttgaggatcttggtaacatgtacgggtattacaatatgaaaaaccgtattaaaatgattcatattaacgaaaatataactattgatgaacaaatattcacttgtgcacatgaattgcaacatgcaatatttcatgagcaggctaatacaccttttctatccgaacacacacttcagtctgtacagaaaatcgaaactcaagctaattttttagcaacaaggttattgattgcaaatagaaaaatagatggaatcaacacaaaaattgagttgttaagatattatgggatacctcttgagatggcgaggttcttataaaataatctaatttatatttaaagggagagttttttatgaagaagattttgttaagcgggttaattatttttactggtgtgattttgatcagttgcggagatcaaaaagaaactgaatcaactacaacaaaagataacgcagatgaacaaaaaattacaactgaagatattcaagttccagatgatgtaaaaaaagttgcaagtcaactaggagaagataagattcctacagaagatttgaaagtaacacaagataattattacatcgatggagaaaaaacaaatgttaatctagtaaaattgttaaacagtgaatctacatcaagtataaacgcaatattaaatagtgataacaaagcagcaaaagaatacaaatttaacggtagcaattcaggaactctcatgctattgctcgcagccgtaaacagcaaacttgatactcaagtctcgaaagaaatagtaaatgctaatgatactaatgaaagtgttgagaaagaactcagttcagacacaagcaatgtattattcaaatatgacccagcgagcgatgatcattctatgcatgctactattactttaaaataaagaatcgcccttctcgggcttttctttaaaaccaaaaacagaacgtatgtgctattaataactttgagaggatgaaagagaatggcaaagaacaaatggcaacccactaaacatttaggaatttatgaatacatgactaaaaaaggaaagcgttatgggatacgagttcgttataagcaaggtaatgattatcctgaaataaataaatctggttttgagacaattgcagctgcaaaagtttataaaaacaacattgaaaatttgaaagctaataaaaaagaatatgtttttacaaatgaaaaattaacattaaatacttggtttgcttcttacatggaaatgtttaaaaagaaaaacaaaagtaaagacacaatagcgaataaatatagtatttataataatcacttagaaatcccttttggtaattactatttaactgatataagtttagatatttacgaagactttttgcgcgaaaaaattaaaaatggatacgcaaacaactcagtcaaagcgatgcataaattaatgaaaagcattttaaacgctgctgttagatatgagaaactagaaaaaaacagacttcaatttgctgaaatagagcaattagaagaaaatgaagttattgagcttaaggtattagaaacagatgagtttaatgtatttatatcagcttgtagagcattttttactaaatatgattttacaatgatttatcttgcagtttgggggatgcgtcgcggtgaagttatgggggtaaaacttaaaaatcttacttttgatgatgctaaacaacaagtacgtattacactagattccactcgaacccttcgtactcccgagggaaaaggtacgaaaacaccagctggtagaagaatattactaatagacggcgaaggttatcgactacttaaatattcggtagaaaaagcggttagcattgctaaagaccatggatctgttttgcaccaggatgattttatttttagaaacccaacttctaatcgtccttgggcggttacgcgtatgaatgatttactacgaaaattagaaaaagaatacgacataaaagtttaccctcatctattacgccataactttaatactcaggcattattggctggagctaatagcaatgatttacgaaaatttattggccacaaaaacagtagcatgactgatcattattcacatgcgacagacgagggacgagaaaaattaatgaatacgatgaaagacagattgtcaggaatctagaaaattgtgggataaaaattaaatataaaaatatcccacaaaaaatcccacaatagtttgatattgtatgatattcaaatgaaatcaaaaaaataaaaaccccgtatttcctaagaaaatacggggttttgatatcatataaaatcaattaaaaattgacttattttttcacttggctcattacttcttcaacaaagttatcttcttttttctcgattccttcgcctacttcaaaacgtacgaatgatacaacttttccgccgctttgttttacgtattcgccaacagtgatgtctgggtttttaacaaatggttggtcttctaaagaaatttcgcttagatattttttcaaacgaccttctaccattttttcaacgatattagctggtttgccttcgtttaatgcttgttgagttaatacttctttttcgtgttcaacttcttcagtagaaacgtcttcacgagaaatgtatttaggattgattgcagcgatgtgcattgcaacatcttttgcaactgtagtgtcagtagttccttcaagaagtgtaagaacaccaatacgtccgttcatgtggatgtattcgccgaaagcagagttgtccgctttttctttaacttcaaaacgacgaagggaaatgttttcaccgatttttgtaattgcttcagtgatgtagtcttgaacagtttgaccattaggcatttctgttttaagcgcatcttctaagctatctggacgtacttcaagaatttgtttagctagtgcatcaactaattgttggaagttgtcgtttttagcaacgaaatctgtttcagcatttacttcaagtactacagcatgtttttcattgctgattacatgagtcataccttcagaagcaacacgatcagattttttcgcagctttagcgattcctttttcacgaagatagtcaattgctttttccatatctccttcagtttctacaagcgcttttttacaatccatcataccagcgccagttttttcacgtaattcttttaccatttgagctgtaatattagccatttattttccctccaatttttctctttaaaaaaggtgataagaatagtgccttatcaccttgaaagtttcaaataaaatcttatgcttcagtagtttcttctgcagctttttcttctacaggagcaacttccgcttcagttaactcttccccttggttcacttcaatgatagcgtcagccattttagcagttaaaagtttaaccgcacggatagcgtcatcatttgcagggattacgtagtcgatttcatccggatcacagtttgtatcaacaataccgatgataggaatatgaagtttacgagcttctgcaaccgcaatacgttctttgcgtgggtcaacgatgaataaagcatcaggaagacctttcatgtctttgattccgcctaagaagcgttctagtttttcttgttcttttttaagaaggactacttcttttttaggaaggacttcaaaagttccgtctgcttccattttttcgatttttttaaggtgttgaatacgtttttgaatagtttcaaagttagttaaagtaccacctaaccaacgatgattcacgaaatattgtccagaacggatagcttcgtcgcgaacggattcttgagcttgttttttagttcctacaaacaggatagttccgttgtcgctagctacttcacgcatgaagttgaaagcttcgtctacttttttcactgttttttgtaggtcaatgatataaataccatttctttctgtgaagatatatttcttcatttttgggttccaacggcgagtttggtggccgaagtgaactcctgcttcgagtaattgtttcattgaaataacaggcatgtgttattccctcctattggtttattttttgcggataaccgccctccgcatggatcaaccagctgaaaaacttaagcgaacaagcgccaagcaccttctcagtctgtcaccgtgcgtgtgtgatttaacaccgtttcctaatataccataaaaacgagaaatatgcaacctgtaatacagatcttcttcctaaactagtttttttcaacgataatctcaagttcttcggctaaactgagaacggcttgtttttttattcttttaaattgtgctatttcataaggtaattccatcattgtagcgatgtctttttgtttatcaatataacatttaattagaatgaaacgatgcagaggtttcatggtatttaatatctctgtatataattgaactaattttcctattgcagttatatcgctactgtcatctgttattaactttttttctactataccctcagaattaagttgtatcttgttcctaggtcctaaaaggaaaaccaaatactgaaactcctcaaaaaaacgttttacattttggacagttttaatgtagtctatactgtttttcattgctgacaccccgttttacattaatactagcaaaatattagctatatttgttatgcatgttgcttaaaattttccaaagaaaaaacgcttcaaaattagcaacaaagctcaatttcgaagcgtttctctaatcaattcgcaacaatatttacaagttttcctggaacgacgattactttacggatggtttttccgtctatgttttctttgattttatcgtcttcatgtgcgagtttctctagttcttcttttccgagtgactttgcaacggtgattttactttttactttgccatttacttgaagtacgatttctacttcatcttctactagttttgtttcatcgtatgttggccaagctacatagctaattgtttctgtatgaccaaggatttcccacaattcttctgcaaggtgtggtgcaattggggacaagagttgaacgaaaccttcaacatattgttttggaatcgtatctcgtttgtatgcttcattgatgaaaatcattagttgcgaaatcccggtattgaaacgcagattttcgtaatgattagtaactgttttcaccatatgatgatacgctttttctaaattagcattcgcatcggttgtaactttttcagcaagagtgccttcttcagttactagcaagcgccaaatacggtctaagaatttacgcgcaccttctagtccattttcattccaagcaatagaagcttccagtggtcccatgaacatttcgtacaagcgaagtgtgtctgcaccgtatttttctactacttcatcagggttaacgacattgcctcttgatttggacattttttcgttattttcgccaagaatcatgccttggttaaatagtttttggaaaggttcttttgttggaactacgccgatatcatacaagaatttatgccagaaacgtgcataaagaaggtgaagcactgcatgttctgccccgccgatataaacatctacaggaagccattctgctaatttttctttatcagcaattgcttcgctgttttttggatcgatatagcgcaagaaataccagcttgatccagcccattgtggcatcgtatttgtttcgcgacgaccttttcgaccgttttcgtctgttacgtttacccagtcatgcaagttggcaagtggtgattcgcctgttcctgatggtttgatttctgttgcttttggcagaagtagtggtagttcgtcttctggtacaagcgttgtttccccgtcttcccagtgaataactggaattggttcaccccagtaacgctgtctgctgaacaaccagtcgcgcaaacgatacgtgattttacggctaccgatgccttctttttctagccaatcaattgcagcggtaatcgcttcggctttagctagtccgttcaagaaatcagagttaatatgtggtccatcgccagtgaatgcttcttttgtcacgtcgccgccttcaagaacaggacgaatattcaaaccaaattgttgcgcaaattcaaagtcgcgttcatcgtgggctggtacggccataattgcacctgttccatattgaatcaacacgtagtccgcaatccaaattggcacttcttcaccgttgattggattaatcgcatatgctcctgtgaatacgcctgttttgtcttttgcaaggtcggttctttctagttcgctttttagttctacttgttttttataagcttcaactgcttctttttgctccggtgttgtgattttttcgataagttcgtgttctggtgcaaaaactgtatatgttgcgccaaaaagtgtatctgggcgtgttgtaaagacattaaacgtttcatcgctatctttaattttaaaagtaacttctgcgccttctgaacgaccaatccagttacgttgcatatctttaatattttcaggccagtctacaagttcaaggtcatctagcaaacgatctgcataggcagtaattttaagcatccattgacgcattggtttacggaaaactgggaagccaccgcgttcacttttgccatcgattacttcttcattggctagtacggttccaagtgccggacaccagtttacagcgatttcggcttcataagctaagccattttcatataatttttcaaaaatccactgtgtccatttataatattcaggatctgttgtattaatttcacgatcccaatcgtaggaaaaacccagagatttaatttggcgagtaaagttggcaatattcagtgcggtgaattcttctggatcgttaccagtatcaatcgcatattgctctgcaggaagtccaaatgcatcccaaccgattggatgaaggacgttcttcccttgcatgcgtttcattctagacaaaatatctgttgcagtatagccttctggatgtcctacgtgaagacctgctccagatgggtaaggaaacatatcaagtgcatagaagttttctttatctttatcttctgttgttttgaaagtgttatgttcactccaatattgttgccatttcggttccatttttttatgattaaatgtcactttactcatcctcttttccttaaaatatcgaattttggctacaaaaaaatccctacatcccaacggcttatcgccatgggacgagagatgcttctcccgcggtaccacccacattagtgtttaaccactcaacttaacaattccttaacgcggaaaacggggatacacccaagctccatggtaagttcatccggattttgtgactgacttgcaccaaccgtcagctctcttcacatcaaaatatgcagattactactccaattcatcgctatttcgcaaaattcattagtcttattgtagctgaatttaggttttttagcaagcggtctgaagatttatctaactttcgtagtaaaatgtgctaaaatgaatggagaatttcatttgaaggagtctaaaactagtgaaacaaacgaatccatttgtatatagtaatgataataaaagataccatacatggaactactgtttacgagaagaatttgggcaaaagacatataaagttgcgctcgatggtggttttgattgtccaaatcgtgatggcacagtagcgcatggcggttgtacattttgtagtgcggcaggttctggagattttgccgggaatcgagcgcttgatttaaaagtacaattccagcaagtgcgcgacaaaatgcaaacgaaatggaaagacgggaaatgtattgcttacttccaggcttttactaacactcatgcccctgttgctgaactgcgcgagaaatttgaaacggttttgaatgagcctggagtggttgggctttcgattgcgacacgacctgactgtttgccggatgatgtcgttgaatacttggctgaattaaatgaacggacttatttatggttagagcttggtttacaatctgctcacgatgaaactgggcgcttaattaaccgcgcgcatgactatgattgttatttagaaggcgtgcgcaaactgcaaaaacataatatccgcatttgtacccacattattaatggtcttccgaaagaaacgccggaaatgatgatggaaaccgcacaaaaagtagttgaaagtggcgttgatggtattaaaatccatttactccatttattaaaaggaacgccaatggtagaagattataaaaaaggtgacttagaatttttaacccgtgatggttatgtgaacttagtggctgaccaactcgaaattctgcctcctgaaatggttattcaccgaattacaggtgatggtggcgtggatgacttaattggaccagtttggagtttaaataagtttgaagtactgaatgccattgatgcagaactcgttcgaagagatagttggcaagggaaactatatcaacctgtggaagtgagttccaaatgaatttacgtggtattctccccttcgctcatgacacacttcgaaaagtagttcgctctggagattatgtaattgatgcaacatgtggcaacgggcatgatacacttttactagcagaacttgtgggtgtaaatggtcatgtgctcgggtttgatattcaacaaatggcaattgatgcaacgaaaactcgtttagaaaatgcgggtgtcgcatcacaagtagagctcgtatgtgctagccatgcgcttattccagaatatgcaacaaaacctgttcgcgctgctattttcaatctcggctacttgccaggtggcgataaagaaattacgacaaccgctgattctacgttagaaagcattggccatttaatgcagctactcgaagttggtggcgtcattattattgtaatttatcacggtcatccagctggaaaagtcgaaaaagatgctgtcttgactttttgtgaagcgattccacaacaagatttccacgttttatcttataactttatcaatcaaaaaaatgatgccccattcgtcattatcatcgaaaaaagaaaacctagacaaagctagtaattagcctgtctaggttttctttttattttccaaaatcgtatttatctgctacgtatacatcataccaaatcataaagataacaactgtccagattttacgactgtaatcgaatttaccggcacagtgatcgtctagtaagcctagaacgtattgtttgttaattaaatgatcggttggtgattctttaatgatatttttaacccaagcgttcatttcgtcttttagccagtgacgaattggtactgggaatcctagtttacggcgattaagtacgtgttctggtacaaaagtggctgccgctttacgtaagatgtatttggttgttccattggttgttttcattgtatctggaatatttcttgctacattgtacacttctttatcaaggaaaggtacacgaacttccagtgaattagccatcgtcatccggtcagcttttaggagaatatctccacgtagccacgtatgaatatcaatatactgcattctttctacaggatgataattcttagtttctgcataaaatggatccgtaatgttcgtataatcatgaccagattggtatttcggaagtaaaatttgtttttctttttctgtgaacattttggcgtttccgatgtaacgttcttccatcggtgttgttccgcgttctaagaaacttttaccacgcattccttctggcataatacgcgccacgctatttaacattgatttaaatacgcctggcattttgttaaacatcgcaagggaatttggttcgttataaatgttataaccgccaaaaagttcatctgcgccctcacctgataatgctactgttacttgtttacgcgcttctcttgataagaaataaagcggaatagcagccggatcagcaagtgggtcatccatatgccaaacaatttttggtaattctttcatatattcttccggtgagataacataactaatattttctacaccaagcttatctgctgtttcttttgctacatcgatttcactgaaaccatcgcgttcaaaaccaacagaaaatgttttaattgcaggatggtattctttggcaatcgccgcaataatcgatgaatcaataccgccagataggaatgaaccaactggtacatcggagcgcatatgcatttttacagaatcatacattacgtcacgcacttctttaatccatgcgtcttctgatttagttactggtgcaaaagatgctttccaataagtagtaatttccattggttgaccaattttcttcgtgaactgatgtcctggttctaagcgttttacatttttagttaaggaatctggttctggaacgaattgataagtcatgtagttttgtaatgaaacttcatctagttctttttcttttaaagcatgtaaaatggatttcttttcagaacccataaatagcttaccgtcttcttctgcatagaaaaatggtttaatgccgaatgggtcgcgtgcgccgtaaacaagttcttcttgtttatcccaaataacaaaaccaaacatcccacgaagacgttctgctgttttttctttgtatttcgcatatgtagcgataattacttctgtatcactttcggtttcaaatgtcattccttcagcaactaattgctcgcggagttccacatagttataaacttctccattaaaaataatccagtaacgttcattttcatacgttaacggttgatgaccgttttctacatcaataatacttaaacggcggaaaccaaactgcacgtgatcatctgtgaagtatccttcatcatctggcccacggtgcgtaatcatactgttcatttgtctaaaggtttctttatcagcgccagtaatttctgtaatgcggtcatgtacgcatcctacaaatccacacatggtaacatttctcctctatatagataatcattttatctttttttcacaacgtctatcatatcataactaggctttctttgcactgtttaggaaagaaaaaaaccgaacattcctcacaagaaatgttcggttaagcttattttacgattaatttttttaaggcttctgctttatccgttctttcccaaggtaaatcaaggtcgctacggccaaaatgaccaaatgcagctgtttgacgataaattggacgacgtagatcaagcatatggattatcccagctgggcgtaagtcaaatagctcattaacaccatcaattaattcttgttctgaatagtcacttgttccatatgtgtcaatcgaaatggaaactggacgcgcaactccgatggcatatgcaacttgtacttctacttttttagcaagtccagcagcaacgatatttttagcgacatatcttgcagcataagcacccgaacggtctactttggttggatctttaccagaaaatgctcccccgccgtgacgcgcataaccaccgtatgtatccacgataattttacggccagtaagtccagcatcgccaagtggtccaccaataacaaagcggccagttggattaataaagtatttcgtattttcatctaagaaagaagcatcaattacttctgggaatagatgtgtgtgtaaatctttcgcgatttgttcttgtgtgatgtcaggatgatgttgcgttgaaacaacaattgtatcaatgcgaacaggttgattaaattcatcatattctacggttacttgggttttcgcatctggtcgtaaataatctaatttattcgttttgcgtaattctgttaacttgcgtgccaagccatgtgccaaaaagattggtagtggcattaactcttctgtttcatctgtagcaaaaccaaacatcaaaccttgatctcctgctccaattgcttcaatagcagcatcaatttcgctgccacttcttgattctagtgcctcgtccacaccttgcgcaatatctggtgattgttcgtcaatagccgttaaaacagcacatgtctctgcatcaaaaccatattttgctcgagtatagccgatttctttaatagtatcacgaacgattttaggaatatctacatatacagaagtagtaatctcacctgctactaaaactaaaccagttgtcacagtagtctcacaagcgacacgtgcgtccggatcttttgaaataattgcatctaaaattgcatcagatatttgatctgcaattttatctggatgtccatcagaaaccgattccgatgtaaatagatgacggtttttagccaattttattttcctcctttagttctctccaaatacgtctcatataaaaagcctctctctattttgcacgaaacgcgcacgaatagagaaaggctataattatacctttgctctcatcgttcaggagatattactcctgcaacagattagcacctttcacttatatgtgtaggttgctgggcttcaaagggtcagtccctctaccgctctggataagagataaattttaattctaagatagaataccataaactgaggctatatgcaataaaaattcggttttgtcttgatttccatttgcaaaaaacagtaaaaaagtgccttcctttatttttcacttatcattatttccatcctgtggtatgatagatggataaaaaagatgttttacttatctaaaggagattgtatctatgagtttaattacgttatccttgattatttttcttgggtttttagccgttgtatgtttatttgattttgtttttcgttggtattggtttaaatatttcttagcaacaatgggattaattgcaagtggtgtggtatttttcatcagtttttacggtggtgggatgtcacaaacagaaatcgctattgctatttttattggttcatttggtgaatatgtcgtatcacttattattagcctagttcgctttatttccaaaaaatcaaaaaaacctaaacaaaagaaaaaagtcaaaacagcttaaaaaactagctacgttaaaagatgagaatctttaatgtagctagtttttttatggataattttaaatctaaagcaagtcgaaagctttacggataacttccgccgaatgttcaaaattagtttgttcttctttagttagtggtggttttatcgtatctagaaccccatttgctccaataagcgctggttgtccgatatatgtatttgtttgttctgaaaaaacagctaacggaaatacttgtttcgcatctgttaaaagagcatcaacaattcccgctgtggcagtagcaattccaaaactcgtccaacctttacccgttaaaatattccagccaccgccgcgtactgcatcttttaaagcaggtaaatcaagcggtgtcttcgttttataatcagtgatattgacgccaccgattttcacagtcgaccacgcaacaaattgtgattcaccatgctcgccaagaacgtaaccttcgatgctttttggattaatatgtaaagcttctccaactactcttctcattctagcagtatcaagcgatgtccctgttccaaatacacgggaatgatcaaaaccagatattttttgaataagcatggtaataacatcacacggattagtaatattcacaaaaatccctttaaaacctgtcgctaaaattttcggcacaatctccgttaccgaacgacttgtttcaacgagttcttccatacgatcttctcgtagtaatgtttccggaccaacagccatcacaataatatctgcatctgaaagagcttcccagctattcgctgtaatggttgtataggaacgagtcatcgatgccatatcgcgtaactcaagcgcttcactttctgcttttgcttctattttatctattataacgatttcatcacaaatcccttgcgtaacaagagaaaaagccacgtcgcttccaacatgaccagcaccaattataccaactttgcgtttcaaaaaatcccctccacaattagttacttgaatttaaagcgattaattcatatttaatgatggttttattattttcccatacaagtttgcgcggaattgcttctccaagtgtttcgccttcttttgttttacgaacagcaattggaacatcaattggataaatccggtaacctactttttccagttcaaagaaattatctgaaattcttttttcatttccctttgttacgatcattgtgtttacctcaagtggcatacccaattttctcacctccagtttcttttatcatagcagaaattaccctggtttgactagtttttatcgtttaaaatccgctcagcccgcttaacaatttgccccattccagcatcacgcataaaaaaactaaatgccggttgcaaaataaacttactaagtgttcctttcacaacaactggaccttttgtttctaagtagttttgttgccttgttattgaaacaatctttgctgtataaacccgtttagtaaaagttcgttccttagattcaactaaataatccgcaacaaaatgaaatccttcagctactgcaccagtttcttccattagttctcggcgggctgccacaagactagtctcgcccggctctcctttaccaccggggaattcgagaccgcgaattttatgttccgtaaaaagccaaccatcgtcaattttaggaataatgagtacgtcatctggatttttcccttgttcttcaaaataaatggtcactttattgcctaaagtatctttataaataaacaaaaactcacttccttttcttttttcaaaaatatggtaagctgttagtaagatgaattttagaggatgaatattaatgaaaaaaatgcttatcggaggaatccgactttatcaaaaatatatctctcgtttcactccggctacgtgtcgtttttatccgacctgttctgcttacggaattgaagcgatagaaacacatggcgccctaaaaggaagttatctcgcaattagacgtatttccaaatgccacccttttcataaaggtggacttgatttcgtaccacctaaaaaagataaaaatgatgattctggccatacttgtaaagcccatcatcaccattaataatagcatgaatcggtttataccggttcattttttcttgctttttctgaaataataaggtattatcaaattcggactataaatcgtaattgctacgattagtatactatttaaacaagaacaatttcgatttagaggagtgaatggattgaaaaaaagttatcttcttgctttaacagcattattatccgtttttttaatacttacgggctgttcggacagtagtaatacaaaagcaacaaaaagcggtaaattgaacgtttatactaccgtttatcctttgcagtatttaacagaacaaattggtggcaaatatgtagacgttaaaagcatttacccgcctggttctgatgcccacagttttgaaccgacacagaaagatatgatgaaaattgccgatagcgacttatttttctatatcggacttggtatggaaggttttgtcgacaaggccgaaaaaacattaacgaatgaacatgttacttttgtccctaccgcagaaaaactcgacttgccaaaagatcctgatgcggccgaagaacatgaccacgaaagcgaagaggaacacaatcacggcgatataaatccgcacgtttggttaaaccctgtgtatatggaacaaatggctactatcgtaaaagataagttaattaaagaaatgcccgatcaaaaagaaacattcgagcaaaattatcaagctgtagaaaaaaatttaaaaaaactagatcaagatttccgctccgttacaagtgaagcaaaacaagaagattttgttacagctcatgccgcttacagttactgggaaacagaatataacttgcatcaaatccctatagccggcgtatcgactagcgacgaaccttctcagaagaaattaaaagctatcgtggaaaaaattgaagcagcaaaaatcccttacattatgcttgaacaaaacactaattcgaaaatagcagatgtcatcaagcaagaaacaaatacaaaaacactgacacttcataatctcgaaacactgacacaaaaagatatagaccaaggtcgcgattatctttccatcatgaacgataatttaaaagctttaaaacaaggacttgattattaaaaaaagaaaggcactctaattaattagagtgtctttcttttaatttatttcgctgaattttgcctgaagctgttttcggtagatgttccacaatcgttatttgcttagggattttaaaactagccaagttcgtttgacaaatatcttttaataccccttcatcaaatccttcatttacaacgataaaggcaacaggaacactgccccatttagcatctgacttacctacaaccgcaacttcttccacagcctcataagcgccaatcacatgttctatttcagtcggataaatattttcgccaccagaaataattaaatcagaacgccgctctaaaacaaataaaaagccttcttcatccaaataaccaatatcacccgttttaaaccagccatctataaaagcttttgccgttgctttttcattgtgtaaatatccaggtgtaattgaaggtccttttagtaaaatttcgccatcgtcagcaatttttacttctgcaggaaataatgctttacctgaggagccaattttgtttaaggcatcttttggtggcaatgtcacaatttgtgaagccgtttcagtcattccaaacgactgtactaatggaatatcgcgttgtttacaaatttccaaaacagctttattagctggtcccccacctaacaaaacagttcgcacattcggatggtagcttccgccttgaatttttaacaatcgttctaacatcgaagtcactacagagatggtagaaattttaccactttcaagcaattgcgtaattttttcttcatcgaaatgctcttctaaatacacgggaattccataaataacggaacgcatcataattgataaaccgctgatatgaaaaataggtacagcgcaaagccaactatctttctccgttaaacctaaatttaaaactgaagaaacagcgctccaccaatgattttcatatgtttgcattacaccttttggttttccagttgttcctgaagtatacataaccgaagctgtgcgtgataaatcccatgttttgcataaatcgggttccacgtatgtcgtttgctgtaactcttcgtagctaattccagaagtcactttatccacaaacgcatctgctacaatcacttgttttacctcagcatttgccaattgaaaagtaatctcttttttcgttaaacgattgttaaggaataaagtgatagctccaagttgttgcaaagcatgaataagtaaaaaagtcattcggtcgttttttccaagtaaagcaaccatctcgtcttttctaataccgcgcgcgaataatttacccgcaagtttctctacggcttcatatatttcttcaaacgtttcttgttttccttcaaaaacaagcgcggtttctccaggagaaagccgcactcgtttttgaagccagtttgtcatgtccatttttacaccttcaaatcaagggaattttggaaattggtcaaagtcaggatcgcgtttttctttaaaggcatcgcgaccttctttggcttcatctgttgtatagtatagaagtgttgcgtcaccagctaattgctgaatacctgctaaaccgtcagtatctgcattgaaagctgctttgatgaaacgcaaggcagttggacttttttgtagcatttctttcgcccaagctaccgtttctttttctaaatctgctactggaacgactgtgttaatccagcccatttcaagtgcttcgtccgctgtatattgacggcacatgaaccaaacttctttcgctttcttatggccgataacacgtgctaaatagccagaaccatatccagcatcgaagctaccaacattcggcccagtttgtccgaatttcgcattgtctgctgcaattgttaagtcacatactaattgaagaacatttcccccaccaatggaccagcctgcaaccatcgcgataactggtttaggaataacgcgaattaaacgttgtaaatcaagtacgtttaagcgtggaatttggtcatcgccaacataaccgccgtgaccgcgcactttttggtctccgccagaacagaatgctttttcgccttccccagttaaaataataacgccaagatccgaattatcgcgtgccaagttaaatgcatcaatcatttctgttaccgtttttggtgtaaatgcattatgtacttctggacgattaatcgtaatttttgcgattccttcataactttcatatttgatttcctcgtatactttttctgtttgccaattaaaactcatttttcttcctcctttaaaataccttccagccagtatatgagctgacttgaaaaaatgtttggttgttctaaataaacagcatgccccgcttcttgtaccgtgacatgagtgctatttggtaaaagttgcttcatttctcgggcgattttttcgaatttctcatctaaattgcccgtaatcagtagcacaggaaaagtaaagtccgctaaattttcccaataagaaggttgcttcccggtgcccattccgcgtaaactctttgctaaaccatgtggattttgagctaatcgctctaatcttattcgcttttttaacgcaaacggtaaattcttctgtgatgcaaaaagggctaaattttcccagtaagctacaaaaggttcaataccatccgcatcaagcgtgtctgctaaccgattatctgcactaattcgacttgcgcgtgctttttcatctcgcagtcctggtgaactactaactagaacaagcccgcgcacaagctccttatattttgcagcaaaagcagtcgctactctcccgcccattgagtaccctaaaacaaaacagctatcgatttttaattgatgtaaaatactggccaaatcatcgcaaatattttcaatcgaataacgcgcaacttccttgggacaagaagtttttccatgcccaagtaaatcaggcgcgatgatactaaaatgctcttttaaaagcgatatgctatcttgaaaagtctcgctggaaccagtaaaaccatgtaacattaataaaactggtttttccccgcttatatcatttattaaatgataatgttgaccgtttactagcatattaatctaacgcctttaaagcagtcgcaattttttcccaaagcgcttggtggtttgctttattttcatgacgattggtttttacttcaataatatctaaacctttatggtagcttgctttatcaatagcttcttcaagtgagtccacagattttgcttcatgataatcagcatcataaaatgccgcagcaaagcggaaatcaagttcagttgaagtaccaaacagtgactcaaaatacttcggttcatttgcttgaggtaaaaatgagaagatcccaccgccgtcattgttgacgataataatagtaaggttcatcttatattttttcgccataagcaagccattcatatcatgataaaacgataaatcaccaatcagtaaaaacattggttggaatacaacactagcacctagcgccgaggaaacaaccccatcaataccattagcgccacggtttgcgagcatttttattttcttatcaatttgcgaaaaataggtatctacatcgcgaattggcatactattaccaataaataaaccagctttatctggtaacaaacggcgcaattccgaaacaattttgccctcttctaaagtagttgtattcgccatttcttccagaacgatttcgcgcgctttttgattgtaagaagtccatctatttaaccatgaagcgtctttcgtatcgtccggcatattttgttgcataatatcaagtaaaaatcgctcgtcgcagtgaatcatatccgttacagctttaattggatccttccaagcagcaccaggatctactacgtaaaatctgatgccaaaaagatgttccaaccagttttttagtggtttagaaactggcatacttccaaagcgaatcactacttctggtgttaatttatccaaaatatccgcttcttttaaaaatgcatcatattggtcaattaccacttcatccattgccccgtaagaacgtaagccagaaagaggatccgctaaaattggccaccctagttttttcgccaaatctaccatgggctgttccaattcttttttatcaatcggtccaacaacgaatacgccttttttgcccgtgcattcggtgaccattttttgaatggaactatcgtctaaaacttcatgcgtatagtaaatatgtacatgatgatgttttttcccagtagcagtaaatggagaaggttctaaaataggcacaagtggttcacgaagcggaaaattaagatgcactggtcccctaggtgttttcatagcaatatccaccgcgcgactactatgccatttagcatagcgaagcatttcatcactgttttcaggaagcgccatatcagtgaaatcttttacgtgcgaaccgtataaatgcagttgatccattgcttgtggtgctccaacatttctaagttcatgcggacggtcagcagttaggacaattaatggaatttgtgataaatttgcttccaccacagcaggaaaatagtttgccgctgcagttccggaagtacagagcagaacaactggacgtttggatgctttcgctagtccaagcgcaaaaaaaccagccgatcgttcatcaacatctacataaatcttcaatgttggatgttctgccatcatcagtgccagcggagttgaacgagaacccgggctaataattgcttcttttacaccggcttgcacaagctcctcaataaatgcagctaaataatctgtcagcacttgttcgtggtttgtcatttctttatgcctcctaatacgcgtaacatcggttggaatttaacctcagtttcttttaattcttcttttggaacagaatcaccaacaatcccgcaaccagcatagatcaaaccttgcgaatcaacaattaaaccagaacgaatcgcaacagcaaactcaccagagccttttaaatcaacccagccaattggtgcgccgtaaaatccgcggtccatttcttccttcattcgaataatcgccagccccattttttgcggtaatccgccaagtgccggtgtcggatgaagagctttcaccatttcaagcattgtcacatcaggctttttcttcgctgtaatattcatatataaatgttgaatatcgcgatttttcagtagaactggttggctagataacgaaagacctgttgtaaatggttttaatgtttcttccatcatttgtacaacataggaatgctctcgtaaattttttgcatcttgcagtaaagcatttcctagggcttcatctgcatcatccgtagcaccacgttcggttgaaccagctacacaagaggactggattgtatccccatttacagcaagcaatctttctggagttgcgccaaaaaagactcctgttcccttttctataagaaagaaataactattttcttgtgttgctagcatattttccaaaataattgcgctatctacttgtcgctggaaacgtaaccccatccgtctagctaaaactacttttttcacgtcttctgaatgattaatcatatcgataatctcacttgcagtctctaggaaatgctctttaccaatttccttaaaatctgttagcaatgccatttcagcttcattaacctcttgatgaatgattttttgccactgattaaaaacagcttctaatttgctctccgtatcatctgagtagatggacaaattgaccgttaagtagcttttcccatccttattagtcaacataaatagcggtaagtagaacaaaccatctttaaaactttgccattctttctctgtatcccgctcaggatcaaaagcaaaaccgccaaagtaaattggcccagttgcatctactgttgcatttgttacacaagtgcgcagtcttttttcaattttctcttgcagtccaagaaaagcatcttttttcttctccgccaaaaattgtttcgttacaccaaaaccggtcatcgtcagtgtcatttctggattttgccagaaaaaacgttcacctttaaaagccgtaccagcttttttaaacaatttgactggagacactaattcatctaactcagttacccagctaaatagagccggttgatcttggcttgcgctacgtttcgcttgattaaataaatcaagaggcaatttagtattcatatgcttatctctccttttacattcacatcttctattataccaaaaatagagctaaactgcttggtttgcgttttttctttcatttcgttattaattattgacgtcgttcaattaattccctaaaatgaagggtagacatctgaaacatatggaagtgaaaaaggagagaaaaacatggctaatgcctcaaaatctgcacttacaaaacaaactggatttcaaaaatggtggtcgttacttcgccctcatacgcttgtagcttcttttgttccggtatttttaggaacctccgtcgcaatgagctataccagttttcattttacacgttttatcgtcatgctaattgcttgtttcttcattcaaacatcagccaatctattcaatgaatattttgattataaaaaaggacaagacgatgaacattcggttggaaatggtggtgctatcgttcgtaatggtatgcgcccaggttttatattgttcctagcaatctttttatacattttatcgatcctcggtggcgtttatctatccattgaattaaattggtacgttggcttacttggcgcaatttgtatgcttgttggctttctttatacaggcggaccttacccaattgcttatacgccgtttggtgaaattatggcagggttctttatgggaggaattattacttttatttctttctacatccaagcggaatttattagttcttttatcgtctacgtttctattccaataatggtacttgttggaaacttgttactagccaatagtattcgtgatttagttcctgataagaaaaatggtcgtttaactttagctattttacttggtcgtaaatgggcaaccgttcttttcgcagctgcttttctgttcagttatgtatttgaaatcgcccttatctttacccaagatgctccgtggtggacactattaattctacttagtttgccagaagccattcgtgctgttcgtcgtttcattggaaaaacttcacctatcacaatggttccagcaatgaaatctacttccaaagctttaactatttttggaattacactagcattcgcttatcttttaagcctattatctagaaacttattcatgtaaaaaactggttgtcctaatgacaaccagtttttttatttggaagcaatttgtaattgttgtttattttgaacatatttcgcaagttcaatcgacaaatcatatcgtaaaaatggcgtaataatataaatcccctgaaaatgctcacaaatagcatcaactaattcacgcgcaatcgccatgccttcttcatttgcgtgaccgtgttcttccgcttctctcatccgttcccgaacctcatcagtcaaacgaatgcccggaacttcattatgaagaaattctgcatttcgacttgaaagtaatggcataaccccgataaaaagcggcacatcaatatttgccttttgcaaagcttctttaagcaaaacagctttatttacatcataaatgggctgcgtaataatataatccgcgccgtattctacttttcgttcaattaatcgaaccgccttttctaagttaagcacattggggttaaacgctgcgccaacatgaaaccgcgctttttccttcaacgattttcctgtatatgaaataccgtcattaaactttttaatcagttgaacgagctccaccgaccttaaatcaaacaccgaggatgctcctgggaaatcacctactttagtcggatcaccagtaatcgcaagcacatcatggagaccgagcttatgaaatcccatcacatgtgaatgcatcccaactaaattatggtcccgcgtcgtcaaatgaatcagcggtttaataccatactcatgtttcaaaatggaagccagcgccatattactaattctcggagtcgctagtgaattatccgaaatcgtaatcgcgtcaactccagcctcatccagcgccttagctccttcaaaaaatttcgatgtatcaaaagtccgaggtggatcaagttctactaaaatcgtcaaccgttccttcaccttatcaagtaaacgctcaccagactcctcgtcctcgacttcttcaggaacaagctccaaaatcggtcgaacttctttttccaaaacgggcttagtgctctctaatcctttacgtaaagcccgaatatgatctggagtcgttccgcaacagccaccaataattcgcgcaccttcttgtcgaaaaacttccccgtaatgctcaaaataatctgtatctgactgataaatgactttcccttcttgcacttctggcaggctcgcattgggataaacagctaagtatgccttatcataaagtggtactgtttcaagagcacgcgccatatgatatggtccaagtcggcaattgataccaaccacatctgcaccgagcgcaataagttcttccagcgcatctggtaattttttcccgttttgcaggatacctgattcatgcatcgatacatttgccacgacaggtaaatcagtcgtctcacggagaattttcaacaccgttttaagttcatctaaatcataatacgtctcgagcaaaattgcatccacaccatctaacaaaaaacagtatagctgctcccgaaaactacgcttaatttcttccagaggagccgccggaagtcttgcatccacagctccatttatcccgccaatcgtgccaaagatatacgtcccagtccctctcgccgcttcctttgctaaccgaatggctgcttggttaattcgcttcacttcatcctcaagaccatatcgagcgagtttaatataattggctccgtaagtattagtttgaataatatccgcaccagcaccaatataagccttatgaatcgctacaatatcttctggatgagataaattcagttcttcaaacgaacggtccaccccgtaggaataaagcaaagtgcccatcgcaccatctgcaattaatactttttcgcttaaatcttttcttaaattcatttcgcgacacttcctttcttaatgaacgaaagtgcttgttttaaatcagcaatcaaatcatctgcatcctcaagccccgctgaaaaacgtaataatcctggagtaattccttgttttaatcgctcctcttccggaacagcagcatgagacattttagcaggataagataaaatactctcaaccgcacctaaactcacggaaaataccggtaactccaaatgattcacgagctcgcgcactgcttcttcgctaccaagatcaaaagacaaaacagctccaccactcgtcgcttgttctacttgaatttcatagcctgcatgggatggtaacccaggataatgcaccgcgactacatctggttccgcatttaaaaacaaagcaattttttccgcagtttccgtcccagctttcatccgaacagatagcgttttaagtccacgaagcaacagccaagaatcttgcaccccaagaaccccaccagttgaattttgcaaaaagtaaatagcttcagccaaatccgggttattagtaacaataagccccgccaaaatatcactatgaccgccaagaaatttcgtcgcactgtggataaccaaatctgcccctagctctaacggtttttgaataagtggtgttaaaaaagtattgtcaacaaacgtatggcagccattcgctctcgcaagtttagaaacagtccgaatgtccgtcacatgtaatagcggattggatggtgtttccaagtaaaccaacttagtattcgcttgaaatgccttcgcaacttcatcaatatttgtcgtatcaacaaaagtatgcgtaatcccaaacctcggcaacacttgctcaaccaaacgaaaagttccaccatacacatcttttgaaataataaaatgatcccctttagatagtgtgaaaagtgccgcagaaacagcagccataccacttgcaaaagcaaaaccgttcgtgccactttctaactcggcaatcgcttgctccactttttctctcgtcggattgccacttcttgcataatcataagtatggtaattatcaaaatcatgttgatgaaatgtagacgataaatgaatgggcgtattaagtgcacctgtttctttatcgattcctaaactagctttaattacagctgtatcttgcccataatccttagccacgagcggtcacccctttcaaaaccgcatcaagcgctttagataaatcagcaattaaatcttcactagcttcaattccaaccgaaattcgtaataatttatctgtgagcccataagaatttctaagttccaatggaatatccgcatgagtttgtgttgttggataagtaatcaaactctctaccccacctaaactttccgcaaaagtaaacaactcaagctcttttaaaagtggcgatacgagcgctgcatccttaataaagaaactaatcattcccccgcggcccggatagcgcacttcctccactaactcatgctcttccaaaaacgcagcgattttctccgcatttgcctgatgctgtctcactcgtaaaacaagcgtcttcagaccacgaatcaaaagccaactatcaaatggtgataacacagtacccgttgcatttagctgatcaaaaaagaattttccaagccattcctctttaacaataaccgcgcctgccagcacatcgttatgtccaccaagatacttcgtcgcactatgaacaacaatatctgcgcctaaagttaatggttgctgcaaaacaggtgtataaaatgtattatctacaataacaagtaaatcattcgcatgtgcccaccgagacacactagcaatgtctgtttcttgcatcaatggattagtcggcgtttcgatgaaaattgcttttgtttccgggcgaaccaatttttccaaatcattcacattcgccccgtcccaataagaaaaaccaatctgatattgcgctccaaactgttcaaaatatctaaaagtcccaccgtacaaatcctgcgagcttataatatgttcacccgttttaaatagctgaaagactaattgaatcgcactcatcccagaactcgtcgcaaatgcatgcgtgccattctctagttccgcaagtgcttcttgtaaagcatctcgcgttggatttcccgttctagtataatcatatcccgttgataccccaagatcggcatgctggtaagctgtagagaagtagactggcatattgacagcacccgttctttcacactttctatttccaatttgcgctgctatcgtctcttgtttcagctttgccataattacctctcctccattcctttatttctctaatacttgatattctgcacgaacttctttagtcgctttaatcatatcttgaagtgctgcaattgtttcaggctctttccgcgttttcaaaccacaatccgggttaatccaaaattgttttgcatcaattgcacgtaacgcacggcggatattatcttgaatttctgaaacagttggaactcgtgggctatgaatatcataaacacccagtccaatttctttatcataagtcacttcttcaaatgtcgaaataatttccccatgacttcttgaggtttcaattgaaatcacatcggcatccaaagcactgattgtatcaataatgtcatcaaaatccgagtaacacatatgagtatgaatttgcgtatcattttgaaccgaagcagttgttaatttaaatgaatataccgcatcatctaaatatttttgccatctcgcttgtttcaatggtaaaccttcacgtaaggctggctcgtccacttggataaccttaatgccattacgttctagtgcttctacttctttacgaagcgcgaggccaacttgattcgcaacaacactttccggcacatcatcacggacaaaactccaattgatgattgttactggcgccgttagcatccccttcactgggcgcttcgttaacgactgggcatagacgctttctttcactgtaatttcctctgtaaaagcaacatccccatagataagtggtggacgaaccgctctcgaaccataagattgcacccacccaaatttagttgcttggaagccagctaatttttgtccaaaatattctaccatgtcagtacgttcaaattcaccgtgaactaacacatcaatatctaaatcctcttgaattttaatccagcgagcagtttctttttcaataaatgcattatattcggcatcggtaatatttccttttagccaatctgcacgtgtcttccgaacttctggtgactgtggaaaacttccgatagtcgttgttggaaacagtggtaatttgagccattcatgttgtaatttgattcgttctgcaaatggtaattctcggtcaacccgaacattttctaaattagcaatcgccgcttgaacttctaaattatttcgatggcttgattcattaagcgcttttacagcctcacgagcttcatttagctcagcagccacactttccgcaccttctgttaaagctttcgttaaaattgcaatttcatctaatttttgatcagcaaatgataagccgcctagaatcacttcatctaaatcaggttcgcttagttttgttactggtacatgtaataatgaattcgatggttggacaatcaatttatcctccgccacataatgagcgatgtcagtaaggagtgccaatttcgcatccaaatcactgcgccaaacatttcgaccatcaatcaccccagccgctaaatatttattttgcggaaatccgtgagctttcaacgctttaatcgaatcgccgtgatcatgaacaaaatcaattccaaccgccgcaactggcaaattaacaacctcttcataataatccaaactttcaaaataagtttgtaactctattttcaagtttggtacagcatcatgaaacgctttgtatactttttcaaataaagcaatttcttttttatcaaaactagttgcaagataaggttcgtcaatttgaacccacgtagcaccagcagtttcaagctctttcaaaatttcaatatacgctggaataaatttatctaataatatttcaaagctttctgcatcgctaccttttccaagttttaaataagtaactggaccaactagtactggcttcccttcaatcccaagctcgtttttcgcttcttcgtagtagtaaagcgcccggttatctaatactttaggatcagcttcagcaagttctggcacgatgtagtgatagttagtattgaaccatttagtcatttcagaagcaaccgcgtcactcttaccacgcgcaatatcaaaatatgtatttagcgaaaccttcccaccatcatgttgaaagcgttttggaataatcccaaatgtaacgctcgtatctagcacttgatcataaaaactaaagtcaccaactggaatcaaatcaattcctttatcttgttgtttctttagcgcatgtaatcttagagcttttgtttccgccaataattcctcttctgaaatcgcaccattccaaaacttttctagcgcacgtttccattcacgtttctccccaagtctcggataccccaagtttgaactaatcgcctttaccatacctatcaccttatcctctcaattttttgccaataaaaaacctccctagagaactagagaggtttggaagtttcgatacacaaatacagtgaaactttttaagtctctcttatctctcgaagcatcacacttcgcaggatttagcaccttttcaacgaattgaaaggttgctgggtttcaacgggccagtccctctaccactcataataagagtaatttatttagtttttttaatcacttaaattggattgaaatcatcataccacttgcaactaaaaactgtcaatcattaaatttttattttctttcaatgtgcttccttccgtcctcccaaagctaataataaacagcctagcaaaaggattccagcgaccacaaaataaaatatttgatttccaaaaatccctatcatcatccccgttgcactcggaccaataatactccctaaactaaagaacattcctaccaaaatatttccagccggaagtagttcaagcggcgtcaaatcagtcatataagataaccctagtgaataaagcgagcctagcaatatccccaaaataaagaaaaatatcacaaagaaaataggtatcttaacaaacgctgttaatacaaaaaccacagcccctgctccagtcaaaagcggtaacattttatcccgaccaaatttatcactaataatcccaatcggcacttgaaaaataatcgtcccaactgaaaaagaagaaataatcatcgcaatcatcattgtatcaagcccgtctcgcaaccctacaactggaaatgtcgcattaagtccggtttcaagaatcccatacaaaaacggtggaatcatcgcaacccaagccatcttaaatacgcccgaaaagcgttttatacttccccaaaaagaaattttccgaataacagccttttctcccacgaaatcatttcgaataaaccaaacaaggctccaagcaatcaatactaaaatacctgacaaaaagaaaggcaagtttgcatttacttttgccaaattcaccaactgtggcccaatcgcaaatcctacagagaaaaacaaaccataaatagccatattccgaccacgcttactaggatcactcattgctccaatccatgtctgcgaagaaaaatgcaacatatgatccccaataccaataagcaatcgcaatataaaccaaaaatataaattaaaccaaataggaaaagcaaatattgcaatcgcaacaagccctccgccaactaatattataggcttgtaaccatatttatgtaaaggtgcctcaataaatggagaaaccagtaaaacacctaagtaaattcctgttgcatgaaacccatttattccagcacttacccctttttcttctaaaattatcgcaataagtggcagtaaaacaccttgagataatccagatatagctacaaccatcgttaaaatccaaaacttcccttttgcccccataacacacctccgaaaaacttactaaaaaaaaacaatgtcgatgttcgacattgtttttttagatgacccgtacgggaatcgaacccgtgttaccgccgtgaaagggcggtgtcttaaccgcttgaccaacgggccatatctggcggagaaggagggatttgaaccctcgcgccgcgcgagcgacctacacccttagcaggggcgcctcttcagccacttgagtacttccccagatataaaaaatctattctctttttgaaagaataactccacaggcaggactcgaacctgcgaccgatcggttaacagccgattgctctaccaactgagctactgtggaataaaatgggcctaaatggactcgaaccatcgacctcacgcttatcaggcgtgcgctctaaccagctgagctataggcccctagtaaatctaattttatggtaaaaagcgggtgatgggaatcgaacccacgacaacagcttggaaggctgtagttttaccactaaactacacccgcataataaaatttaaaaacaaagggcggataatgggaatcgaacccacgaatgcctgaaccacaatcaggtgcgttaaccacttcgccatatccgccataaggcaaaaatgtttaaaaagaatggcttgggacagaatcgaactgccgacaccttgagcttcaatcaagtgctctaccaactgagctaccaagccataatggcggtcccgacgggatttgaacccgcgatctcctgcgtgacaggcaggcatgttaacccctacaccacggaaccactattgcgggggcaggatttgaacctacgaccttcgggttatgagcccgacgagctaccagactgctccaccccgcgacaataatatttaatttagtccacatatcacaagtgaaaaaacggaggaagagggattcgaacccccgcgcggtattacccgcctgtcggttttcaagaccgatcccttcagccagacttgggtattcctccatgataataataaagtgacaagtggaccttgcaggactcgaacctgcgaccggacggttatgagccgtctgctctaaccaactgagctaaaggtccaagattgaaaatagcggcggagggaatcgaacccacgacctctcgggtatgaaccgaacgctctagccagctgagctacgccgccataataataaggctaccattttctttctaattatgtgattaaatgtgaagtaagtggagcctagcgggatcgaaccgctgacctcctgcgtgcaaagcaggcgctctcccagctgagctaaggccccattataaaagatgaaacaatcgggaagacaggattcgaacctgcgaccccttggtcccaaaccaagtgctctaccaagctgagctacttcccgtttaataaagtgcgcccaagaggagtcgaacctctaaccgcttgattcgtagtcaagtactctatccagttgagctatgggcgcaaatataagtgccgaggaccggaatcgaaccggtacggatatcactatccgcaggattttaagtcctgtgcgtctgccagttccgccaccccggcgttgctataaaatatggagcggaagacggggttcgaacccgcgacccccaccttggcaaggtgatgttctaccactgaactacttccgcatattttataataagtgcgggtgaagggacttgaacccccacgcctcgcggcgccagatcctaaatctggtgcgtctgccaattccgccacacccgcaaaagtgagccgtgctgggttcgaaccagcgaccctctgattaaaagtcagatgctctaccaactgagctaacggctctctacaataaaaatatgtattattataaagataatattaatggtgccggctgcaagagtcgaactcgcgacctactgattacaaatcagttgctctaccaactgagctaagccggcataaaaaatggaggttaacgggatcgaaccgctgaccctctgcttgtaaggcagatgctctcccagctgagctaaacctccagaaataatattgcccggcagcgacctactctcgcagggggaagcccccaactaccattggcgcagagaagcttaactaccgtgttcgggatgggaacgggtgtgaccttctcgccataactaccagacaatatgcagttgttgaaagattgctctctcaaaactagagaagaaagggttcagttaggtaacttcgtttcattttttggttaagtcctcgatcgattagtatttgtccgctccatgtatcgctacacttccactccaaacctatctacctgatcatctttcagggatcttactttccgaagaaatgggaaatctcatcttgaggggggcttcacgcttagatgctttcagcgtttatccctgccacacatagctacccagcgatgctcctggcggaacaactggtacaccagcggtgtgtccatcccggtcctctcgtactaaggacagctcctctcaaatttcctgcgcccgcgacggatagggaccgaactgtctcacgacgttctgaacccagctcgcgtgccgctttaatgggcgaacagcccaacccttgggaccgactacagccccaggatgcgacgagccgacatcgaggtgccaaacctccccgtcgatgtggactcttgggggagataagcctgttatccccggggtagcttttatccgttgagcgatggcccttccatgcggaaccaccggatcactaagcccgactttcgtccctgctcgacttgtcagtctcgcagtcaagctcccttgtgcctttacactctgcgaatgatttccatccattctgagggaacctttgggcgcctccgttactctttaggaggcgaccgccccagtcaaactgcccacctgacactgtctccccacgcgcttagcgtggcgggttagaatggtcatacagccagggtagtatcccaccattgcctcctcgtatgctagcgcacacgtctcttcggctcctacctatcctgtacaagcggtacaaacattccatatcaggttgcagtaaagctccacggggtctttccgtcctgtcgcgggtaacctgcatcttcacaggtactataatttcaccgagtctctcgttgagacagtgcccagatcgttgcgcctttcgtgcgggtcggaacttacccgacaaggaatttcgctaccttaggaccgttatagttacggccgccgtttactggggcttcaattcgtaccttcgccgaagctaagcactcctcttaaccttccagcaccgggcaggcgtcagcccctatacgtcaccttacggttttgcagagacctgtgtttttgctaaacagtcgcctgggcctattcactgcggctctctcgggcttgcaccctaatagagcaccccttctcccgaagttacggggtcattttgccgagttccttaacgagagttctctcgctcaccttaggattctctcctcatctacctgtgtcggtttgcggtacgggcagtactactcttcctagaggcttttcttgacagcgtgaaatcaggaacttccgtacttaatttccttccccatcacagctcatgcttcgcaagaagcggatttgcctacttctcacactcactgcttggacgcacatttccattcgtgcgattccctatccttctgtgtcaccccatcggttaaacaattagcactggtacaggaatctctacctgttgtccatcgcctacgcctatcggcctcggcttaggtcccgactaaccctgagcggacgagccttcctcaggaaaccttagatattcggtggaagggattctcacccttctttcgctactcataccggcattctcacttctaagcgctccaccagtccttccggtctgacttcaccgcccttagaacgctctcctaccacgaacctccgaagaggttcatccacagtttcggtaatatgtttagccccggtacattttcggcgcggggtcactcgaccagtgagctattacgcactctttcaatggtggctgcttctaagccaacatcctggttgtctaagcaaccccacatccttttccacttaacatatatttggggaccttaactggtggtctgggctgtttccctttcgactacggatcttatcactcgcagtctgactcccgagtataagtgcatggcattcggagtttatctgaattcggtaacccgagaagggcccctagtccaaacagtgctctacctccatgactctttacctcgaggctagccctaaagctatttcggagagaaccagctatctccaagttcgattggaatttctccgctacccacacctcatccccgcacttttcaacgtgcgtgggttcggacctccagtaagtattaccttaccttcatcctggacatgggtagatcacctggtttcgggtctacgacctgttacttatgcgccctattcagactcgctttcgctacggctccgctttttccgcttaaccttgcaacaaatcgtaactcgccggttcattctacaaaaggcacgctatcacccattaacgggctctaactacttgtaggcacacggtttcaggaactgtttcactccccttccggggtgcttttcacctttccctcacggtactggttcactatcggtcactagggagtatttagccttgggagatggtcctcccggattccgacggaatttcacgtgttccgccgtactcaggatccactctggagggaaagccatttcaactaccgggctgttaccgtctttggcgggcctttccagaccgcttcatttataactttcttttgtaactccgtatagagtgtcctacaaccccaagaagcaagcttcttggtttgggctctttccgtttcgctcgccgctactcaggaaatcgatttttctttctcttcctccaggtacttagatgtttcagttccctgggtctgccttcctcacgctatgtattcacgtaaggatactatccgactaaagatagtgggttcccccattcggaaatctctggatcaacgcttacgtacagctccccaaagcatatcggtgttagtcccgtccttcttcggctcctagtgccaaggcatccaccgtgcgccctttctaacttaaccaatttacttctacgaagtaaaggttgtttttctgatgttccgtatcagcgatgatacttcctatcagatgaaagattcactttcagatgattctcggttacttgtgtcataaataataaattatctatgctaactttactaactttcttatctagttttcaaagaacaaacatacttgagaagtactaacctctcaaaactgaacaaatagagaagaacgaaaactcacaggtttccttttccttagaaaggaggtgatccagccgcaccttccgatacggctaccttgttacgacttcaccccaattatctgtcccaccttcggcggctggctccataaaggttaccctaccgacttcgggtgttacaaactctcgtggtgtgacgggcggtgtgtacaaggcccgggaacgtattcaccgtggcatgctgatccacgattactagcgattccggcttcatgtaggcgagttgcagcctacaatccgaactgagaatggttttatgggattggctccacctcgcggcttcgcgaccctttgtaccatccattgtagcacgtgtgtagcccaggtcataaggggcatgatgatttgacgtcatccccaccttcctccggcttgcaccggcagtcactttagagtgcccaactaaatgctggcaactaaaatcaagggttgcgctcgttgcgggacttaacccaacatctcacgacacgagctgacgacaaccatgcaccacctgtcactttgtccccgaagggaaagctctgtctccagagtggtcaaaggatgtcaagacctggtaaggttcttcgcgttgcttcgaattaaaccacatgctccaccgcttgtgcgggcccccgtcaattcctttgagtttcaaccttgcggtcgtactccccaggcggagtgcttaatgcgttagctgcagcactaaggggcggaaaccccctaacacttagcactcatcgtttacggcgtggactaccagggtatctaatcctgtttgctccccacgctttcgcgcctcagcgtcagttacagaccagagagtcgccttcgccactggtgttcctccacatatctacgcatttcaccgctacacgtggaattccactctcctcttctgcactccagtcttccagtttccaatgaccctccccggttaagccgggggctttcacatcagacttaaaagaccgcctgcgcgcgctttacgcccaataaatccggacaacgcttgccacctacgtattaccgcggctgctggcacgtagttagccgtggctttctggttagataccgtcaagggacaagcagttactcttatccttgttcttctctaacaacagtactttacgatccgaaaaccttcttcatacacgcggcgttgctccgtcagactttcgtccattgcggaagattccctactgctgcctcccgtaggagtctgggccgtgtctcagtcccagtgtggccgatcaccctctcaggtcggctatgcatcgttgccttggtaggccattaccctaccaactagctaatgcaccgcgggcccatctgtaagcgatagccgaaaccatctttcaagagcgtggcatgcgccacactctatcattcggtattagccccggtttcccggagttatccccaacttacaggcaggttgcccacgtgttactcacccgtccgccactaactttggaagagcaagctcttcctccgttcgttcgacttgcatgtattaggcacgccgccagcgttcgtcctgagccaggatcaaactctctttaaaatataaattgaatttgaatacttattcaacaccgtgaataagattccttgcgtcaaattgacttcgctagcaattaaattactagtttgtttttgttgaaaacagctttctgttttctgccctgcgattaccagtgagactttacgtctcattgcttttcgtcttcttctttgttcagttttcaaaggtcagttagtcgctttcatccttgatgtgcgaatgttttcgtttgttttttgcgacttttaaatcatatcatttaagcaactatctgtcaacaactttttaaatttattttatgaataaaattcttttaaatcactgctattgtagcgccgaaaactaatatatcaagttttgagatatatgtcaaccgaattatgcataaaattaaataaaaatgaaaaaaagtactaaaaacataaaaaacacctagctaggctaagtgtttttgtttaattatttgattgtttttctttacattctggacatgttccatatacttccagcctgtgattatcaatttcatagccagttacgtgggctgcgaaatgttctacttcatctaagcctggataatgaaagtctactatttttccacatacgttacaaattgcgtggtagtggttagaagttgagaaatcgaatcgactagatgcatcgccataggataattctttaattagaccggcatctcgaaaaacgcgcaaattattatataccgttgctacactcatgtttgggaagtttccttctaaagaccgataaatatcatctgcggttgggtgtgtatgtgagttaattaagaattcaagtatagcatgacgctgaggagtgattcttactcctgttttctttaagacatctactgcctcttttagagttgcattagacaccgccatgcactcccttccaaaaataattattatattcataataccggaaataacgcttaactgtcaatagaatggcataatttgtagcttaatagcctttatttaaatcaatttcattacgtaattttgtattttctttcaaatgatttatattttcaaaccaaatctcaaaactacgatccaaatatttatcagaatgaccagatacatgcggggtaattgttacattgctcgcttgccatagatagctttctgcaggcagtggctcttctggtaaaacatctagataaaaatgagcgatttgttcttcttttgaagctcgttctaaagtttctaattctactgcgcttcctcttccaatattaataaatacggcgttagttttcattttctcaaaaaaggataactgataaatgcctgaggtttcttctgtttgtggcaaaacacttacgaaaaaatcggctaagggagctactttttccaagtcagtcatggcatatgttttactaaatggttttactggatggccagtagtattaatccctataacttccatatcaaaagcttgagcgaattctgctacttttgctccgattgctccagtacctgccaccactaatgtttttcctgctaattcagttataggttcttcgcttgcccatttttcttctttttgcattttatagaagaaagctgctttttttacgtgagataacataaatgataaggcatattctcccattggtattgcatgaatccctcttacattagcaacttttattttttgttcttggataatttttgttggtaggctatctactccggcagaaaataccattattagtttcaaattagtagctttttttattttttcttcagtaatgttagatccgtatgtgatgatgacatccacttcgcctaaattggtaaaatgatcaatactttcaaaatagaaggtatcgtccggaaatttttccgcttgtaaatttttaaggcgttcgggtacatctagtgtaaacaaaactttcattctgcctcacttcctctctttagctatactttaattttatgctttttttcatttatcagcaataatattgttttttcgattgcggcatctcactttttcgcatagaatatagaaggtattaaaattttgaggagatgacgaaatggatcattcaatgtcaaaaaaactgcatgatgaagcacttttacatatagttggcggggttaatagcccatctaggtcaaataaaggagttggcggtggtattcctgtaacaatggaacgggctaatggagcttatttttatgatgtagatggtaataagtatattgattacttagctgcatttggaccaattattactgggcatgcgcatcctcatattacagaagcgattacaaaagcggcgcaaaatggcgttttgtacggtactcctacgaaacacgagataacttttgcaaaaatgttaaaagaggccattccttctcttgaaaaagttcggtttacaaactctggaacggaagcggttatgactactattcgtgtggctcgtgcttatactggacgagataaaattattaaattcgccggttgttatcacgggcattttgatttagtgctagtggaagctggttctggcccttctactctcggtattccagattcagctggagtaacaagatcaacagcggaggaagttattacagttccatttaacgatcttacatctttcaaagaagcattagctgtttggggagatcaagttgctgctgttttagtagaaccaatcgttgggaattttggaatggttgctcccgcggaaggttttttagaggccgtgaatgaacttgcacatgaaaatggctctttagttatttatgatgaagttattacggcgttccgttttatgtatggtggtgctcaaaattatttaggtgttattccagatttgactgcgatgggtaaaattattggtggcggtcttccgattggcgcttacggtggtcgagtagatattatggaaaaagtcgctccacttggtccggcatatcaagctggaactcatgcaggtaatccggcctctattctttctggtattgcttgtttagaagttttacaagaagaaggcctttatgatcgttttgaaaaatatggttcgatgttaaaagaaggcattgaaaaagcagctattaaacatggtatcgcagttacagtcaaccaaattgtcggagcacttactgtttactttacagatgagcctgtgactaattatgctgaagctggggctacaaatggagatttattcggtcgcttctttaagggtatgctagaagaagggattaacttggcaccgtcaaaatatgaagcttggttcattacttccgcgcattccgaggcagatattttagaaacgattcaagcagttgatactgtttttggcaaattggttcaaggtaaataggtaatattactgtataaacttgagagaaacgttataatagaagaagaatgagcgggaaaacttaaaaatcccgctcaaatagtctatagaaaggaataaccttccatgaaattcggagctagaattttgaaaacaggtattgcaatcacattggcgctttttattgcccagctttgcaattcaccatctccatctctggcaggcatttccgccgtttttgctatccagccttctatttatagatcatatcgaactattttagaacgggcacaagggaacgttattggagccatcattgcaattattttcggactttatattggtaatgattttattttaattggtgttgcttcgataatctgtgtggctttattaatgcaatttcgtttggagaatacgattggacttgctgtagttaccttaatcattgtcatggactctcctggtaatgactttttagaaattgccctcattcgttttgggacaattatgttaggtttacttgctgcatttatcgttaatctgttctttttaccaccgaaatatgaagtttctcttttccagttgatttacaatactaatagcgagattgtacgctggattaaactaaatcttcgccacgccgcagacttccctcttctaaaaaaagatatggaatggatgcaaaaacagttaaatcaaacgcgtaacttatacggattataccgagaagagcgtactttcctgaagaaaaatgctatttcaaaaggtcggaaaattgctgtttataggcagatgttgctttgctctcaaaaaggttttgaactgttaaaaatccaacaccgttatgaaaatgattatttgcaactaccgccagataaacaagaattaattagacaacatattgattacttaacagataaacatgaacaacttttactaacctatattgacaaagtttctatcgaccttgaatatgtagagtcacatttagcacaagatccacaagatttaatgcaacttttcctgcgtgagatggaagaaacagaaaaagatgaatatgaagacatgatggataaatatcatctaatgcgtattatcgcttctgtttttgcttatcaagaaacaatcgattatttagaaaaactaattcacagttttaaacttcggcatacagaagaaaatcaaatcgatattaacgttaatgaagaataaacaaaaaacgagcttggagataaactccaagctcgtttttttaacgatattctttatacttttcataccaaatgtcaatgtaatcaggagaaaatggaccttttttgtccaaaatccagtggcttagcacatctacattagtttttagtatccggtcaattgagtctggatacttcatttggcgacggtgttgttcatattcgccctcatcaagcaaatgaaaccttccatctgggaaaaccttaatatcgaggtcatagtcaatgtacttcagcgcttgttcatctaccgcaaaaggtgtacctaaattacagtaatgataaatgccatcttctctaatcatcgaaattacattaaaccagtaatcactatgaaaataacaaattgatggttcgcgcgttacccatttacgtccgtctgcttccacaactaatgtgtggtcgtttccaccgataataatattctccgtagatttaagcaccactgtctttttccaagtacgatgaagtttaccgttatgtttgtagctcttgatctgtattatttctttctctttgggtaagtacatcctttatcctactttcctcatgtactatcaaaatcattattattataacataaggcaagactgcaaaaaaacaatattgtgctgaaacggaataatttcctcaaaaaagaacaatttttacgaaaaatagctaatttttatcctttttactttactatactaaaagtgttctaccaccatctactaaaatagtttgcccgcgaatcatgtctgctttttcactagcaaggaataatacggcattgactaaatcatttggttcaatcattcgacctgctggagttttacttacggcatcttttaataactcttcacggtttggaaaatgattcagtgcttccgtttcgattaagccacctgaaacagcatttacggcaattccaaaaggcgcaagttcaactgctaaatagcgagtaagtgactctaccgctgcttttgatacgccaacagttgtatagttttccaaataccgaatcgaaccaatagagcttaaactgatgattttaccacttttttgacgttgcattaatttagctgcttcttgtcccgcaaataataacgccttcgcattgatattcattgtccagtcccagtgtgattcttctagttccataattggtctaagcacaccacttgctgcattattaataaaaacatctaatcgaccaaattcttcgtctaccgctttaaataaagctctcactttttctacgtcgccaacatttgctttaaaaatagtgcattttcttcctaattgttcaatttcttgttgtacttcttctgctttttttcgatttcttgaaaagtttactgcaatatcataaccttcttttgcaagcgcaatggctatttctctcccaagtcctctactacttcctgttactaatgctactttgttcatttattactcccccttaaattctttccaagcttgccacattttttgatatggtactggaaaagcaagccgtttcatttcttcttctgttgcgaaatgccagttttcatttggaactgctgaccgaagtctcgccacacgaatgtccattttccaaactaaatgagaaaagatgtgtttgatatgcgcaattggttcctcttctagcgatacttctaagccataattatgtaaaaattgtagttttgctacctcatcattttcttttttggcgatttcaatggttggaaattgccacatattcgctagtaagccattttctggtcgtttctctatcgctatttttccatcgtctgaaattacaataatacttagtaattctttggttttcgtttttgtttttttgattttcactgggtaattggtttcgacaccatttttatgcgcctcgcaaaaaggttgcaaggggcaaagcagacacattggttttgtaggtgtacaaacgagcgcgccaatttccattaatccttggttaaaggctgccggattttcttggtcgattagttgatacaatacttcttcaaaaattttccgtgtggatgctttcataatatcttcgctaatttccaaaactcgtgcaataacacgcatcacatttccatcgacagctggttctgcttgattatatgcaatacttagaatagctcctgccgtatatggtccgacacctttaagtgataaaatagtggttaaatcacttggtacttctccagaaaaatcagtcattacttgtttcatcgcggtttgaagatttctaacacgcgagtaataacctaatccttcccatgcttttaatatgtctgcctcatctgcattaacaaaactttccattgtcggaaattgagtcataaagcgattaaaataaggaatcacagtatcgacttttgtttgttgaagcatgatttctgagacccaaattctataaggttcagtattttcgcgccaaggtaaaatgcgtttattcgcttcataccaggaaacgagtgcttcttgaaaagcagttatttttgtttcatcccatgttagtctcttcatttttctcattttcccctcgtaattctaatagatttctaatgtgtgatactccggatgtgtagtataatgtaaacagggaataaaatagtatacccattcttaagccgttttctattataccgaaagctggcttaattgaatagtgttgtgctttctcaggcagcaccacttgtatttttaaagaccgattttagaggaggcaaagtcattggatactggcacacatgtagtaatgggaattgcactcggagcgttagcaaccgtagacccggtagttgccggaagttctcaagctgccattggtattatgacagcaacaattattggttcacagattcctgacattgacacagtattaaaacttaaaaataacgctgattatattagaaatcatcgaggaatcacgcattccttgccgatgcttgccatttggccattacttatttcatccattttgtatttaattttcccagcagccacgtttattcatttattattatggacgtttatagcggttgggttacacatttttgttgatattttcaacgcatacgggacgcaagctattagaccgtttaaagagacatgggttgcttttggatttatcaatacttttgattggttcattttcggctctcatgtcgttgctattgcggtttggctattaggttcaccagcagttcctacgtttgtcacgctctacattattttggcactttattacgtggcaagatttgtgacgcagcggatgatcaaacatgcggttcaaaacttaattcccgattcagaagaaatcattatcgcgtccactatccatttctttcagtggcgtgtggcggttacaaccaaagatcattactacgtaggtcgagctttcaaacgaaatatctccatttatgaaaaatttgatcggctacctgttcctgataatgaaatcattcgttctgcgaaaaaagataaaaacctagctgctttcatctcattctccaaagtgtacaattggcgcattgaagaaaaactagatggcacctatgttacttttactgatttgcgttatcgaagtaatgggcattacccattcgtagcagtagttaaattagatgatgacttgaagatcatttcatcttacactggttggattttttcaactgaaaaattatacaaaaaactagcacctgttagtatttaaaaaaagacccgggattccgggtcttttttatttatctaccagtacttcctaccccaccaacgcgtgattcgtttgcaacgatgtcagtatctgctactaagtatttttggaaaacgccttgtgcaacacgttcaccggattcaatttctactgggtctgaagagaaatttttaattgcaattccgatattcccgtcattacctgggttactataataagaagaatcgattatgccagtaccgttacacagcaataaaccttttttaatgccgatagaagaacgcacgtggatatttaaaacttcatcttcttgcatataacttttaatgtctgtccaaaaaatatgtttttctcctggtgcaatagtttttgtttcattggagaagaaatcatagccagctgaacctttgtcgccgcgtattggtagcgatatggtttgttctggaaattttctacttgcttcattaactacttcaaatcctcttactttcactttgttcactcctatttgtttgggtcttttcgttctacttgatgtaaaaagctaccgtgacgctcgatttgttggcgaacataatccgctgcgtactcagggccacggtatgggtaacctgcttttgcataggaactttcgaaatctgaccaaagcatttcaatccaccacaaggcttgctctttatctaaatgcggatttttagccatcaattccgccgttagttcatctaaatacgtatacaattcactcttcctcctcgaaactgatttcattttcagttaggtatgattgaattgtatcataagaaaaacctttctgcattagcgatgtgatcgttttttgcttggcgatgcttggtttatagcgtttatttttacgaattgttttttcaacttgtttttgtaaaatgtctgcttcatccgccacatctaactcacttgtagcttcaattgcagccattttcgctacttcgctagaatagcctttctgaattaaatcagtgataattttttgttgtagcattttctttgcacttttgttgtttcgtttcatgattttcatcgcttgtttggtggcattttcgagctgaatatcacttgcatattcttccattacttgactaataatttctcttgttaaacctttttcaactaactcacgctcaattgttcgcggtccttttagtgttgttttgatttgtgtttttgtgtatagttcggcaaattcgacatcgttaatataatccatatcagctaatttttttaaaatctcatctactgcgaaaggttccatttcttgctttcttaaataatcgcgaatttctttttccgaacggacgcgatgtgataagaaattgattgctttattaagacctttccggaccatatctgcttgttttatttcttctatatcagcctcagttaacgtttttcctttcattagttggtagcgggctaaaacttcttcatccacactaaaattatatttttcatcaataaaaatgttatagcgttctttgtttttttgttggacacttatggacgtgattttcataatccgcctccttctcttatctatcataccgcaaaaattggttttaatactactaaaaagggaataaattagttaggactataaagaggtgataaaattgcatatcttacttacaggcgcaacaggttttattggtgatcatttagtacatgaattagaaaaatcagatcacgagcttttcatcttaacaagacaaaagctaaaaaaccgcgcaaatgtacattatattgaatggttaaatgatgataagttacctaatttagaagatttaccagtagatgtttgtattaatttggcaggtgctggtttgatggatgaaaaatggacatatgataggaagaaagtgattgtaaatagccgcatcgaagctacttcagcactcttatcgattgtttcaaaaatgaaatccaaacctaaattgtggattaatgcaagtgcaattggagcttatacttcctccaaatcaactatttatctagacacggaagaaaatgcttatgcagataacttcttaggaaaaacagtttatgaatgggaaaagacagctagtgcagcaagtgatttaggtattcgagtagtttacgctcgttttgggcttgtacttgggactggcggcggttcatttcctgtttttgaaaagttattccaaacatatacaggcgggaaatttggcagtggtcgacaatggtattcttggattcatgtcgatgatgttgtagcggcaatgttgtttatttttaatcacgaacaaattagcggggtagttaattttaccgcacctcatcctgttcaagaaaagaaatttgccgagcgacttggtaaaacaatgcataaaccttataaaactccagtaccgaagaaaatcattaaattcattctcggtgaacgagcaatgaccattttggatagtcagagggcttatccagaaaaattaatgagtaatcattttgaatttcgattcgaaacgttgcaagaagctttagatgacttaattgattagaaaaaccagattctgatttactcagaatctggtttttctatttcttcatttagcgggaagtcgagcactacttgattatttgcaagtggtcgttttttccctacgagaatcattagctgtaacattgtaaacgcaatggagcttcgttttctaaaagctacaaatttttgttcccattctgttacatatttagatttgaaatttcgtaaacctttaaatccatagaaaccttgactataacggtacacaagccctgccaatcgttcacctagaaacgcatacttactttcaccaacgtttgctagtggtgccatgcctgcattgaatgtttggaatccgtcttctttcgctttttcaaataaattgatgaagagaaaatccataatgcctgatggagcttcttttgagtatcgcattaaatcaatcgaagtcatttcatcagtatacgacggcatcatagaagcaaaaccaactacggttccgtctgcatttttggcaagagctatatctgcttgttctaaataatacgtatcaaagaagccaagagaaaagcctttttcctccctgccatcaagccattcatctgaaacagctcgcaaggtcttccacatctcattgttaaaaggcggctgaatgatttcaaacgtgtaaccttcgcgatctaatttgttcattagcgctcgttcgccttttttcttcttaccgctcatagtaaagttttgaacatctacaaaaccttcctcgccaagcttaatgaagtcaaagccgtgatcatgcagataagggatcattgtgccgcggacttcatagaacacaggacgataaccaaatcggtctgcatttgtcatgacttcttcaatagcgtcttccattttttccatatttccagttggttctcccataattaccatcttgtcagcaataattcggtaagagaaaagtacttcaccgtttgccgcccaaaatagtagtttatcgcgtaagaacatggtatggctgacttcatttccgccccatttcgctaaatgttcacgtactttgaccgcttcaaatggcgagccgagtttttctttagtagtagataggtagatataaataataactaaactaacaaccgcaataaagacaccgacaaatccgactaaccataaatgttcagatgcaatgcgtagatagtcaggaatttctttggaatgcttgatgtttggtgaattataaataccgataacaatataaccagctaaacatacgataaaaatgatactatcaatgattactttactccaagtatacactagtttttcccggtaaaattcatttctagcaaggaataaacatagtaaaacgattcctaggaaaatcgcttgtttcatcgaaaatacgcgagcaagcgtgttgaaaatagcgcaacctagtacgatgactgttataatgtaagctttctttgtcttacattcaatcccccttgcaagtccgagtagtaagaatccaaaagcaacaattgtaatttgcgatgtaaacaagaagttaaacggcatgattttgtataagaatggtacatggtaaatcgcatttggaactgcggaagataaaatcagtaatagccccgatccatatacgaaaaacactaaaaatcgatgtgccactttttgtaaaaatagtagtggtaatccttctaaaaaatcgtttagtcgttttcctgctttttgaacaaagaaaagtagaccgacaatgaacgggataatatagtagaaaatccgataaaatagcatccaagcaagtgccaattcctgagaaacaccgagttggctaagtccaagaatcattactacatcaaaagttcctacgccccctggaaccatcgaagcaataccgatgacagaagcgataacaaacaatggaaataccttgaaaatatcaactggttctcccattaaaacaccaataattgcaaaacagccaaatgcaaagccccactctaaaagggaagcaacaattaacgttaattctctcttaattggcaagtccacgaataacgatttacttttccattttgtaatcgtgaataaaatcggaaagtaaagaccgccagctagaagccatggccagtaattaacgaaatgatcagcaaaacctggaataagtaatgttgttaatgatactaaacagtaaatcgataatcccgatactaggaataaagcaatttttgagattgctagtaaaatttctttatgggaggcattttttccgtagaaacttgctcttaaacttgcgcctaataccccgccaaatccaccaatattggtgaatgtattcgtaatccaaccagatgcaaccacatgaattggcgaaaactttcctggtaaaagttttacaataacataatcatacaaaagcattggtgtcacagcaattaagccgacaatgaacataataaatatctgttctgggctttgagaagtgatatttgcctttaatgatgggtaatcaatccctgtcgcaatattgacaatctcaaatatgacgaaccccattacaaaggtaataaaaactatttttacgatcatactatttctttggaaccaagcataggcttgcattaacttttctttcataactaagtctccttaacgattacattcatcttcttttatttatacgttttctaactggtgggattgcatatgcaagtaagacaccaattaaaccgcttaacgtatttaaaataatatcatctacatctgtagagcggtttggtggaagtgagatactttcaaatcctgtaatcatcgttgtttgagcaaattgtagcaattcaataccacaagaagtaaggaaaataacaagtatagtttttcctgctgtactagtgattttaaagtaaagtagaaagaaagacagcggacataataataaaacattcccgattatttgaataattgttggcatcgttggtaatgtttgttggaatgtgttttctattgttgtaaaaggtattaaattaatcatttctttttgaatgtggaaattccctgtatacgtgctgtttacaaagtcaccaatcgaaatataggctactagatgtaagagcacaaatatatataaaataaatacacaaaaccagatgaaatcaatccagttttttaatttagccagttttgttaaaattaatgttgttaataaaagtatacaactattagtaatcgtattaattaaatcagcgttattcccaaattgtagtgcaagtgaaaccccatataagagatataatactggcagtaacaatacaaaaaaacggcatttttggacttgcattctcgtatcccaacgccttccgtttcaaaatcagctttcagactctctgaataagcacctagtaccagtttagcagatataaatttgaaaagaaagcttgtttatacttacatttttgcaagcttctagaaagcttcttagttcctattttctttttgagtgaaaaaatgctacaatttcttaatgatattcgtggaggagactaggatgaaagaattattagggttattaaaagaaggcaataaatcagctttaacagcagctcttgttaatacgattgtttcaattataaaaggtgtcacttattttttcacagggaacattgcgatgtttgctgaaacgctacatagccttggtgacgcagctaaccagtttttcgtatttataggttctgctttaagtaagaaacggccgacgaaacgttttccgcatggttttggccggatggttaacttagtacttcttggcgcggtaattgttgttggtattatggcatttgagacaattcgagaaggtttcgcgcacatcatcgatccgacaagttcaaccggttttcttattaatctcgtggtacttttactttgtactattttagagttttccgttcttgtaaaagcgatgcacgaaattgctcatgatgttggtttagaatcaaaaggtcttagcttatttaaagatagtattttaaatcttggtaaggcaaaagcagcgactaaactagtattcttggaagattcggtggcaactggtggcggcttgcttgcaatgattgcggtcattatttcccactacactccttttcatcaagcggaaggtattgcatcgatgttaattggagttatgatgtttattgttgtcggaaaagtatttttagataatgctgctggggtgattggagaatcggatcaaagcatgcatttaactgttggtcaattagtaatgagtgatccagatgtgcgtgatatacaagtgcttaccgtgttaaaagaaggcgatgtgtttcacgttgatgtcgaggtcgaacttgatccgatgcttacacttgcggaagtagatgatattaaagaccgtttagaagaaaatattggtaaacttcgcggagttgctgatgtgttaatttcttttgatgaagacgatgctattcgtaactgggaatacggcgacggacgttaaaagaagaaaaagccaagtgcgcaaattgcgccacttggctttttttagtctccaggatttataatggctagtacttgatgatcttcccacgttccattaatgcgcacattttgaaccgctagcccttctaaatgaaatccagcatttaaaagaacttgcttagatcgctcgttttttggcataacacccgcttcaatacgatgaagtccaagaatatcaaatccaaaatctactattaactgtactgcttcggtagcatatccatttccgttatgagtcttatccaaaaaataaccgataaatgcggattgtaacgattcacgcaaaatactaaataaattaattgtaccaataagttcatcagtatctttcaagaaaattccataataatactctacatcacttgcagcaaaatcttctaatcgtaaaataagcgcttgttgctcttctatcgtataaaagcgctcatctcgctccatcgaatagctcgcaaaaaaagacttattcgccaaatgaaaagctagtttttgattcgcatcggttatttgaaaaggtcttaagtaaatccgttcccccgtaattcgcatccctatccctcccgtatttttctaaattataagattgttctaacaggattgcaagtaactctactaagctaaatttttttattatacccattttataaaaaaataaaccttctaatacgaatataagtgtgttattatgttgatgttggttattttcatattatttttctaaaaaatggaggtttttttaatgaatgttaatgcggaaacagaagacgcaactctccttctcgatggtttacttcaaaacgtagcaataattcgttttgatactaataaaaaagtaacttacgctaatgcacttttcgcggaagctatggggtatacagaagaagaaatgttgcaattatcgcaccctgacttatgctttccagactttgtacaaactgcgagctacaaagaaatgtggacaaatctactagctggacaaaaatttcaaaataaaattgaacgaaaaaacgctcgtggcgaacgtgtttggttcgaagcgacttatatccctattattcgcgaagaaacagtagtcggagttgcaaaaatagcaactgatattacgagaagagaagaaactgtccatgattttgcctctggtttaaaaagcatggctacaaatttaaaagaacattccagtgttggaaaaacgcgcagtgaagctctccttgaactcgtgaaatcaatcacgaaagaatcaaatgaaaataccgatacccttcacgatttgcaaacagaagcacaaaatattcacggcattattaatacaattaacggaattgcttctcagaccaatttacttgccttaaatgcagcaattgaagcagcacgtgctggtgatgctgggcgtggatttagtgttgtagctgaagaagttcgtaaactttcaagtcgtgtagaagaagcaattaaagaagtagaaaaaagtgtcaacggtatcacccaagaaattaatactatctcaagtggtacagaacgtgtcgaagcaaaagtcgaggaaagccaagaagtccttattttatctttagaagattttagccaaattgaatctgcctctactgccttggatcaaaatgccggtgctttcacaaaaatgatttaaccgactgaaaaaaggagcgaagaagtcttgaaactaattggaaaacatccttctggccgtgccattattattcgcttgaacaatcaagagtaccactacgaaactgcaaatagttttggaagcgcgacttcattaacacgagcaaaaacagaagcaagagctgatagttttacatcaaatgaaatggatcaaggtttacatatcggtaattggcactggaaagaacttggatgaaagagaatcccacctaacaataggtgggatgtttttatttattcaaatcttgttcaagttgatttttaaagttggttgctacgtcaaacacggtaacaaattggaaatcgctcatgttgtaatggacgacaaactcgttatcacgatggcggaccattatggatgagcggactttatcaccgattgcatcgccagcttgtgttccactatagaaaacccagtgcgcggcttcgattggatttgctgttttttcggcaagatcgctttgaattagctgttttattgtggtacttaattcaggttcaaactcattttcgatataaccgtaccaaatagttcggtagtatttgttttcaaattcattcgtttcatcaaatagttttttcatagtagttcctcctgtatttgctatttatgatacctttttaagcgttcttctaatgtcccggcgtgtaattcaaacaggtgattatcatagtcataaaaataaacggatcgtccttcgccttttactctagagcgctctggttttatttccatgccgagtgatttaattcgctcgatatattcatccatttcctccgcttgaatttgaaaagcaatatggttgtaagtgcgttcttgtaaagattcaccttccataatgcaaatccacagtccagcgattagaaaaaacttttctttggagagcgaaaatgtgtcatcgccactagaatagatttcttctgcatcaaaaatttcttctaagaatgtggttgttttattcaaatctttcacaattaaagtgatatgacttaatcctgaaatcatgtactcacccgccctcttgttttctttgcagtacttttcctacctaacgacctatttctcctttcactggctatagtattgatagtatcttatcaattaattcttgtctatctgcgggtttcgaaatgatagttgaagcaattgcaattactatccgtttatttttatttatataaataatatttccacctgaacccactgccatatattcgtctttattatctctaacccaccacaggtatccataatatccgtaactattttttacttggcgggtagactcttctagccattctttactaataatttgctttccattgaaatatccttcctggaggcatagttgtccaagttttgacatttcatttaaagttagtgttagcccccaaccacccgaattatttcctaaagggtcagaaacccaacctttcattttcctcccaaagacatgatctatatcaaatttcatcgggaaattaggaactgtttcaatcgataatggttcaaaaaggtgtttatttgcaaattcgcgtgcactcatttttgttgcttttgtaagaattgctgataacaaatgggcaccgcttgtagaatatttaaatgttccaattctcccgcctgtccccattatttgaagcgcatactccacccaatcattctgccgacatagtcttgttaaaggttctcgcatatttggaaaaggaaatggagccgtcattgttaaaaggtttttaatagttatctgattccttaaaacattgttatcagtaaatttatattcaggaaaaaaatctatcactttttcgtttacacttcgaatataacctttatcgatcgcaattccaattaataaggatatgacgcttttagttatggaagcaacgttaaatttatcatttttagtgttacgaccataataggtttctagtacgtgattttcattttgaaaaatagatagtcctctaatatttgagtacttcttctttactaattcatcaattattaaaattttttctggaggcaacataggcgtgttattcacttataaatacctccctgtaatagatacattattttcgcttaagtcgattggagttccttgtgcaataacttctccgcccttgtctccactaccttcgccaagctctataatccagtcacagcattttaatatatcgagatcatgttcaataacaattactgaattaccacttgtaactaactcatttagtaaataaagcaattttgaaatgtcatattgacttaagcccgctgacggttcatctaacacataaagggtatctttttttcttgtttttccaatttcttttgctaatttaattctctgagcctcaccaccactaagagttgaggtaggttgacctaatttcacataatccatccctatttttttaaggatatttaatacggataggtcaatcgttgaactttccaaaaatgagatagcctcatctacgctcatttctagaacatcattaatatttttttcttgtacaaaacttgcagggttttagaattaaatcgtgtcccattacattctggacaagttttactaaattgaatgtcgtagccaatcgaaatatcttcaaccccactacctttacaagataggcatgcgccatttgagttaaaagaaaaatcgcctgcttttaatccttccttaacggcttgaggttgttttgcaaataattctcttatcttatcccataaacctatataagtgaccgggtttgaatttgctttgcgtccaattggagcttgtgatatttcaattatcttttgtattttatccattcctttgatatttggattactgaaatcgctgttctttaattgttctttgcagagtggtactaatgttttagatattaatgtactttttccactcccagaaactccagcaattccaacaagtctgttaatcggaatttcaattgaaatgttttttaaattgtttcggtttgcattactaatgcttagtgtatcttttgttttctgcttattttttttgaaactttttgtcatatcataatctagaaattttgaagtaagcgaatggcgattattcagaaactctgaataggatccttgataaactatttcaccgcctaaatctccagcatttgttccaacatcaataatatgatcagcagcttttattatttttttatcatgagaaacaataagtacagtgtttccatgggctttgattgattgaagtgactcgataatctcttgtttttctgattcgtgtagtccgctagtaggttcgtcaaacacgtagatgagtgaatctagttttgattctaagtggtcatataaaaaaattcgttgtagttcgcctccacttaaggtcggaatctctcgatacatcgttaaatgtcctagtttaatatggatgagtgaatttaaagttgtaataagcgaacgagataactctgtcccaaaagctgacaatttattcatctctatataattatcaaggaattcttttacttttattaacgacatgctggcaatttcacccaagtgtagattagcaattttcatcattctagcttcatcacaaatgcggtagccattacaggattcacagatttcttgtgaataaaatctctgaacatcttcattacgtagataccgattatgtaatactcgttcaatgcaataacttgttttcccagagtaattatctactacaccataaattaattcattttgaatctcgatgggacaattcgaaaaagcttcatgaaaataagcagtatattttctctgtagtaaattaagataaccttttgttgaaccaatttgttgaaatacttgttcgaccgtcactgttttagatgaaataatattttccatatgaatatgaaattgtttaccagttccagcgcagtcaaaacacatcccatttggcgaaagataggaaaaaatatcaggatttatatcatcattagctaacgaaaaactttcactatcttggtaagaaccttcatttgcgaataatagacaaaatttgtttaaaagtcctgttttagatccaacagtagagcgcggattactttgtctgatgaggttttgctttactgctacagtgggacttaacccggtaatatttgtataatagtctgttccaaaatctaaagccattcctattgattgaagatacttttttctaccttcttcaaaaatcaaatcgaatgctaaacttgattttcctgaaccactgattccagtaattacaataaatttatttttagggatttctatacttatatttttcaggttattaatatatgcgttttcaatttgaatatagtccatgctttccccctactaattagtttattggttcaataggaatatagatatccacaatatgtttttgaagtgggtcttccagtggattgtttaaatatacttcaaatggaaatgagtttgctggcaaataaccactagaaggaagccaatttccgtaaacaaaatcccaagcatctggatactctttttgacgtatttcaaaatgaatgactccgtataacccagaaggtatctccataagcccgatttcctcactgtctaactgcttaacattttgtttaataataatacaactactagctctctgattatcagctgttgttatatcgggatggctatggtaaattgtcaacggaaacgatgaatctttatcaagtaaatcatgctccattccatattgaaagagttcactcaaagggttggtgagttctaattccttgtaagaacctactattctcttatagatgacaggtatattctgtagcgtagtaatggttactttgcctggaatattatattgtttttcatctacaggcttattatagcgggaagtaagaaaattctctttgcaattgttgctattttgttttctaatttctataggagacacatcgaaatatttcttgaatgccctagaaaaaacggaagaatcgctgaagccaagttcatatgctacatcggttattgttaaatcctttcgattcattagtaagccaagcgcccattccatttttattcttgttgtatattgaaatatcgactcatttgttaacgctttaaaaattctatgaaagtggtatttggataatccagcaatttttgctaattgttcggatgtgaaattctctgctggatgagcttcaatataatcttgtaaggcgaaaatatgtttccaatattcgttttcatatttgctcgttgtcacaacataacactcctttttatgaagccataacttcattatagggtattttaaaaacatatgaaacaacaattattgcggctttctgtagttagatttaatgctcgctttctttcataaattgggtgtaaaaaaaagacgctccttttacagaagcgtctttatcatgtaaattaatagttacattaattgaggtcacggtcattttaaattgaattttattttcaacgattgttaattggataaactaaaaatttaagttacccggtttagcgtcgttgtagtaatgttactgtctcgacatgagctgtttgcgggaacatatcaacgggttgcatatagcgaatttgatatttcttcgctagcaaggctaaatcgcgagcaagcgtagacgggttacatgatacgtaaacaagttgttttgcttctacttgtaacagcgatttaattaaaccttggtcacagccgcttcttggtgggtcaacgatcactgcatctgggcggaaaccttctttcacccatttaggcaatacgtcttctgctttccctacttcataataaacattatcgataccatttttctccgcatttcgtttggcatcttcaatggattctggaataatatccatacctcgaacttctttaactttgccagcaaatgcttggccgattgttccaaccccgcaataagcatctactaatgtttcactgcctgttagtacgagtgctttctcaacttcttggtagagccgctctgtttggaacggatttaattggaaaaaggcacgggctgataaatcgaattcgagttccattaatttttcttcaatgctttcttttcctgctaaaaggaacgtttcatcaccaaaaataagtgaggattttgcttggttgacgttttgcataatcgaagtgacttctggaagagctgcttcgatttctgctagcatttcgcgttttttaggtaactttttactatttgtaatgaagacaagttgtgtttctccggtttttacgcctgtacggacgacgattgtacggatgatgccactgcctgctttttcatcataaattggcacgccgtatttttcgagtaaatcacggacaaaattcgttactttgatggtaactggttgctggacgatacagtcttcaatcggaacaagttggtgagaattggctccgaaaagtcctgtttccacttgaccactgcctaccattcttgtttggaattggcttttattacggtagcgccatgggtcttccattccgattgttgggcggatttttaattttgctgggtcgatttttgtatgtttttcgattgattgaataacaatatctctttttagttcaagctgggcgttataagccacatgttgcaactggcaaccaccacacgcctcgtacactgggcaaggtgcggtaactcggtttggagattttttacgaattttatttaattttgcttcggtaaagcgatcgcgaaccttaactgcttcaacaaccacctcttcaccggtaattgcgccaggtacaaatacaactgcttttttaaagtagccgattccttccccgttgattcccatgcgtctaatagttagcgggaacttttggccttcttctactggattttgattcattattttcctccatcattccaagtcttcattaatactaacaaaaaaactgccacttgtcagtagtttatggcatgatttcaagactttcatcgacaataatacttttttcgacagaacggaccatcgaacagtattttggggttaattttagcgctttttcaagtggattaggatccaagtcagtaccagttattttaaaatgaagatgaatcgcgctaatccgattttcttcttcaggaatacgttccattgttgcatctacccataaatcagtaaaatccactcgttttttccttaaaatgttacgaaaaacaatggcgctacaactggcaatagacatcaacatcaaatctgctggtgaataatcggtcattttatcatcaattaaaaaacttcctgtgtcaaacccattttcggtataaactagctttaatggttttgtcatcattatccctcatttcttctcttttatcgtacaaaaaatctccttattaagcaaattagtagtataatgaacagatagtcgaccaaaaaggaggctactcgttttatggaaggagtaggaaataaagtgattgttttagcaggaatgattggcgctgggaaaagtagttatacagagctaattgcaaatgaacttggaacaaaggcattttatgaaagcattaaggataatcgcatccttgaaatgttttatgatgacccaaaaagatgggcttttgccttacaaatatattttttaaatacccgttttcgcagtattaaagctgcattaacggatcaaaataatgtgcttgatcgaagcatttatgaggatgcgctttttacgcaaattaattttgaagaaggtaatatttcggaacctgagatggatacatatcttgatttgcttgataatatgatggaagaacttgcatatatgccaaaaaaagcgccggatttattgatttatttgcgcggaagtttagatactgttttaagtagaatttccttgcgtggccgtccttatgagcaaacctttgataatcctggcttacttgattactataagcatctccacagtcgctacgatagctggtttgagtcttatgataaaagtgatacactcgttattaatattgatgaagttgatattaataaaccaagcgacgcgaaatacgtcatgcaactcattcatgaaaaattaaaacgctaaaactgctcactgcagttttagcgttttttaattgatttcgcctagttcttttttctttttacggattgcaagtgttgcatttagctctccgccgatcattaaaataataccagttaagtaaaaccacaacattaaaataataatcacaccgatactaccatatgttgcggaataattgccgaagttatttacataatacgcaaatccaactgaagctattgtccagccaatggttgaaaaaagcgctccagggagaacactaattaacgtactacgtctatttggcgccacccaatataaaaaggtaaagacgacaaaaataacgacgagcgtaacagtccaacgaagattattccaaaaactaagaaagtcttccgagaaattcaaatggttaattaaaaacattccaatttgttgtccaaatacgagtaatagcaaagttgcccccaccgttgcaagcattgctaaagtgaaaaacatcgataataatcgttgtacgacataattccgtttattcgtaactccatatgctttattgagcgatttcattacggcattcataccattagatgccgaccataaagtcgcgataatcccgatagaaagtaatccgccatttttctgcgttagtaaggtatttaaattttcttctaaaaagtccataatctgatctggtgcaaattcttttatcatattaaaaaccgaatctttatcaatatgaagataagcgagcaaagtggccgcgattagaagcattgggaaaatcgaaaacagcatataataagctaactgtgctgcattcccagaaacatcatttcgccctactcgtgcgcttactgtttggcccacttggacaattccgttatgtttaatatattttactacttttttccacactgataaggccccctttttctagtcattcatctggaagtttttcttctattatggtaaaattttgtctattagcttgaaaggagcaaaaaaatgaatcttgaaaccccttcacaggaaaacttagattttatgttagcagaaattactactaaactaaaaatggtaaatgttggcgtttttgaaaatcttgagcttgactctgttgattataacgcacttactgatatttatcagctaattaaacgtaaatcaaattttagcccacgcgaaatgcaattatttgcagaagagttgcgtcggattagaaaataaaacaaattccagccactatttagtggttttttgtttggaaataatcggttccaaaatctactaaatcacgcatattataaattttagttggcgctcctataaccgtcgttgggtgaaaatcacgttctttctcatatgtacgacctaacgcgataaacgcttcactgttataatcaatttcctgatacttctcccaaacaatctcaccttgtttcaaaaatgcagcttgattttcaataagcggaaacacatttgaccgctcttctgctaaatgaagagaagtattattattgttatccactccaaacaaaatgattttagccgaaagttgatataacttaccgagcggtgaatcatcccctaaacttttcgaaagaggctggtgagcaagtatttcttctttatctttcccccaagcgcaaaacgaatgatatggatgaaaactgcgcgccacatccggcatagctcgaaatgtttccgcaatgacgcccatactgcgagttggtgttactaatggatcaaagggtggcgtttctgctcggattattttccaccagctttctggaacaggaggattttcccactttgccggatcgctcaattgtccagtttgcgctggcatgacgatatttccattaatgccaactgtctcttgaagtgcataaatcaccgccaccggtcccccgcaaatccagtgtgcttttgacatggaggcatgaaaaataaccgtatcaccttctttaatacccgcttttttcaggtctgacacgattttttgttttgttgctggttttttcgttcgccagatggccattttttctcccaattgccctgtcaccacctctaaaaaataaagccagatgcctagaaaaaaacgtcaaagtaaaacagtgtaataactacaagtgtttttactcgaattctgttctaaatgcatctggctaactagtttaattaatcgttttcgccttgatacgttaaaatttctgggccatcttttgtaatagcaaaagtgtgttcatattgagctgataaagatccatcaacggttcttgcagtccagccgttatcgtccatttttgctttccaagcgcccatgtttaccattggttcgacggtaataaccataccttcttttaagcgtagtccttttccagctttaccataatgcggaatatctggtttttcatgtaaagtaggtccaacaccgtggccgataaactcacgtacaacagcaagattttcagactctacgtatgtttggatagcgtgaccaatgtcgcctactcgtgctcctacttgtgcttgttcaatcccaagataaagtgctttatgcgttacatccattaaatgcttcacttcatcagaaacttcacctactgcataagtccaagctgaatcagcaagcgcaccgtgatagttcacgaccatatctactgtaataatatcgccttgatttaacttctgtttgcgcggaaaaccatgacaaatttcatcattgatacttgcacaaatggcatattcgtagccttcaaaccctttttgttctggagttgcgccatttttacgtaaaaattcatctgtaaatacttctaaatcccagctagtaataccaggtttaatgattttttttagttctttatgcgtatcggcaaggattttccccgctgctttcatctcatcaatttcacgtcttgatttgagtgtaatcattcttttcattcccttctaaaatttccactatttactattatagctcgaaaaccgttagaaataaagtaatccggaaaaaaggttgcagtttttctgaagacatttataatagaatgtatcagttgaaaaaatggtagactggtttgtgccattttaaacaataaaaaattcagaaaatggggatgcaaaatgacaaaagttatgatcgtttatgccagcatgactggtaatacacaagaaattgccgacattttaggtgaagaattagaaaaatacgatattgaagttgaaattgaagagtgtatttcagttgatcctgaagatttactagaatatgatggcgctctaatcggtggctacacttatgatgatggtcaactacctgatgaatttgttgatttttacgaagatatggccgacgttgattttagcggcaaagtttgcgcttctttcggttctggcgatactttttatgatgaatattgcttaacagttgatttagttgaaactcgtctgaaagaacaaggcgctacagttccagttgctgggctaaaagtagaccttgatcctgacgaagaagatgttgttcgcgcagaaagttatgcaaaaactttcgtcgaggcattaaaaggataattctaaagcaagtcctctttttcggacttgcttttttatttatttaaaaatagcaaaaacagtagcctcgtggttgctttacctcattaattgagatacaattctcgtattgaataaaaagattggagtgattaattatgacagtatttagtgaaaaattagaaaagtatgcagaattgattgtaaaagttggtgtaaacgtccaacctgaacagaaagtagtaattatggctccagttgacgcggctccactagtgcgccttatttccaaatatgcttttgaagtaggcgcagaggatgtcattatggattggcgcgatgaagaattaggcgcattacgttacaaaaatgctccactacgcgtttttgaaagcgctccggttcaccgtgttgcagaaaaaacagaacttgccaaagaaggcgcttgttttatttcaattacatctgaagatccagatttactaaatggcgtagatagcaacaaaattgccactttccaaaaaacaatgggtggcgcaatgagcgagtttcgtgagttaatgcaagcaaatgtcgtaagctggacagttgttgcagcagcttcacaaggttgggcagcaaaagtattcccagatctaacaccagcagaacaaatggaaacactttgggaagctatttttgaaacaactcgtattaacaccgaaaacccggtagaaacttggaaaaatcatgatcaaacacttgctgccaaagcagaaagtttaaatgaaaaacaatttacttctttacattatacggctcctggaactgaccttacaattggtcttccaaaaaaccatctttgggttggcgctggtagtaagaacaaaaaaggacatgaatttatggccaatatgccaacagaagaagttttctgttgtgcggataaactaaaagtggaaggttatgtttcaagcacgaaaccacttagttatgcaggaaatattattgatgacttcaaaatcactttcgaaaaaggtcgtattgttggcgttgaagctgcatctggcgaagaaattttaaaagatttaatcgcaacggatgaaggttctcattatttaggcgaagtggctctagttccagatccatcccctatttcccaatccggcattttattctacaacacgctatttgacgaaaatgcatctaaccacctagcaatcggtagtgcgtatgcgtttaatgttaaaggtggcgaagaaatgtctcgcgaagaattagaagctgctggtgtaaacaatagtttgacacacgttgacttcatgattggttcttctgaaatggacattgatggtgtaaccgaatctggtgaagttgttcctgttttccgtaaaggtgattgggcattctaatccttttttaaaccttataccttttgcgtaaaacccttgtagctttttgctttcaagggttttcgtttgttatttttcatagaagagagcgaggtgcattagatgaaatttagaacttgggacatcaatttaaaagtaaggctttttggggaagcactactcgatatttctttttggatggtcttcccctttttaacaatttatttttctgaaagtattggacgagagcttacaagtttactactgattatttcgcaagtgttagctgtttttacggcattacttggaggttacttcgctgataactttggtagaaaacggatgatgagtatttctgtcattggagaaggcttcggttttcttgtttttgcaataggtgcacttcatgttgtggattctccttacttaagttttgcagggtttgccattgccagtgtttttatggctttttatcagcctgcgagtcaagcgatgattgctgatgtcgtgcctcctgaacaccggacacatatttattctgttttctacatgatgattaacatcgcggtggttatcggaccgattcttggttctgtactattttataattttacgactgaaacattacttgcgattgtttgcgcggatttattattactctttttactacaaaaatttggtcatgaaacagcaccacttttagttaaccctgatttgcaaaaagaagttgttcggaaaagtattggagctgttttattggagcaacttaaaaattataaagttatttttaaggataagattttcttcttatacattattgctggcattattgtttctcagtcgtttatgcaactggatttactattcccgctatatattaaagaagtcatcggtgcatctaacttgttcgcgtttcattttactggggagcagctgtttggtgtaattgtttctatcaacgggttctttgtggcagctttaacagttgttgttactcgctggatgagccattttagagagaaatttgtctttatgaattcgtctttcctttatgctgttgccatattcttgtttggtatttccactggtccgtggggtgcgatttgcgcaattattctctttagctttgcggaactgatgacagttggtttacaacaaacctttgtatcccaattagctccggaagataagcgagcaatgtatttttctgctgctggtctccgttatacgcttggtaaagttattgccccactcgcgattacgctttctactttaattggctacactggaacttttacaattattggtgttttggcgctcgttagtggattaatttattattatatgtattcggaatttgaaaaacaacgtaaagtttcctaatgaaaacgactatctatggatggatagtcgttttttgattggattactttttttacgatttttttacgaaatggctaaaacaccagctttattccgcgtttaaattaccttttgatgtcaagcatgtttaaataatgcttataaggtgaaaagagtctatactgttatttatacacctagaattgactcgttatttttaatagaaagttaggtgtgagaatgtttggaacaacaactattgggattgatttaggtactgcgaatattttagtttacagtaaagaaaaaggaattatcttgaatgagccttctgtggtcgcgctaaatacgaatgatggtacggtacttgcgattggtcatgaagcaaaagaaatgattggtaaaacgccaacttctatttccgctgtgagaccaatgaaagatggtgtaattgctgattttgatttaacaagcggattgttacgcgaaattatgcgaagaatttcaactagcggcgttagaaaaccaaatgtcgtagtttgtacacctactggagcaacttctgtggaacgtcgcgctatttctgacgcggtaagatccactggtgctcgttcagttgctctaattgaagagcctgttgctgctgctatcggggctgatttaccggttgctgagcctgttgcgaatgttattgtggatattggcggcggtacgagcgaaattgccattatttcatatggtggtgttgtttctagcacttccgttcggactggtggggatcatatggatgaagaaattattcaatacatccgtaaaaactataaccttttaatcggtcaagcaactgcagaacgtattaaaatggaattagggtttgcaccaattgaacatgtagctcaaacagcagatattcgtgggcgtgatttactcactggcttaccaaaaacaattcaagtaagttctacggaaatacaaagcgctcttgaagagacattgcaacgtattcttgaagcaattcgaaatacccttgaaatgtgccctcctgagttaagtggcgatattgttgatcgtggtattattttaagtggcggcggatctcttctccaaggtttccgtgactggctggtgcaagaaattgatgttcctgtacatatggctccaagtccgcttgaatctgtcgcaattggtacgggcagatcccttgcttttgtagataaattagctaaaatttgatattttataagcatatgaaaaggcattctatacgctttttcaaatgcttatttatcttgctcttaatctttatttctggtaaacttatttctgttgtttgcctttcaaaagcccatatagttaaacggatataacaagcccctcctaagggctagttcgtggttcgattccgcgtatgggcgtcctaaaaagccgaaaactcttgagaaatcaaggctttcggctttttacagtctttacttcgaaactaatcttgaaactattattttttgaccgtatacaaaacccaatttcctttctctttctccacgacttccctaaaaccaatttcttttaagagtgctgttagcgaggcggttgttttatattcgtccatatgataatcaattttatctttttcagacgacagtattaaaacaccctcttgtgacatgacccgatagatttcttcaaatcctttttggagattatcccagtacatgtgagtttggatagcataaactaagtcaaaagactcctccctataatccatatccgctacatcagctacagttagcttaacttttccatcacttatggcttttttatttaaagcactggctgttttataggactctttggaaatatcgataccataaattgttagattctgatctaagttcactagatttttaacattggaacctcccccataaccaacatctaaaacttttgtaacgcccgccatttctgtattattaatcgtccatttactcaaatcttcaaaatacgatgaccatattttggtagtaatttcaccaataattccgcgtggattggcagcttgaccacttaaatagttaatcaacggcttatataaaataaaacttaacacgagtactcccccaagaatagttaaagtgaatttcttcttttttgtcattttcatcgcagttacattcccttcacgagttcatagcctttcgtatttcgatatatagttttgaaatataaatcaccatatttcaaaactattgtatgataattcggctattaaagtcaagttattttgaaatataggtgctaatatttcaaaatggaagaaattatggtatattattgctagcataaaaatggaggatgtgtgtaatgaataattacgagaaaagaacgcttaaaaagaaaacagctatcactcatgctgcgttaacgctatttgggaaagctggtttttcggaagttagtattaaagatatagcaagtctcgccggggtctcccaggtttctatatataattattttggaaataaggaagctctcgttgctgaatgtgccaaagtcattatgcaagatacgatttctttagccgaagaaatattagtttctgaaggtacttttacagaaaaattaacacgcgccatccaactttgtcatgcggaaatcaatgtttctttaagtaaatttatatccacagaagctagcaaggattctcaatttataacacttttagtaaacaatattaacaagttaaaaaatgatatttatatggaatatgttgccgctggaaaaaaagcaaaggtaatcaataacgacatttctgatgatgtaatccaacttttcattgattctattaatggattgggtttgacaattccagaagaagagctagagaagaaacaagcggagattattcatttgtttttgtatgggttgattgggaaataattaaaatacaaaagacacatataggaatgctaagataaaatatccaccctatatgtgccttattatttatacctgtatcaatttataagtatctttccactactggaataatcttatctgcatgattaaaaatatcaatcacatcaacaatttctatcgtagttttctcttcgtcatttattacaaaataggttcttgcattattaatgtataatcttaaaacccattttcttatactgttatctataattatattgaagtacgatttattatctctataaaaaattctagatgtatcaatggtatctttcaataataatttagttgtcgtgaatgcttcaatttctgcttctgttgtaataatatcttcttcctcttcagcatttgcttctacttgaggaacttctaactcttctactgaaacagatgtattaagtgcagcatttagtttactattcacttgatctgcaataaattgtcgaaatcccctttttacaacaggtgtgaatttatcgataattacttttgtttttattccgtcataaatttcgccaagaataaatttaacaaattcttcgcttggatcattaacttctttagttaaaaattctttgacaaaattaagatattttaaatcagaagctgctttagaaatattctctacatcaaaattttctttttggaatttaaaaatttcagaaatttgaacatcttttatttctgtaagcacaaaggaaaagaatggcgttttatccatcttgtttggttcttccaaatcagtatagaatcgatattcattaccgttagttaaaataccgaatttagctgttgtagttccaaaatatctaaacagctgcgaatcatggttttttaaatctgatttaatagatttcgcttcaattaggataatgggattgttattatttaaaatagcataatctactttctctcctttttttatccctacatccgcaatatactctggtgaaaattcgagtggattaaaaacatcatatcctaacagttgaaaaaagggcataattaatgatgttttcgtcgcttcttctgtagctatcgaatccttaagcgcagatactctttcccctaatttctttacatctaataatagtgtttcactatccattttcatcgtctcctatttatgtattattattcacattcatttctaaatggaataaccgctcaaacaagttaagtgtaatataaatttctttatccgtctattctttttaaaatatcacaaatacaaagtgttaaaatacacatttatggattaaaaaatatgtataattcacaaaaaataaatactaaaaaacagaaaccctctaatataaaagagaatttctgcttttttaaaattttatttcttctcaaccaatctaaaatgttgccaaggtaaaattgtatcaagtaaataacgctcttctggaacgattcgtgcgacaatgttggtgttgccggagttttccatttcttgaagtgctacttgcatttcgcctttgtagcgttcgtagccgtcgttatcgatagtcacgtcgccttttgcaatggtatttgtgtcgtgtgccgggaaatcgaattgtttgaaattaacacgcgtcattgttgaacgtagcacatactcggaagcatcgccacggttgaaatgtttttgtgttaaaacgatttctttttccacgtcagttgcaccgtctaaaaactctactgctaattgtaattcattgcggtttaattcgcttaaagcgcgtaattcgtcttctgaagcgaacatgttccctacaatgacatcatcaatcaggccagtgttccataagtcttttgcttgaacagtaatgtctactccgcgatgttcttccattgttggaagtccgccgtccacaacaaaccatgggccaaattcgccgctgttagaagaaacgaaagctgctgtacgtaagtttaaatctttaaattgtttacttgtacgtaagaaatgttctctggaaagaccagtgtattttcttgggtagaagttgtgacagccaatgatattacctacgtttgcttggtaagataagatattttcaacgtaacgagtaccattactaatgtttaattcaattttcaagtcagtatcatcaaacgacattgcggcttcttctgaaccggagaatcctaaatcaagacgaaggccagctagtccaagttctttgaaacgatctaattctttgtaagtgatatttaacgattcaaatacagtcggatcaacatcagcaataacatcaaatcctagttctttagcgcgtttgcaaattgtttctaatttagcaaactccgcttcgtcattagcagaaattaaacacgtgaaaatacggctaaaaccatattttgcagctgtttcaatatattctaatgattcttcaagcgctacgtgttgcggaaatacggatattcctaattttctcatttaaatcatcccttcaaaagcttatttagaacggtataaatcaacaatttcttttgctaaatctttaaaagtaatagcattcattaagtggtcttgtgcgtgtactaacagtaaagaaacttctgctttttcgccgcgcgcttctccttgaattaatgaagtttgtgaatgatgcgcttcaagtagtgccgcttctgcatttttgatttgctcatctgcaacgtcaaaatcccctttttttgccgcttcgatagctaacattgcgtcactcttggcgttacccccgtgtacgattaattgcataattgtttgttctaattccattgtttacacatccttttcatttatcaaaactgtgtcttttttcctcttcaagcagtatcgaactcgaggttatttgttaatcattgctagtgcatcatttagcactttttcgccgtccattgttccgtagtcaataccattaatgattgaaactggaatacccagcggatccagtacccgcttcaaattcttctctaaaaaacgaacttgtggagcaagtaaaactacatctacattgcccttatacttatcaaaatcagcttctgcaactgcaattacagtggcatctacatggttattttcgatagcttctgtcattttttttacgagaagacttgtggacataccggccgaacaaactaacatgatgtttttcatttaataaacctcctagtttgaaaagctgcacgtatatataatatgcaagatatgtgccaacttttcttcttataagttgctactgtacgaactttccacttacacaagtaaaaaagccaagtgtgtaagacaatacacacttggcaggttgttttttctagttaacttccacctgattagagagcatcatctgagttaaataagcaatttctgattgcgggatgacgatatcatactcaatttcaacgttttccatcatttgttgcgtaatctgcatttcaaccatatgatttttagcaaattcatttaaatccgggaactctctatccaccgcgcccagtttgacacgctcgataaggaaagccaagtggagaatcatgccgatgtctacaccagattcaagaatcacattaagttgcagctgtagttctgaaatcacttttcttaggaaataaacaagttgctcagcagaactcacggcttgtaaatttccttctaatgaggcgattaatttttcataaggtacttcatcgtttaaaattctggaaacaattcctaaaccgccttctgatagtacttcaagcgcgctaaagaatggaatgtcgcgatattcaaaagcaactgaacccataattgctaaaatattatactcttccatcagttgatcgatccgctctctgaaagcttctttatgcaagaattgtaacacgataatttcgattttcgtttcgtcgataattggtgctacgactttacgcagttgttcggctaccccttcaccagtaaaacaagtaaagattacagcatttttgactggcttagctcgtaaaacatgggccttatatttattttcaaataattgctcacaactttggtaaatatcttctaaacctcgacctaaagatgcttttcgcattgcttcaagtacaacaggtgtactgaccatcgttaccgttttcgtgcggatgccgagctcttctgtaaggatatttccaaatgaagtgagtgaacccatatcagaaagtatcaacacacctttaacaggatttaatttaacgacggtttgttttagtttttcatacatcgctttcacttcaactgttagaggcatatcgagggcaattccgctttcaatgcttagtaactcttgcacggtttcaaccatacttgttgcagtggacctgccatgcatcatgactattacttcgacttgattttcctgagaaagtgctgtatctactacttcctctgtcaaaaacattgtcaaaaatccgatttcatcaaaaggaatttcaatgctaagttcttgttcaattaaagcggataggtcaattgcgacttggaattcttttggatattttttacgaatattatttaaatccgggtgaataatatgtttttgttcacgaacacgctcaatggtgctttgtaaatgtaaggaaaaagcgaatttcattttttcattatatttacgatttaatttttcttctgccattgcgtacactttttctgttaattcccaaactgctggcgcgataatttctttggctgtttggtgggtaggtaattggaccatgtaatcgtggaaatattgatccacatcgacataaagtgcttcttctaactcactttggtctttaccttctttcattaactggtctgctttttcttggatggcatggtaaacatcgtgcacatcttccacttccgcagaggcatcgctcgtatcaacgaatttaaaaatcgctttattaacatcaattaagcggtttaatttctctggttcgtcttttaaatgtagtaatcctttttggacatgaataggtaaatcatcttgttcgattagaatataattggctgtttttgttttataatgtaaaaaggctttggcacacgctagttttaaatctctttgcaattgaccaacgttggcacttgcatgataaagtaaaaaggcaataagtgcttttcggtgcacgcgaatggattgatgcagcctgattgcttcttggtttaagaaaaactcgattaattgataacgttcttctaagtttctttcagcaagtgatggcaaggtgattgtcatcggaatacgtctagtgaacgtttctagtaagaagttatctggtgattctgttgttgcaccaatgatttgcacttgcgcatgatgaacgttagcgctttccccaagtggccgaaattcacctttatcaatgaaagtgaagagcatttcttgtccttctgggggtaaacggtgaatttcatctagaaataaaatcccgccatccgctttttttagtaaaccttcacgagtttcttctgctcccgtgtatgctccttttataacaccaaaaatatgaccgaataaaagttgcgggttttgcgcataatcggcacagttaaaggatataaatggcgcatcagctgggatagtttgagattctttcgcaaattggtacatacattccgcaaaaagggatttccctgtcccagttcgacctaaaatcaaactatgaagtccatttggcggataaagtattgctgcttttgcttgttgtatacttactttcaaactatcttccgacccaattaatcttccaaatgcggactcttggaagctccctgctacttcttctactttagaagcagtttttaaagcctgataaaatactggtttcccaggaagtttgtctattcttttttctttaaaaagatcatttagataacgactagcgttcgctcggtccatttgaagcaattctgcgacatctgcagcagatactttttcttcttttccatttagaagttggaggacttcttcttttctactagacatctactctactcctttttaaaactctatgtttccattatacctttttaaatagcatactcgcaacgataaaaattaagtaaaaaaaagtgcgaatgcttttcaatctatgaagagagaaaaacattcgcgacagcttatgattttttaaaattatttggttttttattaaatttatttggtttgttattccgtgttgttttagaggagttagtaggtttttctttacgacttcccgctcctccacttggtttttcgcttcggaaaggttttttcgtttcatcttttttgcctttttgaacttgttttggaggtctgcttgcttttttagcaattttattttctggaaccgctccatcgagaagttttccttgataaaaacgaacttgtttcccttttagatgatggatagttaaatattgttttaacgttctgatttcacgaggattggcaaaagtaattactgtaccagttttccccatccgtcctgtacgaccagagcggtgtgtatactctttttcgcttgctgctaagtcataatggatgacatatggtaagtcttctatatctagcccacgcgccgctacatctgtcacgattaaataagttaacgtaccttttttaaagtcgtccaaatattttttgcgtttttctttacgaatttcgccgtgaattccggctgcttttactttatcataatgtagtttttctaataaaatttccatacgtggtttatctttcacaaaaaccaagccgcgcatgtctttaatatgagaaattcggcgtaaaagagtcgctttatcgcgtgactctacatccatgtataaatgctctacgtttgttaattcttctggtttcgctgttacttcaagcatcactggcgttttttctgtttgtaagaaaaaggcttcaggattttcgagttttgttgcagatactaatgtcaattgacgatcgcgcacagcactttcaactatttctagagtacttttgaagttctcttggcgaagtaattggtcacactcatctaaagtaatcgttttaatttcgtgcatttttattttcttttgtttgattagttcaagtgcacgacctggagaggctacaataatttgtggttttttctttaatttttcgatttgccgttttacattggctcctccgattaaagagattactgtcagttcatcacttggtaaccacgaacggattacttccgtgatttgcataactaattcatgagatggcgctaaaacaagccattgtgtttttggaattgcttctattttttcaagggttggcagtgcataagcgactgttttccccgttccagttggtgatactgcgagtacatccgcgccgtctttgattggttggtacatcgcactttgaatctcagttggcgtttcataaccatgttctttccatttttccgcccaaaagcttgggatatttgattctgtcatgacccgactcctttattagttcttctctgtatcataccatgcttactgcaagtctgcacttttatttagaatttttgttgctagaaaaaagtaaacaagagccatcaaaagattaaaacccatctggataaaattaaaatgaacacttgaaaaaagggaataataaaaatggatttctgagctacttttagataaaaaatttgttccaatggatacttgaattgcattaattagtacaaagtagattaatgcaccaataaaactaacacggaaaccattgactggcaccatactcaaagctgttgctagaaaaaggatacagacgaaagaaaaagtattaagtcctatcgctaaaaaagtgtcaaaaataatagttagtcctactgaaaaagaaatctccgcgcctccaattatccccaagctaattataatcacaagaactccagctgttagaatagccgtctcgattaagacgatgattaatttgttcaatagtattttccaaataggtgtttctgtttgaaaaaacaaataacggttttcatcgtaaattccagatcgagctgctgccaaaaataaaagtaaccaaatgagtaaccaactagcaccaacaatgcctattaaagctatgaaaacaccatcgccggacccaaatacagctccatctatatctgactccattacaagcggctctgataagccatttcctaatttagaaaaaagaccaataagtaaacaaatcagccaaccaacaaaagttgcaaaaaatatgtaacgatgcgcattccattctaatttccagtgtgctttaagcatgtccaaatacctcccgatagtaatccaccactgatttcccgttttcttcccgaagtgtttctgtgtctatttgctcgattattttgcctcgtttcaagaagataatttcatcaaacatcatttccatatcttgaattaagtgtgttgtgacaacaagtgtggcatcttctttaagaaacgttgcgatgcttttaattaggtcatcacgtgaaatcaaatcaatttctgaaaatggctcatccagcaaataaaggtctacatctcggcataaaataagtgccagcattacttttgcagcattacctttggataagtatttggtattttcttttacgttaattccaagtgaatgaatcatttgttttgctttttcttggtcaaaatccgaaaaaaaactgcgataaatttgaaaataatcgcggataaccatattgggtagaaaatcttcacttggcagataggcaattctgctgtgttctgctaagtttattgtcccagatgttggtttaagtagacctgacattgcatttaacaaagtagtttttcccgcgccattaggtccaagaaggccgatgattttccctttttgaagagaaaggttaatgtcatttaatggttttctttttcgatattttttcgttaatcccgtaattgtaattaggttttcattcatggtttcggctcctttttattagtaattctattgctgtttggtcgtctaaaccgatgctcttcgcttcttccaaaaagcgttctgtaattgcatctgctaactctttttttaattggtcaaaaagtgctttgtcggaagtgacgaatgatcccatccctcgttttgcataaatatagcccgctcgttctaattcttgataggcgcggctaacggtattaggattcactgcaagctttacgcccatttcccgaacagaaggcaacttatcctcacccttccattcacctgtaatcatttgttttttcatccagtcagagatttgactatagattggtttatctgcatgaaaagtcggattcattgttacctcctttttaaacggaactagtgtattaagtaaatagtacacttgaatttcatttattgtcaagcacaaaaaaactaggaatcagcatggtagctttttcctagttcttcaaaattatttttctgcgtcaaaccaaatatcgttttggtgccgtagttcgtttgaaacacgtaatacttttaagcttaaatcggctaagtattcgtatgtatctcggtcaccttgttcgataattcttgcaaactcagcagcttcaaattgcatatcattagcgacaactggaccagccagctctgtttcttcttttgtcgcattatcataaaaagtaattttttcaattcctgtcagcggatcgacaattagtgttcctttttgaccgtagatttcacttggtaagaaggattgtgaattttttccttgaatgatagtgatattgaaggatggatattcaagaatgattggtccaagtccgtctacaccagttggtaatttcgttgcaaaataagttgctttaatgggttcaccgaatagtgtaatcgctgaatataatggatagacacctaggtcaacgattgatccgcctgagaatttcaatgagaaaatatttggttcttctccgtttaaaacttgatcgtatctggaagaatatttcatataagcaagtgttgcgccgtgaattgtgccaactttttcgatattttcttgtaatcgtttgaagtttggttcttgaatgtggcgtgctgcttcaaataaaaagacattattttcacgagcaatttggtgcgcatgctctaattctgctacggtagaaaaaatcggtttttctacaataacatgctttttatttttcagtaagctaaccgcatgctgataatgaagcgcattgggagaagcaatgtagacagcatcaagcgcatctgatttccccatttcttcaatatctgtgaaataagtcaactcgccgtatttttctccaaatgcgcgtgctttttcttctgttcttgaataaacagcagttaaattccattcgcctgaattaatcgcgccttcaataaaagaatcagtaatccagttcgttcccataattcctagtttcattagccaacagctcctttaattttatcttaagtataccttaaaataaggaaaaaagcgtactaactgtttgaaacagatggaccactgattctagttgtatagattatttcattttcagctttttcaccctcgagaagttcgacaagtttatccgcagccactgctccccatttgtacttcgagtattcgatagtagctaggcgcggcactaaatattcgctaatatccgtattatcaaagccaataattcgcacgtctttgccaatttctaaatccgttccagcaaaatatcgatacatcccaatcgccatattatcatttaaagcaaagacggaaacaggtgctttccagttttcggcaataattgcggctgctttttcgccactctcttcggaaaaatcgccttcaataatatgcacttttttatcattcgaacgagccagttcttgctttgctgtttctaggcgaacccttgcatcataagaatcttctggacctgtaattacataaaagtctcctttgaaattagtagataaataatcaatcgcaagtgttgcaccacccttattatctagcaagacttggcacacattctcatgagtaagttcgcggtcaagcacaactaatttatgaccacgatttgcataattaatgatttcactcgacgggaaattcgcatctaaaataatagcgccatcaatcattttctcgggtaaaaatcggtgtgttttcgtaccactgcatgcaatgagttcatatccatgtttgtatagcgttttcgttaaaccttcaagtaaagtcccgtaaaaaatcccgccgtaattcgttaaataaacgccgataatttttgtttctcttgtttttaacgttcgtgctgccatattgggaatataattcaattcatttgcgatggtcataattcgttttcgcgttttttcggttactttcgggctgccattaagcgcgtaggatactgttgaaatggaaacccctgcctttttcgcgatatctttaattcctaccacgtgaatcgcatccttttctgttttcttttattatacacaaaacaaccttagagacggttatttttttgaaatttaatcgtgatttgtgaacattttgtcgttaaattctttttaggtaaaatgagtgcgccagttcggtacaaattcgctccattttcaactggttgtttttcaccattcacgacaatagaaccctcatccgcactttcgaaagtaagatcaagcggataattatctagttcaatatgacattctaatccatctaattcttcaggcaaaatcggatcaaaaataagcgcatcttccgtttgacgaataccaagaacagaacttattaattgatgtaaatagattcctggaccgctagagtaaatccgccagccgcctttcaccggaatactgccttctttcacacgaccaaactcattttgcgcctgatagcgatctaaaaacgctgcatcagaactactgaaataagtattactttgacgaagtgccgcatttgggacaacttctttaatattgattggattaatgacatcaagcatatgccaagcggatttatcgccaattttagctaaagcttcaatataacgaatatgcgcatgcacgtattgcaaaccaacttctcggccaaaattggctgcttgctctgcccgtttaaaatgagtacttacaccaccagcataatgcgctggctcgctcattaatcttacgccatctggatgaagtaaatgctcaccaataatttcaaaattacgactggcttgctttttatcgactaattcagaaattacacttcttgtcagtggtattaagcgatatttaatattcgtttctttgtcttctgggtgaatcatccatacaggtgcttttccttcttctaaataaaggaaacctggaataacatcggtatcatttgtcatatatttcgcaaagtccgcttgaacattttttgctaatgtttcgtatttctcacctactggtaaaaatgcagctaaacgtttaaatgtttgataagttagcgcgaccgtccagctggataccatgtttttcttcagctgggcattagctggttgaagtgtgtcatcccagtcaccatcgccgtaattagaaagagccgttcctttcataaagcgtgcttcgatcgttttcactgcgagttcaatgtgttcaagaagagttccttgctctttcgtaaaggttttcgattcgcggtcaacaaaaggaatagcttcttctaaaatccctgcatccccgctcatttccaagtaatcaccaataattttcagtggccaaacaataacatcgccgtggctttcttcttgctgaatcgatgtatatttatcaaacataaaccactgtggccaatcaccagtatcttgatattgatgagaaaaaatggtcaacactagcttacgtaaaacagccttattgcccgttgcaaggaaaaattcaaatggaccttgactcacatcacgcgtaccccaagccgctccgctgtactgctctaacccatgaggtgaagcatagtgaaccaacatttgatgcgcataccaataaaccgttaaattcagtttctccgctgttgtactttgatgatttaaatggaactgagcagttaattcgtcatagctagcgcgaattactttgttgtttgcttctaaatcctcagttggtttcgagaattcatcgctgagttttgcttgaacatggaaagtagctttatcacttggttcaaaaacaaacacatccaaacccgctgttcccacgtaatctttcgcaaaataacgttcgtcagtcagttcattataagttccatctacgcggaattgaagtgccggataggtttctaaaatcggcgagtcttctgctgggaaataagtgacgattccgtctttgatttcttttttcacggtagtatcatattcatttgtccccatagttacttgatttgttaagactaatttatatgaatgacctttttccgaatgaacggtgacgaatgcctctttactatcagcagttaaggtggtttgtaccgtgattaggtcgccgttccactgataataccaagttgagtaattcgtactagtttcccagacagacggtacgccgagcagtcgaagttcggaatctaattcgatataaattcttaatccgcttgtttgaagaatattgagcggattacgcgcgtggctattccatttgttcatattcgtatttccagcaactaattgtgataaaaatgccccgtacatgtacgttgttgctgaaagagtcgcttctggatttaacacatcgactttatcaagcaaaatactgccatgcgggcgttctaattctgcttctttttcgcgcatcactacatgtgcatagtttggtgtgaaaaaggaaagcagtgcgccgttttgttgttcttcttgaatccggtctgggaagttctcttgaagccagctgtcagaaattgtttcgccggtaattggtgttcctatatgtttgtttaatatggctttagtacttggttgataaggttgctctgaaatattactttttagttcggctaaattttcgaatggtgctccagatgcttttggttgattttctgttgcatacccgtaaaagattgtttcaccgtgattagtaaatagctctgtttgtaaggagatttgagcgaattcatattggtagactcggcttggcaatgatttttccttaaggttagctagttcgctagtcagtttataattagtcccataaatatcaaaaccatctgttgcataccctacaattttcgttaatgctccaatttgaactgctggaaaacgctcattttgaggttgattttgacgtgcttgaacagtgaaaccagtcgcgccttctgtcacatgataatcaatatattgcgacatataagcttcatttgttctcactgccgcttgttctgcaagccccaagtcttgtaagtaaacaagatcaaactcaagatcaccatccactgtgacatcataaaaccaaccgcgcgtatgaaaatgcatttgcacgctataacgaaatggtccaactacaccgcgatactccacgccgttttcattaaaaccaacttcagcatctctgctaagtagtggataaatttctattttatctcctacatgcgcgcgtacatatatttgcgataagcgattttctaatggattttgaatcacttgatttagcataatatcttttaattttagccaagcaagctccccgctcggataaaatgcggctgataaatccgcttttttaatttcttttaacattgtcacacatatccacccacttccacttcaaaaacgtctacatcttcactactagtcccaacaaaaacacgatgaagtcccggttcttgcactttttcaagttgatggttatagaatgaaaatgcctcgcttgttaattcaaatgtaactgttttttcttcgccagcttgaagcgccactttttcaaaagcttttaattctttgacaggccgtgaaatgctcgctgtcacatcttgtaaatacacttggattacttctttcccagcaatatcactaatatttttaatggttacttctacatgtagtgattcgcctagatttagttctttcggaagactgcttgtttttaactcgaattcgctataactttttccgtaaccaaatggataaaatggttcatttggaatatcaagataatgcgacacataacgttcgcctttattttccggtgtttgtggtcgtccagtgcgtaaatgattataataaactggaatttgccccgttgtttgcgggaatgacatggataatttcccggaaggattacttgcaccacttaacaaatctgcagtaacacgacctgcttctgttcccgggaaccataattcaagaagagcatcactagattctgctaactctttcacttcaagcggtctaccattaaataatgtaataacaactggttttcctagtgtttgaacgaatttcgctaattgatattgtgcttctggtaaacgaatagtagcaagacttcctgcttccccgccccattcatttttttcacctagcgcaagtacgacaacatccatattctgtactgccgctttcactgccactttgtcttcttccgacaattcagtgtactccgttgaaacaacctcgactgtttcaaatacttcacgtaaccctgtttcaacattgatgccatctttttcttcgccgtatacattccaaccgccgagaatatcaggtgacgttgcaagcggaccaaccaaggcaatttttgcttctttagccagtggaagtaatcggcttttgttttctaataacacagcggattcaacgcctgctgctcgagctttcccgcgactttcatcggttaaaatgtcttttgtgcggtcgttattttttaatccgcgatatggatcttcaaatagtcctaaatcattttttaaatttaacatccgaagtaccgcttcatctaaaaggttctcggataatttgccttcttcaattaaaccttttaattcatggatataacaagtcgtcatcatttctaaatcaacgcctgcttccatcgaaaactgtgcagcttctttaggatttcttgctgttccgtgattaattacttcggcaacagcgccccagtcagaaataagtacaccgtcaaactccatttcgcctcgtagcacatctcggttcagccatttgttcattgttgctggaatcccgtccactacgttaaaagcagtcatgactaatttagctccagcttgtatcgccgcattgtaagcaggtaaataattttgatataattcgcgcgtagacatattaactgtgttgtattccaacccagcctccgcagccccgtatgcagcaaaatgtttgacacatgccgccatctgctccaagttttcatttagtttactcgcatcaccttggtaaccatctaccattgctttcccaagctcactatttaaaaatggatcctcaccagttgattccatcacacgtccccaccgagggtcacgtactaaatcaagcattggtgaaaaagtgacatgatgcccatctgcagttgcttcaagcgccgaaacctctgccatcactcgaactgtctcccggtcaaaagaacaaccaagtgcaagtggaataggaaaaaccgttttataaccatgtataacatccgccataaaaacaagcggaattcctaagcgattcgtttttaaataagcttcttgaataccaatcatatcaagcgccgaacttgatccaagcaccgaacccgcattttcagtatgcgcatccgttaatttcatttcttgaagaagcggccctgttagttctgcatttttgtttgtacctttaaaaagaaaaggtgaaagttgaagacattgagcgattttttcatctaaggtcatttgactaactaattcttgtactttttcttgtttcataggaacctcctgtacacatttttcgaaacgtttctattcaaatataacaacagtataagcgctttcttttctttagtcaaccaaaaacgacattcacatggtgaaacggtcctattttccagttctttctatagtatctcgtttttgagaattttactcgttcaaatttttctgataccaaaagcattgatacgcaacgtcctaactaaataaactaaaaataaaatagcaattcacttgaaaccgattacataatatactataataaccttgtcgaaacgtttctatgaaatattgtgtatgtgaattggttttcacaatttgcttcatcccgtacggcgcgcaagttctgtacaacagtttttattctttaacagcttttagttaatcaagttgctttgaaaaaaacaaaaaatggaggaaaaatcatgaagaaaaagatgtttgtcgttttagctttagtgttgtcgcttagtttagtattaatggcgtgtggtgggtcaaaggatgatgcaaattccagcgattctaaagtattaaatgtttgggctatgggcgatgaagccaagtcattaaaagaactcgcacaaaaattcacgaaagatactggcatcgaagttaaagttcaagttattccttgggcaaatgcacatgataaattacttacagccgttgcttcaaaatctggccccgatgtagtccaaatgggaacaacgtggatgcctgaatttgtcgaagctggtgcactacttgatattacaaaagatgtcgaaaaaagtaaaaatatgaattctgatctatttttcccaggttcagtaaaaactactcaatttgatggcaaaacttacggtgttccgtggtatgcagaaactcgcgtattattctaccgtaccgatttactgaaaaaagttggttataatgaagctccaaaaacatgggatgaactttctgacgcagcacttaaactttctaaacgcggcaaagatatgtacggctttgcaattgatccaaacgaacaaactactggtttcattttcggacgtcaaaacggctcccctcttttcgataaagacggtactccagtattcaataaaaaacctttcgtagacactgttacttatttagatagtttcattaaaaatggttccgcaccagacactgatcttggtttagatgcttctcaaagctttggcggcgacggcattgtaccaatgttcatgagtggtccttggatggttaatacactgaaagacactgcccctgacattgacggaaaatgggcaactgctgtactacctaaaaaagaaaataacgaatcaagcttaggtggcgcgaacctttccattttcaaatatagtaataaaaaagatgatgcgcttaaattcatggactatatgagtcaacctgacgttcaattatcttggttaaaagatacaaactcgatgccagcacgtatggatgcttgggaagacgatatgctgaaaaacgatccttactacaaagtctttggcgaacaaatgaaaactgcagaaccaatgccacttatcccacaatttgaagaaattgctcaattatacggaaaatcttgggaacaaatttaccgtggcggggcagatgtacaaacacaaatggatactttcaacgatcaagtagaagcacttcttaaaaaataacgaataaaaagggcaaatgatttattctgccatttgcccttttagaatggactggatgttatgaaacaatttttaaataaaaacacaccctatttgtttatatcgccagcactgtttttacttcttctgttttccctacttccgattttgcttgcttttgtcattagttttacggacattgatttagtcgggcttgccgattactctaaaattaactttgttggtgtggacaattacgtcaatattatgcaagacccggtatttttaaaatctatttttaacacgcttttctatgtagttattggcgttccactggttatcgtttgctcgcttggtattgcgcttatgattaacttttcgcaagcaaagattttccaatttttccggttaattttctatactccttcaattacaaacgttgtcgctgtagccgttgtttggagttacttatataatccgcgctttggtttacttaactatttgctttcgtttttagacttaggaccagttccatggttacaagaccctactattgcgaaattatcactgattatcctagctgtttggcgagcaatcggtgtaaatatgattattttcttagccgcgcttcaaggcattccacgtgaatattatgaagcagcctcacttgacggagcaaatagccgccaacaactatttaaaattactgttccaatgcttcgttttgcgattttctttgtaacagttacaacgatgattggttggttacaattcttcgaggagccgtttgttatgacagaaggtggaccacttgatagtacgaactctgttgccctctttatctatcaaaacggtttccaattaagtaaatttggttatgccgctgctggatcgtttatcttgtttatcgcgattattattatcacgattattcaattccgaattcagcgcaaaaataatgacggggatatttaagagaggagtgtttataaatgaatcaatatagacaaaagtcgcgcggcgctcaaattgccgtaattacaattttaacagttggcggattctttatgattttaccgttcatttggatggttctctcctctttgaaaacggatgctgaaattttaaaaatcccacctactatttggccagaaacttttacactagataatttcaccaaactatttaccgaaatggactttgctatttacttaaaaaatacgttaatcattgtattcttctcgtttttcggtttatttttaaatgcgatggcgggttacggctttgctaaatttaaatttaaagggaaaaacaagttattttatcttgtccttgctactatgatgattccaggacaagtaacaatgattccggtttacttgctgcttaatgcggctgggttaacgaatacgatgacaggtattgtgcttccaggacttgttggcgcattcgggattttcttattccgtcaattcatgtccaccatatccgatgatttactcgaagcagcaagacttgatggcgctagtgaattttatattttctggcggatagttattccgatttcccgccctgtgcttgcggtacaaggtattcttacattcatcgccggttggaactcgttcttatggccgttaatcattgccaacgacgaaaaattctataccctatcagtcggtcttcaattattaaaaggacaatacggcagcaactatgctttacaaatggccggagcaactttcatggtcattccaatcatcttgattttcatgacattccaaaagtacattttaaaaggattcaatgtttcaggaatgaaataattggtccaaaaagagcttaccctttttaggataagctcttttttattatggtaaaaatgtttctcccatcaagtaaaagtcaacttctcgtgctgcttctcttccttctgcaatcgcggttacaactaaactttgaccgtgacgtgcatccccacaagcaaacacgccttcttcacttgtgcggtaaaatcctttagcagcgtcaattgtatggcgctctgtttttcctacaccgaaattagtaaatatatcttctgtcgtacccgaaaagccaatagcaattaaaaccatatctacttcaaaatatttctcgctaccttctactggtgtatattgtctcgtctctttatcttctgtaacttctaccgtgtgaagcccaacaagatttcctgctgcatctttttcgaaagaagtagtattgatgagatactcacgtggatctctgccgtacactgcttctgcttcttcatgcgcataatccattttgaaaacacgtggatattgcggccatggattttcaccatttcttaattcgggtaatttatcttgaataccgaattgataaatacttttagcgccttgtctaagcgcagttgccacacagtcagcccctgtatctccgccaccaataataacaacatttttatctttagcagaaagtgtttgaactccgccattatctaaattatcacgcgtgctttgtgtcaaatacggaacggcgaagtgaatcccagccgcatcacgtccagcaagcggtatatctcgtgcattaccagccccagtcgcaagaacaatcgaatcatattcagcgcgcagttcagcaaaagtaacatcagtacctgctgcaacacctgttacaaattcaattccttcttccgccatcaagttcactcggcgtgtcacttgttctttttctagtttcatagttggaataccatacatcaataagccaccaattcgatcacttttctcgatgactgttacactatgaccagctttatttaattgatcggcacaggcaagtccagctggtccagagccaatcacagcaatacgtttgccggtacgtttcttaggaggttgcggtttaatccaaccttcctcaaaaccacgatcaataattgctttttcaattgatttaatgccgacagcaggttcagaaatagctactgtacaaccaccctcacacggggccggacaaattcgaccagtaaactctggaaaattatttgtttttagaagcagttgtaacgcttcataccagtcaccccggtaaacggcatcgttccactcgggaattaaattatgcagcggacagcctgacacaccatttttaatttccattcctacactacaaaatggcacaccacaatccatacagcgagcggcttgtaaagttaaatctgctaccggcatcggtaaactatattcattccagtcacgcgtccgacttttcggatcacgtcctggcgaaggaattcgatcatattccataaatccagttgcttttcccatgctttcactcctctctatttcgccactccggcaattaattttccgtctttatgttcataaaaagcttgtaattctgcttcatcatgtgtttttccagtttgttctagtgaagttattcttgttaacatcatttcatattcattcgggataacgaaaataaaattcgctttttcatcttcccagttgctaagaatttcttgtgcaaactcgcttcgagtaaggttagcatgttgctcgattaactgttttagtttagctaattctggtgcagataacgtagacctactgttaacaagttcatggttgatttttgtagttgtttcttggctgtttttcgtgtaaatgtatgcaactccaccagacatcccagctgcaaagttctcgccgatttctccgagaataactaccgtcccgccagtcatatattcacaaccattatcgccaatgccttccactacagctgttgcaccactattacgaacggcaaaccgtgcacctgcttttccgtgcatatacgcatgccctcccgttgccccgtatagcgttacgttcccaacaatcgcggagtcatgagctttaattggcgttctatgatctggacttacaattaatttaccgccagaaagtccttttccgaagtagtcattagcgtcaccatgaattcgaagcgtcataccaagtggtgtataagcgccaaagctttgacctgctgatccgacaaaatcaagtgaaatggtatcttcaggtaaacctaccgcaccatattttttacttataaaggagccagcaatcgtaccaattgcgcggtcaacgtttcgtactgcgaaagttccagttaccttttcaccgttttcgagtgccggtttaattaatggaacaatttctcgcatatctagcgtttgatcgattttgtggtcttgctgtttcgtacagtattggacttgatttttataaaagtcatcactgtaaagcatattcgaaaagtcgatatatttcgctttccagtgcgcttcttttttctcatgggttgttaaaaactctttatgaccaataatttctgttagacttctaaatccaagctcagccatcatttcgcgcatttctgcaacaataaaatggaaaaagttaaccacataatctgctgaaccattgaattttttacgaagctcaggattttgcgttgctacaccaactggacatgtatctaaatggcaaacacgcatcataacacaacctagtgttacaagtggcgcagttgcgaatccaaattcttccgcgccaagcatagcggcaactaaaacgtctttcccggtcattagttttccgtctgtttcaacgacaactttatttctcaaaccgttcagcagtaaagtttgatgagtttcagctaggccgatttcccacggtacacctgcatgacggatacttgttcttgccgctgccccggtcccgccttcatagccacttactaagatgacatcggcatttcctttagcaaccccagcagcaatcgttccaattcctgttttcgaaactaattttacgtttacgcgcgcattttggttagcgttttttaagtcgaaaattagttgcgataaatcttcaattgaataaatatcatgatgcggtggtggtgaaatgaggccaacccctgttgttgaaccacgtgttttggaaatccacggataaacttttttcccaggtaaatgaccgccttcaccaggttttgccccttgagccattttgatttgaagttcctctgcattgaccaaataatgacttgttacgccaaaacgtccagaagcaatttgttttatagcacttctacgccaatctccgttttcatctggcgtaaatcggttcgggttttcgccgccctctccactattgcttttgccgccaatacggttcatcgctatagcaagtgcctcatgagcttcttgactaatcgaaccataagacatcgcgccagacttaaatcgcttgaaaatcgactccgcaggctctacctcatctaatggaatcggcttgcggtcgcttgtaaatgttaataaccctcttaaaaaggcattactttgattttgcattaaatccgaatataaattatatgtttctcggtcattttcacgcgtagcttgttgtaaagaatggatcgcaagtggattatatacgtgatattctccatttgaacgccactgatactctccgcctgtattaagcgtgaaactttggtagccaatatcatgatatgcttcacggtgacgtaaccaagcttcttgagcgataacttctagtggaataccaccaatttgtgaggcagtacccggaaaataagtgttaattacttcgtcgccaattccgattgcttcaaaaatctgtgccccacgatagctctgaacggtagaaatccccattttcgacatgatttttaaaattccatcggtaattgcttcaatataacgactttccgcctcatctagcgtgaagcctttaatgcgcccttctttaattaagccatcaaaagtatcaattgctaaacttgggaatacagcatccgccccgtaaccaattaacagtgcacattgatgaacgtctcttgcttctgctgtttttacgataatacttactttcgtccgcgttcctgcttttactaaatgatgatgcaaaccactaacagctaataatgctggaataccaatccactccgcattcacgccatcatctgataaaactagcaattctgccccgttcgcgatttttttatcagctgcttcaaataattcttccaaacatgcttctaatccatcccgctcttccgccttaaataaaatcggtaaagtagctgttggtttagcgaattttgtttgtaaggtgagagcagcaaattcttttcgagataaaataggcgtttttaagcgaattcgattagcatttttcgcagttggatttaaaatattcccctcatcaccaagtagcgtcatcgccgaggtaacagtttcttcgcgtataccatcaattggcggattcgttacttgcgcaaacagttgtttaaagtaattaaacaatacttgggggcgctgactcaaaactgcaagcggtgcatcataacccattgcgcccatcggatcttttttctctgtgaccataggaatcaaaattttatttaattcatcttgcgtatatccaaatgcacgttgttttttgaaacgctctgacttatccatcgactcataacgtaaatcagctgtaactaagtcagcaatctctgtcatctctaaatctagccattcacgatacggtttttcagttgttagttcatctttaagttcagaatcagtgacaattcgtcccgcttctaaatcaatcagcaacatcgttcccgcgccaaccgtttctttacgaattacctcactcggatctactggcacgacacctgtttccgatgagtaaatgattgtatggtcttttgtttcataataacgtgccgggcgtaacccatttctatccaaaatagtgccgataacacgaccatttgtaaatgaaatcgatgttgggccatcccaaggttccattaaagtactatggtattcataaaatgcgcgttttggatctgtcatatgtggatttttatcccacggctctggaattagcatcattgccgcatgaggtagcgaacgaccagcctgcactaaaaattctaaagcattgtctaacgttgccgagtcacttccactttcgtcaataactggtaatactttagctaaatcttttccaagtaaagctgattccgctcttttttcccgcgctttcatccagtttacattgccacgttgcgtattaatttcaccgttatgaattaaatagcggtatggatgcgcccgttcccagctaggaaaagtatttgttgaaaaacgcgaatgcaccaaagcaaaagccgatacataagctggatctgctaagtctaagtaatattgattaatttgctctggtagcagcattcctttaaaaataactgttcgtgtcgataaacttggaacgtaaaaagtttcggtaattagttcagaagtagctgcaaatttttcgacttgttttctaattaaataaagcgcccgttcaaaaccggcttcgtccaattcggcatttttctgaataaataattgatacattgcgggctctgtttttctagctccggcacctacttttgtaacatcagtaggaagtttacgccaacctaaaaatgtttggccttcgcttgcaattagtttttctgtttctgacattaaacattcgcgctgagctttattttgagggaaattaaacatcccaacagcataatgatatttttctggtagcgtaatgccaagcttgctacattcacgtcggaagaaagagtcagaaatttcaagcaaaataccagccccgtcacctgtatctcctccaacttccccgccgcggtgtttaagctggcaaagcatatgaattccttgttcgacaatcttatgagaagaaatctttttaatattagctacaaacccaataccacaagcatcatgctcattctctggattatacaggccgtgtttttttggcaaatttgtttgtttcatcctaactcctcctcttcaaaaactgaatcatccggatggtttacatcggaattattcaaattaactgataattaattggcgatccagcttaccttacatttcttgtagtatctattttattccttttcatttatcgaaacaatatatataatagaataaaacaatctcatttcgagaacaattggaggtaagtaatggaacttagacaattaaagtatttcatggaagtagcccgcgtcgagcatatgactaaagctagcgagaatttgcacgtagcccaatctgccgttagtagacagataacgaaactagaggaagaactaggtgtgcctttatttgaccgtgtcggtcgtaatatgcagctcacgagtgtcggtcaagacttcctgagtcaagctacaatcgcattaaatgaactacaaaaagccgaagccctcgtaactgaatacaccgatcccactaaaggaacagttagagtcggcctgcccaattcgctatctaccaaagtcttgccatctgttatttccactttccgagaaaaatatccagaaatcacctaccaatttatggaaggaacaaatgaagaacttaccgaaatgctagtaaatggtgttttagacatgacgttcttatctccagtacccgaatctagtgaacaaattgaagccctccgtttttttgatgaaaaattgaaattaatcgtcccaacaagtcatcatcttgcagaaaatttcactgtttcactcaaggaactctcttctgaaaaattcgtactttatcctgaagacttcgatttatataaaatcgttacgaaagcggcgaataaaaaaggcttcgaaccgcaaatagcttttcaaagcagggatttttatacaattcaaggattggttggcgctggtcttggcattagtattttaccggaaatgattttagatggtgcgatttttaaagaaacgaagagtattgcactccgagataaagagttacgtcgatctgtagggattattacgacaaaaaaacggaacctatccccttctgagaatttgttccgttcatttattatttcgttcttttccaattaattatcttcagaaaatgcagctgggtaatgaattgtccctgctagattttctaaacttccatcatacagttcaagtagcataaagtattcagatggcacatcaaatggtgctggaatcgcaaattgattggaaggaataaatccaaatcgcggataataatcagcatgtcctaacacagcaatagcgggatatgctttttcgcgtgataagcggatcccttcctccattaagcttgaaccaacccgtttcccctggtattctggcaaaacggcaagcggggcaagacctaaaataaatctgctgcgcccagctgtctccagtgaaatttcactaaacataatatagcctacaataagcccatcttccgtttctgctacaagtgacaaacctggctgataataatcggatttccggatattttgaattaagtctgcttccacagtacctttaaaagcttcctcatttacacgacgaatggcctcgtaatcttgtggttgttcttttcgaataatcatttttacttagccacacgcttcattgccatgctatcttccagctgttttatcgcatttaatactacttcagctgtcatttcacctggcatcatatggatcgtctcatgtggctcagttgctcgtttagatacagcaacgattgtttcttcagtaagtgtcgccagccccatatcatacaaactcgttggaagacccagtttggcataaaacggtagtaattggtcaatttcattccatcgattttcaataactagttgaactaaaattccgtacgccactttattaccatgtaacaaatgatgcgtttctggcaccatagttaatgcatcatgaatcgaatgcgctcccgcacaacgtccataatcatcaccaaaaccgccaaccattccgccaactaaaatatttgtttcgataattttcacgaatgcttcatttaattcttgcttatccattgcgttaagtgcttcttcgctaaattgcagtaaattgtctcggcacattttagcagcaatatgagcaatttcgatttcgacagatttagttggtaatgatttaataatcacatctgcttcataccatttagcgagcgtatcgccaatacctgcaacaagcaattcttttggtgaatctaaaatcatttccggatcaattaataataaggcgttgctgctagcgaatacgtcataacgaatcattgcgccttcaacgtcatacatcacactaagcggtgtataagccgcacaagtggaagcaagtgttggtaaaataatcactggtaaccgtaaaactgctgccgctgctttacatacatcagcaatttttccgccaccgactgctataatcgcatccatattatttgttttcattatcgctaccagacgatcgcgttcctcatacgttgaaccgccattatatacttcaaaagtagatgtaacattagataataccgggaatttctttttagcgacttcccaagaagcatttccacgaactactaaaacatttttcaaaccgcggcgttctaagtgggtaggtaaagtatcccatgcgcctacttggcaaaaatactcttgtggagctccgcgtacaatcaattccttattcaacaaaaatcatcccttctgtctggcacggtcggatattcggctgcgacatttataattcaaattgtatcgaaacttaaacctactgtcaatctagctactgcttagcgatttcgtcatcaccaaaccattttttactaatttcctgcatttttccttctttgtataatttttcaaacgcttcattgatttttgattgcagttctttatcacttttacgcatacctacagcaaaatcggtcggatcaaagccaccagttataatagtatagtcatctttatttttttgtttatcaatataataacgcgcgtatacttcatcaataatcaagccgtcaatgcgtttattattcaaatcaataaatgctgtatcgaacgtatcatacaattctggttcgttgtttttgataatatctgtgagcacttctggttttttagccatgtcatcaatcgaacttgcgccgttttgagcccctagcgttttatctttcatatcactaaatttattaatattgcttgatttcaatgtcactaatacttgttcgtttttcatgtaaggtttgctaaatgcaacttgtttttttcttgcgtcagttaccgtatagccattccaaatcaaatctatcgaaccatttttcagctcagactctttcatcgtccagtcaattggcgtaaatttcgctttaataccatattcttcaaaaacagcttttgcaaggtcaatatcaaatccgactaaattatcatctttatcacgaaatcccattggtacaaaactatcatctaaaccaatgacgacttccttatcttttttaattctactccactggtcttccttagattcaccacttgaacatgcccctagcgctaacattacaattgccattaccgttattaataatccttttttcatattaaattgcctccttttttagtggttcgacttccatcatttgatctgcaacttttttggcaaaatcatgatcatgggtcacaataatctgcgtaataccaacatttttcaaactcaaaattaacgacgccacatgatctcgtaagtcaggatctaaagccgatgtcggttcatcaaatagtagtacttttgggttcatcgccagtgcccgagcaatagccacacgttgcttttgtcctccagataattggtaaggcatattgtccgctttatctgctaaatcaagtaagccaagtaacctttcagcttctttaatagcttcttcttttttagttttcctagcaagcgtcggtgccaaaatcaaattatctaacacacttaaatgcggaaacaagtgaaattcttgaaaaactacgccaatcgtattttccacatcttttctcgacatcggatcaattttttcaccgtcaataaaaatttctccggcatccattttttcaagaccactaatacaacgaagcaaagtggttttcccgccaccggatggcccgacgatagaaagaatttccccgtcttgaagcgcaatattcacattatctaaaatcgttttttgatcaaattttttcgataaatttttaatttccaacattttcttcacctcatttataataactaaaacgtttttctaattgtttaaatagtagcgttaggatagccgttaacgctaagtatattgcagccactaatacgagtggaattaaagtaacgtctctactcatagcaatttttcctgctcttagtaaatcaccaatgccaaggatgtaaactaacgaagagtcttttactaaattgataacttcatttccgatcgccggcaaaacacgtttgacaacttgcggtaaaacaatttttcgaagcgtttgaccgtaagttagaccaagaactttagcactttcatattgtccgttttcgattgatagaaagccaccccggaaaatctctgcgaaataagcagcataatttaaaataaaagcaataaacaccgcgtccatccggtcaaacacaactccgataatcggcaaaccataatagataaaaattaattgtaaaagtaatggtgtacctcgcattatccagatataaatgtttaaaataaatttcagaggggctattttactaatgtttcctactgccactatagctcctagcgggatagaacaaactagcgtgacgacaaaaacgagtaaggttgttttcgccccgtcaagtaatgctggtaaaatttccatgatataatccatattgtttcgctccttttttacataaaaaaatctcgtcgcacttggcacaaaattgccaagaggacgagaatactattcacgtggttccacctcaatttactgatacttcacagcaccagcctcagttagttcgagactaacaagctataacgggcttttcccgagttcacctactcacttatgcttcagtaaaccagctccgagatgtgttcgataacgctatctttatcctttcacaccaaccaaggactctcttaaaaagaatgacgctctacttgttctgttcatcgcttttacttcttcttgctaatactctaccacgataaagcgatagagtcaaccatttttaattaaacaaaaaaagacaagcaaacagttagtagtttgcttgtctttttgttaatctttcgctattagtaagtaatcgtctttttgttcaaagtaaatgcgtacttctgtccctatttcacttttagactcgatacaaatttcatgacctaatttcttcgccatttgcttagcgagatatagccccattccagttgctttcttttcttggcgaccgattgtgccggtaaagccttgttcaaagacgcgaggtaaatcttcttctttaatacctcgaccgttgtctttaatgtgaagcactttttttccggttacttctgtatcgcaccaaatttgaatatcgccaccatcagcagtatattttaatgcgttagataacacttgatcgataataaagcccagccatttactatcagttcgcacatcaatatctacattttgtaaatcaagtttcatttttttaccaatgaaaagcttggagtgacgcttaaccgattcgcgcataacagcaccaagattttgttcttggatgaaatagtctttagaaaacgtatcaagccttgaaaaatagagtgcttgcattactaatttatcaattgtttctaattcttcatcaatctgtttaaaaattgttttggtatcatttaaatctgggttattaattaacattttgcttgctacaacaggagttttcacttcatgtacccagtataaaatgaaatcatgatattcttgttgtttatcttgaagtttactaatggttcgtaattcttctttatgtttttttgccattagctgattaaaaaaagcttgctcgcgtgttcgcggttttggtaataattcaatgatattttcttcaatttcgccacttactaggtcttccatttcacgccaataattgtatttaaagaagtagcctaacactaagtaagaaagcaggaagacaaaaacaaagacatataagtaaatgaaattcccgagagttaatttactgttaggatcaattgaaattaataccccgacgaaaaacataatactgcaaaagaataataagaaaaatcgtttatcttttatatagctccaccagttcatatcgcacctccctcattcgagttaatttacttcatttggaataatttggaatgtcgcaaaatcaaacaatccttgatctgttaattttaattcaggaattactggtaaagtcagaaaagacaatgtcaaaaatggatcaaatcctttagctttactaatttgattaaatgcttttaaaagtcctgccaaatcattttctacttcttcatatggtttatcactaagaagtcccgctacttggagcgctaaatcatgtaatacattacctgctgcgtccactacagcaatgcctccacctgtttttgtcacatgatcgattgctttttccatggcctcatcgctcacaccaactgcgacaatattatgggaatcatgcgcgacggtcgtagcaatcgcaccttctgttaagccgaaacctttaacaatcccaacaccgacgcaaccagtattatgatgccgttccacaacagccatttttagcaaatctttttcgattgacggaacaaatttaccatttttaatcgtgacttgttccattagtttttctgtaaaaaggttattttgttgcattccaatgacatagcaagtttcatttgttaatggaagttctaaatctttgatgcttaaatgatgattaatttttggagaaatgaacttcgctttgttttcctttttaaaggctgcttctttacgagttccgttttcaacgacaacttgtccattttttaaaactttgctaatttcaattgtttttaagtcttttagaaaaacaatatccgcttgatagcctgctgcaactgcacctagataaggcaagttatggcaattagccgcattaattgtcgccatttggatggctgtgattggctcaacaccgttttcaattgcgagtcggatattataattaatcgagccttctgtaagtaaatcattaattagtttatcatccgtacaaaaacaaaaacgatggctatttttctccgttactgctgaaatagtttgctttaaatcacgaccgactgtaccttcgcgcaacataacaaacattcccgcacgtaagcgatcaagtgcttctttggcactcgtactctcatgatcagttcgaattccaacagcaagataattatttaaatccgcgctagttaaacctgccccgtggccatcaattctgccaccttcttgttttgcatcaataatttttgttaaaatatctgcgctcccttttgcaacagatgggaagtccattacttctgcgagaccgattactttttcgtgtttataaagtggatggagctgttttgcatgaagtgtttcgccgttatgttcaccttctgttgctggtacggatgatggtagcatgacaaacatatcaagcggagcgccttttgcatcttcaagcataaattcaatacctttttctccagcaacattggcgatttcatgtggatctgtaatgattgtagttacgccatttggaagtaacacccgggcaaactcagagggggttaccatcgcactttcaacatggacgtgcgcatcaataaagcccggtgagataaattctccagcggcatcaattatttgatctgcatctggaaaatgaccaatcccagcaatataaccgtttttaatcgcaatatcgccttccataatttcacctgaaaacacatttactattcgtccattttttataactaaatctgcttttgcacggccatcacttactgcgacccgttcttgcagttgctttaaattctccacctatttttcgcctccgttaattatgcttcaaaaaaaccttcatcaagtaaataaccttctgcagcttctaaagttgggaaaaccgcttctagattttctcctgtataaataacccacattttattttcatagactaaagaaagcttttcgccttcattatcttggtatatttttgtaaaaccttctttaaacccatcttcatctttgtccataaactctttcgcttcaagtaacaacacgcgaatttcattttgagagtagtcttttacattgacgtaaccttgcttatctagcggttctacttctaaaaacggcgcgtaaacaaacgcgttaccattaggatgaagatgtttgacgatgatttttttatcccttttactcgctggataatgtacgttcacgcgccccatagaaatttcatgcagttcaaaaccatcgattgattctattagcgcttttttctcttcaaaatttaacataatatatttttgcctccaaattaattttcttttaaaatatccgtcacaagcgccggcaaccagacttttatatcttcaaaagtaaagccagcttctgttgcttttgcattatccatgtaataagttttattgatgctaaacggcgaatcatccacatcatctgttacttcttcaacgagtgccacttcacctgttttcgcttcaagcattttgataaaagcatttaacgaatatgtaccgttagagctagcattaattggtccagtaaggtctgaatccacccctacccattctaaaaaatgagctgcttcatctgaagtaataaaacttatttccgcctgcgcattactaataccaatttcttcatggtttttaatatgctccaaatgaaaatgtagacgtttcgtataatcatcgagtccaaggacaatcggaaaacgaactgctaccactggaaaagaggctttttgaaaaaacacagcttcagcaaggcgttttccttccccgtaatcaaaatcatctttgtcaccaataacaatttcataatgttttggattaaaatcatcttccaccaacgcgcgacctttttgactataaacggacagagaagatgtatatatgtatcgttttactttgcctttaaatgcatctactgcataaagagcttctcgcggtgagaaacaaatattatcataaataacgtcccattcttcttttgctaattggaataaggcgtctctagattcgcggtctagtacaacatgttttacagaatcgccaaaatcatcttttgtttttcctctagtgccaattgtgacatcatgcccagcggaaacaagtcgttctactaatttctttccaaaaaaacgcgtaccaccaaatactaaaattttcattttgactcctccttaatttacgaaaaacaggaagttcgcgttttttggcgctatcttcctgttttcttacttcattcaatcatataaccttggccttttttcgtcttaataaattcatctaagccgatttctgctagttttttacgaattcgtacaacgttgactgtaagtgtattatcatcgacaaaactttcatcttcccaaagtgcacgcataatttcgtcacgacttacaatactacctttttgtttcattaattcatataaaatcaaaaattcgtttttcgttaattcaattttatcttctaaatgggtaagtgtattagtatcaatgtgtaaaaatacattattatgttccattacgttcgcttcttctaaatccgcatacgaatatgtccgtcttaaaagtgcattgatccgagccattaaaacatccaaatctactggcttttcaatataataatctgctcccatgttcattcccatgatttgatccattcgcgagttacgtgatgataagaaaataataggtacattcgaaacttcgcgaatttgattacaccagtagaacccatcaaaaaatggaagattcacatctaaaataaccaattggggctcaaatgataaaaactcttgcaaaatattattgaaatcatcaacaacccctatttcaaatccccatttacttaaatgttttctaatagtatcacgaattacctcatcatcttctacgatatataccttaaccatttcttgtacctcctcggcagaactctcttttcattttagctgaattaaacacaaaagccaattactttttatctgccataacgattttaataaaagaattaatacataaaaagtaataagcagcataacaaataatgtaaatacctgttccaattaaaacaggatatttgatattatccattaaattaatcgaaattccccataatgcagccattgaatgggcaattccaaaaaacaacggaatggcaaaaatcggccaaacttgtttggaaataatccttcgtacttctttttcggtaacacctaatttaaataatatatcaaacttagacttctcagaaacagcatctgttacaagtttaaaataaataatacttcctgttgctaagaaaaatacaataccgatgaaaatcccaataaataatagcgaacctactagcgtggaaatcaaatgataattcgtataataggacgaaacattttcagaaaaaagagaaggttccccgtccacgatagtctgtactttcttatctaattcttcactgtgattgggattcgtaatatcaaacattgccactctttctggcgggaatagcctttccaaatcatcataatattcatctgatacaacgagcgtctcataagaaatacccgtattgaaaatcgaattctctcgaaaatcaactactttcattggtggcatttttttcgctaaagactcattcgactggactaccatttttcttgatagccacttatcttgaatctcttgtcttgcataatacgtattttttccaagtaagatggcgtctccataagaaagctttttcggcttctcaaaatcactttgctgtttggcgccaatacggttatattcagattctgctacgaccgtatgaatcatgttatccatccgcgttttatatttaggaatatctttatattctagcgtagcactaaccatttccgcttgcatcaaactttttaatttgtgatcttggtcattttgtatcgtttgaataatttctcgttcatctttagccgaaatatcaagcacttggtaactagaaggattttctgctgaaatgtcattaatcgttcgaacataaaaactactcattgatccaataatcgttaatgtcgtcgcgcttaatactgcaatcatcgcaatcgttcctgcatttttctttaacctaaagcgaagggaagtcacaccaatcatgtttgttccgttataaaagaaacgtttattactatataacttccgaatcacatacggcgtgccaaaccttaccataagccatgtccctaaaataacagaacatataataactaagattacatcaaaaaaatcatatgttagccaaattggtgatacttcaatattacttgttgccaaataataaccaaaaataataagagcaagtccaattaatataagaaaaatagaacccttagccaatttctcttctttttgatcatttttaaacaattggcttaaattatatcttaatacaatataaacagcataaaaagaagtgaacagcatgatacaaaaaaagacaagcccagtatcaagaactgctttaaatgaaataataaattcagcatcaatcgcgagtccaacaatccaaaacaaaatcatcgcgaaaaactttgaagaaaatatgccaattaaaataccaaataaggtcgcaagcatgtataacaaagcattttcataaaataaaactaaaactatttgcgatttacgtaaaccaagtaatgaataaagtccgatttctcgttttcttcttttaagaaagaagctattagaataaaatatgaaaaagaaaataaataatatcaacattaaacttgccgatgaaaacattgctggaccaaataattcccatcgtttaaacaccttgtcaatgagtgggttataagaaagtgagacaaaagtaaaaaatactaatacacatacaataagcgaaacaaaatagacgatatattgattaaaattctttcgcatattggtcagcgcgattttaaataacattattttcgccacctccaagaagtgccaacacatctaacaccttttggaaaaattgttttcttgaacttgttcctcggtatatttctgtaaaaatttcgccgtctttaatgaacataatccgttcgcagtaactcgccgcaaaagcatcatgagttaccatcaaaatggtagaattccgaacacttttagcttgagagagaccttctaacaagttagttgccgctttagaatcaagagctccagttggttcatcagcaaagattaatgttggttcggtaatcattgcgcgacaaaccgccgttctttgtttttgcccacctgaaatatctgtcgggtatttattccgtaaatcataaatgccaaactgacgtgcaataatttcaaaacgttcatcaatttctgtttgctttactcgagctaaggccagaggtagcacaatattatctttaactgtcattgtatctaataaattataatcttgaaaaataaatcctagttgatctctacgaaacaccgctaaatctttccctttcattttagacagttgtttcccgccaatttctatttccccagaagttggcttatctatagaagataaaacattaagtaatgtagatttccctgcacctgatggacccataatacctacaaatgagcctctttgtatttctaaactaatacttcctaacgcagaaaacaaatttccttttgaaccatatacttttctgactttaagcgcctttagcactgtatccattgttttcctcccgttacacgattatttgcttattttaccctataatgaagcaagataccatggtctatagatgtatttatcaaaaaatcatctccctattttaagaaaacagaaaaatgattcttgttattatttcttttcaatgaatatttcttccccaactgtattatcatctgtatacgtttcttgcatggactggataattgctcttaattcttctaaactaacagacacatctgctgcaacaatatcccaagcaacttcttcccgtccgttaatcgatgtcatgatctttaatcttccctgcgaaaaaagaattactgctggcttaattagttctgtccctttaatttcattccacggcttaaaatcgccacgataagcaagcccacgttctgttaactctacagtgggtgcgatattgattaaacgcagtaatggccgtaaaacacaaagaccaataaacacaagtaaaatcacttcttctgtacctgtaacgccttttatatgactaaaaattacatataacaataatccggcagcaatccaaagtaaacaacttgaaaaaataaggcgccggtttacgccaaattcgattttttctgttttattcgcttgatttagctcattttctatcattttcttcctccagtttacttctctcttatttctattgtactagaaatatactacaatggaaagaaagcattctatcgtttaaaaactgctatcaaaatggattatttacagttgacgttttttacatttgtgatataatttctttaatgcttttaagtagtaaaatgtaagaaataataaaggaggagaacatcatcgatcaagttatcttaattggcttcatgggagctggaaaaacaacagtcggcaatatactcgcgaaattagctgatttgccttatattgatattgacgaagtaattattcgcgaacaaggaatgagtgtatctgaaatttttgcaaagtatggtgaacaagaattccgccgactagaacacgaaaaattaaaagaactagctaataccaaagccgttattgcaacaggcggtggcattgttctaaatcctgaaaatagaaaagtcttaaaaaatacatatccagttatttatttagaaaccgatccggaagtatttatgaaccgcttaaaaggtgatacaacacgcccgctagttcaacaaaagacacctgaagaaatccgagcaattttcgaaccgagaattgcccattatcaagattccgcagacttcattgtcaatacggacaaccgtaatcaacacgaagtcgctaaagccattttaaccatgctagataagtaaaaaagagcgctaataatattagcgctctttttttattccgtgcagtgtcgacaccacatatcgggtaaaacagaagtataatcttttgtaaatgttaataagtcataaaacatactatctgcgtaacctgcatcgatattttcgattttatttaattctatttcgcgatgaagtgcttcgagtgcggcatcacgaagagcgggcaatacatagccagttatcttaatttgcgctaacgcagccgatacagttatccggtccgactctctaagagcgccaccatattccgctaaaagttgttgtaaacggtctaccccgtcgtctttggctggtatataagtggaatgtttgactgtttccatcatgtatttcggaaaagccgctaaattaagtccttggtcacttttatcactaaaatattcttctaaacgatgaagtacctccattccatcggcatatccaaaaggactataagaatcgtttttgtctaaatagtaacttgctttaaaatgttctttaaaatggggatgggttgtctctaagtcaagagcagcatctgggcggtcaatatacattgtaatagccattttataagttcctccattcatgtgaaatctgttacatacatcttaccaaattcgcacggttatggaaagcaaaaaaatattatgacaatttagcgacaatttcatgtgccctcagcccttaattcgtgttttatttaactttttagtactaaaacagtaaaatttatcgattctaatatttgaaaagttaaaaataacacctttgaccatatttttatttcgtggttaaataataattggacttgattttcgtaaatcacgtctgttaatttgacttagtcaaccacacacactcgaaaagcaaaaaccgccatttatcccattttggcggtttttgtatgtttattttaaggttaaaacggtcacagcttcaatatgtgtcgtcatcggaaacatatctactggttgcactttcttcgcttcataaccgccttctgttaatatcttcatatctcgagcaagcgtccctggattacaagaaacatatactactttctttggtttcattgcaagaattgtttcaagtagtgtttcatcacaaccttttctcggtgggtctactactaaaacatccgctacaatcccgttcttataccactgtggaataacttcttcggctttacctgtttcaaaggttgtattcgttagattgtttaattcagcattcgcacgggcatcttgaatagcttggtcaacaatttcaacaccgtaaacatgtttggcttttttcgcaagacaaagtgagatcgagccaatcccgcaatatgcatcaatcacggtttcttctcccgttaactcggcggaatcaatagcttgttgatataaaacctctgtttgcaaaggatttacttgataaaaagaacgtgccgaaattgcaaatctaataccatgaatcgtatcttcaataatatcacttccccaaagtgttttcgtacgatcaccgaaaatcacatttgttttttgtgggttaatattttgaacgatggacgttacttctaattgattcgttaagtcttgaataatttccgctttaaaaggaaggcgctctttcgttgttacaaggacaatcattaattgacctgtagtgtgcgcaaacctagtcataatatggcgaatatcacctttacctgttttttcatcgtaaggttctgtcccatattttgccaagatttctcttgttttttgaacggcaacatcccctttttcattgtgaatcaggcatgtcgacatatcaataatatcatgacttcttttttgataaaaaccggctgttaattttccgttcacaaagccaactggaacttgtgatttattacgatagcgccacgggttttccataccaagcgtgtctggtacttctacatttaacttaccaatgcgtttcattgtttcttctacttggtttcgtttaaaagctagttgtccatcgtagctcaaatgttgtaaactacagccaccacattttgaataaacggcacaaggtggttcaacacgttcagcactaacaacttcaatattttccatccgcgcaaagccgtaatttttatttaatttagtaatttttgcagttatcttttctcctggtaatgcatttggaatgaaaagcggatagccatcaatcttacctacaccactgccgtcatgtgttaaatcttcaatagttagttctacggattggttcttttttaaaagggatgcttccaaagtcccttgcccctctctttgctttacttaataatgtattcgatgccgattggttctgtgatagttgcttctttttggtctttaaatataagcatcgtatttttttgtaaagtaaaatcataaacaaatgattttggataaatcgttacgtttttttgagtacttaaattttttgtattgtcatttatagttatttcatcgggaattttattgctaaaaatagccgcagcaacttctgcatccttacttgaataagtcgtttcaagtgttaatttaatatcgctttttttagttgattctgcttttatagctttttgacctgtttcgattgttcgttcgccgcttttaatttcgtaattagcaagctttttttggacggtcgttgttggataacgatattttgtattagtaatatattccgaaacttttttcgcttcaatgcgaagacgatatgccttcattccgtcataacgactattagaagctgctaatttatttaaaatttctggattagttgttgctatgattaaatcgccgtttttagcgattgttgcttcagtacttggagatgggatagatagaaatacattatcctctaagggaatttgcatttggtcgtttatccacactttattactttcaattaattctgatttactgactgtcggcgcttgttcttcggcatcaacctgccaaaagaaaaatatagccgctgcgatagcaatgataaggataacaattaccataatgaatttttttaatacatatccactcgtcatatcgcattcacctcatttcttgtcaagatacctattatacttgttttgcgcaaataagacaaatatctaacaataattacatcctttttactatgttgcagttaggacatttaggctaaagaaaaaaactaccaagctgggcagtttttagctattttcttttataaataaatcggttgctggaatatcatctacactcgcaaaaaattcgatatgctgttttaaattgcggaattccatcggggtttcgccaccaagttctccgtcaaggttaataagcatcttgtcttcagagtgtacacttactttttctgattttacataaataacgtttggttctttaatatgatctcctctaagcgccaaagtaactaagcgaataaattctgctaaattcacttttttgacgatgatgagcgaaaacttaccatcatctaacttggcatcaggagcaattttttcaaagcctccaatagaattggttaaacctaaaagaaaaaacattacttccccttcaaagacaccttgatcatattctacttttactttggtagcttttaaggaagggagcatttcaattccttttaagtaataagctaattgtccaagcattgtttttaatctgcttgggacatcatacgtgagctctgttagcctacccccaccaccaatattaataaaataagtatcatttgctttacctatatccattgctacactttgaccagctgctataatcttcgttgcttttatcacgtctctaggaacatgtaaggctcttgcaaaatcattggttgtcccggttggaataatccctacttttggtcgataaggttgttctgcaatcccattaataacttcattaatggtaccatctccgcctgctgcaacgactaaatcatatcgatctcttacagcttcttctgctgcgtgcttggcgtcacctggctctgcagttgtggcatgtgcagatgttacataacctgcttgctctagtatcgaaaggacatctgcgagatttttcttgataatctctcttccagatgtgggattataaataactcgagcgtgtttttgcattatgttcgtcctctccttcactcaaacagcgttgttcaaaagaaaagcgcgttttgacacatgatagtaacattatagcaaatttcgctataaattcctaataaataaagcagtgaagcgaaatgcctcactgcctaaaaattaacgtttattcatttcttctagtaaaattttattaaccattggtgggtttgcttggccttttgttgctttcataacttggcctacaaggaaaccaactgcacgatctttcccatttttgtaatcgataatagattgttcgttgttatctaaaatttctccaatgatagtacgtaaagctccttcatcggaaatttgaacaagtcctttatcttttacaacttgctctgcatcgccaccgttttgtgctaattcacggaaaacttttttggcgattttagaggaaatagttccagcttcgattaatttaatcattcctgctagattttctggtgttaatcctgtgtcgtgaagttctttttgttctgcatttaagtaagcagaaacttcacccatcagccagttagatgcttgtttagcgtctgctccagctgcaagagttgcttcaaagaaatcagacatttcttttgtaagcgtaagaaccatcgcatcgtatgctggtaaaccaagatcattgatataacggatttgacgtttgtctggaagttctggaatttcagcgcgaatgcgttctttccaagcatcatcaataaatagatctactaagtctggctctgggaaataacgataatcatccgaaccttctttgatacgcatcaaggaagttttacccgttgcttcttcaaaacgacgagtttcttgttcgataatgccgccggacttaagcacttctgcttggcgtttttcttcatattcgatacctttacgcacgttgttaaaggagtttaggtttttaagttctgtttttacgccaaattcttcttgcccgattggacggatagaaatgttggcgtcacagcgcatcgaaccttcttccattttcacatcggatacgccagtgtattgaatgatagattttaatttttctaagtaagcgtatgcctcttcagcagaacggatatctggttcagaaacgatttcgataagtggtgttccttgacggttaatatccactaaagaataaccatgcgatgtatgcgtgtttttccctgcatcttcttctaaatgaagacgagtgataccgatttttttctttttgcccccaacttcgatttcaatccagccatgttcgccaattggtttatcgaattgagaaatttggtatgctttcggattatcaggataaaaatagtttttacggtcaaattttgtatgctcagcaatttcgcagttaatcgccattgcagctttcataccatattcgacagcacgtttatttaaaactggtaaaacacctggcattcctagatctactacggttgtatttgtatttggttctgctccaaaatgagctggcgcagaagaaaatatttttgaattggtttttaactctacgtgaacctcaagtccaataactgtttcaaaattcattgctacgcctcctataagtttggtttttctttatggaatgttgtttcttgttcaaatgcgtgcgctactttgtatagtaaagattcttcaaagtaattaccgataatttgtaatcctaccggtaatccttctgaaaatccacaaggaacagaaatagctggtacgcctgctaagttaattggaacagtcaaaatatcattggaatacattgtaattggatcattaatcattccatcaattttaaatgctgttgtcggggaactaggtccgataataacatcatagtttttaaacacgtcaacaaaatcttgtttaattaacgtacgtgcttgttgtgcttttttgtagtaagcatcgtaataaccagaacttaatgcgtatgttccaagcataatacgacgttttacttcatcaccaaagccttcagaacgtgtttttgtataaagttcttctaaagtagtcgcgtttggagaacggtatccgtaacgaacgccgtcaaaacgagaaaggttagaagaagcttcactggatgctaaaatgtaataacttgctacaccgtattcagaatgaggtaaagaaacttcatcccaagtagcgccaagtttttcgagtgttttaagtgcatctaacacagcttgtttgacaccaggatccacgccttcaccaaggtattcttttggaacaccgatgcgtaagcctttaatatcacctgttaagctatctgagaaacgttctactggttggttaatcgatgtagaatcatttgcatctaaaccagaaatcgcttctaataaataagcgttatcttctacattttttgtaattgggccgatttggtctaaagaagacgcaaaggcaattaaaccaaaacgagatacacgaccatatgtaggtttcattccgactaccccacaaaaagctgctggttggcgaatcgatccaccagtgtcactaccaagcgagaataatacttcgcctgctgcaactgcggatgcgctaccacctgaagagccaccaggaactcttgataaatcccatggattatgtgttttatggaagtaagatgtttctgtagaagaacccatcgcgaattcatccatgtttaattttccgatattaatcgtttgcgcgttttttaatttagaaacaaccgtcgcatcataaattggatcgaagttttctaaaattttacttgctgctgttgtacgtaagtttttagttacgatattatctttaataccgataggaagaccagccagcatattgttcggatcaattcctgcatcaccaagctcttctgctacaccaagtgctgtttctttgtttaaagtaataaatgaaccgactttatcctctactgcttctatacggttaaatgattctgttactaaatcaaaaggtgtgatttctttttttactaatttatcatgtaattcttttactgaaaaatcaaataagcccaaaatattttccctccttagcgtgtttattgttccattattgttggtactttgaacatgccgtcttgttgatccggcgcatttttcagtacttctttacgatcaaggcctttcgttgctacgtcttcacgtaacacattcgatacatcgattgcatggcttgttggctctacattgtttgtatctagtgtatttaattgctccactagctcaataattttaccaagctgaccagcaaaagcagttgcttctgtttctgatacttctagtttggcaagatttgctactttttctactgtttctttggatatatttgacaaaatgccatcctcctttttagtggtactttctatgcggtagtgcttcccgccttgctaaatgggaagaactgtcctctcctgcataattatacaacaggaaagaacaattcgcattgttttttattaatcataaatgtgagcagtagctgcgtcttcatttgcttttctagtaattaaagcagctggaccgtctgatgtagaaatattgacttgtaaatcagctgttttaggaatatgttgtcctactaaatctgttacatattgtgtaaagccaataatttccgcttgcccataaaattgcaatggaatatcaatactaagttctgctaattgcccgtcttcatatctagcgcgaccaactacacctgtaaagttcgggtagtaatcttcaatagcttttttgaagttaaggaaattatcattgtcagttttgtgatcttttgcagattcagtggaaggtaaaacgtaatttttttcttctacgtctttccaactggataagctgtcaccgtttgctgttgcataagtaagaaaattacctggagctacagcatcacgtggcccttgtttataaatagcaatcgtaactggaacattttctaacccttttgtttggcgaattcggttcaatacagtaccagacatttctttaccttgtgctagtaaatcgctgtcactgatttcttgttcaaaagtgtcgccgtattgttctttttgatagtaatcaactgaattcattgccagtgcaattgaaatcccaccaagcgctacagtatctttatctgtttgttttaaataatcttgttctaaaatgtgagctaaataaattggcttacgatcttttccgtcgccattactttctggatttaaaccattaggatttttttcacttttccggtctaaccatttttctagtgtttccttgtccaaatactgcccctcttggaaaagataattgtctggcgaatatttattttgggaaactcgcattaaaccagattctaactcgttaatatcgtatcttgagtaaatattcgatactacaagtccacgagatttacttgctttgtacggtaataccgttttgtaataattggatgaaatttgattttttgtcatgatgcccgtttctgcttttttatcatctttttgtaccactttatcgtttgagtcgagttttggggcacagccagagagaataagcgttaaaccgagcgctgcaattatgagttttttcattcgtttaatccaccttcgtctggtaagtactctattaagtcttcttcggaccaaataggaattgctagttcttcagctttggctagtttagaaccagcatcactgccagctacaacaacatccgttttcttactgacgcttccagaaacatttcccccgagtgattcgattaatgcttttgcatcgtttcgtgttaatttttccagttttccagttaaaacaactgttttccctgcaaaaacaagctcctcttcggacatgttttctagttttggccctgtataggtcatattgacgccagccctttttagttcttccagtaaatcatgtacttcttcattcgcaaaataagtcacgatgctatctgccattttttccccaatgtcattaatacttgtcagtgtttctttgtctgctattttcaaattatccattgtttcaaaatgaactgcaagcgatttggctgctttagcaccaacatggcggattcccaagccaaaaagtaatttttcaagcgaattttgtttacttgcttcgatggatgccagtaaattggttactgatttctcacccattctttctaattctaacagtttctctttcgaaaggaaaaacaaatctgcaacatctttaattaaatgcattgaaaatagctgaataataactttttctccaaggccatcgatattcatcgcatttcttgaaacaaaatggataagcccctctttaatttgagctggacacttaggattaatacatcttagtgctacttcttcttccaagcggacaagttcactatcacatgttggacagttttttggcatatggaaaggtttttcactaccagtacgttcttcggtaatgctcttaatcacttcaggaataatatcgcctgcttttttaattaaaacggtatcgccaatgcgaatatctttttctgtaattaagtcttcgttatgaagtgacgcacggctaactgtagttcctgcaactcttactggttctaacaccgctgtgggagttattacgccagttctgccaacgtttaattcaatatcaagcagtttagtgggtacttcttctgcaggaaatttataagcaattgaccatcgtggtgatttaactgttgtccccatttggcgttgttgttctaaattatttaattttaaaacgataccatcaatatcgtaagctaaaccagctcgtttttccgtccactcgtcaatgtaagcatatacttcctctaaattactgcaaagtctacgctctttattgactttaaggcctagtgtttcaagcatatctaagcccgcgctatgtgtttcaacacccatttcaccaaaatcagctactgcataaaggaaaatatcaaggtttctagatgcagcaatttttgtatctaattgacgaagtgagccagccgctgcatttcgcggatttgcaaataacatctggccttcttcttcgcgtatttcatttaatttttggaaggaacgttttggcataaaagcttcaccgcggacttcaatggaataagcttttttcagtttcattgggatagaacgaatcgtgcgtaaattagcagtgatgtcttcaccaactgttccatcacctcgcgtagcaccttgtttatacttaccattttcgtattgaagtgatacggctagtccgtcaattttcagttcgcacatataactaatgtcatcaccgactttatcgcggatacggcggtcaaaatcagccaaatcatcgcgattaaacgcattggccaagcttaacattggtgtgtcatgttctacttttttaaaaccttctaaaacttctccgcctactcgtttcgacggtgattcaggtgtaacccattctggatgcgcttcttctattttaagtagttcttgcatcttttgatcgtattcggcatcttctactgttggattatcaattacataataatcatagctgtattgatcaagtatgtttattagttcttcataccgttttttatcagccatttcttcacctgctttttccaaatttatactttttcaattggcgcaaattctgcgagcaatcgtttgactccagttgggcttgggaatgcaatatcaagttccattccgctaccttctcctttgacacttacgactgttcctacgccccatttcttatgactagctttatcgccgactgtccaaccgagtgtttccgctccagaagatttataggcagtagttgctttttgcggcatgcgcggtttggcatacggtttatcagctgttaatttattttcgttgcctaattctagtaagtcacgaggaatttccccaataaagcgagattcttggttggatgatggacgaccataaagcatccgggaatacgcgctcgttaggaaaagttcttcttctgcacgagtgataccaacgtaagcaaggcggcgttcttcttccatttcttcttcttcataaatggctctagaatgtgggaaaattccttcttccatcccaactaaaaagacaactgggaattctagccctttggcagagtgaagcgtcatcagcgtcaccgcaccgttttgttcttcattatcttcttctaacttatcgacgtcagcaaccagtgctaaatccgttaaaaatgcgagtaatgttttatcgtcattttctttttcaaagttttgtgtaacagataaaaactcatcgatattttctaagcgagtttgagcttcaatagttcgttcgtttttcagcattgctcggtaacctgttttttcgagaatttcttctacaagttcagttacagataggaaatcttgcatttgggtgaatccgcgaaccaaatcatggaaagcaactaaatctttgcttattttagcagaaatcccggctaattcaatgcgattaagtacttcaaacaaacttaaatcgtaagctgcggcaacattgtttagtttttctaatgtgcctggtccaactccgcgttttggtacgttgatgatacgtgtcagactaatatcatcttcattattactaataagtcgtaaataagccaaaatgtctttaatttcttttctatcatagaatttcgtaccgccgaccattgtgtaagccatatttgacttcatgaaatattcttccattacacgggactgggcattggttctataaagaatcgcaaaatcagaaagaggacgactcgaattatttacttcttcttgaattttcataacgacgtaagccgcttcttctttctcagttaacgccttatggtaaaaaatcttcttcccttccgcattactagtccaaagattttttggtttacgattgccgttattttcgattacacggttcgccgcttctaaaatacgtttggtcgaacggtaattctcttctagtaaaatggttttggcacttgggtaatctttttcgaaagacataatattactaatatctgccccgcgccagccgtagattgattggtcagagtcaccaacgacacataaattcttaaatctagaggcaagtagttttacaagtaagtactgcgcgtggttggtatcttggtactcatccacgtgaatgtattgaaacttgcgctgataatattctaaaacatctggaacacgttcaaataattgaatcgtcaccataattaaatcatcaaaatcgagcgcttgatttttcttcagtttcttttcatatttttcatagacttcgccgaccattttatcgtagaaaccacttgcttcttttatatattcgcttgcagttataagttcgttttttgcattgctaatagaagccaaaatacctcgtggctcaaacttcttagggtcgacatttttttcttttaaaatgcctttaataaccgataattggtcacttccgtctaaaatagtaaaattgcgttcgtagccaatccggtctatatcacgacgtaaaattcttacgcacatggagtgaaaagtggaaatccaaattgattccgcttctccgcccattaaattaccaatccgtgatttcatttcacgcgctgctttattggtaaacgtaatcgctaaaatattataaggattcacgccacgttctcttactaaataagcgatgcgatgggttaaaacacgtgttttaccactccctgcaccagccataattaataaaggtccttctgtactttctactgcttttcgttgttctgggtttaatccgtcaactaattcttttgcattcaattgcattctcctatacaccaccatacaaacatttgttcttattttatcatactacactttataatcaaaccgttttcttcctaaaaatagttgcggtttctagtgctttttctaaatcctcataaataatattgcccacaataatcgtatccgcgtacttcgccatttcagcagcttgttctttggaacggattccgccaccataccaaaactcggtgtcgcttaaaacttcacttacttttcttactgcttccggatcgccgtacatcccgctatattcgacataaaaaatcggcagacgaaatatattctctgctaatcgcgcataagcaataatatcttcatccgttaagtctgttttcgcttctgttaactgggcaacttttgcgtctttatttaaaataacataaccttctgatgtgattcgcttccaaggaataaaatcccctagttccttgattaactctttgtgtaaaccatgcgtccatttactattttctgtatttaatacgactggaattaaaaaatgttctgcttccggtaaaatcatggattcatcgcttacttcaaggaaaatcggcaaatctgtttcagctaataattcatacagattttcgactgcttctatttctaaattatctgtcccaccaatgataaatccatcggttccagaatgaatgagctttgtgacactattacgaggtaaattctttgctgggtctaacttgaataaatgcttcatatgctcctccaattctctataatgggatatcttattatagcattagttacatttcatcgcacccttacaataggaaattttaactttttttaagctttttttacgacttcttgttgggatagcttttattttatggtatgatgaggaaaatttgattttattatgacttctagagtattgacatagaaaaaaggaaatggggatattatgcaagaaaacagagaagaatggggctcaaaagtcggatttattttagcatccgctgggtccgcaataggaattggcgcgatttggaaactgccttatgtggctgcaactgcaggaggtggcgcatttttcttattgtttttagttttaaccttacttgtagtcatgccacttttgattgctgagtttgttattggacgaggttctggtggggatgcggttcaagcttataaaacgctcgcacctggaacgaaatggaacttaattggaaaattaggcgtagttggcgcaagtattttattttcattttatagtgtcgttggcggttggattattacttatttaattaaaacgctcactggtggaattgccggtgaaaaccaagcgactttactccatgattttcaagtgacgacagccaacccatggatttcggttggtgcgacaattttctttattttactcaatgtgatcgttattagccgcggagttgtcagcggaattgaaaaaatgagcaagtttatgatgcccgcgctttttattttatttatagtgttaattatcaggtccttgacattaccaggcgcaatggaaggtgtcgcatttttcttacgaccagattttagtcattttactgctcaaacggttcttattacacttggtcaggcgttcttttcactcagtgtggggatttcggtgatggttacgtatagttcttatttgaaccgttcgactagtttacctcagtcggcgatttcggtttcgcttatgaatgtgtttgtttcgttacttgctgggttagctatttttccagcgacattttcgtttaacattacgccagatgcaggtccggggttattgtttgttattttaccctcgatatttaatcaaatgccgtttgggatgttgttctttattattttcttgattttattcttattcgccgcattaacgtctagtttctcgatgcttgaagcaactgttgctccgctgatgaatgctggcgttaatcgtaaaaaagcgagcctttggatggggcttgtgattgtgttaatggcaattccaagtgcgcttagtttcggtgtttggagcgatgttcagatttttggactaagtatttttgatgctgccgattatcttgtgtcgaatatcatcttaccagttggtgcattatttatcgcgatttttgttggttaccgattacctcgtgaattacttttaaaagaatttaccacgagcagccattttggcaaaaaggtttttattatttggctctttctcattaaatatattgcaccaattgcgattatttttgtctttctctccgcaactggtttaatcgattttctgttttaacaaaaaagcaatccgctaagtttttagcgagattgcttttattatattgccatcagtacgatacttgtcacacaaatcaggattccacttaggccaatcgccgttccaattgctcgtttttctctaacattagcaagcgtcgtgaagataaaacaaataataaagacccagtgccacagtaaagaaaaatcaagcccagttccagtggaaatcatattaatcacaaaataaataactgcaagagcaagaatagagatgattacaatctgataggttttactattaaactttttcaatattaatccctaccaatcttattctggctttgtcattcttgaaaatacgacatcgtacatatcattgccataatgaagtgaacgttttacacgtgaaattgttgctgtacttgcacctgtttcagattcaatcacattatacgtttttccatcatgaagcatttttgctacttggaaacgttgagccatggattgtatttcgttcacagtacaaacatcatcaaaaaaagcataacattcttctaaattctcgagcgttaaaatcccttggaagaattcatccaatccttgtccacgcaacttctctatttgcatatctttacctccaaataatctcatatatcctactttcatattttaacgtaccaacgcgtaaaacacaaacgtttctctttacgaaataaacaaaaaaagtactatccaagcaatttgcttaaagatagtactttttattattctgcctttgttccaatatccattcgataaaagaaatttggattatctaatttttgcatttctggatacagtaaagtccgtgcatcactcatggtttcagcttcttttgctagtaataaaacgcggccgccacttgagacaaattccccgttttcattttgttttgttcccgcatgataaatggcgacatcctctctaatatcatttaagccagtgagtttatttcctttttcataatgttctgggtaaccggcacttgctaaaacgacaccgagcgtaattccttcttttttaaagcgaacttctggtttttcgttgttgagtaaagctgctataagtgctgcaaaatcactttctaaacgaggcaatacgacttgtgtttccggatcaccaaatcgcgcgttaaattcaattacttttggcccttctgtcgttaaaataagacctgcataaagaattccgcggaagtagcgatcttcttgcaccattccttttgcagcggggcgaaggattttttcaacagcttcattcactacatcttctgaaatatgtggtactggtgaataagcacccatgccaccagtattaggtcctttatcgccttcataagcacgtttatgatcttgtgcaatcgccattggatacacttcttccccgtttacaaaagccatcaaggaaaactcttcgccagctaaaaagtcctctataacaactttgagagatgcgtcaccgaatttttcttctagcatcatatcttttaacgcaaggacagcttcttccatctctaaagctactgtgacaccttttccagcggctaatccgtctgctttaataacgatcggtacaccgcgttcatccaaatatgctttagcttccgcataatcagtgaaagttcttgaggcagcagtaggaatggcatatttctccataaattgcttggcgaagtctttactaccttcaattaaagccgcatttgcttttggtccgaaagctttgattcccgcttcttcaaatgcatctaccaccccttctaaaagaggtacttcaggtccaacgatgacaaaggaaacgtctgctttcttggcaaaatcaatcaaaccaactttatctgtttcggaaatagcaactaattgaatatcgtctaaacgcattccgtcatttccgggagcgcaatatactttttcaacattgtttgattctagtaattttttactaatagcatgttctcgaccgccgctaccaactactaataaattcatttaatgacacgtcctttttatgaggattaatgtttgaaatggcgtacatgagtcagaaccatggaaattccatatttatcagccattgcaattgattctttatctttgatcgatccaccaggttgaataatcgccgtaatacctgcttttgccgcagcctcaactgtatcatccatcgggaaaaaggcatcggaggcaagtacagcgccttttgctttttcaccagcttgttctagcgcaatcaatgctgagccgattcgattcatttgaccagcgccaattccaagcgtttgtttatctgagccaacaacaatcgcgtttgatttgacatgtttgacaattttccactgagcaagtaaagctttcatttctgagttggttggttgtttttctgtcactacttcataacttgttgtatcttctacaagagcgtcattcgcttggataagaagtccaccgttaacagaagttttctcaaaaccttccacgttacccgcaaatggaacagttaacaaacgaatatttttctttttcgctaaaatcgcaaaacctgcttcggaaaaacttggtgcaatgataatttctaagaaaattttactcatatgttctgccgttttcgcatcaacttctttatttaaagcaacaattccaccaaaaatagatatttcatctgcttcgtaggcttttaaataagcttcttcaatcgtttcaccaacgccaactccgcatggattcatgtgttttactgcaactgccactggttctttgaattcactagcaattttaagtgccgcatctgcatcgcgaatgttgttataagataactctttaccgtgcaactgtttcgcagcactaatcgagttttcaatcgcgcgtggttctgtataaaaagctgcatcttggtgaggattttcaccgtaacgcaaaacttgttttcgattataagttaatgttactttttctgggaaagtttcaccggtaacatccgttaagtactctgcaattaaagcatcataagctgctgtgtgtcgaaatactttagcagcaaggcgttggcgcgtttcaaaagtagttgcgccgtgttcttgtagttctgtaagtactgtatcgtagtccgctgtatcaaccacaacagttaccgccgcataatttttcgcagcagaacgtaacatcgaaggtccgccaatatcaatgttttcaatcgcttcttctaaagtaacaccaggtttttgaatcgtttcttggaaaggatacaaattaacaatgactaaatcaattggcttaatatcatgtgcagcaattgcttccatatgttccgccgtatcacgtcttgcaagcaaaccaccatgaatagctggatgaagcgtttttactcggccatcaagcatttctggaaattcggtaactgcttcaattcccgtaaccggtacgccagcttgttcaaatgctgcttttgtcccaccagttgaaataatttctacaccaagttctactaatttttctgcaaatggcacgatgccgtttttatctgatacacttataagcgctcttttcatgataattaatcgttccctccattttgaattaatcctcgaatcacttttggataaaaaatatgttctacttgatgaattttttcagctaaactatctgctgtttctgttttagctaccactactttgacctggtcaatcattggtcctgtatccatcccggcatccacaaaatgagctgtaacaccggtttctgatactttcgcttcgatagcttgaccaatcgcatctttccctttgaatgcaggtaataacgacggatgcaagttaacaatttgctcagggaattccgcaagtaacgtaggccctatcaagcgcatataacccgcaagcactaataaatcaatttccaaaccgcgcagttctaataaaatttcggtttcaaaagcctctttatccggataatttttcacatcaaacaggaaaaccggaatattttgcttgtttgcgcgttctacaacataggcgtttggtttatcacagacaagtagcttcacatgaggcttaataagctcatcatctactaaagcttgaaaattcgagccattaccagaagcaaaaatagctatattcatccttttgcgcctccgaaaataacggcatcatcagaacgtgttgttacttctccaataacataagccgcttccccgttttgaacgagtacttctaatgttttttcgacatcctctttcgcaactgccaacaccattccgatacccatattgaaaatctcatacatttcaagttcgctcaattgaccgtattttttcattaagtcaaaaattggaagaaccggccacgaaccaagctccactttgacagctaaatcatttgttaacatccgtggtaaattctctacaaatccgccacctgtcacatgagtaataccgtgaacatccactgcttttaaaacttctaaaactggcttcacataaatgcgtgtcggcttaagtaactcttccacaagtggcacatctagttccgtgaacgcttcatttaacttaaagtcattgtctttaaagaaaatttttcggactagtgagtaaccattactatgaattccgctcgacgggataccaatgagagtatctccggctttgactgcaccttctgtaatcagtttctttttctcgacagctccgacagtaaaacctgctaaatcataatcatctgccccgtacatatcgggcatttcagcagtttccccgccaattaaagcagcaccagcttgttcacaaccatcagctacccctttaacaatttgttccattttaacaggatctgtcttccctgttgcgatataatctaagaaaaataatggctcggcaccttgagctaaaatgtcattcacgcacattgccacgcagtcaatcccaatcgtatcatgcttatctgcttcaatagccaaaagcaattttgttccaacaccatctgtaccagaaacaagaacgggttcttttaaattcaaactacttaagtcaaacattccgccaaaagaaccaagggcacccattgcgcccatccgctctgttctagctacatgctttttgatgcgctcgactacttgatagccagcatctacgtccacgcctgctttactatatgcattctctgccattcgatttgtcactcctcattatttttctgcttctaagctcgctaaatattctgcttcataatcgtataaaggggtcggataatccccgttaaaataagccatacaaagtcccccataaggttcattcggataaggtttgccaatggaatctactaaaccttcttcactcaaatactctaaagaatctgcgccaataatacggcaaatttcatcaacagaataattagaagcaatcaattcatttcgtgtttgaatatcaattccataaaaacaaggataagcaagtggtggagaagcaattctcacatgaacttccgccgcgcccgcttcacgtaaaagctggacaatgcgtttacttgtcgtcccgcgaacgatggaatcatcaatcatgacaactcgtttaccttccacaactcctcgcaccgcagaaagcttcattctaaccccttgttccctaagttcttgcgatggctgaataaaagttcttgccacatatctatttttgatgagaccaagttcgtacggcagtccggcttcttctgcatacccaatcgccgcagaaatacttgaatccggcacacctgtcactacatccgcatcaataaatgcttcttttgcaagtcttttcccagaacgctttctagctgagtgaacattaattccagcaatattagagtccggacgagcaaaataaatatattccatactacaaatcgaatgcgtcacattttccgtaaatttttcaatccgcagtccgtcattattaataataatcagttcacctggctccacatcacggacaaattcagcaccaaccgtttcaaaagcacaagtttcagaagcaactacataagaatcgccaattcgaccaatcgaaagcggtctaaagccatttggatcaagcgcggcatacattgtatcttctgtaagcagcatatatgcaaagccacctttgaccttgtttaaagctacttttaaatcttctacaaaatcaccagtatggctgcgtttaattaaatgcgctaatacttccgtgtccgaacttgtttgaaagatagctccttcttcttctaattcgcggcgtaaagtcttcgcattcactaaatttccattatgcgcaagtgcaagtgaagaactgtgaaaatgaaataaaaatggttgtacatttcctaagtttttttgaccagctgttgcatagcgaacgtggccaattgctgccttaccttttaaatcgtctagttcaccgtgcttaaatacatctgctaaaagcccaagattccgatgcccttttaacgtttctccgtctgttgaaacaattccggcaccttcttgaccgcgatgttgtaaactatgcaacccatagtaagtgatttccgctgcattaggatgatcccaaataccaaaaataccacattcttcattaagtccttttacttcagcaagcatggaatagccccttcccaaatagatcgtaaatcagatgtactcgcagttactagctcttctttatgtttcacgcgaatcgtttcatctgccgttactacaccaagtcgatatactttttccagttccattaatttagcaaaagctgcttcattttctggttttacagatactaagaaacgtgattgtgattcactgaatagttgattcaactcaaatggtacttctacatccgcaccaagccctgctttaaatgtcgcttccgcaagagcaacaccaaacccgccttctgctaaatcatgactggaagcaactaatccttcctgaatcgcggttagaagtaattgttggtattttttctctgtcgctaaatctaattctggcgcgcgtccgctaattttcccttgttgtaatttctgtaattccgagccactatattcagcttttgtttcaccaattaagaaaatcacatcgccactatttttaaaatcttgtgtcgtaatgtgtgccaaatcctctactaaaccaaccatcccaatcaccggcgttggataaattcctgtaccatctgtttcattataaagcgaaacatttcccgaaatgactggcgtatcaagctctagacaagctgcactaatgccatcagcagctttttcaatttcccaaaaaatttcaggtttttcaggattaccaaaattaagtccatctgtaatcgcgagtggcttcccgccagaacaaacgatattgcgcgccgcttccgcaaccgctatcgctccgcctacttctgggtcaagatacaaatagcgcgagttacagtcagttgtcatcgcaatcgccttctcggttccacgcacacgaacaattgccgcatctgatccgggcacaactgctgtgtctgtgcgcacttgataatcatattgttcataaatatgtcgcttactagcaatcgttggctgagcaagtaactctttccacacaccaaccacatcatcaatcaccggcacaaatgcatcctcttcttggaaagcttgataacgagctggttctttcgaaggtttatgataaactggcgcatcttctgcaagcgcatctacaggaacgttcgcaaccacttcaccgtgatgaataattttatacattttatcgtccgttacttttccaatcacaactgcttctaaaccatatcgttcaaataaagcttggatttcttctacatgaccttttttcacacatagaagcatccgttcttgagattcagaaagtaacatttcgtatggcgtcatatgtagttcacgttgcggcacatcatccataattaattctagcccagcacccgcttttgaagccatttcagaacttgagctaacaagcccagcagctcccatatcttgaatcccaactaaaatatccgaatgatcacgaatcacatctaaacaagcctcaagcaacaatttctccataaaaggatcgcccacttgtacagcagaacgttgttgttcgccttcttcactaaactctacagatgcaaaagtggcaccgtgaatcccgtcacgaccagttttagcgccaacatacatcaccgggttgccaattccttttgcttgccctttttgaatatcttttgcttcaattaatccaacacacatcgcatttactaatggattttttgtgtaacaaggatcaaattggatttcgccgccaacagttggaatcccaatcgaattaccatatccagcaatcccagcaacaacttcactaactaagtacttcgcatgtggagtatctagctcaccaaaacgaagcgagttcagcattgcaatcggtctagctcccatcgagaaaacatcacgaataattccgccgacaccagttgcagctccttggtacggctccacgtatgatggatgattatgactttcgactttaaaagcaacacctaaaccatcgccaatatcaacaatcccagcaccttcacccggtccttgcaaaacttgttttccctctgttggaaattttctgagtactggtttagaatttttatagctacaatgttccgaccacataacagagaaaagacctgtttcagtataattaggctcgcgtccaagaatcgaacaaacaagctcatattcactatccgttaaacccatttcttgataaatcttttgttctttaatttcttttgtcgttggctccatgttaggcatttacttgttcctccttccaagcttttacaacggactcgaaaagtcttaaaccatcagtgccgccaataatatcttccaccgcgcgttctggatgtggcatcattccaagcacattcccgcgttcattaacgataccagcaatatctgcacgacttccatttgggttcacgctatcatatgtaaacacaatttgattattgtcttttaattttaaaagtgtttcatcatcacagtaataattaccttccccgtgagcaactggaacttgaataatttcgccttcttcataaagtccagtaaacattgtatcggcattcgccacacgaagcggcaccgtcttacaaataaaatgtaaattattgtttctaattaaagctcctggtagtaaaccaatttctgttaaaatttgaaatccgttacacacaccaagcactggttttcccatttcagcaaagcgtaaaacttctggcataatacttgaaaatttcgcaatcgcaccagttcgcaagtaatctccataagaaaatccacctggaagtaataccgcatcaaaacctgcaagacttgtttccgcatgccaaacatattccgcctcctcaccaagagaatcgcgaatcgcatgtagcatatcaaggtcacaatttgaacctgggaactgaatgacagcaaatttcatcgtttaagcctcctcaatttcatatcggtaatcttccatcaccggatttgttaacagtttgtcgcacatttcattcaacacttcatgaatatctctatctgacttcgctacttttaattccataaatttaccaatacggacatcttctacttcttcgtaacccatgcttttcgctgcgtcttttactgcaaccccttgtggatctaatacgcttttctttaaagtgacataaactttgacattatacattttgtggcctcctagttttgaacttgctttaatctattcaatacttctgtatacacatctgttaaattgccaatattccgacgaaagacatccttatcgagcttttgatttgtttccttatcccatagtctgcatgtatctggtgaaatttcatccgccagcaaaatatttcccgctgcatcacgaccaaattctaatttaaaatcaatgagagtaatattcatttgattgaataattcttgtaacaccttattaatcgaacgagcagcctgacgaatcgtgtccatttcatttgttgtcgcaatgtctaaataaagcacatgatcatcattaataaacggatcatctaaggcatcatctttataataaaattccacaatcgcatttggaatttcctcgccttcttctttaccaagacgtttcgcaagactaccagccatcacattacgaacaacaacttcaagtggaataatcgaaacttctttaacaagttgttccgtttctgaaatcgcccgaataaagtgactcgaaatcccttcttttgctaaataagaaaaaataagtgatgtaatctgattattaagttcgcctttaccagcaaaagattcttttcgaacaccatttagagcagtcgcatcatccttatatgcaacacgcaagaccccagcctcatctgttttaaaaagtcgttttgcttttccttcatacaacagttcattagtcacgataatttatctccttataaattacttaacctctttgaaaaaacatatatcaaagaggttaggttgtattctgtccgtaattataatcctaagcgatcaaaaattaagtcgacattcttcaggtgatagttgtaatcaaagcagtctgcaatttcttctgcagatagattttcagtaatggttgcatcttgttctactaattcacggaatggtacttgtttttcccaagcttccattgctcttggttgtacgacatcataagctgcttctcgagctaagcctttatcaatcagcgcaagtaaaacacgttgcgaataaattaatcctagagttctatccatattacgtttcatattttctgggaataccgtcaagtttttcacaatattaccaaaacgatttaaaatataatctaataaaatagtagaatctggtaaaataattcgttccgctgaactatgagaaatatcacgttcatgccaaagtggtacattttcataagcagtaaccatatgtccacgaataacgcgagctaaccctgttacattttcagaaccaattggattacgtttatgcggcattgcggatgaacctttttgcccttttgcaaagaattcttctacttcgcgtacttcacttttttgtagtgcacgtacttcaacagcaaatttttcgacagaagtggcaattaaagcaagcgttgcaagatattctgcgtgacgatcacgttgcaatgtttgcgttgaaatcggcgctggagtagttcctaatttttcacaaacatatgcttccacaaaaggatcaatgttagcataagtcccaacagctccagaaatttttccgaactctacaccatcagcagcaaagttaaaacgttctaaattacgtttcatttcctcgtaccatagagcaagttttaaaccaaaagttgttggctccgcgtgaacaccgtgcgtacgacccatcgttactgtatatttatgttctttcgctttttcgccaataatcgcaatgaaattctccaagtcttttcttaaaatttcatttgcttgttttagtaagtaagaattcgctgtatctactacatctgttgaagttaagccataatgcacccatttacgttcctcaccaagagactcagataccgaacgagtaaatgctactacatcatgtctagtttctaattcgatttcatgaatacggtcgacatcaaacttagcattcgcgcgaattttctttacatcttcttttggaatatcaccaagctctgcccacgcttcacaagccaaaatttctacttctaaccaagcttgataacgattttgttctgtccaaatattgcccatttctttacgagtataacgttctaacatcctttttaattcctccagttacttccaaatttgcgtttcttctatatcactcaataccgcttttggttcatcagtcaagatagttatatgacccattttgcgattgattttagcttcttttttaccataataatgtacaaaccaatgtgggtaatctatcatttgttcattcactgcatccacatgttgtcctaaaatattgaccattaatgctggtttcaatagctcaggttttactagcggcaagccaactatcgcacgaatatgctgtgtgaactgagaaatcgaacaagcctcaatcgtaaaatgtcctgaattatgaggtcttggagcaagttcatttacataaatcgccccagaactagtcacaaacatttctacagccaaaacaccacataattgaagtacatcggctaattttttggcaatttcttccgcttcttcatagacatccgctgccactttggccggcgcaatagtcgtatgcaaaatattgtttacatgaacattttcagctacggggaatgtttccacttgtccatttaagttacgagcaacaatgacagaaatctctttttcaaaaggaatccaagcttctaacacacaagaaccgtaacgcaacaattgtgcggcatcctcaatatcacttgcactgtgaataacaacttgtccctttccatcatatccgccttgcgctgtttttaagacagccggataaccaatacttcttatctcactttcgatttcttctttatcaacaattacagcatatggggcaatattaatgttagcagattctaaatacgccttttctaaaattctgtcttgcgtaatcgaaagtaattccgatccttgcggaacagatactaagttttgtgtcattttaagcgcatcgtagtcaatgttttcaaattcatatgtcacaacatctgctttttccgaaagttcacgtaaagctactttgtcatcataatcagctacgatttgttcatcgcttacttgagcagctggacaatctgctgtaggatctaaaacaataattcggtaacccattgcttttgcagctattgctagcatacgtcctaattgtccaccaccgatgataccaattgtactatttgtcagtaaaaattttttatccaagagaatcactactttctagaactgtttcttctagtgtagcacgtcttttttgtaatctgttagtaattgcatcgtttgtaatagataaaatttgcgccgctaaaagacccgcattgactgctccactttcaccgattgcaacagtagcaacaggaacaccaccaggcatttgtacaatggacagtagagaatccattccgcttaacgcttttgacttaattggcacaccaataacaggcaaagttgttttagcagcaaccatacctggcaaatgcgccgctcctccagcgcccgcaataataattttcaaaccacgttcccgcgcttgttctgcatattgaaacattaaatctggtgtacgatgagcagaaacgacttttttttcataagcaatttcaagttcatccaatacatcacatgcttttttcattgtatcccaatctgaggtactccccataatgacaccaatttccgcaggcattacgtgatcaactccttcttaatttcataatctctttcgactccttcattctaacaatagctatcataaaagtcaacgaaaaatcgaacatttaattgttacgttttcttaacgttcgtgttttactgtattttattactattagcggtattatgtagctcatttcactaaataaataaaaaaaagaagctaccatgcttggtaagcttcttcctattttctaacttgttttatccaaaaaccgccatgaatttgttttggctcagatgaaacaataaatgctccattatcaatttcaataatttgtttatatagttttcgttcattctttctttgagtcaaaatttcaagcatcatacgctctccatcacgcccactcgcaagccaactagtcaccccgtagcctaaatcacgaatttgattcggcaaatctaaattatattctttcgtaataacatttacagtgatataacctaaagcaattcgctcttcaattttcattccaacaataatacccacaccaaaacctactgcataagctaaaacattcgctatgttatttaaattatctaataccaaacttagtgcaacaacataaataatcatctcaaatacactcgaaagtgcagctaaataacgatatcctttcatcgtaagtagcaaccttaccgtataaatggtcacatacaaaatatttacaacaaagattgtagctactataaatataccattatccactaaaaaacacccctccacctaaaaaactccattaaaaattctatttaagggtcttttactaatataacatccaataagatagctgacaaaggaaacacttcaacaaaaaaagccctaaataattaggacttttaatattgcccggcagcgacctactctcgcagggggaagcccccaactaccattggcgcagagaagcttaactaccgtgttcgggatgggaacgggtgtgaccttctcgccataactaccagacaatatgcagttgttgaaagattgctctctcaaaactagagaagaaagggttcagttaggtaacttcgtttcattttttggttaagtcctcgatcgattagtatttgtccgctccatgtatcgctacacttccactccaaacctatctacctgatcatctttcagggatcttactttccgaagaaatgggaaatctcatcttgaggggggcttcacgcttagatgctttcagcgtttatccctgccacacatagctacccagcgatgctcctggcggaacaactggtacaccagcggtgtgtccatcccggtcctctcgtactaaggacagctcctctcaaatttcctgcgcccgcgacggatagggaccgaactgtctcacgacgttctgaacccagctcgcgtgccgctttaatgggcgaacagcccaacccttgggaccgactacagccccaggatgcgacgagccgacatcgaggtgccaaacctccccgtcgatgtggactcttgggggagataagcctgttatccccggggtagcttttatccgttgagcgatggcccttccatgcggaaccaccggatcactaagcccgactttcgtccctgctcgacttgtcagtctcgcagtcaagctcccttgtgcctttacactctgcgaatgatttccatccattctgagggaacctttgggcgcctccgttactctttaggaggcgaccgccccagtcaaactgcccacctgacactgtctccccacgcgcttagcgtggcgggttagaatggtcatacagccagggtagtatcccaccattgcctcctcgtatgctagcgcacacgtctcttcggctcctacctatcctgtacaagcggtacaaacattccatatcaggttgcagtaaagctccacggggtctttccgtcctgtcgcgggtaacctgcatcttcacaggtactataatttcaccgagtctctcgttgagacagtgcccagatcgttgcgcctttcgtgcgggtcggaacttacccgacaaggaatttcgctaccttaggaccgttatagttacggccgccgtttactggggcttcaattcgtaccttcgccgaagctaagcactcctcttaaccttccagcaccgggcaggcgtcagcccctatacgtcaccttacggttttgcagagacctgtgtttttgctaaacagtcgcctgggcctattcactgcggctctctcgggcttgcaccctaatagagcaccccttctcccgaagttacggggtcattttgccgagttccttaacgagagttctctcgctcaccttaggattctctcctcatctacctgtgtcggtttgcggtacgggcagtactactcttcctagaggcttttcttgacagcgtgaaatcaggaacttccgtacttaatttccttccccatcacagctcatgcttcgcaagaagcggatttgcctacttctcacactcactgcttggacgcacatttccattcgtgcgattccctatccttctgtgtcaccccatcggttaaacaattagcactggtacaggaatctctacctgttgtccatcgcctacgcctatcggcctcggcttaggtcccgactaaccctgagcggacgagccttcctcaggaaaccttagatattcggtggaagggattctcacccttctttcgctactcataccggcattctcacttctaagcgctccaccagtccttccggtctgacttcaccgcccttagaacgctctcctaccacgaacctccgaagaggttcatccacagtttcggtaatatgtttagccccggtacattttcggcgcggggtcactcgaccagtgagctattacgcactctttcaatggtggctgcttctaagccaacatcctggttgtctaagcaaccccacatccttttccacttaacatatatttggggaccttaactggtggtctgggctgtttccctttcgactacggatcttatcactcgcagtctgactcccgagtataagtacatggcattcggagtttatctgaattcggtaacccgagaagggcccctagtccaaacagtgctctacctccatgactctttacctcgaggctagccctaaagctatttcggagagaaccagctatctccaagttcgattggaatttctccgctacccacacctcatccccgcacttttcaacgtgcgtgggttcggacctccagtaagtattaccttaccttcatcctggacatgggtagatcacctggtttcgggtctacgacctgttacttatgcgccctattcagactcgctttcgctacggctccgcttttcccgcttaaccttgcaacaaatcgtaactcgccggttcattctacaaaaggcacgctatcacccattaacgggctctaactacttgtaggcacacggtttcaggaactgtttcactccccttccggggtgcttttcacctttccctcacggtactggttcactatcggtcactagggagtatttagccttgggagatggtcctcccggattccgacggaatttcacgtgttccgccgtactcaggatccactctggagggaaagccatttcaactaccgggctgttaccgtctttggcgggcctttccagaccgcttcatttataactttcttttgtaactccgtatagagtgtcctacaaccccaagaagcaagcttcttggtttgggctctttccgtttcgctcgccgctactcaggaaatcgatttttctttctcttcctccaggtacttagatgtttcagttccctgggtctgccttcctcacgctatgtattcacgtaaggatactatccgactaaagatagtgggttcccccattcggaaatctctggatcaacgcttacgtacagctccccaaagcatatcggtgttagtcccgtccttcttcggctcctagtgccaaggcatccaccgtgcgccctttctaacttaaccaatttacttctacgaagtaaaggttgtttttctgatgttccgtatcagcgatgatacttcttatcagatgaaagattcactttcagatgattctcggttacttgtgtcataaataataaattatctatgctaactttactaactttcttatctagttttcaaagaacaaacatacttgagaagtactaacctctcaaaactgaacaaatagagaagaacgaaaactcacaggtttccttttccttagaaaggaggtgatccagccgcaccttccgatacggctaccttgttacgacttcaccccaattatctgtcccaccttcggcggctggctccataaaggttaccctaccgacttcgggtgttacaaactctcgtggtgtgacgggcggtgtgtacaaggcccgggaacgtattcaccgtggcatgctgatccacgattactagcgattccggcttcatgtaggcgagttgcagcctacaatccgaactgagaatggttttatgggattggctccacctcgcggcttcgcgaccctttgtaccatccattgtagcacgtgtgtagcccaggtcataaggggcatgatgatttgacgtcatccccaccttcctccggcttgcaccggcagtcactttagagtgcccaactaaatgctggcaactaaaatcaagggttgcgctcgttgcgggacttaacccaacatctcacgacacgagctgacgacaaccatgcaccacctgtcactttgtccccgaagggaaagctctgtctccagagtggtcaaaggatgtcaagacctggtaaggttcttcgcgttgcttcgaattaaaccacatgctccaccgcttgtgcgggcccccgtcaattcctttgagtttcaaccttgcggtcgtactccccaggcggagtgcttaatgcgttagctgcagcactaaggggcggaaaccccctaacacttagcactcatcgtttacggcgtggactaccagggtatctaatcctgtttgctccccacgctttcgcgcctcagcgtcagttacagaccagagagtcgccttcgccactggtgttcctccacatatctacgcatttcaccgctacacgtggaattccactctcctcttctgcactccagtcttccagtttccaatgaccctccccggttaagccgggggctttcacatcagacttaaaagaccgcctgcgcgcgctttacgcccaataaatccggacaacgcttgccacctacgtattaccgcggctgctggcacgtagttagccgtggctttctggttagataccgtcaagggacaagcagttactcttatccttgttcttctctaacaacagtactttacgatccgaaaaccttcttcatacacgcggcgttgctccgtcagactttcgtccattgcggaagattccctactgctgcctcccgtaggagtctgggccgtgtctcagtcccagtgtggccgatcaccctctcaggtcggctatgcatcgttgccttggtaggccattaccctaccaactagctaatgcaccgcgggcccatctgtaagcgatagccgaaaccatctttcaagagcgtggcatgcgccacactctatcattcggtattagccccggtttcccggagttatccccaacttacaggcaggttgcccacgtgttactcacccgtccgccactaactttggaagagcaagctcttcctccgttcgttcgacttgcatgtattaggcacgccgccagcgttcgtcctgagccaggatcaaactctctttaaaatataaattgaatttgaatacttattcaacaccgtgaataagattccttgcgtcaaattgacttcgctagcaattaaattactagtttgtttttgttgaaaacagctttctgttttctgccctgcgattaccagtgagactttacgtctcattgcttttcgtcttcttctttgttcagttttcaaaggtcagttgctttgttaacgcaacttttaaatcttaccataaagtttatatcgcgtcaacaactaatttttaaatagtttttgatgaattatttcgtatcaattcagctttattattatataataccttttctataaatacaagtgtttttaattatacttttaattctttttctaatgcttgtataaaatcctgcataattttttgtttttcttttgctatagttttggctgtttcagtgtttaattgatcttttataaggagaagtttgtcgtaaaagtgttgtaatgtggtgttttttggattgttctggttagctatttctcgattatgagcgccaccataagtgaaggttcttgctatgccgattgctccgatggcatctaagcgatctgcgtcttgaactattttttcttctattgttaatgctttaaaagtattttttccttttttaaatgaaactgattggatgattcggatgatttttttgattagttctgatggtatttctttggtttccatccaattgattagtgttttagttgcttcctgttcgtcggttgttagtttaatatctgagtaatcgtggaatagagcggctaattctatagtgaacaggtcgccaccttcttttgattggatttctttacttaatttccatactctttttatatgagaccagtcatggccggtcgtttcattttcaaaatgagagtgcatccaattctttgctgaaagaataatttcttctttattcattttttttactcctttttatgttatttttcatgtacaatggtagaaaatggaaatggggtattcgatgtttgcatttgaacatgtttatttaaagcgtgaaaataaaactatcttatcggatattaattggaccgttaacgaaaaggaaaactgggctattcttgggctaaatggctctgggaaaactactttgctgcagcttctaaatgggtatctttggcctagtagtggaaagcttcaagtgcttgggcatgtttttggacagacttctttacctgaattacgtaaatcaattggttgggtgagtaatgctttagatcatcagctgaaagattacgagctaagtgagcaaattgtgcttagtggtaagtttgcaagtattggaatgtatgcgaaagtgacagatgttgaggtaaaccaagcgaaaaaactgctgactaattgtggtggggcctcgcttattggtaaagcttataaaatcttgtcacaaggagaacgacaaattgttttaattgctcgtgctttgatggcaaatcctaagttactgattttagatgaaccttgtaacggacttgatttatttgcgaaaagtcgtttattagaacggattaaaaaaattgctgaacgtcctgattcaccgacaatgctttttgtcacgcatcatacagaagaaattctcccctgctttgataatatcattttactacgtgacggggaaataactcatcacgggaaaacagaaaaacttttgacagaggaagtgcttcaagcgttttatcaaaagcctgtcgagttaattcgtattaaagatggtgcgattgcggtttatccgaagtaagtggtatagtaaggttacgaataacgcgtatgtaaaaggggcgaaacagtttgtataaaactatgattgcaaaagcaggcgcacgtgagcttcttggtatggatactagcctgatctatggttcgttttcttatgtagtggaaggcgaattaatggatctaacaggactttggatttcaaatgaagatgtttttattttttacttagaaaatgaagatgtttacttacttaagaaattcgcatatgaagacatagaactattagagcaaaaagtaagtattatctcgatgacaaaaaaattgatattacatcttaaaaatagcgaaaaatatacattgctcgttgcaaatggagaagcaaaagtgtttgcagctaaagtaaatgaacatataaaaaagggagtctaactaaattagactccctttttaaattattctttttcttcaaataaacgcgctacttcaatgattacttcggttgctttcaccatgctttctaacgcgacgtattcaaacttaccgtggaaattttcgccgccgccaaagatgtttggtgttggtagtcctttgtatgaaagttgagctccgtctgtcccaccgcgaattgggcttatttttggttctatatctagatttctcattgctgcactcactatgtctacaatttcttttactggttcaattttttcgcgcatgttgtaatattgatcattcagttttaattctactgaaccttccccatatttttctgctagtttttcggcgatacttgcgatatgagtttttctttctacaaatttcagatgatcaaaatcgcgaatgatatagtaagatttggcttgttccacatcaccgtttaatgagattaaatgataaaagccttcatagccatctgtatattcaggggcttcttcttttggaatctcggcatcgaattccattgccattttgacagcattaatcattttatttttggctgttcctggatgcacactatttccgttaaaagtaagtttcgcaccagctgcattaaagctttcatattctagttcgccaagtggcccaccgtccattgtgtaggcatatttggcaccaaatgcttctacgtcaaaacgctctggtcctcggccgatttcttcatcgggtgtaaaagctacgcgaattttaccatgcttgatttcggggtgattgattaaataattcattgccaccataatttctgtaattcctgctttatcatccgcgccaagcaatgttgttccgtctgttgtaataagcgtttttcctttgtaattagctagttctggaaattgtttaggtgacagtacgacatttaggtctttatttagaacgatgtctttaccatcatagttttcatgcacttgtgggtttacattttttccagttaagtcagtggcagtgtctaaatgagctaaaaacccgataactggtacttctttcgttgtattagaaggaagtgttgccattacataaccgaattcatctactgttacttcttgcataccgatttcttttagttctgtaacgagaatgttcgctagttccatttgtcctggcgttgttggacaaactgtgctttcttcatttgactgtgtatctacttttacatattttgtaaatcgttttaatagttcttctttcatttctatcactccctcagattgattctttttcattataaacttgattttcaaaaaattctattcctgactgtcgagtagtgttagtaatttagcggttgttcgccagtttcgcgttgtcgttagtgtttttttatattctccgagaaaaacaggcaattttaattgatggatttggtttgagaaaacgtggatatataacgctcggccgattgcgattacttcggcttgagtatttttttgtttaggaatatcaatattttcattgtaaaaagcaatcatccaacgttcttcttcaccaattatttctggtggaaatgggttgtttttgatgattgttttgtagttttgttctgaaaaaacgaatacatcgatggataaattgaagctcgctaaaattacttctgttatttttgctgctacttcggtttctgtctgtaaattagaacttagaacgaggttgccgctttggatataggttgttacattttggaatccctcttcttgtaaggctgcttttaaatttttcatgttcactttatttttccctgcgacatttacggctcttagtaaagcaacgtatttttccattctagtccctcccaatcgtttaactacattatagcatgttacttacgttataatagttctattagagatgggaggtttttggatgaaattaatttcttggaatgtaaacgggcttcgtgcagctgtgaaaaaaggttttttggagtattttgaagaagttgatgctgatatattttgcttacaagaaacaaaattacaagaaggtcaaattgaacttgatttacctgcgtataaagattattggaattatgccgtaaaaaaaggttattcaggtactgccatttttacaaaagttgagccattatcggtgcaatatggtttaggtgtcccggaacatgatactgaaggtcgcgtaatcacgcttgaatttgaagatttttatatggtaacggtttatacaccaaattcgcaagctgagttaaaacgattagattatcgtatgacgtttgaggatgcgattttagaatatgtcaaaaacttggataaaacgaagccggttgtgctttgtggtgatttgaatgttgcgcacgaagaaattgatttgaaaaatccgaagacaaatcgcaaaaatgccggattctcggacgaggaacgcgcaaaattttctgcgtttttagacgctggttttattgatagtttccgttatttttatcctgatttgaccgacgcttattcttggtggtcttatcgaatgaacgcgcgtgctaggaacactggttggcggattgattattttgttgtttcggaacgtttgaaagataagttagtggatgcgaaaattcatgcggatgtgcttggttcggatcattgtccagttgagctagaacttaatttataacataaaaaaatcctcacttgttggagtgaggatttttgaattatttagctaatgctttttttgctgaatcagcaagtgtgttaaatgaagcaatatcatttactgctaagtctgcaagcattttacggttaatatcaataccagctaattttaagccgtgcattaatttgctgtaagaaagatcttgcatacgagctgccgcattgatacgtgcgatccataatctacggaaatcacgtttcttttgacgacgatctctataagcatattggtaagatttcattaccgcttggttagctactttgaataataaatgtttagagccgtaataccctttggctaatttaactatctttttacgacgtttgcgtgttactgttccgccttttacgcgtggcatattgtctacctcctagaatttacaaaaatgttgtttctcttatttcattttagcgaccatttgacgaatacgtttgaagtcgccagctgataccattgctgatttacgcaatttacgtttttgtttttgggatttgttagcgaacatatggcttgtgaaaccgtgtctgcgttttaattttccagatcctgttctcttgaaacgtttagcggaaccgcggtgggttttcatttttggcatgaatatttcctcctcaaaactttacttttcatgaagtggtgctaggactaagaacatggaacgtccgtccatttttggtctttgctcaattgtacaaaggtcttcgcacgcttttgcaaaacggtcaagcaccttctgaccgatttctttgtgtgtaatggcacgacctttaaaacggatagagcattttactttatcgcctttttcaaggaatttacgtgcattacgtagcttcgtatcaaaatcatgttcgtcaattgttggacttaaacgaacttccttcattacgatgactttttggttcttacgggcttctttatctttcttctgttgttcaaaacggaatttaccgtagtccataatacgagctactggcggtttcgctgttggagcaacaagcactagatcaagattagccttttcagcaatttgaagcgcatcgattttactcttcacgcctaattgttcaccgtcttggtcgatcaatcttacttcacgtgcacgaatcccatcgtttaccaacatgtctttgctaatggtgagccacctccacttaattttgttacaacaagatagaaaatagctgttcaaatctgcggcctgctaactcgttcgttcagaggccataaaaaaacgggctgcttttcagcaatcccgcacattcaaaatcgcgtaagttacgcgacgaaagtttgaattttttgcctgaaaacgttcgtgttaacgaggcgagaagcgggttgcttcttctttcttgtttaataaccttacttactatatcatatgggatttttggtgtcaaggtgaattattagaaatatactcagaaagctaatttaacgttttaataaacttgtttgcatacacatacgcattttctactatttcttcatctgtgacttcaaaggagctgccatatatcgtgtgagcccctctatagtcagctcgaatgtggtttattgttgctcgaaatggtgtgagtaatgtatcgagtgaatagtcaattggtgcatcttctttataattatattttttatcgccaattgaaactgcaagagcaagctttttcccagccatcttgtccccttttgagccgtaagcccagccatacgaaaagacatcatcgaaccatttttttaataacggcgggtagctgtaccaataaaatggaaattggataatgactttatcgtagttttgcaattgttgttgttcaaaggctacatcaatatcccagttaggataaacttcatataattcatgaattgccaactcttctgtactttttaaaagagcttctttccatactctatttacgcgtgaattttcgatattcggatgtgcgataataactaatgttttcattcgattactcctttattctatcgttattatttatcgtaatttagttttgaaagaaagtaaatacacactcgaaagtggcttagttacttgtaagtaagtgtctataagtggtattatttgcaagtatctaaatcggatgaggaaaacaaatgaaagtttataatttaggtgtagaagctacactcgatattatgggtggaaaatggaaacccttgattatttgttttcttgttcaagggactaagcggactggcgagctgcaaagatgtattccgaaaatatcacagaaggttctagttcagcaactaagggaattagagagagatgggattattgatcgtacggtgtataatgagcttccacctaaagtcgagtatagtataactgcttacgggcttactttaaatgctatagttgatacaatgtgtcagtggggaaaagaaaatatcgcacttagaaacagccaaggagaaccagtgacactaatcgaaaaatcttataaccttcagtaaataaatcgaaaaaaacagctaggattatatactagctgtttttttctacaattgggcataaattcatttttcttaataaaggtcgaattataacataaactatgtagccgaaaatcccgccagaaaagttcaatattacatcatcaatgtctacaaatttaaaaggcgcttgataaataaggtcttgtaataactgggcaaattcaatcccaacggttgctataaaacttatagcgaaaacacttttccatgttaattttggaaaacataatggtaaaagtattccgaggggaacaaacataataaaatttgcgactatttggaaactagcatattctctcccttccataaacatttcgcctatggaattaaatggtattaaattcatataggaaccagttgcatatttttttgtatcctcaattagaaaagaatctagcataataggaaacatcgtaaacttgattactccacacgtatacacataaaaacaagttttgaagaaaattgtttttttggtatcgtgttttttcaaccatctccataagaaaaagacaatatatataattaaagcgattgttattactaatccagaaaatctaagcatcatagttctcctaatctgtagttaatattcatttggttgtatgtctaataattagtaaaacaaaaacccttgatttctcaagggtttcagccgttaaatgattaacgaatttctttaatacgagccgctttaccacgtaggttacgtaggtagtaaagtttcgcacgacgtactttaccacgacggataacttctaatttcgcgatacgtggagtatgtactgggaaagtacgttccacaccaacaccgttagaaattttacgaacagtgaaagtttcgctgattccagctccgcgacgtttgattacaacgccttcgaataattggatacgttcgcgagtaccttcgactactttcgcatgtacacgtacagtatcacccggacggaaacttggaacatctgggtttagttgactttttgtgatttcatcaatcagtttgttcatgtttttctctccttccaacaaacattcattcatattaataatgaagcggaatatcgttatcagactggtctctccagccaccttatttaggttaccataaactagattcgctgtaaagtttttttcttactttttctttaataaaaaacttgaccttggagtatggtctaatgttaccttaagtatatcaaatggaggtgtcgaacatggaacaatggacagtaaaagaaatggctgcttgcgttggaattcgggcagacacactacgatattatgaaaaaaataagataatagtacctaatcggctggaaaacgggtatcgtgtttataacgctcaacatttactagaattaaagtttattttggtgatgaagtatgccagattctcccttgccgaaataaaattaatgatggaatggttaagaagcgagccatctgttgcgtgtaatacggcgtcgaaagaattgcttgcccttaaagcagcagagattaaacaaactattgcacactatacgaaaatcgccgcccttttagaagaattacctcaaatcgatgatgtacaagactattcgactgttcaaaaagatgtaaatacctttgtggaacatattttcactgacatcaggaaggacggattttaatggcaaaagttgtagcaataatgggtgacccgcgagaaaaaggaacatcaagagaactgtttcataagtatttaactttttttcaaggacactcagcaatcgagataaaaacgtatgatattcgcgaattggcttttgatccaaatttacctgagggctaccgaactgaacaaactaccgaaatgaccaacttaaaacaagatgccagttcggctgatttgctgctatttgcttatctcgtctggtggtttaatgttccagctgtactaaaaggtgtaattgatcatttgttttggcgcggcgagagttatagttttaaagataaaaaatatttactgaccggtccttggcgaaaaaaacgagcgcgcttaatttatacgattggcgggatggagttacaacatcggctgttcgctcgtcctgctcttaccgccctccgctatccactttggatgagtggcgtcctttctgttagagctacttcaattgaccggcttgatctttccattagaaaatcaaatgaatactatgataaaaaaattgctcgagcagctaaaaaagatttacattttttattaaaaaagtaatatagaaagaaggatttggaatgaaagttactgctaaacatcaatattggcaaataacaacattgccgcacctttttccggtaaattgttacttagttttggagaaagatggtttaactttaattgatacagggattttatctcatgcaaaaggaataatttcacttattactaaactgaaattacctttaaaacgaattttgttgacacatgggcatggggaccatattggcggtttagttgcacttaaagaagcttttccagaagcccttttgatggttggaagcagggaaaaattgctggtagaaacaaaagagatttatgcttttgaagctcaaaaaccgttaaagggtagttatcctgatcaatttccagtaaaaattgatcaactattaaaagatggtgatatggtaggttcattattaattatggatacacccggacatacacctggctcgatttctttttttgatgagcgtaatgggcatttattcgttggtgatttatttcaaactcgtggtggtgcagctatttgtggggagaaacggattttgtttccttttcctgcgatgggatcttgggacttagaaacgagtattgcttccgcggaaaagttgcagctggtagatgtgactgaaatcgcttgtggtcacggacctgttaaatccatgagtgattttgatttattaagaatcattcagcgtgcaaaagcccaactaacaaataaaaaagactagaaaaccagttacccagctttctagtctttttttagaatctcgtaattttaatgttcacggctgttccatatgccagttgatatacaagcccgtcgacgaattgctcagtgaatgaacaatgaattaagccatttccgcctgcatctaaagctttcttttgcaattcctgtagtaaattttcaaagcctactgtttctaagtacgcttctggatcacttttaattcttgggcgaacgcttttggcgaaaacaacggttagaatatcatgattaacatttattggtcctgttgagacctgaatatcctgccatctttgacctattcgcttttggtcgttttcttcttgcacataggcttctcgttctttttgtcgttcggattttttagcttctttttcatctggagttccgaagattgccatttaaaatcacgtccttttttatttactgtcagaccattctttgagccaagttttttgcttgtctgttaatggatagtttttaagtaaatctggtcggcgttcgtaggttcttttgagtgattctttatcgcgccactcttctatccaagcatggtttccgctgagtaaaatatcaggtactttcattccgcgaaaatcggctggccgtgtgtagtgtggatgttcaagtaaaccggtggagaaagaatccgtcacagctgaatctttatttccaagtacacctggtaaaaggcgaataacgctgtccatcacaatcattgcaccaatttcgccacctgttaaaatataatcccctatcgaaacttcatctgtaacaaggtgttcgcgaattcgctcatcgtatccttcgtagtgaccacaaataaaaacaagatgttcttcttctgcaaattcttctgccattttttggtcgaagcgtttaccggctggatccattaaaataactcttggctttgtttctggttgtttatctttgaccgcttgaacggcatcaaagattggttgggctttaaggagcatccctgccccaccaccataaggataatcatcgacaacctgatgctttccttctgcatattccctgaaatcagttacttcaaccgcgacccgctcattttcgattgcttttttaataatggaactcccagtcactcccgaaaacatatctggaaaaatggatagaatgtcgattttcattaatctagcagcccttccattacttcaatggtaatttttttatcgttagtattaatatctttaactacatcggcaatataagggatgagtttttcttttttgtctgcgccttttacaacccatacatcatttgcgcctggtgttagaatttctgtgatttcgccaagctcttctccgtcagtcgtcacaactgtgcaaccaatgatttcatggaaataaaattcattttcttctaaatcggttagttgcgcttctttgattttaagaacgccttctttcatacgctctacttgatgaatgccggtaagtccttcaaacataagcaaatcaaagtttttgtgtttgcggtgtgaacgaataattagtttttcaggctttttgctgtttttttcaaataagtacacggtattcccaacttggaaccgttcttctggaaaatcggtcgtcgcgataacacgaatttcaccgattaagccatgcgtattaacaatttttcctacattatacattttctccataagtcacctctagcgtatttctactatgattccatctctcacaacgattgttttatcgaaaatggatttatcccacttgtctcctacttgtacatcaatgattgtttccatttctcgttcgcgaatttcactaccaagttcaagtacttctaattgttccatttgaaactggattaattttttcttttctcggcgtacttcaagttcatgcgtgaaatagtcagccactcgttctggttgaaatttgctttttcgttccattttcttttgttcaaaatgcaactgatcgcattcttgttcaatttgtcgtttttgttcggtataatactcgattaattcttgtttacttgtttctgtcagaatttgtttgacgacaactttttggatgatttccacaggacacctccactagcgattatgtccttattttaccatagtttttttggattcatctactaaagcttggaataattgttcactttctggatctgtttggaacattaattccgggtgccactgaacacctaaataccagcttggtaaattgtcaccctccactgcttcaatcatcccgtcagcagtccgggccgttactttaaaactcggtgctaattttttgataaattggtgatggagtgagttaactagttttttatttgggtggtgttttgcgagttcgcttgtaggttcaatatcgattgtatgggagccgagttgctcatcgactcgttgcagatgttggagtgctttcgtttcaacttggctaatatcctgatacagcgtgccgcctagtgcaacattgacaagttgcattccgcggcaaatcgcaaaaataggttttccagcgtccaaagctgctcggactaaggcgatttcatagctatcgcgcggtggaaaatatgccccgatttcttgggacggttcttctaaatataattgcggtgtaatatcttgtccaccggttaaaagtaaaccatctacgagagaaattgcttgaacggcagtagacgggtcatctattggtaacgcgataggaaatccgccaactttctgaatagcatctacatatcgctgttgtgtataagttacacggtgtccgtaaaacacgtccactccttttactaatctatttcctgtaattccaataactggcttcataacaattcctccatttctattttattttacaacatttagtgaggtaattgcttctctgatgattattaaaaaaagttataaaaaaactcgccaatttgacgagtttttgttattcgataatttcaagacgaatcttcttatcgtttttggagccaactgcatagacaagagtacgaatcgcttttgcaatacgaccttgcttaccaatcacgcgtcccatgtcttctttactgacagacaatttgtaggttaacgaagtatccgtttcttctggcgtgataacaacgtcttccgggtggtcaacaaggggtttcacgattgagagaatgagttcttccattcgcgccgagacctccttatttacctaatttttggttatggaatttttccatgataccttcgcggctaagaagattgcgaactgtatcagatggtttcgcaccattatgcatccatttcaaagttgcttcttcgtcgattttcacttcaaccggatcaagtaatggattataagtaccaatagtttcgattgaacggccatcacgtgggaaacgagaatcagcgactacaatacggtagaaaggtttctttttagaacccatacgttttaaacgaattttaactgccatagtttaattacacctccataaagtcttacacaagtatatatattaccagtaaaggatttgtttgtaaagtgttttttctttacagaggatatttttttcttttcagcggacactttcggcttcagtgcttagttttccttgttttaatagttgataatatctcacatatccggaaatattatgctcaacatcatcaattctcacgcggaaagactggtgacgaatgaagaaactaccttctattctggctggatttttgtagtacatcgcaagctctggataaaagtaaccatttaattgataaagtgcgcgttttgtaattgttttttcaagattttcaagcgaataagatgttaataatgcttgttgtccttccgcttccatccgcagtgtcatttcttttgtagcaacggtaagctctaaaaatgttggaaaagtggtttcgcgctcgtaaataaatggtaagttgtcaaaggcattttgcagtccaaattcgtagtaagcttcgtctttgatatatttggtaatttcattggcgcagtagcttaaccagtgatcgtgattttgccagtatttatcttgtataaagtgattaaaagatttggctgctgcgtctaaccatttggaatcgcggtcaatttcatacaggcgaagtaggccaaagacagcttccccgtcataataaataattcgaaaaatatcttttacttctaatgatggatattctaacacatgtgtgaactttccattttcgtcttgtaatgagagaattgcatttgctatttttcggcaaagaggtaagtatgttttagtgccagtaatatgcatatatttagttaaagctagtagagtcgcggctgaaccacctaattttacttcacggagttctggttcgataagaaaggccatgtcgtctttttcataaataaagtgtttttcaaggtatgttaaagcttttgttgcggcttctaaaatagctttatttcccgttaattcatatgcttctaacatggaataagtagtactagcatggcgcaaactattataatgtttgatttttttgtcaaaacaagcaaaccaaccatagttaaattccccagttgtgtttacttgatgcgccaaatattctccagcattttcaactaatgtagaaataatttctggcgtcaaatattctactttcctacgtccgtggtctaaactagctgtttctaattcatgaatgttctttccatcaaaaaaccaccctactgtttcgaaagtgacaacactagaatcgatggttaagtttaattgggcttgatttttattggcttgaattaaatatctattcatattttcaacgttgatagctagtccttcatctccaggtaaaaggatagcgttcgcattaatttcctgttccattaaagctattttaaaattttcatttaaggcaatgcctcgtctataataatttttctttgtttttaaagcttttctattccattcccctaagttttcgagttgataattcaccgcaatatccattttaaatgaaattgcttcttcggtttgatttttcaatgcactttttttcatttcattaattaaatttgctaaacaaagatagctaaagttgattactgtcgctcgtttatttttataacctattgttagaaaaccatgccatttcccgttgtaagtggcgtgctcttctgcttctgttaattgatcaataattttattttcaagttcatcaagtacacctctccaaggcatatgtaccactcctttttataatttccctgccgctaaaactaacttagcagcagggaatcaatgttttgtggctttatttacggaaaagacgtagtaagaacgcgccagctaatgagaagagtccaagtcctacccaaggaagactgctactagtatcccctgtggatggaaggtcgcttgcggaaatacttgtagttccatcagcactgtagcctgaggaaagcattgttccggagccgtttgtactcatattagaaacggttacgcccgtacctccatttgctgttccagtagttccaccgttattagaagagttagtacctcctccatctgaatcagcgtcagcatcggcatctgcatcggcgtcagcatcggcatctgcatcggcgtcggcgtcagcatctgcgtcagcatcggcatcagcgtcagcatccgaatcaactaatggttgaactgttactgctacatcatcacttgtttttacttcgtcaccatatttagcagttacttgaaggtggataacatctccagctttcaaattataattaggaatatttattgtataggttccatctgaattaattaatacattgccaatgactgtgccatccggaagcgttaaattaatatagaaaactgttccggctggagcatctctttgtaatgattttaatagggtattcatattaaggtttttatagatagaagaacctgtaatagttttagttccttcataaattggattgacagttggtttttcaactaggaaatctctccagtcgatatctacgtcggcatcggcatcagcgtcggcatcggcatcggcatcggcatctgcatccgcgtccgcatcggcgtcagcatcagcgtcggcgtcagcgtcggcatctgcatcggcatctgcatcggcatcagcgtcggcatcagcgtcggcatccgcatctgcatccgcatcagcgtcagcatccgcatcagcgtcggcgtcagcgtcggcatctgcatcggcatctgcatcggcatcagcgtcggcgtcagcatccgcatcagcgtcggcatccgcatccgcatccgcatcagcgtcggcatcggcgtcagcatcagcatcagcgtcggcatccgcatcagcgtcggcatccgcatccgcatcggcatcggcgtcagcatcggcatcggcgtcggcatcggcgtcagcatccgcatcagcgtcggcgtcagcatccgcatccgcatcggcatccgcatcagcgtcagcatcggcatcagcgtcagcatccgcatccgcatccgcatccgcatcagcgtcggcgtcggcatcagcgtcagcatccgcatcagcgtcggcatcagcatccgcatccgcatctgcatcggcgtcggcatcagcgtcagcatcggcatcggcgtcagcatccgcatccgcatccgcatccgcatcggcgtcggcatccgcatctgcatcggcgtcagcatccgcatcggcgtcagcatcagcatccgcatcggcgtcagcatccgcatcggcatccgcatcggcatctgcatcggcgtcagcgtcagcatccgcgtcggcatcagcatccgcatctgcatcggcatccgcatccgcatctgcatcggcgtcagcatcggcgtcagcgtcggcatcagcatccgcatcggcgtcagcatccgcatcggcgtcagcatccgcatccgcatcggcgtcagcgtcagcatcggcatccgcatcggcgtcagcgtcagcgtcagcatcggcatccgcatcggcgtcagcatcggcgtcggcatccgcatccgcatcagcgtcagcatccgcatcggcgtcggcatctgcgtcggcgtcagcatccgcatccgcatcggcgtcggcatccgcatccgcatccgcatccgcatcggcgtcagcatccgcatccgcatcggcgtcagcatccgcatccgcatccgcatcggcatccgcatccgcatcagcgtcggcgtcggcatcagcgtcggcatcagcatccgcatcggcgtcagcatcggcgtcagcatccgcatccccaacatccgtcgtaataaatccacgagctgcgttactattcaacaaatcaacatccaatagtccatcgccagttctagctgcgaaatccaattttccatcatttgcactaggaagagccgtaacaccgagcgctagtaaatcaattgttagcgtaaaagtagatacactactaacgccaactcccagtaaatgatttactcttgccccaattgcatttctactagtatcaatgaagaaattatttgaactaccattaactgttccttgattaaataacccaatattcccaattcctaaataagcaattttataatcaatttttgtatttgcttttatatttggattactcaaaatagaagttaattcgctaggcagttcaaaatacgggtaatacgtagacacagcactcgcactaactaattggttccctgatagagtaatcactaatttcccattcgcatattgtgtattcaagcttgaattcccaagtaaatcaatcgttgctgcatccgcttgaataccactgagggcaaatttgtgattaaaagaatcataattcactgtgacaggtgctaccatcattgttgttgttgtaattagagcagcaattaattttgctttttgcgctcgcttttggtcaagtttccttttgtaatccacacgctgttttttcatcatttttcccccttaaaaatcaataagttttgattttgaaaaataactgaaaacagaataaaggtatttaattattgtttactaataagctaactattaagtatcccatgaacctttatccaatatcagattaaaatcatttcagcaaaatgcccctcctttctttttatgtatctaagtgaacctttcatttaatgttataaccagttagataactttactatatagtatatttttaaaaattaaagtaaaaagtactagaaagaaaaaatacttcaattcaatatcattagtctaaaagttatacaaatatgcgcatttaaggcttatatttaaactttagcactggtctttaataggtaaatatatctactaaatccaactttacatgaattgtctttaaattgtatacaaatctttttaaaatggttcctcactttaaatctatttgtacgcaaaaaaaatagccctctttgaaagggccatttttttttagtaaagatatgcttttttaagttgctcttttttatcatcagttagtccgagtttttcttttaaaaagttatccatcgaaccatatttagcatcaatttcatcgaaagcggcattgatataagattcacgaacttccattacagctgtcatcccgtcgataacttttttattatctgttttagctgcgactgcttggattgctttttcattttcactagcacggtatttattggataacatataatcgtctattacagtgtttttatctacacctagtgccgagaggactaaagcagttccaaatccagctcggtcttttccggctgtacaatgccaaagaactgagccatcttgattcgctagtagtatctcaaaaaattctttgtaggcttgaatagaagtttcatctgtaacaaagcttttattagcattaattagaaaggtttcgggattatccattttagctagactggcggttaaatcttgcgtgctcgtggatgctccgttatctttcatcacagaatcatgtgtataatcgactccggtaagttctggatctggtttggctttcacttcggtatttgtcctaaaatcaactatatgcgaaaggtcatatgtatttacgagtttctttttatctgaatcacttaaagtggcaagttcggcgcttctgattaatttatgtggtttgattgttaaaccatctgttgttttgtaaccacctaagtcacgaacgtttactgccccttgtaattttatttgactacctggttggagtgttttttcggttttaacattcgcttctgctttttcttctgactgagttccacatccccctagtaataatgttgcgcttaatacacctgctcctgttacttttacccaatttctcattctttctcctccttttgtaagcttaattgtaattataacaatggattttattggttgaataaagggtttgtaaagaaatgatttgcaggatgttaaggtatgaaaaaagccaaaaccgcattagggttttggctttttgaattaaaatggcattttgaaattgccgaatggatttttacctttcttaccttttcctccaccagtcatttgcttcatcatttttttcatttcagcaaattgttttaggaggcgattgatttcttgaattgggcgtccgcttccacgagcaattcgttttcttctgctcgcattgatgatgtccggattatctttttcgtttttggtcatggatttaattatcgcttcgatgtgaccgagttgtttatcatctacttgcatgttgtcgaggcctttcattttgtttgcccctggcatcatttttagtagttcatctagtggtcccatttgttttacttgttgcaattggtccaagaagtcatctaaggtcatgctgttgtctttcattttttgttccatagctttcattttttctgcatctacatcagtttgtgctttttcaataagagaaagtacatcacccatgccgagaattcttgaagccatacgatcgggatggaacgtttcgattgcttccattttttcaccggtagcaacgaatttgattggttttcctgtgactgaacggatggaaagtgctgccccaccacgtgtatcaccgtctaattttgttaatacaacgccggtaatttctaattgttcgttgaagctttgggccacatttactgcgtcttgcccagtcattgaatcaactacaagtaaaatttcagttggcgtagcgatttctttcacttgttttaattcgtccatcagagtttcgtcgatatgaagacgaccagctgtatcgataatgacataatctaaatgttcttcttttgctttagcgatagcttgtttcgcgatttctactgggcttacttgatcgcctagagaaaatactggcatatctaattgtttgccaagtgtttctaattgtttgattgctgcaggtcggtaaatatctgctgcgactagtaaaggtttacgattatattttttacgtaataaattagcgagttttcctgaagtggttgttttaccagctccttgtaaacctaccatcataataacggttggcgggcgatcagctgttccgattttactttcttcgccgcccatgaggcttgttaattcttcttgaacgattttaattacttgttgaccgggtgttaggcttttcattacgtccgcgccaactgcacgttcgcttactgttttaataaattgtttaacgactttaaagttaacatcggcttctagtaaagcaagacgaacttcacgcatcatttcttttacgtcagcttcgtttactttccctttaccgcgaattttgttcattgtttcttggagtcttccagctagtccttcaaatgccatgattctggcctcctaatcgatatttttaagctgttcgagcgtatctttcacttgctcgtccagaaaattcttcttggttaattgtgcttctaattgatcaaagagtttttctcgttgttgatattttcttaacatccctagtttttcttcgtatttttctaggctttcttctgttcttttaatattatcataaatagcttgtctactcacttcaaattcttcggcaatttcgcctagtgagtaatcatccaagtaataaaaagaaacatacgatttttgttttgttgttagtaattcttggtaaaaatcaaataataaattcatacggtttgtcttctcaaacaaggcatttcacctctctccttttaaaggatacggggaaatcacgggaatgtcaaggaaggttaaataaaagagaaaaaagccggaatgacgagcatcattcggctttctctgattatttttcgttatcaaccatatcagcaaataagccatacacatattcatttgcatcaaaggcttgcagatcgtccatttgttccccgagtccgacgaattttactggaatatcgagttcattacggatggctatgacgataccaccttttgcagtcccgtcgagttttgttaagataatacctgtcacgtctgttgtttctttaaattgttttgcttgaacgaaggcgttttggccagttgtagcatcaaggactagtaaaacttcgtgcggcgcattaggaatttcacgcgtaatgacacgttttactttttcaagttcgttcatcaggttgactttattttgcaaacggccggctgtgtcacaaagtaagatgtctgcttttctagctttggcggcttgaacggcatcaaacatgacagcagcaggatcgcttccctcagcttgtttaataacatcgacacctgttcgttcgccccagacttctagttgatcgattgcacctgctcggaatgtatctcccgccgcaagcataacttttttaccttcttgtttaaaacgatgtgccatttttccgatagaggttgttttaccaacgccattaacaccaacaaataagataacagttagaccattttcttcaatatgcaaagtttcgtcttctttttcgtcgccttggtaaatatcaactagtttttcaacaataacttcttgtacatcttttgggtcgctaatatttcttaattgtacttcacggcgaagtgtatcgactaattccattactgtttcaaaaccgacatctgctccgataagaatttcttctagttcttcaaagaaatcttcatctactttacgataacgagcgaccatttcattgatcttcccggaaaagttaccgcgagtttttgataaaccatctttaaattttcctgaaacagaatcggtttgctgggtaattttatcttttaattttttaaaaaaggtcattttatatactccttttatttaatgagttcggctgtttcttctaagcgaaccgaaactaatttggagacgccggactcttgcattgtgacaccgtagagtacgtcggcttcttccattgttccttttcggtgcgtaataacgataaactgagtgcctgactcaaattgttttaagtagcggctaaaacgtgtaacattggcttcatctaaggccgcctctacttcatccaaaatacagaatggtactggtcgaacacgaatgatagcaaaaagtaatgcaatcgcagttaatgcacgctctccgccagaacgaagcgataagttttgtagttttttccctggtggttgaacgacgatgtcaatccctgtcgttagtagattctctggatcaagtagtacgagttccgcacttcctccgccaaataattctgggaaaacaatggcaaattctgtttttattgcttcaaaactctcactgaaacgaattttcatttcttcatccatttcgtccataactttaaagagggtttcttttgcggcaagtaaatccgcttgttgtcctgttaaaaagtcaaagcgttcttggatgcgatcaaattcttcaatagcgccaatattaacgattccgagctcgtctatcgaacgttttaataaacgaactttagaacgtgcttgttccgtatctacttctggtaagattttttcttcggcttgttctggtgttagtaaataggcttcttgcaagcgatcgattcggttagtaatatctacttcaagacgaccaatacttatttccgcattatttttttgttccacataaaaactaatttggttatttttttgcgtcaactcagcttctagtagttcgattttttcttgtagttcggtgcgagtttgtcttgtttgatttagtttttcactcgtttcggccttatctttacgaagttcttcgatggattttctagcagattcttcacttgtatgaacacttgaaagatttgtttttaaggaagcgagtttttgctcagctgcttctttttgttcgtagttttcatgtaatgtcgttgttacgcggtctactgcttcgacggcagactgtaactgctcacgtttagcggcaatttgcgcttttaaggacgacaagctttctaaatctgctgtacgtttactttctagtgctttacttgaagatgtcatcgcttttatttcttcgtcggttttttcgatttgtttagcgatttctacttgctcttgaagtagcgtttcttttcgttccagcagtttgtttaattcttcgctgccatctgctttttcaatatcatatagctgtaattgtttgttaaaacgttctagattttcggtttcgcgatctaatttaccaagcaattctttttcttgtaaacgtaaattttcaccaataacacgagtttcttcaagttcttctcgttttttcgacatgctatctttggcaacttgaacagcagactcgagttcacgagtggaattatttaattcagcgattttttctgctaattgacctaattcgtgttttctcgttaagatagacgatttgccgccttttgttgctccaccagtcattgaaccaccggcattaaccacatcaccttcaagtgtcacaatgcgatacctgaagtttactaaacgagcgagcgtattcgccccttttaaatctttcgctaaaatcgttgtaccgagcgcgtttaaaatcactggagacactttttggtcaaatgaaatcacttcgctagcaagtgcgatgaaagctggttgattacttaaagcgtttttagttgctgctggtaattctcgaggttgaatagttgaaagtggtaaaaatgttgcgcgaccgcttttcgttttctttaaaaagctgattgcttcacgagcaactcggtcatcttcaacaacgacattttgcgcacttgctccgagcgctgtttccattgcttgttgatattttgctggtatgtcaataagttctactaaagctccgtgtatgccaggaatttctttttttgcttttaatacttcacgtacaccttggaaaaatccagcataatcatctgccaattcttctaatgtttctttccgtgatttcatttgttggactgtttcataatgtttataaagcgcacgttcttgtgttccaaaaacagcttcttgttttgccaatgtttgctgcacttcacggtatatttccatttgttctgtgagctcgctttggatttttgtaaggtgcgtttttgttgtatcaatttgagctaacatatcttttctttcatcgacatgttgactattttctaaatctaatttatcaattcggctagtaatttgtccgatttggcgttcgatataccctaaatcattattgattgtcgtttgtgtatggcgtaaatcaatataatcacttttacggttttcaatcgcttcttcggataaatcatcatattttgaaagtgtcgcttctagttcttttttcgcttttacggcaatttcaagcgccgtttgtttttcgagttttgaactacttaacacttctctttgttcttcaagagcagtaattttttccgtaattgcagccaatgtttctgcgtagacttgttcattttcactgctatgttttttacgttctaattgaagattccgctctccttctagttgttcgagtttttcggtttctactaacaaacgctcttgtaaattatctagcgcaatatcagtttcattaagcgcttgtttttcacgggaaacaattgcttcttccgcatgtaattcttcgcgtagcttaattaaaaccgtttgattttcaccaaactctttacggacttcagctagtttttctgttaaagaactgatttcactcgcaagtaacgtcacttcgtatttttctagctcttcttgttggaataaataatccttggcaatagaagcttgcatttcgagcggctccagttgcccttctaattcatataaaatatcttgtacacgatttaaattttcttcggtttcaaataatttattttcagcttgttttttacgatgtttgtatttaagtacgccggctgcttcttcaaaaatcgagcggcgttcttctggcttactgttcagaatttcatcaattttcccttgcgaaataatcgaaaaagactctctcccaagtccagaatccataaataaatcgacaatatctttcagtcgacaattttctttattgattaaaaattcactatcaccattacggtaaatacgtctagttacagctacttcgctataatcaagtggtaaaaaatggtcttcattttcgagaataagcgatacttctgcaaaattaattggtttacgcgtatcacttccagcaaaaataacgtcgcccattcggccaccacggagcgatttagcggactgctcaccaagtacccagcggattgcttctgtaatattacttttcccgctaccatttggccctacaactgcagtcatgccgggcacgaaatctatcgcaactttgtcagcaaaggatttaaagccattcatttctaatcgttttaataacatgtccggacacctccatttttgtttatctatgtgttagttgatttatagcaaattgtgccgcactttgttctgcttgtttttttgttctaccgctgccttttccaagtacttgtccgttaacaataacttgggcatcgaatgctttattgtgtgctggtcctgtttcgccaagaatatcatattcgatcaagacatcacggtcccgttgaacaatctcttgtagttgtgttttgtaatcgactgtttgcaagtatgcacctgcatcaatcttcggaaaaataactcgttctagaaatttcacaactttatcaataccattatctaaatatagggcgccgataaaagattcaaatacatcagcaagtaaagctgggcgtgttctcccacctgctttttcttctcctttacctagacgcacatatttagagaaatgtactgcttccgcgaactctactaaggaaggttcacatacaatagctgcacgcatttttgtcatgtgtccttctgccatatctggatatttattaaaaagatagtctgaaacagttagttcaagaactgcatcaccaagaaattctaggcgctcattatctttcacattttcccggcgatgttcattgacatatgaggaatgtgtgaatgcttgttgtaataattccacattttgaaaatcaaaaccaacactttcttgtaattcttcccattgattcatttcacttgcccctctctatactagtaagcaagttcattttctaaacagccactagcaaaaagctgcttagaaaatgaaccaacaaatcttcttaaccttgaaaaagaggctacctgtactacttatctcacgtgcggaagttaccacagcaaagataagtaacacgggcaccctcatttatccggtcacataaagttttatgcgtttgcctctatgtacttcactgcatcaccaactgtgttaatgttttcagcgtcgccatcagagatttcaactccgaactcgtcttcaagttccattactaattcaacaacatctagggaatctgcacctagatcttctttgaaggaagcttctaaagttactttggattcctcgacacctagacggtctacgatgatttttgtaactttttctaatacttctgccatttttcacttcacctccctccaagtattatataggattatttctcctacgtaaacaaaaatatttaaagtaatgcgagccaagtaaattcgcattcattaaccaattttacattaccattccgccatcaacggatagtgtttggccagtaatatacttcgatgcatcgcttgctaagaaaagaactgcattcgcaatatcttcggttgttccgtaagcaccaagcggaatttgagctagcattgcttcttttgttttatcatctaatttgtctgtcatttctgttgtaatgaaaccaggagcaacagcattaacgttaataccacgtggagcaagttcacgagcagttgtttttgttaaaccaattacgcctgctttacttgcaacatagtttgcttgacccgcattaccaattaagccaacaacagaagccatgttgataattttaccagcgcgttgtttcatcattgtacgacttactgcttttgtacaaaggaaagttccttttaggttgatgttaataacgtcatcccactcgtcttctttcattcgcattaataaattatcacgcgtaattcccgcattattgactaaaatgtcgatacgaccaaagcgctcgattgcttgtttgaaaaatgcatccacatcttcagcaatcgctacgtttgctttcattgcttctacttctacaccatgttcggcaacgagttttgctgtttcttccgcagcttctgggctaccattgtaattgaagaaaatatttgcgccttctttagctaatttgatggcgatgtcacgaccgattccgcgcgatccacctgttactactgctactttgccttgtaaagtcattaattattctcctttcaatgtcgcggcaacacttttcactgactcaacatcacctgcggacagtacggttacatcacgattgattttcttaattaaaccagctaagacttttccagaaccaatttcaacaaaagtatctacgccgtttttaattaattcttcgacaatatcttcccataatactggggaataaatttgcttgattagtttatcgctaatttcggatttatccgtagtttctttagcatccacgttattaactactggaatttgaccatcagaaattttaacctctgctaaaatatcacggaaagcaagtgcagctggttccattaaacttgagtggaaaggtccgctaacagcaagtggtaatacgcgtttcgcaccattttcttttgctttttcgcctgctttttcaacgccagcagttgttccagagataacgatttgtcctggacagttcaggttagcaagttgaactgcatccccttcagctgttacttcttcggttactttttttaatgtttcacggtctacgccaagaaccgcagccattgcgccggcaccatttggtacagcggcttccattaattctccgcgtttacgaacaagataaatcgcatcacttgcttctaaaaatccgccagcaacaagcgcgctatattcgccaaggctatgtcctgctacgtaatccgctttaacaccatatgtttctaatgcgcgtaaaatagctacacttgttgaaactaatgctggttgtgcattttcggatttcgttaataattcgattggtccttctgtaataacatctgtgatggaaaagcctaatctttcatcagcatcatcatagattttttttgcttctggatattctgcagctacatcttgccccatgccaattttttgtgctccttgaccaggaaatacgaatgcgattttagtcatttgtttctgttcctcctacttttactttatctacttctgatttaatggtttcaacaacttgtttttcaaccatttcacgtacttgacgaatagtggtaaaaatcccatttgcattagatgatccgtgtgcttttacaactggggcttgaacaccgaataaacaagcgccaccgtattcgctatagtccatttttgcttttagttccattaaatcttttttcaggaagcttgctgcgactttatttttaaagccatttagtaagctcatttttagcatacttaggaaagctgcacctgttccttcaattgacttaagtaccatattaccagtgaatccgtcagtaacaactacatctgctacatccattaacaaatcacgtgcttcgatattaccgataaattcataggcatcttgatttttcattagctcaaatgatttttttgttaattcatttccttttgtttcttctgttccgatgtttaaaagtgccacacgtgggcgttcgattttacgtactttttccgcatagaccgaacccattaagccaaactgtaataaatgttctggttttgcttcggcattcgcacctaagtcgagcataacaaagccttttccagtaacggttggaagtgttggcgcaagtgctggacggtcaatccctttaatgcgtccaatgacaaagagtccagtagacataagggcacctgtatttcctgctgagatacaggcatctgcttctccgtcttttacggcttgggctgcaagtaccatggaagcttttttcttccgttttacggcgcgaactggttcatcgtcactttctattttttcatcggtatgtatgattttcacacgagttttatctgttaaatgttcatttatttttgtttcgtctccaaaaagaagaatttcgatatctttatattgggcaacagctttcattacacctaaaacaatttcttttggtgcgtgatctccacccatcgcatctacagcaattttcattatacgtcagtcctttattttcatttttgcgttgcgtgatacatttcaaacttacctttgagtacaatttcgtctccaacatagctttttacatccactatagtaatagctctgttgtctgttgctggacgtacttttgcttttgctatgatgcgttcaccttcgtatacagaacgaacaaagcgaacggttgcttgtgtggttaaagcgagttcatttgggatgactgcggttgctaaggaattagcttgggcaaataggtgatgccctcgagcgattttatttcgtttaaaaacatgctcacttctcacgtcaaaaatggaaattgcactcttactaagttggatatcaataatttcaccaatcacttcatcgatgggaagactttttactgcgtcggcataattgacactcgctacatgtttgattcgctctctgagttcagggatagaaagagccacccggtctaaacggatagtctggacgataaccccaaatttttcagcaagttgctcatctgttatgaaaggattttcttcaatagcaacttgaagtttcatttgtcgatccttcttagaatattttttcatgcacggttcctcatctctttttttgtgaaaggtattaacaccagctactaaagactggctaaaaaaaggaagttacctctgctggataaccttcagaacttcctcctatttattggtactttaatatgttattaaaaatcaagccaagttgcaagtttttttaaagtttgttacataggtttaatctagtttttgttctgtgaagacgccttcttcctcaagtagcgccactaatttatcgtacgttttattttccaacatgttttcttcaaagatcatatggacggcatcttggcgagcgatttcaagcacacggtaatcatgaaccatatcagcgactttgaattctggaacgccactttgttttctaccgaagaaatctcctggtccacgaagttcgaggtctcgttcgctgacaacaaagccatcgtttgtttctgacataatcatcattcgttcttttccgacctcggtttttgggtcagcaattaaaatacaataagattgctcagcccctcgcccaactcgtcccctcagttgatgcaactgcgctaaaccaaaacggtctgcatcatatatgaccatcatcgtagcgttcggaacatttacgccaacttcgactacggtagtggatacgaggcagtcaatttttttatcattaaagtcgcgcataatttgttctttgtctgccggtaataacttgccgtgcatgagtcctggaacatatttagtgccccatttattttgtaaaatgttgaaaacgtctatcgcattttgcacatcgagtttttcggattcttcaattaatgggcaaatgatataaacttggtgacctttatcgatttctttttccataaaaccgataacgcgatcaagcatttgatgttttacccagtaggtttcaatttcttttcgtccagctggaagttcatcaatgatcgatacatccatttccccgaaagctgtaattgcgagcgttctagggattggcgttgcggtcataaataacacatcgggatattcacctttttcccgtagaatccggcgctgtgctacgccaaatctgtgttgttcatctgtaataactaaaccaagtcgatgataaattacttcgtcttggattaaagcatgggtgccaattaaaacgtcaattgagccattttcaagcattgccagtaattctctacgttgcttccctttcacactactagtaagcaaaccaactgtaatatcaaagggttgaagtagctccactaatgaattcgcatgttgttcagctaaaatctccgttgggaccattaaagcactttggaaaccgcttttagcagctgcatacatcgcgatcgaggctacaactgtttttcctgatccaacgtctccttgtaacaaacgattcatatggaagtgcgataacatatcaccgcaaatctcattcactactcttttttgcgcttttgttagcgggaatggtaaggaatcgatataatgacgcaaatcttctacatcataattaatcgaaatcccacccgacttctcacgttcgattttacggaaaaactgcatttttaattggaaaagcaagaattcttcgtaaaccattcggcgtctagcttgttttaattcttcattgttttttgggaaatgaagcacgcgaacagcttctaaccgatccattaattgatatttttcaagtaaattggttgggataacttcttctatatccttgctataactatcaaaagcaagccgagtgtatttttgcatcgttttattgcgaagggttccttttaatctataaacgccttctaattcttcttcgttttcgacagcacctattttaattttgctggctgtaatttgggcgcggcttttatcccatttgccagaaatcgtcactgtttcgccaacgcttattttattttttaaatatggttggttgaaaaaatcgattttgatgacttgaccttctgttgacacgcggaaagaaagcttggattttttgtgaccgtaaaaggctacagttgcttcggttagcacttcgccttgaattgtaattcgttcttcatgcgctacttccgataaatcccgcaaccggtaatcttcatagcgatacgggaagttccatagcaaatcatgcacggtcgataaacctagctcttttaaagttttagctgtttcttcaccaattcctttgatttcagttgtcgggattcgtttaagttcactcacgtttatcttctggcgacaatccgaaaatcttccgctgaatggcgcgtccagtcggtgtagccgccaatcctccttctgccgtttctcttaaagagcttggcatttgtaaccctacgcggtgcattgcttcaatcacttcatcacatgggatacgacttttaatgcctgctagtgccatatcagctgaaataattgcttgcgaagaaccaagggcatttcttttcacacatggtacttctacaagtcctgctactggatcacacacaagcccaagcatatttttcattgtcatcgccatcgcatgtgcagattgttcgggggttcctcccgctgctgctacaatcgctgctgaagccattgcacttgcagaaccaatttccgcctgacaaccacccgctgccccacttataaacgcattattcgcaactacataaccaaatgctccagctgtgaataaaaagttaaccatgtcctcacgcgtcatatcaagacgatcttttaaagagaaaagtacgcctggtacaacgccagcgcttccagcagtgggagttgcacaaataacacccatcgctgcattgacttcatttgtagcaatcgcttttgctactgaatctagtaaaacttcaccagataagaagtttccttttttgatatagtcttgcataaggacagcatctccgcccgttaatccggtagttgaagtaacgcctgcttcaccttcatgaatagcttcttccataatatctaaattccgttccatcgcagcagttatttcctcccgcggtaaaccagaaatactcatttcacgtttaatcataatttcagcaatagttaggttctcgcgttcagcgatgtccactaattctgcaacagttctaaacattatcaacactcactttctatactcattaccaacatacctgatttacaactcaaaataaagccaaatgcacgttttatttacgcacatttggctttacacaaatcgagcgaaagccaccgatttactagagataagtaccaaaacgattaaatcattacgcttgctacttggtaaatccctggtaattcagcaattttgctaattaaatcttgttcaacttgttggtcaacttctattaccattaaagcttcgtcgccttttactttgcgcgatactttcatttgaccgatattaattttatggtcagcgattacggatgacactgctgcaatcgcgccaaatttgtcttgatgtaaaataaggatagctggagcagttccagtgaattctagctcaaattcgtttaagcgaataatttctactttgccgccaccaatcgatgcgccaattaaggtcatttgttgcataccatgttttaacactaatttgacagtgtttggatgaggcggctcttccacttcttcaataaattggatgcgcatgccccattcttctgcaagcttagcggattctttcatacgcggatcatctggctcaaaaccaagcaatccaccaatcagcgccacatctgttccgtggcctttatacgttttagcaaaagaaccatataaatgaatatctacttgggatggttgttcattaaaaacagctcgtgcaatggcaccaatacgactagcaccggcagtatgagaactcgatggaccaatcattactggaccaataatatcaaacacgctattaaatttcactaaaatcatcctttcttctattcatttaaaacaagtctttactctaccgcaaaaatatacgggtaaactggttggtcgccttcatgaatttctacttctacatctggaaaagcttctgttattttatctgctaaaagttctgcttttttagcatctgcatcttccccgaaaataatagtaacgatttcgctatcatcatcaagtaatttttctaatgtttcataagcagcttcttctaaagtttcgcggctgactttgattttaccttcaaccataccgataaaactgtcttttttaattacaacgccttccaccgtagtgtctcgaacagctgttgtaacttgaccacttgctacgtcctgaattgcttctctcatcgcttctgcattggaagtgaaatcttgttctggttggaaagtaagtacagcagtaagtccttgtggaattgttttagttgggatgatttgtactttatcttctccaagaatttgagccgcttgttctgcagccatttggatatttttattatttggaagaacaaaaacttgttctgcatttgctgattcaatggcttttacaatatcttctgtgcttggattcattgtttgaccaccagaaagaacaatggatacgcccatgctttcaaatagttttttcaatccttctcctgctgaaactgtaacgataccataaggagctttttccttggctggcgctttatcgtcgccaacgatttcattatgctgttcgcgcatattttctactttcattttaaggagactaccgtattgttgaccatagtttagaacttcaccaggatgttctacatgcacatgcacttttacaacttcatcatctgccgctacaagtaaagaatcacctagttcacttaagtcttggcggaattgttcttcatcaaaaggttttagccctggtttattttcgttaatcttcacaataatttctgtacaataaccaaaatgaatatcctcagtggacataaagtcttgcacatggcgatgatgttctgcattaattaattcgcccattgatgccatataatcaggtgcttcagccattttaccagtgagcactccgtaaaatccttcataaataataatcagaccttggccaccactatcaacaacgccaacttcttttaaaactggaagtaaatcaggcgttttttcaagggctacttttccttgtttcaaaattgcttccattactaattcgatttcttgatgttcatttgcggcaagaacacccgctttggcagcctcacgtgctacagttaaaatggttccttcgactggcttcattactgctttataagctgtctctacaccttttacaaaggcatttgcaaattcttctgcattaagtgtttctttattttctattgatttagaaaagcctcggaaaagttgggataagataacgccagaatttccacgcgctcccatcaacaagccttttgcaaggtttgctccaacggcactaattgtttctttgtcattttttgctacttcttctgctccacttgtcatggataaattcatatttgttcccgtgtcaccatctggaaccgggaaaacgtttaatgaatcaacaaaatcagcatttttcgctaaattttctgctccaagcgctatcattgctgcaaatttctctgggtctaactgatatatactcacttacataatcctccttatgattccttgattactcggacaccttgaacataaatattcactgattccactgtaataccgagtgttttttctagtgtgtatttcacgcgttcttggacgttatgagctacttctgaaattttagttccaaagctaacaatgatatacatgtcaatatgtataccttcttcttcttgtcttacaataacaccttttgtataattttctcttctaagaatatcggttaaaccatcacgaatttgatgtctacttgccatacctacaattccaaaattttcttcggcagcaccaccagcgattgttgcgataacatcactagtaatatcaattttgccaagctttgtgtcgatttcgattgccattctatattcctccctacggattatattctcgttcgattatttttttattattgtttttaattgctagtttagttgttcttacctattttactataatcacagccctttggaaagcatatcacaaatttggctgattaaatccgcatttatgctgtcaagtaaaaattctttgcactattttcgcatatcctcttgcaaagtatacttgtttatgataaattattctagtgtatgaaaaacaaaaggataggttattttaaataaattatccgaagagctctgtaaggaggggtaaactatggctaaagaatgtgttattacaggccgcaaatcacgttccggtaacaaacgttcccacgcaatgaactccagcaaacgtacttggaaagctaacttgcaaaaagtacggattctggttaacggcaaacctaaaaaagtttgggtatctgctcgtgcgcttaaatctggtaaagtggaacgcgtttaatcgaaggagaaatcaagtgcagcgacaatcatgtcggtgcattttttctttgtctaaaaataaaaaatacaggcgaaaatcacctgtatttctcattaatcattactttgtgttaataaaatcattccagttttaaaagaaaacgctccaatttgatcgacaaactcattactcgaaagtgccgaacctactgggtaagtggcattatcaagtggataaacgaatccttttagtgtaagtcctgtaacatctttcattgttgtgaatgctacatattttttatcaggcaatttttcaattgtatagcttcctggtgtatacattttgatatagttatagcgatcaatcatttctacaaccggcacagcgtctaagaatcgtggctttgttagcatcatcagattcgcaagtaagtggtctaaacggcctcctgttgctccaaaaatgcgtatcttatctggtttttgttccattgcccagcttagcccaatttctgtatctgtttcatccttttcggcaggaaattcatgtacatcagctacttttgtttttaaatgagctaattcttcttttgttaaagaatcaaaatctcccattgcaacggtcggaacaattcctctatctaacaaacgtttagccccgcggtctacgccaacccaactaatatctgtattcgtatattgtgttaaatcaggaatttctgacgcaggtccaccaaccatgatattaattattttcatatttgtgttcccttctttcctaacaaataaggctggaacgaaaagtctgtcccagcccccaaatattattcgcctacaatagctcgtaatttgtcaattggcgtttgacgatttttatttccataaatataacttccagctacaaaaacatttgcgccggcatctcgacataatttcgctgtttcatgatccacgccgccatctacttcgatttcgatgtctaagcctttttcatccacgatttttttgaaggcagaaattttttctagtacctctggaataaatttttgtccgccaaagcctggatttactgtcataaataaaaccatatctagttcatttaaaacatgttgtaatacgtcaattggtgttgcgggatttagtactgcacctgcttttactccgtacgaacggatgagttgtaatgtgcggtgaagatgcgtgcacgcttccacatgaacggtaatataatccgcgcctgcttttgcaaattcagggatgtatgtatcaggattttcaatcattaaatgaacatcaagtggtagttttgtttccggacgaatcgcttttacgacagcaggaccgaaagtgatatttggaacgaaatgtccgtccattacatcaacatggatataatccgcgccgtaattttctacttctttaatatctcttgcaagatttgcaaagtctgcacttaaaatcgaaggagctatttttcccatttttaatacctcggctttctgttttttaattcttgtaaaatttggatgtagtgtttgtagcgaaaatcggctatttcatttgcttcaacagctgtttttacagcgcaattcggctcattgtcatgcatgcaacctcggaatttacagccactacgacgatcttccatttctggaaaacaaaattgtaatgtttctggttgtaaatcatcccactcaatcgagctaaagccaggcgtatctgctacaaagccatcaccaatcggcattagttctacgtgtctagtcgtatgtttaccacgtccaagtgagttcgatatttcggccgtttttaaggttaaatcgctatttaaactatttaataaagtggacttacctacacccgattgcccggcaataactgctgtttttccgctaatgtagtctttaattgcttctttatctggttcatcattagttacaaaaacgtcgtagccaattgtttcatatacctctttataaaccgcaatttgttctttttccgcatctgttgctaaatccattttactaatacaaataacaggttggatgtcttctttttcgattgcgactaagaaacgatctgccaggtttgtagaaaaatctggttctactgccgaaaacacaagaatcgcaatatcgatgtttgccacgggagggcgaactagcgcattctcccgtgataacacatctaaaatataaccatccgtcttattttctacttgaaattctacgtcatcaccaactagcggggaaatatttcgttttctaaaatttccgcgcgccctgcattggtatattttcccttcagagaatacatagtaaaatccgctcaacgctttgataatttgtccttccagcacatttcctccgttctcttttttaatttggataagggactgtaccttcatcgattactttatcgtcactgatgattttgtagcctgcgctagaaccttcttcaatttggaaagtcacttctaccgaggtattttgggtaatattcatttctcggtatgcgcttgtcatactatgatctttgtcttgaatgtaaatttggactttctgtggttgtggattttcttcatcgcttggtgtataagggatgttaaatgtttttgtaacttctttaacttgtttttcttttggtccagcagaaataacgatttcaatagtatcgcctgcatttattgccgttccagctgatggggattgcgaaattacttgccctttttctactgagttggagttttcttctttactcgaaactttgagtccaagtggtgaagcataatcttctacagctgtttttgtatagccacgaaggtctttaagtgtaatcggttctgcgcctttacttacgacaaattttacatctgtcgacttagcaactacttccgttccttgagttggcgtttggctaataatcattcctttaccaacttcagaactatatgcttcttctgcagaaatattgttgaaaccttgctgctctagcaaagttttagtctcagagtaacttctaccagtatagtcttccatcgtaattttcttagaacctatacttacaaataaattgattttcgtgcctttttctttcatttcacccgctgatgggtccgtattaataactttgccttcttctacgtcatcgctatttttttctgctgttttaccaataacaaagccatctttttgcagtaaggcaattgcttggtcttctgttttaccagaaacatcaggtacagcgacttcatcaggacttttacctaaaagccataacagtaaaataccaataatgaaaagaacgattacggaagacacgattaaaataatcttctttttcttgctcatttttttcttctttttaccttttttatcgtctacagctacttcttctgcagctactttaccttctggaacgatggttttatctagattttgcatcgcttcttttgtggcgatgattggaattgtttttgtgtcgccatcatcatcattggttggaaaaacgtatttaggttcatttagacgatctttatttaagcaggtttgcaaatctttttccatttcttctgcgttttgataacgtaaaaatggatcttttgctgttgctttaataataatattttctaagctttgaggaatttctgggttttgggctcttgcagacggaatttctgcttgtaaatgtttgatagcgattgaaacagccgattctccgtcaaaaggtaccttcccagttaggagttcatataaaacaattccgagcgaatagatgtctgacttttgagttgccatcccaccgcgagcctgttctggtgataagtaatggacagagccaagtaaggaattcgtttgggtgatggatgtttcagaaagtgccatcgcaatcccaaaatcagtaatttttacgactccatcatgatcaattaaaatattttgtggttttaaatcgcgatgaataatgtgatgttgatgtgcgatagctactgctgaaacgatttgaagcatgatgtctacagctttatcatagctaattgggtgattttcttggatatactgttttaaatccatcccatccacatgttccatcactatatagtgtaaatcattttcttcgccaacatcgtacacactaacaatgttaggatgcactaagctagttgctgattgggcttcacgttgaaacctgcgaataaggttgctttcatccgctaaatcaatccgtaaaatttttacagctacatcgcggtcaagaattatatcatgcgcaagatagacattggccattccacccccgcctatcgcatgtaaaattttgtatcgatcatttagtcgcttaccaatcatcatgaagcatccctccctttctgcataagatttctttctactaacaacacagtgatattatcttctcccccgtaagaattcgcttttgtaataaatacatcggctttttcagaaagagttcgtttactttttaaaatttcttccatttcagcttctgggaccatattagtcaaaccatcggaacaaagtaataatgtatcgctcgtttgaaatggtactacaaatgtgtctacttctacttttccttctacgcctagtgctcgtaaaagaatgtttttccgcggatgattcatcgcatcttctttgctgatttcgccagttcttagaagttcgtgtacaagtgagtgatcttcagttaattgacgcattacatcgttttgaagtaaataacctcggctatcccctacattggcgataactacttgtgactgagccataattgctgcaacaagggttgtccccataccatttagatccatttcactttccgcgtaaagtacaatttctttattgacttcttggattgttttttgaagccatgtttcaatttcttctgcggttaaaagagcggtcgtttctttccacgcgtcgctaagtagacgaactgccatttcgctcgcaacatctcctgcgcggtgccctcccataccgtctgcaacaatgacaatcggctgcttatctttgttttcaaatacgccgccattatcttcattatgatgtcttattctgcctctgtctgttctaaattctgcatgcatttatacgcacctcactatttttcaggactcacttttcttaagctggaaacaaagaatccatcgcttccgatatctgttggtaaaagttgtacaaaatcgtccttcttaatttgtgccaatttttcaggaagtactacaggttctagtgcaaattctggatgtttttctaggaatgcgcgcaagactgtttcgttttcttccttgtcaatggtacaagtactataaactaatataccattttcttttactaattggctaacatcatctaaaattgctagttgaatttctgctaatttatgaatatctttttctgtttttgcgtatttaatatctggttttctgcgaagaacaccaaatcctgaacacggcgcatcgactaaaatacggtcaaacgtttctggttcaaacattgtgcttgcggttctcgcatctagatgagctgtacgaatgtttaaaagttgtaatcttttggcggcttgatcaatgagtttggttttcttttcatgaatatcaagtgcatgaaccattccagtaccatgcattttttcagctatatgggttgtttttccgcctggcgctgcacaagcatctagtacggttaaattgtcttctagttgaagcgcataggctacgagcatcgaactttcgtcttgaatgctacatttgccgtctttataagcttttgtttcagctacagagcctttttcaacgagtaaagcttcatcgataaattcgttgcgagtagcagtgataccttggtcatttaattctttgattagctgctcggcgcgaatttccgtttggttcacgcgtatactttgatgcggggctactaagaatgccagaccaatttcacgtagtttttcgagaccatattgatcagcccatcttctcgctaaccattctggcaagcttgtttcgacagcgattttttgtactgggtctttaattaaatcaatacttggtacgcctttacggataacatttcgtaataccccattgacaaatttcgtcacgccttgatgtccaaggtctttagcaatatcgcctgcttcatttaaaatggcgtgttctggaactttatctaaaaaggttaattggtaaacggacattcttaatagatttttcacccagttatctggttctttgtttagaaacggcgctaagtaataatcaagtgtgattttgcgctgtgtggttccgtatactaattctgttaaaagtcctttatcaagcgggtttaacttctgtttttttagcgcgtcgttaattaatagatggctgtatgattgattgttttcgattttaatgatgagctctaatgcaattgcacgaactgttttttgttttttcatttattcaccaaaccttgtcgtcttgcttagatttctgccagcaccagacatgaatgaatggatatccattttcggttttccagctggttggattactgttgggacaataagtgtgccgtcacctgctacgattttgagtgttgatttatctgttaaaatcgtgcccggttcgccgcttgtttttgtatcttcaaacgttgcttcccaaattttaaaaggtttttcttcaagtgtcgtataagcaactggccaaggcgaaagtccacgaatttggttaaaaatcgtccgtcctggttttgtccaattgattttctcttgctctctagaaatatttcgcgcaaaagttactttttctggatcttgtgctacagcggtaatttttcccgctaaaaagtcaggtaatgtatccattaataattctgcaccaagcttgcttaatttatcaaacatagtaccagtgttatcttcctctgtaataggaattttgcgctgacttatcatatcacccgcatccaatttttcaaccatatacataatcgtcacgccggtttctgtttttccgtcaagcagtgcataatggaccggagccccgccacgatattctggtaaaagtgatgcgtggacattaatcgcaccatgcttaggtgattcaagtagcgtattaggtagaatttgaccgtatgcggctgttacaagtaaatctgcttctaatgaaataagttcttctagctcgctagatgtgcgtaatttttctggttgataaactgggattcctaattccaaagctgctttttttacaggcggtggggttaaaattcgtttgcgtccaactggtcggtctggctgtgtgacaactgcaatcacatcataagcactagctaattgttctaaaactgggacagagaatgcaggtgttcccataaaaataatttttgtcatcggtttactccttttacattaatacgtatggttgtacgtcaatcgttatcgttaagcctttttgttgatctttttggtaatgggtgattagtgtttttagttctttttttaagtttggttcaattttatatttaataatacattggtaacgatatttgtttttaattcgggtaatagtgcttggtactgggccaagaataacggcatcaggacctaactttcctcgtaaaaactgcgccatttcttgaattgttcgaatggctttcatttcattttcatcgctgacattaatcatcgttaagtaataaaatggtggataagaacccattttcctgagcttcatttcgtgattataaaagccgataaagtcatgttgtttggcaaattcaatgctgtaatgctctgggttatagctttggacaactacttcgccagttcgctcatggcgccctgcccggccactaacttgggtgagcagttgaaaagttcgttctgaggcacgaaaatctggcaaatgaagcatggtgtccgcatttaatacgccaactaacgtaatatcaggaaaatctagccccttagcaatcatttgtgttcctagtaaaatatccgcttcatggttacgaaagcttttgagtaatttttcatgggcgccttttgttcttgttgtatctacatccattcggattacacgtgcttctggaatcagcttcgttaggctttcttctactttttgagtacctgttccaaaataacggatatgttcgccttcacagctaggacaatgcttagggacacgttcttcatgaccacagtaatgacatttcatttggttgctagactggtgataagtgagcgaaatatcacagttaggacattcgacaacataaccacaatcacgacacattacaaaagaagagtaaccacgacgatttagcattaaaacggtttgttcttttttggcaattcggtctttaattttctctaacaattcagtcgaaaattcagtgcggttttctttacgcaattcttcgcgcatatccacaactcgtacttccggcattgcacgatcattcactcggcttggaagttcaattaatgtataaacgccctttttcgctctagcaaaagattcaagagatggtgtggcactcccgagaacgactgggcattggtacttttctgcgcgccaaatcgctacgtctcttgcatgatagcgcggattatcttcttgtttataacttgcttcgtgctcttcatcaataataattattcctaaattttcaaatggtgcaaacacagcggaacgagctcctacaacaacacgtgcttctttccgttcgattttacgccattcatcgtatttttctccggaagaaagggcactgtggagtactgcaacttcactaccaaagcgacttttaaaacgttctaccatttgcggtgtaagggaaatttctggcactaaaacgatagcttctttaccttcttttaattttgcttcaattgtttgtaaatagatttcggtttttccacttccggtgacgccgtgtattaagaaggtttcttgctcggttgctgcaatgattttctcacaggctaacgcttgatctggtagcaactggagcgactcacttttttcaaattggtgattttcgtatggatcgcgtgaaatgattttttcttggatagtgagtatatttaaatctactaatttttttattgttgcatcggttgtttctgcttgtttttttagttctgcagcggcaatttcggttccttcaaatgcttgaaaaaatgctaatacacgtgattgtgctttggcgtttttaggcatatcttctattatttcagctagttggtgcggcgcttttaaacagctaacgacacgaacttttttgtttgtaattttatttttcacttggtagacgacttccacgctaccttctcttacccatttgccaatttctttgagtaagccgcgcgactctgctactttccaatcaagtgtttcatagccttcgaataatcgttctagcgcttcattttcttcatctaaacgtaaaaaatatttttcatacttcgcccgtagtgcagctggtaacatggcttgataagcagagacgcgaaaactaagggtatcctccgctaaccaatcacctagttccatcaattcctcgtttaatacaggcgccaaatccatgacagcctcaataccttttaatttcggattttcttctgtttcgccaagagaaatgacaaagccttgtattttacgatttccaaatgggacactcactcgcataccaggacgaataagatcttctaaatcttctggaataaagtaatcaaatggacgatccacttgcatggctggaacgtccacaataacttttgctatattaatcattcgttcacttccttaaaaagttagcggcttcttcgatgatatgttctgcaacttcttttttgtctagtaacggtaatgcctcattagatccatcttttcggtataaagtgacaatatttgtatctcctgaaaaacctgcgcctgcttcgctaatattatttgcgacaatcatatcggcatttttggacgtgagttttttaagtgcatttgtttctaggttttctgtttcagcagcaaagccaattactacttggtcagctgttttattttgtccgatttcaagtaaaatgtcttttgttcgtttcatttcaattgtaaaatcgcctggttgttttttgattttttgctctgaaacatttgctggcgtgtaatctgctacggctgctgtcatcacgaaaatatgctgttcggctttacgttctaaaacagcttgatacatctcatccgccgattcaacatataccgcttctacgcctggcggtacgggtagtgttttgcttgtcgtaataagcgttacatttgcaccgtgacgtgctgctgactcagctatactaaagcccattttccctgtagaatgatttgtaaagtatcgtactggatctaatttttcgcgagtcgcgccagctgttacgagtacttttttgccttgaagtaggtctttatcttcttgaaaaaattccgcaatacggagaacgattttttcgggttcttcgaggcgacctcggccaacatagccacatgccaagtaaccttcttctggttcaataaaacggacgccatctgcatatagtctgttaatgtttcgaataactgctggatgttgaatcatatggacgttcattgctggtgcaacccaaactggcgcttctgtagctagaatagtcgttgttaccatatcatcagcaataccatttgccattttaccaatcagatttgctgttgctggtgcgacaattactaaatcagcccagtcagctaaatcaatatgtgcaaccacactagattttttttcgtcaaaggtgtcggtatatacatcatttttggataatacttgaaacgaaagcggtggaacaaattcttgtgcgtgctcggtcatcatgactttaacgtttgcacctgcttgcgttaatttacttgtaagtgcgactgctttatagacagcaatgccacctgacactgcgagtaaaatattttttccttgcatcgataagtcacctcattttattataaaaaatcattagttctattataccttaaattaaggcaggacaaaaccatgaagaaactagatttctgcttatttttatgataagtccagctaacaaaaaagccccgcaatgaagcggagcagttaggcttatttctcgtcgttttgtaaaactaattttccagcgtgaatttcttctaacgctttaccaacaaatttatcagattggtagcttggtaatacacctttatcgttttctaattgcatgtagcgcgcacgtttagcagccacagtaactagcgaatattttgagtcgatttttagcaataaattatcaattgatggatataacatcattgtaatccctccaacatttttttgtagcgatgaattactcgctcggtttttaagtgttctgtttcgacaatgcctttgattttttgtacggcttttgatacgacatcattcaccacagcataatcataagacgccatcatttcaatttctttcttagctgtttccatgcgttcctcgacaacttccatcgattctgtaccgcgcccgataatccggtttttaagttcggataaatctggtggcgttaagaaaatgaaaattccttctggcatcgcttttcgaacttgcattgctccttgtacttcaatttcgagaaaaatgtctatcccagcggctagtttttcctcgacatattcaagcggagtgccgtaatagttaccgacgtactctgcatattctaacatttttccgtctttgatagcttgttcaaacacttctcgtgaacgaaaataataatcgacaccgtcttgttcgccttcacgaggaagacgcgttgtcatggaaatagaataatcaaaacttgtttccggatctttaaaaacagcttcccgaacagttcccttacctactccagatggacctgaaagtacaattaacagtcctctttctgtcatcatttcccctcctgcatatcattccacattttgcacttgttcccgaattttctctagcgtcgttttcatttcaaccacttgttcggtgatttttagagaacttgctttggatccaatagtattgatttcgcggttcatttcttggataagaaaatccagcttccgtccaattggttcttcgagtaaaataataccataaaattgctttaaatggctcttagttcgttctacttcttcattaatatctgccttttcaagtagcattgcgacttctgtaagaacgatactaggatcaaattggtcgcccacaacgttttgtaagcgagtttcaattttttcttgataatgtttttctgtatttggaatttcggcttgaatgatttccaaacttgtttcgagtgctgtaagatgttgtttgaaatatagcagtaattctgctccttccatacttctcatctcgtccagtcgctcggttgcgcgggcaagtgtgtctaaaactagtcgctctagctcgctacttgcttccacttcttcttcaatagaaagataagcttgttcttgaagtaaatcggtcattgtaggtaattcttgtaattcatatcgagcgcttgcttgtttaataaaacggtaatagctgtctgcgaggtcccaatcaatatgtagttcacgttttgaaatttgctctcctgtgatggaaaagaaacattcaattctaccacgtttgatttgcttacttatcgtcttttttaattttccttctaaataagcaagttgttttggcatccgaaaaagaaattcggagtagcggtggttgactgcttttaattcaatggttactttgaacgcttcaaattctttcgtagcacgcccaaatcccgtcatgcttttcaccatttggcaagacacctttcataacttaaagttccctctaagattacttgaaatttgttctgacttcttattataccaaagctacttcatgcatacaatacattttcggaatgtatgttaaaatagaaagtaactaactcaaaaaaggaatgaataactaatggcgtttgatgcaatgtttttaaaagcaatgacagaagaacttgcggaacatggtgaaagtggtcgtattatgaaaatccaccaaccattttcgcatgaacttgttttatatattcgaaaaaaccgtgaaaataaacgtctgctaatttcttcgcaccctagctatgcccgaattcagtggacagatgatattccagaaaatccagcaacaccaccaatgttttgtatgttactccggaaatatttagaaggagcaattattgagtctatcacgcaacttcctaatgaacggattttacaatttagtattcgcgggaaagatgatattggcgaaaaccgtttttgcgacttatttgtggaaattatggggcgccatagtaatattacccttgtcgatcgtgcgaaaaatgtgattgtcgactgtattaaacacgtctctccagcacaaaatagttaccggacacttttaccgggggcgacttacgtgttaccgcctgcatcagataaactgaacccattcgaggttaattcggagcaaattctggatagacttgattttacagcaggtcgaatcgacaaacaactcgtacaaaattttgcaggatttagtccattactcgctcgagaaattgtttttcgtgctggaaatttaacagccgactcacttgtttctgccttttttgaagtgattgggctagtgaatgagcatttaggaagtgccgctgttccaaacgaatggcggatccaaaataaggaagattattatttcttcccgctccgtcatgttgatgctgtgacaactgaattcgctaatttaagtgcccttttagatcatttttatatcggcaaagcgcgtcgtgaccgtgttcaccaatttgcacatgatttggaaaaactgatttctaatgaactctctagaagtaggctgaaaatcgaaaaactcgaaaacaccttacttgaaacagaaaaagcggacgtttaccgcatccaaggtgagcttctaacagccaatttacatttaatggagcgcggaatggaagaaattaccgtcgaaaatttttacgatgatatgaaaaaaatgacgatcccgcttgactctagaaaaacgccatctgccaatgcgcaaagttactttagtcgttatcaaaaattacgtaacgccgtcgaagtagtaaaagagcaaatcgtacttactaaagaagaaatttcttatttagagtccgttgaagcccaactagaaacttccggtccagaagatgtggaagaaattcgccaagaactagctgaacaaggctatcttcgttacaaacagaaaaaaggcagccgtaaaaaagctactttacccacacctgaaaaatacacttcttcaaccggcttatcaattttagtcgggaaaaataataaacaaaatgattatttaacgaataagttagctcgaaataatgaatactggttccatgtgaaggatttgcccggttcgcatgttgtgattcagtcaaataacccggatgagacttccattacagaagctgcgatgattgctgcctactactccaaagcacgtctttcagcaactgtcccagtcgacggcacacttgtaaaacacgttaaaaaaccaaatggcgctaaacctggttatgttatttacgataatcaaacaacatattttgtcacaccagatgaaacacttgttttagcgctgaaaaattaacggttccctcgcggagccgttttttctttcaaatttagggtagatattatactgactttacttttttattggaaggatgatagacaaatgaaaattttattaattggcgcttcaggtacgcttggttctgcggtgaaagaacgtttggagaaaaaagccgaagtgattactgctggtagacatagtggtgatgttaccgtggatataacaaatattgatagtataaaaaaaatgtacgaacaagtgggtaaggtagatgcgattgtttcagcaactgggagtgccactttttcacctttaacggaattaactccagagaaaaacgctgtgacaattagtagtaaattaggcgggcaaattaatctcgttttactaggaattgactcattaaatgataaaggaagctttacacttacgactgggattatgatggaagatccaatcgttcaaggggcttccgctgccatggctaacggtgcagtaactgcttttgcaaaatctgcggctattgaaatgccacgcggaattcggattaatacagtgagcccgaatgtactagaagaatcttgggataaactagaaccatttttcgaaggtttcctcccagttcctgctgcaaaagttgcccgtgcgtttgaaaaaagtgtttttggtgcacaaacgggtgaaagttatcaagtatattaataaaaaacagctcaccggtagaggtgagctgtttttttatttcccccaaacttctgggtttttcttccattctttcaaggttgccatatcttcagtagtaacgtaatttttatttaaagcgacttcaatcagttcgtcataatttgttaaagttactagttttgtattagattcttccagtagttttttacctttatctaatccatatgtaaagatggctgcgattcctagtacttccgctccagcttcttctaaagcctcaactgctttaagcgaacttccacctgttgaaatcaaatcttcaatcacaactactttttgtcctttagtaagtggcccttcgatttggttccctttgccatgttcttttgctttcgaacgcacgtagaccattggtaaatctagtaaatcgcttacccaagcggcgtgcgggattcctgccgtcgcggttcctgctacaacatctacttcgccaaaattttctttgattttttctgctaacgatttagcgataaattgacgaacttttggaaagcctagtgttagacgattatcacagtaaataggtgatttaatgccggaagcccaagtgaatggctcgtttggttttaaaaataccgctttaatttctaataattgttccgcaacttgtttttcaatactcatgcattccactccttcaaaacttgattatatgctgctactgggtcgtttgctcgagtgatagagcgaccaacgacgatattcgatgatccaatcgaacgagctttttcaggtgttacgacgcggatttgatcgtctgtcgcatcacttgctaatcgaatacctggcgttacgcgtaaaaagtcagaaccattttgtagtttaatttcgtctgcttcgagtgctgagcagacaacaccatctagccctgcttgtttggttaaatcactgtaatgtagcactgattcaagaagactagcctttactaattgttccttttgcatgtcggtttcacttgtactagtaagttgtgtcactgcgataagttttggacgtttgccacttgttgaacctatttcaagaccttcacgagcagcttccatcattttctttccgcctgatgcatgaacattcaccatatcaacacctagttttgccaaaccaatcatcgcacttttgaccgtatttggaatatcgtggagtttcaaatctagaaaaatagcatgattttgttgctttattttttcaacaatggctggaccgttactataaaaaagttccataccgacttttacggataaagattctccggaaaactgggctaaaaaagcctctacttcttggtaagtttgaaaatctagcgcgataattggtttattcattggtttagtagctcctttttaagttcttgtagagaagaaatgccgagttcgtccattctttttggcagttcggtaattaattttgggcaaataaagggatctgtaaaattcatcgttccgactgcgactgcatctgccccagcaattaagaattctagcacgtcatcaacggtttgcacgccgcccatgccgatgataggaatattacttacagcacgaacttgatgaatcatccggatagcaactggtttaatcgctggacctgaaagcccacctgtaccattagcgatgactggttttctagtttttaaatctatccgcataccgagtaacgtattaatcatcgttagtccatctgcccccgccgcttcaattgcttgggcgatggaaataatatccgctacattcggtgataattttacataaactggcacacttgcgacacttttcacggcttttgttaaacggtgcgctacttccggatctgttccaaaagcaatgccgccgtgtttcacatttgggcaagaaatattgagctcgattgcttttactgcttttgattccccgattcgggagcagacttgaacataatcgtcctccgtcgcacctgctacattggcgataatcggcgtttcaaattgctctaaaaatggtaattcatgggctaaaacatgttccaaaccaggattctgtaagccaattgcattaagcattccgctcgctgtttctgctactcgtggtgtgggatttccaagtctaggttctggtgtgactgcttttgccataatcgcaccaagttcatttaaatcatagtatttgctatattcttgtccgaatccaaaacacccagatgctggcataatcggattttttaaggataatcctggaatttctaccgctaatcgattcataaactcacctcatctgcacgaaatactgggccatcctcgcacactttaaattgcttcttcgtatccccagcttttggacaaacacatgcatagcaagctccaattccacaagccattcgttcttctaaagaaagatatgtttttgtttctggaaaacttgctttcacagcttgtaacatcgcttttggtccgcaactatagataacgtctggctcttctggaaaatttttcgtaatatccgtgacaaagccttgtgttccgtatgatccatcgactgtcgcaatatgcacagtgccgtattctgtcatttctttttcataaaaactgtctttttcagattggaacccgtttacaaacgtgacttgtacgcctttatcagctagctctttaccaagttgatacattggagggacaccaattccacccccgattaaaagagcggtttttggtgccggaatagtatttaaatcaaaaccttttccaagcggacctaacacatcgatagaatctccttttgaaagactactgaaatctttagtcccatctccttctacccggtataagagaatgcatgtctttgccgttttatcataagaacaaatactgattggtcgtctcattaataaatcagagcgacttggttttagcattaaaaactgccccggtgacatgtcggctacacattctcctgataagattaattcgtatactttatctgcaatttcggtttgctgaatgactttcatttccgtctgtaacacggttccaccccgtttcttctatttatacacgtgctttaggttgcttaacttcactggcattcattgattctagttcgaaggagcgtgattcaagtacacgcaagattgcttctgctgtatcaagcgacgtacaaactggaatgccattttcgacagattcacgacgaatttggaaaccatcacgttctggacgtttacctgtagttaaagtgttcactacgagcgtaacttggccgtttcgaatgtaatcaattaatgtttcttgattttcaccaatttttttcacttgtgaaactgggatttctgcttcttctagtgtgctggctgttccttttgtcgccatgatagtgaaaccgatgcgattaaatctcttagctagttcaactgcttcttctttatcacggtcagcaactgttagcagtactgtcccataatcatgcatcgttgttccacttgctacaaagcctttatagagagctttttcaagcgtaacgtctttccccataacttccccggttgatttcatttcaggtccaagtgatgtatcaacgctacgcaatttcgcgaaggagaacacgggtactttcacaaaaatttcttgtttttctggtgcaagtcccggcgtgtaaccaaggtcaatcaagttttctcctaaaataactcttgttgccacattcgccattgggatttccgtgattttacttaaaaatggtgctgtccggcttgagcgagggtttacttcgataacgaaaacttcttcaccgtcaacaacatactggatgttaagcataccgataatgtttaagccggttgcaagtctggtcgtataatctacaattgtatttttcacctgttcgcttaaacgttgtgctggatatacggcaatcgagtcaccagaatggacaccggcacgttcaatgtgttccatgattccagggattaatacattttcgccgtcgctgattgcgtcgacttctacttcttgaccgctaacataacgatcgactaacacaggatgtttcggattaacttttactgcatttgtcatataatgttttaacgcttcttcagattctacaatttccattgcccgtccaccaagtacataagatggtcgcactaagactgggtagccaatatccgttgctactttgatcgctgcttctacggaagtggctgtttttccagctggttgtgggatttgtaagatttctaatgctttttcaaaagcgtcgcggttttctgcacggtcggtatcttctaagcttgtaccaagaattttaactcctcgtttcgcaagcccatctgctaagttaatggcagtttgtccaccgaattgtacgacaacgccaagtggttgttcgatttcgattacatgcataacatcttctaaagtaagtggttcaaagtacagtttgtccgatatactaaagtcggtagagactgtttccgggttattgttgatgataatcgcctcgtaaccggcttgttgaattgcccagacggaatgtactgtcgcgtaatcaaattctaccccttgcccaatccgaatcggaccagagccaagtacaattacgctttctttacttgagcgtatcgactcattttcatcttcgtaggtgctatagaagtatggcgtagtggactcaaattcggccgcacatgtatccaccattttatatactgggaaaagattttgcgcttttcgtaagtcgtatattgcttgttcgtcgatattccagcaagtggcgataaacgcgtcagaaaaacctgctcgtttcgcttctgctaaaatttcttcgttttgcgggttttctttcaagcgattttctagttcgatcgttttacttaatttgtataggaagaataaatctatttttgttttcgcgtgtagttgttcgattgtttgaccacggcgcaatgctgctgctaagaagaataagcgatcatcttctgggaaacaaattttgcgttctaatgtttccgcgtcagcattttcagcttcttcgagtagtaaatggtcagcgccaatttcaagggaacgtactgcttttagaagggcttcttcccatgaacgaccgattgccataacttctccagttgctttcatttgtgtgccaaggcgacgatccgcttgttcgaacttatcaaaagcaaaccgtggaattttcgcaacaacataatctagcgttggttcaaaatgcgcgtaagttgttcctgttactggatttctaacttcatctagtgttaagccaactgcgatttttgctgctagttttgcaatcgggtaaccagttgctttcgaggcaagtgcggatgaacgactcacacgcgggtttacttcgattacatagtagttgtaactatccggatcaagtgctagctgaacattacagccaccttcaatttccagtgcgcggataatttttaatgaaacatcccgcaacagttggtattcacggtcggaaagtgtttgacttggtgcaacaacaatcgaatcgccggtatgtatgccaactgggtcaatattttccatgttacaaacaaccatcgcgttattgttcgcatcacgcattacttcatattctacttctttaaatccagcgatacttttttctagtaagcactgagttactgggcttaattttaatccgctagttactgtctcaattaattcttgttcattatggcatatcccgccgccagaaccacctaacgtataagccgggcgaacgataaccggatagccaattcgttctacaaaagtataagcttcgtctaaattatggataatatcgctttctggtactggctcacctagttcattcatcaaatcacggaaagcttcccggtcttccgctttttttatcgctgtcaaatcagttccaagtacttccacattacattcatccaaaatccccgcagctgaaagttccatcgccatgtttaaccccgtttgtcctccaagcgtaggtaaaatggcatccggacgttctttacgaatgatgcgcgatacaaaatcaagtgtaattggctcaatgtatactttgtcagccatttctgcgtctgtcataatcgtcgctggattcgagttcactaatactacccgataaccttcttcttttaagcttaagcaggcttgagttcccgcatagtcaaactccgctgcttgtccaataacaatcgggccagagccgattacaagaattgtttttatatcgtcacgtttaggcatgtaattcaccctcctctttcacattcatcatttccataaattcgtcaaacaagtagttaacgtcacttggacctgggtttgcttctggatgatattgtacggtatacgcttggtattccttgtgtgcaaggccttccactgtttcatcgtttaattcaatatgcgttacttttaaatcagtgccgataagcgattccttttctaccgcataaccgtgattttgcgcagtgaagtcaacgcggccggttgctagttcttttactggatgattcgcgccacggtgaccgaacttcaatttaaacgtatctgctccgtttgctagtgcaaatagttggtgccctaagcagattccaaataatggcagtttaccttgaataccgcgaatcatttctagcgcttcgggtacgtctttcgggtcaccaggtccgtttgataacatcacgccatctggatgcatggcaaggatttcttcggcagttgtattataaggaacaaccgtcacataacaattacgtttattcagttctcgtaaaatcgagcttttcacaccataatccacaaggacaactcgtttaccatcgcctggacttgcaaaagctttagccgaagatacttcatgtacttggtcaacaggcaagcgtacagaacgaagatggtgtagcaattcctctttgtctgctgttgctgctgataaaattccttttagcgtgccttctttacgaattaatttcgttaatttacgcgtatcaattcccgcgattccaggaatgcctttttcttttaaaaattcatttaaagtaatttggttgcgccagttggatggatactctgcggcttcacgcacaacgactcctttaacagctggattaatggattcaaaatcatcgcggttcacaccgtagtttccaacaagtggatacgtaaaagtgataatttgcccataatatgaagggtctgtgattgtttcttggtagccagtcattcccgtattaaaaacaacttcaccgattgtttctttttcactaccaattgcatcaccgataaagtaattgccatcttctagcattaaaattcgctttgtcatttgttttccccctcattgtatacaagttctccttctgcaaacgttgctaccggccagccgatacacgtttctccaacaaatggtgtattttttccttttgagtaaaaagtagctggatcaatagttgcttctttttctaaatcaagtacgacaatatctgctactgcgccttcttctagttttccgtatgggagtttaaagcactctgctggcttcactgtcatccagtcgataagttgttttaacgtccattcgttcgttttgacaaaatgggtgtatagcagcgggaaagccgtttctaaaccaacaataccaaatgcggcttgctccattgggacatttttttcttccgctgcgtgtggtgcgtggtcagttgcgataaaatcaatcgttccatctagtaatccttctaaaagtgctgcgcgatcttctttgctgcgaagtggtggattcattttccagttgccgtcatttcccggaatgtcctcttcgtcgagtatcaagtgatgtggcgaaacttctgctgtgacacgaatacccgctcgttttgcatcacgtaccacgcgaacagattctttagtcgaaatatggcaaacatgatagtgacagccggctgcttctgctagtaaaacatcacgcgcgatttgaaccgattctgcaatgtttggaatgcctttaagtccttctttttcagcaaaaatcccgtcgtggaccactccgccgtaaatgagcgagttgtcttcacagtgagcaacgattgccatatctagtgctgctgctcgtttcattgcctcatacattgttccggctagctgtacgcccacgccatcatctgtaaaagcaaatgctccagcttcttttaaagcttcaaaatctactagctcgtccgttccaagactcgttgtaatggatgcgtatggtaacactcgaacttctgctgtttctttaatttttgcttgtaaactgttcattacttctttggaatctggaacaggttttgtattaggcatcgaacaaatcgttgtataacctccgcgtgctgctgcttttgttcctgtcaaaatggtttctttatgttctccgcctggttcgcgaagatgtacgtgaacatcgataaagcctggtgcgattagttttcccgttgcatcaaattcttcgccacttgttacttcaatcgaatctgcaatcaagttgactttgccgttttgaataagtacatctttgttctctagttcgcctgattcatttaacacttgaccattttttaatacgtacatactttcgccctcatttcctgttcttttaaaattgattccaaaattgccattcttataaaaacgccatttgtcatttgcgtaacaatgcgtgatttttcgctttcaactaagctatcagcaatttcaacgtcgcggttcactgggcttgggtgcatgatgattgcatcttgttttaatttcgctgcccgttcaaccgtaagtccaaatttttcgtgataacttgcttttgtaaattgttctgttccactatgtcgctcatgttgtacacgcaacagcatcatcacatcgactttttcaacaatctcatcgacgggtaggtatgtgccgtattctaagtagctatcatcaaaccattctttcggtccggagaaaaacaacttcgctccaagtctttttaatactttcatatttgagttcgctaccctgctgtgtcttatatcgccagcaatcgccacttttaaatcttgaaaagtcccaaattgttcttttatcgtgaataagtctagtagtgattgactcggatgttccccgcagccatctccgccgtttacgatagcaatatttaatttatcaagtccggcatagtagttttcttcagaatgtctgataactgctacatttactccgacagcttccatagttaacagtgtgtcgtaaagcgtttcgccctttgtcatgctagaagttgctgcgtcaaaggacacaacctctactcctaactttttctctgctacttcaaaactcgtatgcgttctagtacttggttcaaaaaacatatttactgcaaaagcttgttctttcaaagttgctttttttccgtgcttaaactgtgccgcctgctctaataaatgctcgatttcatggacggttaatgcttccattgacaacaaatttttcattcaaagcgccaccttttctcattcattttatacaaaaacctctgtgaaattttgtctgcagaggttttttgtggtgtgttatgctgatttatgctcggctggtaagactaagtttaagataatcccaatgactgctgcgagtgccataccagatagttcgaacgttccagctttaatgaacaagccgccaattcctactactagtacaacagaagcgataatcatattacgattgacacttaaatcaattttgttttcaatcatcattcgaagtccacttgtcgcaataaccccaaagagtagcagggaaattccgcctagaactgctgttggaaccgaggtgataactgcattaatgtagccgataaatccgaagaggatagcgaaaactgccgcgcctcctataacaaacacgctatatacttttgtaattgctagaacaccaatgttttcaccgtatgttgttacaggtggtccaccgattaacgatgcgataaccgaagcagtaccatccgcaagcaaggaacgatgaagtcctggatctttgaaaaagtttttatttgtgattcgattaagtagtaattgatgccccatatgttctgccatcgtaacaaacgctagtggcgccatactaaggatgactgtaacagtaataactgggtcgatatttacaaatggaatactgaaatctggtacttggaaaaacgaggcatttttgattaacgtgtaatctaccataccgaaagccatacttgttaagtaacctactgtgaagccaaacaaaatcggaatcaagcccataaatcctttgaaaaacatcatggcgattatggttgcaaggagcgtgattattgctacagttaaagtttctaaactatatttaccattgttcgttcccatcgccatcgcagccgcacttggagctagcgacaaaccgataaccataataactggtccaacaacaattggcggtaatactttttgaatccaatcaacacctgcgtaataaacaatcaaagaaacaattgcataaactactccgactgagaaagttccgaccataactgcgcccggccctccgccagattttgctgcaagtaatgctgtaattggtgcaataaaggtaaaggaagaacctagatatgcggggattttcccgcgagtaattcctagataagcaagtgtcccgagcccgctagatacaagcgccactcccggacttaaccctgtcacacttggcacaaagatagtagagccaaacatggtgaaaaggtgctggatgctaagaataatccatttattaaagcttggtttttcgtgtatatctagtactggttttgtcactgtttctgtcgtttctgtcattttcttccctctttcttcataaaaaataccccttgcctcggtcgacaaagagtatagaataatcccctatagaaattaatcactctttgtcagcctcacaggactgcttttaaaaaagtgttacattgttattcatttttgttgataataaccgcatcttctgaatgatccacatcggtcaaacgcacttctactcgctcgttacctgatgttggaatatttttccctacgtagtctgctctgattggaagctctctatgaccccgatcagccagtactgcaaggtgaatttgcgcaggtctacctacatccattaatgcgtccattgcggcacgcacagttcgacctgtataaagcacatcatctacaagaacgactttttttccattaatatcaaatggaatgttcgtcccatgtacagcgggttcgcgcgttttatcatctttgaaagataagtcatcgcgataaagcgtaatgtcaatatccccgactggcacgtcaataccttcaatttcaagtatccgcttatgcaaacgctccgcaagataaataccacgagtcttaataccgacaagcgctaaattctttgtccctttgtttcgttcgatgatttcgtaactaacccgggtaagcgcgcgtttgattgccgcctcgtccatgacaactacttgtttttgcatccgaaatctctccttttgtgcaaaaaaataaccctctgccagtgtaagcaagggaacgcgtacgagtatacaaataacccgtcaaattatcgtcaccttcttagcctctctggactatgttaaaggactttatttcattagattcatcttacctgaaagaactctccctgtcaatcaaaaaaatataaaacatgttatactgtttataataaaataaaggaggccaaaattatggctacatctaaagcgaaaaagaaacgccaaaaactagtgcgtgaaggtcgtttaaatccagaaatcaaacgaagcccctttgcactaattgacctaagctccaagcaaacaaaaactaaaaaaggatatctttatagtaggaaaaagaagaatcaccaagaagatgattcttttttttgcggttttttttaagttttcacattttatacataaaacggtttaaaataatgggctcactctagaaattattcctctttttttatgctttatgctatgctttaatagctaaaaaaacatctacttaagaggtgaatagaatgagcattatgaatagtttattacaacagaaagaaaccgtcgttaaaggttggcttacgtattatgtatctgtggatgatccatatgtttttgccttaaaagatgaccaccgcctaatggacgaaaccggttttgtcttggaaaatttatttattggtatgaccgaagaccttgcaaaaatgaatacattcgctcgtgaattaggaaaggcacaatttattacatcacttggcatttcacgcattttatttcatattcgtttactagaagaatttttactagattatgcctcggaaataaatgcagaatgtaataattaccgcgagttatatctttttagcatcaaactccaccaagtatttagtagtttcacacaacatttaatcgaaggatacacactcgctacagaacaattagtccaacaaaaagaaaaccaaatcatcaaaagttcaacaaaactaatttggcttgctgaaaaagtatttcttttgccacttataggaaaaataacggatgaacgggcaaaacaaattaccgaaacggctctttttgaaacgtgcgaacaacccgtaaactatttgattattgacttatctggcgtacaatttgattcagctaatattggcgaatatattgagcacttcttctcttcactcaaacttgtcggagtgacaccaatcattaccggaatgcagccggaaaccgccaaaataatggtacaagccaacttgaccgagcaaaaaggcattaaaacatttgctactttacgtcaagcaactaaatcacttatcaaagaaaaagaagcaagaaacgccattaaataggcattcttgcttcttttttagttttcttgtcgtaatgatttaagcgcttgttcaaaagaatctggtagtggagcttcaaaggtcattcgttcatttgtcgtcggatgatcaaatcctagtttggccgcatgaaggaattgtccattaccttttattgtattttttggtccgtattttggatcaccagctagcggatgaccaatatatttaaggtggacacgaatttggtgtgtcctccccgtgtcaagcttacagttaataagagtataaccaggcaaacgctcaattacttcaaaatgagtccgcgcttctttgccgtcacgaacaacagccattttttgacggtcttcttttgctcgaccaattggcgcttcaatcgttcctttttgatggacaatatcaccatggacgagtgcgatatattctcgatcagatgttttatcttttaattgtttggctagtgattcatgcgcatggtcgtttttcgcaaccataagcaatcccgatgtatctttatcaattcggtgaacaatccctggacgaattttaccatttataccagataaatcatcacaatgaaataataaagcatttacaagcgttccactcgcatgaccagctgatggatgaaccaccattccttcaggtttatttacaacgagcatatctttgtcttcaaaataaatatcaagtggaatatcttcggctaaaatctccagttcttctggttcacgagcttcataacgaatttcgtctcctacttgaactttataattcggcttcgcaagttctccgtttaccgttatatcgccattttttagcataagttgtatcgctgaacgacttttttccatcatttcagcaataactttatccacacgttcccgggcgtgactctcttctataatcaatgtttcattctgcattatttaattcctttcgttttgcggtcgtctacaaaaacatacacgagcattagtacgacaccaactgaaagcgcggcatctgccacattaaagattgggaagtaataatttccccacactgtttgtacaaaatccaccacttcttgatgcaagatccggtcgataaaattaccaatcgcaccacctagaataaacgctaaactaatggaaaatagtcgctttcctttggcatatttttgcataatataaattataattccaataacgattacagtaataagatagaaaaaccacatatgcccttctaaaatactccaagctgctccgtcattacgatagcttgtccagtataaaaatccaggaataacttctattttctgtccaatttccatgttttgaacaacaatccatttagtcaattggtctagcgcaatcacggctagggtgattagataataatacatttttcgaaccctcttttcacatcagttagataaaaagtacgcgctcccctttaaacttaagaagagcgcattgcttctttgttattgtatgataaattgaagcaaaaataaagctgcaatcacatacatgactggtgaagtacgttcttcgttcttcgtaaaagcgcgaagaattggatacgcgataaaaccagccgcaattccgtctgcaatactatacgtcagcgggattaacacaataatcagtagtgctgaaaaagtttctgccggattggataaatccatttctttaaattcttgcagcatcgacatcccaattacaactaaaatgggcgcgattgcactgttcggaataaaagataataccggcattaagaaaagggatgcgataaagaacagaccagtcgttattgttgccagaccggtttttgctccactcgcaaacatcgaaccactttcaagcgcagagatggttggacttgtaccaaataagccagataaaaaggcagttagggagctcgcttttaaaacgcgtggtaatttttcggtttgttttagttgtcttacttgaccatttgtaagaccaaccgtttcaaacacaatgaccattgtcatcgtaaagacggcgctccaaaaactaacgctcgccatcccagaaaaatcagctttaaagagaacatcactccacggcgcaacactaatcgaagcgccatcagctttcccggttacaccaaacattactccaacaagtgttccgataattaaactccataagaaagtgcctggaatttttcggataactaaaatcattgttagtaaaagtgtaactagtgttgctaagacgaatggatcgcttaaatctccaactgcaattatggcatgtttcccacttgttacgattccgcctttttcaagccctaggaagattaagaaaatacctaacccgaccgtaatggcttgttttaaaatgagcgggatagctttatttagttttcctgcaagtggtgtgaacgcaagaatcataaataataagccactcatcgtaacagcagcaagtgcaacctgccaacttagtcccattccttgaacaagggtatacgcaaacagcgcattaatccccattcctggcattagaataagtggtgcatttgcccaaaatcccataatcaaacaacctaacgccgaaataaaaatcgtcgcaaggactgctccttgataaggaactccagcctcagctaaaatcgagctattgacgacaataatatatgccaccgtaaaaaagccaatcataccagctaaaaattcagtccggatattggttttatgctcgttcagccgaaatactttgttgaaaaatttctgcatactttttcctcattatgaaattgtccctctcccaacccgcagagtattgcccctgccacagaactttattataacaaagatagtacatatacgaaaggaaaagttttttgttacgccgccagattgccttatttatgctataatctttaaggatgtaaaaaggagatgattacttgcaacaaacagtcacatacggagctaaatggaaacagtttttaacgatattcacaccgattgtcattacgcaactcacgcttttctccatgacattttttgatacaacgatgagcggaaattattcgaatcaggcgctggctggtgtagcgattggtagttcattttgggctccagtgaatgccgctttttctgggttattaatggctatcacaccaattatcgctcaattaatcggggcgaagaaagaaaaacaagtcaaaaacaccgtgcataatggtttatatattgctttatttttagcttttattttaattcttattaattttttagtcgttccaacgattttgacgcatatgcctgtcaccgcagaagttgcgcatatcgctcgccacttcttaaatgggatatgtattgggattcccgctttttttatttcagcgattttacgctcattcattgattcgcttggtttgaccagagtcaccatgttaattacgctttgtacagttccgtttaatatctttttaaattactgctttatttttgggaacttcggttttccggaaatgggtggtgctggtagtggttatgcgacggggattacgtactggctcgttgttttagttagtgtgattctgattcaaacacaaacgagattgcgtaaattcggtatttttaaaggcctcacagcgcttcgtttttccaaagtaaaagaaattatcgggattggagtgccaaatgggttaacaattttatttgaaacgagtattttctcagcggtgacgattttaatgggtgcttttgggacggagacgattgcagcgcatcaatcagccaatagtgtttgtaccttgctttatgcgtttcctcttagtgttgcttccactctgacaatacttggtggttacgaaacaggcgcaaaacggttaaaagatgccaaacaatatcgccatattggtatgacggcagcgattctaattggctgtattaatggagcgatactgtttttcttccgtgatattattgctggcttctacacgaatgacgcagaattaagtgatttaattatgcatttcttagtatatgcgatattatttcaatttgcagatgccgttttatcacctgttcttggggcgcttcggggttataaagatgttgcaattacctcgattatcgcctttatctcctattggttaattggactcccagtaggttacgggttatcctttacaaatttaggaccatttggttactggataggattgagtactggcttgtttgtcgccgcgtttattttatccattcgggttcgtaaaacggaacgtaagctttctttaaatgcaaaaaacgcagagatttcgagttaatctctgcgtttttttatttagctaaaccatcatgaattttatcaagattatagcgcatcatttctaaataagtgtcgccttcttcgccttttttcgcagtagaatccgtgaagattttagcgaaaattggtacgccggtttctttagatacactttccatactgcgcggatccacgctcgtttcgacaaataagttaggtactcgctctttttcaacgatactaataatttgtttcatttggtcaggtgtgccttgactttccgtgttgatttcccaaatgtacgcagcttttaaaccatagcgagcagcaaaatatttaaatgccccttcacttgtcactaatgttttttgattttctggtaaatctgcaaatttttgttttgcctctttatccagtgttgctagtttatcgatatattttttggcgttttctttataaaaattagcattgtctggatcagcctttacaagggcatcgcgtacattttccgtataaataataccgttatgaagatctaaccaagcgtgcgggtctgtttcagaagtctttcctttttctgttaaatattttggttttacccctttacttaactcgactacttggtctttgtcatctcttgatttatcagctgtttcgagcattcggtcaaaccaaccattcccagtttctaagtttaagccattgtaaaaaattaaatctgcatctgctgcgctttgaatattatctggcaaaggatcatattcatgcgggtcaacgccaaccggtacgatgctatggagttcaattttatccccaccgacattttttacaatatccgctaaaatggagtaggtagccaccacatttaatttgtcccctgtttttttcgtgtcgctattttggcttgaacaccccgccagtactaatactaaagcgaaaagcgtcccaactataacttttttcattcgataacctccttctttttagaaaacaataatccttgttttggtgcgaataaaaaggcaataaagaaaataattgttgcaactaataccattgccgcacctgatgctaagttgaaaatgtaactgaaataaagtccaataattgcactcactgcgccaaatgtggaagcgagcataatcattttagataatttatttgtgaggagatacgctgttgcagctggtgtaattaacattgccactactaagataattccaactgtttgtaaggccgaaaccgtcacaagtgtcagcagtagcattaagaagtagtgtaagaaccgcacatttaaaccgtatgcttctgccatcacaggatcaaatgagcttactagaaattctttataaaatattgcgactagcgaaataaccagtatcgcgataataattgtcatccacatatccgaactccgcaccgcaagcacatttccgaataagatatggtacaaatcggtactactcttcgcaaatgaaattaaaataatcccgagcgcgaaaaatgcactaaacacgatgccgattgctgtatcatttttaatccgacttttttgattaacaaagccgatgccaagtgctgctgcaatgccgaatgttgctgcacctatgaagaagttcatccccatcatataagaaattgctacaccaggtaacaccgcatgagagatcgcatcacccattaacgacattcctcgcaaaatgataaaactaccaattacacctgatacaataccaactgtcacggaagtaataagcgctttttgtaaaaaaccatattgcattaatccttctaaaaacagcatctctacacccccgccgcaaatgctaccggtgcgtcaccataagcaaattgaattttttcttctgtaaatgtttgttctaccggaccgtgtgccactaattttttattgagtaaaataatgtcatcaaagtaagcagctactttatgaaaatcatggtggacgactacgatagtttttccgttatctcttagcttttttaacaatttcataataagcgcttcgctagccatatcaatgccagcaaatggttcatctaaaaagaagatttccgcatgttgcgctaaggcacgagcaataaacacacgctgcaattgaccacctgacagttcgccgatttgtcttttactaaatgccgtcatctccacttgttctaaagcatcaaatgccagctgtttttcttttttaccagggcgttttattaatcccagggccggataagtaccaagaagtaccatatcaaaaacagtgattggaaaagttaaatctacttcactacgctgcgggacataagcgattttctttctccaataagtgagaggcttattatctaatgttacttggcctttttcgcgtggaactaatcccatcattccttttaataatgtagatttaccagcaccattgggaccgacaatcccagttaattttcctgttgctatttgaagagtgacatcatcaatcgccactttttgtttatatgctatcgttaaaccttgaatgttcatttctaccacccttttcccataagactattttttatacttaactaaaaatgtttccttaatgcaactttaatccaaagtataacgaacaattatttttttgtaaagtaaaatgtctaaaaaaatcctgtagttttattaactacaggatttttactatttatttgattgtgagccatctgctaatttttttagtaatttgcggaattccgcttgttcgtactcggaaaaaacagcaaaacgtttaacaatcatttcttttttctttttatcaatttctttgacaaattcctcggcattagatgttaattttaattcgataatacggcggtctacttcagaacgatgacgagtaattaatttctcttcgactaaagtatctgtaatggctgtgatgtgactggctgaaacatcaagcgttttagctaaatcagatgttttcgttaatccgctagaaataagactcaagacacggtattcgctaccgcttagtcttttgtcaagaacagcttctacctcatgacgaaaactattaaaaattcgcttaatcaatgtttcaatttctaagtatgtttccatttttttgctacctccagtttttcaaaaaagttatgcgtttacttcaccaaggcttttgctttttgtagttgtggatctgtttcttttagatgtttttgcgttagttcaactaatttatccgttgtcacgccggtcataattcccgtaacatctaaattatttgctgcttgaaatctttgtactgcatattctgtatctatatcgtataagccatctacttttccaacgttgtagtctagcgcttttagcaatgtttcgattgttttcacatcatcaccaaaatcgccatttttgtagacttttgtggaggaaggaatagtcatggtcgcgtaacttggcatgttcacaaccacatctggcgtaatacctttttcatgaatccattcgctatttggcgtcaaccattttgcgactgttaatttaagtgtggagtcatcagataaagtggtcgctgtttgcacagtacctttaccaaacgatttatttcctacaagtttaatgccgccagattctttcgctgctgctgccagaatttctgatgcacttgcactcccaccatctataagcattgttgttggtactttaactttataatcaccatgtgagctgctatcggctttaatggcggatttatcgccatcttttccttgttcttgaacgacaattttgccatcaggaacaaataaactagaaatagagactgcttgatcgagtaacccacctggatttcctcgtaaatcaatcacaagtcctttcataccatctttttccaaagcttttaatgctttttcaagctcatcataggtattttcagagaaggtactaatagttacgtgggcgattttgtcattacccatttctttatagaccgtttcgattggaatttcgtcacgtgtaatagttacgtcaaacggtttatcttcatttgaacgttggatagttaaagtgacatccgttcctttttcaccacggatttttttagttgcttctgtcgctgtatcgcctttgacagatttaccatcaacttgtgtaataatatcttgaggtcgcaaaccagctttttcagccggggagtttttaattggagagacaactacgatagctccatctttttcttgaatttcagcaccaattccttcaaagctagaagaaattgtgtcattaaattccgccgattcttttttcgacataaaagtggaatacggatcatctaaggaatttaccatacctgtgattgctccatctatcatgttagtggatttcgtgtctttatagtatttctcagagatttcatcatagacatcatagagctttgtgaattcttttcgctctgggatgctgactttcacttgcttatcatcccctaaagacatgacgatcgttgttactaatgcggtaacaaatacaaaagcaaataaaagcattataaatgggaataatttcatttttatataaccattgccaggttttgttttttcttcttcgggtttctccactttttcttctttgttttgtggggattgttccatctttcttcaccactttctatgtaaaatgtaactaataatagtacattttatttaactcatttattttaccagttttccaaacattttggtatctttttttcatgacaaagaaaaaagagggattcactcaggaatccctctcgcttctaaacttaagctacttcatatcctgcttcttctacagcatcaattaaagcatcttcagttacttgacctttttcgaattcaaccgttgctgttccttcatccaaagaaactacagcgctttttacaccacttacttctgataaagctttggtgacgcgagcctcgcagtgtccacaagtcataccttctacagttaatgttaatttttccattttcttttcctcctatgatttaaatttatatctttttaggcgtagtgcgttagttacaaccgaaacggaactaaatgccatcgcaagtccggctacccatggggcaagtaagccaagtgcagctactggaatacccgcacagttataagcaagtgcccagaaaaagttttgtcggatgtttcgcatcgttgcttttgaaagttcgattgtttctggaataagtgttaaacggtgacttacgagcgttacatcaccagtttcaatcgcaatatctgttcccgttccaatactaatgccaatatcactcgctgcaagagctggagcatcattaataccatcgccaacaaatgcaacaatatgtccttcttgttgtagtttttctactaatgcgcttttatcgtttggtagttgttcggcaaaaaacatatctgctcctaaatctttcgccatattttctactacgacagattggtcgccggaacaaatagctgttttaataccttgtgcttgcagtttttgaattgcttcttttgcctctggtcgcggtgtatcggataaagcaagtgccccggcataagtaccgtctattgccattgctacaaccgttttccctgcattcatccaactttggattaattcatcttcttcgctcgggatagttgtaagtgaagacacatagcgataagcgcctagttccactttactatcatccaaattacctgtcatcccatgtccagctttggcgcggatttttccttgttttacatctgatacatcgattttttcagattctaacatgttgataatcgctttggcaattggatgttctgattgttgttccatcaagaataaataagggaaaaatttatcgttgcttgcttttttatcacttacttctaatttaccttctgtcaaagtacctgttttatcaaaaacaattgtgtcgactttggaagtacgttctaaatgttccccgcctttaaataatatcccactttcggcgcctttaccagttccggccataatcgctgttggtgttgcgagcccaagagcacagggacaagcaataactaaaacagcaattgcagcttctaatgatccatctaccgtgcctgttacaaggtaccaaataataaatgttacagctgcaattccaagtacaatcggtacaaaaatacccgagattttatctgccaaacgttgaattggcgctttaattccttgcgcttcttccactaaacgaataatcgattctaaaacggtttcttccattcgtttcgtaatttttgcttggaaagctccgtcaaagttgatagtcgctccaataacagaatcacctggttttttctctacaggcacgggttcaccagtaatcatcgcttcatcaatgcttgtttctccggagataatttctgcatccattggcactttttcaccaggacgaactagaataatatcaccaattttgagagaatctactggtactaaccattctttgccttcacgaataacagttgcttctttcgcttgtagttcgagtaatccggcaatagattctgtcgttctcgaagttgcatatgattcgagtaatttacctaataagatcaacgtaatcaatacagcacttgtttcaaagtaataatgcggcatcacgcttggatcaatcatatgacggatatattccactacactataaaagtaagctgcggatgtaccaagtgcgactaaaacgtccatattcgcgcttttacctcgaagcgccttataagccccatcataaaaccgccaaccaatataaaattggacaatggttgcgagtactaattgaatggttggattaatccagttaccaattgtttccgcaaacgccatttcatgaatatacggaatgtgagtaaccatcgttaaaagtaatggcagtgagagcaccgctgaaagaataaaccttctcacttcttttttgaaattcttttctaaaacggcgtctttttcttcttttgacattttttctgcagcatcataaccagcatgcttcacgactttgattaattcttctgtcgtggtcacttctggatcataatacacagccgcattttcagtgactaaattgacattggctttttcaacaccttctgctttatttaaagatttctcaattcttgttgaacaagccgcacatgtcattccaaaaacattcaaatcttgtcttacatatttatcattcactctaaatacccccctcaggttttagaaaactgacgtatagccttaagtaagtcctccattacgtcatcttctccgttttttgcagcatccacgacacagtgtgctgtatgatgttctaatacttgcaagccaacatttttaagtgctttattcgctgctgaaatttgaactaagatgtctgtacaatatctatcatcctcgaccatttgagcgataccgcgaatttggccttcgatacgtcgcaaacgattttgaagtaatttcgtttcttcatctttgcgtggaacaatgggttggtcatgtttcatattttctcctcctttgtttctacaattaacagtataccccctataggtatattttgcaaacatttaatttttaaaaataaaaaaagaaccataaacaactaaatgtttatggctctaaagcttgttattttgcggcatctactttcttttgtagtgctttaacatgttcaaaaaattcttctaatgtccagttgtttttgtaaatgattgttgcagcgtctttgccaacataacgataatgccaagattcgtattgatatttcgtaatatcttctctacctttcatataacgaaggataaagccgtaattatgggcattttcttctaaccatttaccttctggggtagttccaaatgcttcagttagttcatatgattgattttctgaggaaatatccattgctaatccagtttggtgctcacttgttccagggtaagccactgcttctctagcttttttatcccctttggaatttacttcagcttggaatacctcttgttgtcgtttataagaacgataacccgacacagcaaaaagtttcttaccatcttgatttgctgctttgaacatttcttcaagggctgttcctgcttcttttcttaattgcgctttttctacttgttcattcccaaaagaaaaagtaacatttggtcgaactaaatcagggggggtatatgttggctgcaaggaataatctttattagcaagtactaatatattttcctcgttttcgatatactgaatcccatttttttcgactaatttattttgtttatcaatgtaaggataaagcggatctttttctaagtcagcaagtgtattattacttgtggctttttgctccactttagcgactggctctgcattttgcccgccgaaatattgatcttctaccgtgtttacacaactgatagtaacggctaaagcaattgttaataaagaactcatatatgtttatcaaccttcctgtatacattaagtcaaaatctaaggtagtaattttgattattttattgctgcttctaatgctacaacaatcatatcattaaaagtagtttggcgctcttcagcggatgtttcttcacctgtaaaaatgtgatcgctgactgttagaatagcaagtgcacgacggccatatttttgcgctaatgtataaagagccgctgcttccatttcaattcccagtactccgtaatcggctaattgttgtttatccaattgatcattataaaaacgatccgctgagaaaacattaccaacttttagagataggcctttttcaacgcctgcatcatacgctttttttaataaagaaaaatctgctactggcgcaaagtcaacaccagcaaaagtgttacgattaatttgagaatctgtcgaagctgcttgagcaattacaacatcacgaactttaacgtccgcttgaatgccacccattgttccaacgcgaatcaaatttttcacatcatagctttgaattaattcattcacataaatcgaaattgacggaattcccataccagttcccataacagaaactttttcgcctttatatgtaccagtaaatcctagcattcctcttacttggttaaataatacaacgtcctctaagaatgtttcggcaatgtatttcgcacgcaaaggatctcctggtaataaaattgtttcggcaatttccccttgttttgcttcgatatgtacgctcataattttctcctcctaatgtttgtttttctcttcatctagcaaatacgcttcccaaagttcatcgaaaatagacattcccggtaaataaggcgcattaaactcaagatagtcacaaagaatatgataatttcttgtttgctttggaaaactatgatctcggtatgcattgttggcaaattccgttttctgatctgttagcttcgggtcccgatatgtcattaaaaaatgataaaatgatcttcccaacgtacaacacactccgctctttttatgctttaactatagttgatttctcgtgaaaaataaagttaattttcaagtttacttagaatttcttctgctagtcgatgtgtctctaatgcatcttcttcagtaattggagctttttcgccgtttcgaacagcatttaaaaacgcctgaataatcggtacaaagccgcgtttataaagcgttgtttcccagtcaccaaaccgttcaaaacgctcggtcgttccttcataaatatgtgtctctgttacattttccacttcatatttagcgctttttgtcatcacggctaaacgttcttcattcacaccactatcccggttcatgatggcagtagctactttattgccagcagaaatttggacagttacactagacagtaattcgttttgccaaacaggtaccacatgtaattgatcaatttttgcatcaagtaaataacggacggtatcaatgacatggataaaatcatcataaataaatgtacgtgcctcacctggctgtcctgcgcggtttttttgcattactatcatgtttatatccgttaatgcttttaattcttgatatttaggtgcataacgacggttaaatcctgtcattaatagcgtgtttttttcttcggctaagcgcgtcaattcttccacttcggccaaattatcggcaattggcttatctacataaactggaatattatgtgataaaaaagtccgaattacttctggatgacttgctgtagatgaatgtacaaaagctgcattaacgccagattctatcattgaatgaatactttgatgataatgatcaaaacgatatttttcgcttaaatgctttaatttttgtgcatttcttgtataaagatggacctcgatattttccatctcagcaaaaacaggtaaatacgctttttgtgcaattccaccgagtcccactactgctactttcaacatacatttcgctcctttttcataacaatgccagagaatgatttcgcgatattattctacgcatttcattttctggcatcgtttgtttattcaaagattttcttataggtttggtagccttcttcttctaacttatcaacggggataaatcgaagcgctgcggaattgatgcagtatctaagtccaccttgatcttgtggtccatctggaaaaacatgccctaagtgcgaatcagcctcaactgacttcacttccgtccgaatcatcccatgtgataaatctctatgttcgattacttctgcttcgtcaattggttttgtgaaacttggccaaccacaaccagcatcatactgatcattggatgaaaataacggctttcctgaaacaatatctacatagattccttttgccacattatcataaaattcattttgaaatgggcgttcggtatccgctttttgggtcacattatattgtatatctgttagctgtttaagtcgctcgttttttttactttcatccatttgacttcaccctttccagttggcatctatgaatgcagcacgaccggaagctacttgataaccttcatagtgcgctttttcttttttatagaaatcttggtgatattcctctgcaggataaaaagtttctgcttttgcaatttctgtgacaactggtttcttaaatcttccgcttgcatccaaagctgctttagatttttcagcgatttgtcgttgttcctcattatggtaaaaaataaccggacgatatgaatctccgcggtcgacaaattgtcccgctgcatcagtcggatctgtttgttgccagtatacttcgactaatttttcataaggaaatactgccggatcaaatgtaatttcaactgcttcggtatgccctgttgtcccgctgcaaacttctttatatgttggattcactgtatgtccacctgtataacccgaaacgaccttctcgattcctggttgtgtgtcaaaaggttttaccatacaccaaaagcatcctccagcaaatgttgctttttcaagtgattcttttgtcataaaaaatgccccctaactaggattgggccagttaaattacttaactggtactaaaagtgtaaacgaaatatcgtctttcttcaaatttagcgtatcggcacgaacttttgtgtcgccttttagttttaatttgtccaaagataaatatattttttcttttttaggaagtacagtgacccactcagggaatttatagtttttattaacatagttcatcacgtaagaaactggtaaaggtaatgctccaacagacatatctgtcagcgataattctatatttccattatcaactacttttggtgaaaatttaagtcttagttcaacaggctcaccaaaaatcttcgcttcagctgtaaaattgacattatttgctacaaaaactttataaccgatatcttgctctttgctgaactcttctatatagctactgattaattggtttaagtctgatttagtggtgcttgtttgaaattcaatatttgatttattgctaataagcgaaggcgttggctcttcttgtgggctaagtacaaagactgttacataaagccagccagcaagaaggataagcaaactaattaaagttaggcaaatccatttccaataatttcgttttggtttttttggagctgatcttgtttctacttgcaagattttatcacctttctatttaggaatattaccatcatctagttgtttgacgatagctttttctaactcggcgctcattttttcatatcctttatggtttggatggaaataatcatctgaaagtaatggattcggcttgtctttattggatgtatttctatcttctaatgctttagccactgggacgaaataagcattgttagtttgtttaattgttttcgcagaagcatcattccaattggtaatgacctcatcaaattgttttatatctgcaaaataagtcgtataaggattgtaaatacccattaaaaatatcgctgcatctttattgtaagagcgaatatctttaagtaacgttgtaagttcttgttgaaattctttatttgcttttgcaaaatcagccacatctacatttaaaaggcgagattgcaaaatagccatcacgtcattcccaccgattgtaatagttattacattggcatttttgacatcttgctggaattgtttattcgttttgaggcgtttttctagttgtgtaatacggtttcctgatacaccgtagttgctcgttttcacactagacactgtagcttcttcatttagtttttctggaacaatgcccacatagccgccttctttgttttcatcaccaacaccttctgttaatgagtcacccattgcaactaggttaatagggatttcttttgattctttataatacttgataccaaaaactgcgccaacgagaagcgcgataataagcacgcttcctgtaagccacagccattttttctttgtcatatgcaatcactcacttagtcagtatagtacataaatgcaaacgcgccagttccagcatgagtggaaatgacaggatctgcaaaaaatagtggaatttctgttaatccagttatttctttagactctgcgataaagtcatcagctaaattcagcccattggcatgaactacatccagctgttgaatttttttcggttcgtctttaattagattaaggcagtattgtaaaacttttttgttactgcgaactttggtttcttcttccaattgtccatcagtaagcttagcgattaatttgatattcaaaagactacctaggaaaccttgcattcgaccaacacgcccacctttaattaaattatcgagcgttacgaccacaatataaagttttgttttgtcgcgaatatcattaattgcagcgtgaatttcttctactgaataatcgccagcctgagccatttcagcggcttttagtacttggaatgcttggccacgtgccgtataatcgcagtctactacggtgatgtttccttccaccatatcagctgcttggcgagctgcattcactgtaccacttagtttttccgtcaaatggatggaaaggatttcatacccttctgccgtatatttttcataagcttctacaaaagaaccgattgctggttgcgaagattttggtaattcttttgtttcagccatgcgtaccatgaattcttctggcgtaatgtctgttttaggattataaactttcccatcgatttctacggttaaatataaaacttcaatattccattttgctgcttcttcaagagttaagcctgcagttgagtctgtgataatctttatttttctcatttagccacatccatttttgcttattttctcttattataacattcccggcgttatacacaacctataaactagttttaagaaaagagaaagaaatggtatttgtctttctattcttacttttttagcgtatgatagaaatgtaacaacccacaaaaattttgtagaaaagtatggtgataaaatgaatgtcacttcttataattggaaagaagaactggcgaatgcaataacgcacggggttggatttatccttagtattcccgcgctcgtcttacttataatattcgccgctggaaaagataatcctctttatttaacaagttttttaatttatggaatttcactaatgttgctttatatttgttccacactgctccatagcttcaaaccttgcaaagcacgaacggtttttaatattatggatcatgccgcgatttatgttttaattgctggcagttatacaccatttgttttgattaccattcaaggaactctcggttggacgctgtttggtgttatctggggactcgcaattgctgggatcatttataaaatatttatgactggcaaattaaaacttttatcgacgtttgtatacttagtaatgggctggatggtcatgttcgccattaaaccactttatgcagggctaacgccaaccggattttggctacttgcaactggtgggattatgtttactgtaggggcaattttttatagtatccctcgagtaccttatatgcacgcgatttggcatttatttgttatcgcgggaactgcttttatgtacttctgcattttgttttatgtttaaattataatttttaaaaccttctcgataatgagaaggtttttttatatagtatgacataattaagacttgtttttaattatgtcatactatataatgtttagcataacataataaaaggatgtgattccaatcgaactttcctctagacaacaccagattgttgcctttgttcgcgcgaatgagcctgctactggtgactctatcgctgctcatttaaaattaacgcgtgctacgattcgtgctgatttgtcgattttgacgatgaccggaattttagatgccagacctaaagttggttatttttactcaggactcgaaacaaatccgattcatttggatgaaattcgccaattgaaagtagcagatattatgacccaaccatttttcgcaaaaaaagaaacaagtgtttatgacgccattgtgatgctctttatggaagatattggcagtttatatgtaattgatgacgaacaattagttgggcttgtctccagaaaagacttactgaaaggcgcactggcggatgcagatacgaaagccactcccattgcgactattatgacgcgcatgccaaaccttgttactgttactaaaaatgataaagtcttgcacgcagcagaacagcttgtctttcatcaaatcgattcgcttcccgtttttgaaaataactctcgagaagcgaaagtcgtcggaaaaatatcaaaaacacgtattactgcgctttttgtagatacaataaaaaaggtttaataggaggcaaatatggaaaatccggttattatatatgttatttcagatgctatcggagaaactgctcaacatattattcgcgcggtaacagctcagttttcacttaataaaccagctgatattcggcgccacgcttttattcgcgatgaaaacgctttacttgaaacattagaagaagcaaaagcagctgatgggattgttgttcaaacgctagtacaatcaaagctcgctgattatgcgtcaaatttttgtgtgaaaaatcatcttcaaaacgttgatttattacatacgctcactgccgcagtggaagcaaaaactgggttaaagtctaaacaagacccgggaaatatgcgccggcttgatagtaattattttgatcgtattgccgcaattgaatttgccgttaaatatgatgactgcaaagatccccgcggtttactggatgccgatattgttttagttggtgtttcaagaacgagtaaaaccccacttagtagctatcttgctaatcaaaactggaaagtcgctaacgtgccactcgttcccgaaattccgattccagatgaactttttcaaatcccagcagaacgtattatcggtctgacaactacacctgaaaaacttgctcaaatccggaaagtgagattaaaatcaattggcttagatgaagcaagtagttattctagtgaaaaacgcattttagaagaattagaatatggttatgctactttcaaaaagcttggctgccaagtaatccatgttgaagacaaagccattgaagaaaccgctgccctaatcacggagattatcacgagttaccactaattagaagaggtgaataaagtgagaaaatttgtctatcagttcagtgaaggttctaaagaaatgaaaaatcttttaggaggaaaaggtgctaatttggccgaaatgacgaagattggtttgcccgtccctcctggctttattatctcgaccgatgcttgtaatgattatacaacgagcaacaaacatctatccgaagacatttttgaagaagtaaaaattcatttgacagaactcgaaaaacaaactggaaaaattttcggattcgcggaaaacccactgttagtttcagtacgttctggcgcgcctttttcgatgccaggaatgatggatacggttctaaatctagggttaaatgatcaagctgctgaaggattagctaacttaacaggtgatgctcgttctgcgtttgactcttatcgtcgcttcattcaaatgtttggcgatgtcgtttttgaaattccaagctatcaatttgaacaggcgcttgctcgtataaaaaaagacaataattatcttttagatacggaattaactgctgctaatttaagtgaactaattgagatttataaactgattttcagccaagcaactggcagagattttccgcaagatccgttagaacagctgagacttgcgattattgctgtttttgattcgtggatgaaccctcgtgccgttatttatcgcagactgcatgatattgatgcaagttttggcacagccgtgaatattcaagcgatggtttttggcaacactggcgaaacaagcggtactggtattacttttacgcgaaatccatccactggtgaaaagcaagtttttggtgagtttctactaaatgcacaaggtgaagatgttgttgcaggaatccgcacgcctgaaccgattagcgcattagaacaaagaatgcccctcgtttataacgaactccttaaaacatgtgaactacttgaaaatcactatttagatatgcaagatattgaatttacaattgaaaaaggaaaactttacgttcttcaaacaaggagcgggaaacgaacagccaaagcagcaattcaaacagcagtcgatttcgtccacgaaggcaaaatcactcgtgaagaagcaattatgcgagtagaaacgaaacagctacatcaattacttcaccctgcttttcatgaaagcgctctaaaagctggacaagtcatcgcaaccggattaccagcaagtccaggagctgccaccggtcaaattttctttgaagctaaagaagccgtagcagcttcagaacgcggcatttctgttatcctagtacgaaatgagacttctcctgaagatattgaaggtatggcgagaagtagcgcgattttaactgctcatggtggtatgacttctcacgctgccgtagtggcccgcggaatgggaaaatgctgtatagctggttgcgctgaactcactattaatgaaaaagaaaaaaccattatccttacaaccggagaacagcttcatgaaggtgattttctttctctcgacggcagcactggaaatgtctatcttggacaaatagcactcacagaagcttctataggcggtcattttgatgaattaatggcatgggcagacgctgagaaaaaactaaaaatccgcgtaaatgccgatacaccaacagattttaaaaaagcattactatttggcgctgaaggtgttggtctttgtcgcacagagcatatgttttttgatgaaaaaaggattccttatgttagacaaatgattttagcagaatcacttaaagagcgcgaatctgttttaacatcattaaaagagatgcaaaaaacagatttcagtgaattatttcgaatagcaaatggtcgagcagtgaatattcgccttcttgatccgcccttacatgaatttctaccgaagactaaccgcgaaatcgaacaattagcgcgcgatatgaaccgtactgttccccaaatcaccaaacgaattgaggagctggcagaagcaaatcctatgctaggtcatcgcggttgccgtttagccattacttttccagaaatttatcgtatgcaggcggaagcaatcatggaaagtgccgttatcgttcatgatgaaggaatcgatgtccacccagaaattatgattcctctaatcgctacaaaaagcgaacttagttatattaaaaatgaaattaagcaggccattcatgcgatttttgaaaaagaacgagttgtgctaccttttgatattggtacgatgattgaaattcctcgtgcttgtgtgaccgcagatgaaattgccgaagaagcccagttctttagttttggaacaaatgatttaactcagctaacatatggtttttctcgtgatgatgcaactaaatttctagctgattattatgaaaaagatattttacctaaagatccatttgttacgattgataaaacgggcgttggtgcgttagttgaaatggctgttactcgcggaagaatgactcatgcgaacttaaaaatgggcgtctgtggagagcatggaggagacccagaatcaatccacttcttccatcaacttggcctcagttatgtatcatgctcgccttaccgcgtgccaatagctcggttagcagcagcccaagcagcactgagcgaaaacaagctagtatctactatataaaaaaagtccagatggcaatcacttagattgtcatctggacttttttatttttcgcaaatcgccacataattcccttcattatctgcaaagttgaacacgcgaccgattggcagatcaaccaaatcccctactgtaattcctttgtttttatattcttcatacagttcgctaatatttgttccaaatagtaaaatcgatggcgtcccaaggttcatatccgggttcatttcggcaactttctttttattttggagcacaaaagtagtttccacaccttttgaaggcgcgatttcaacccactgaatttcgccgtttacgacttcttctgatacaacgacaaaatccaatttttccacccaaaaatctcttactgccgcttgatcttccacatataacattacttgaccaattttttcaatcatttttcatcgtcctctcgtcatttctttttctttcaagccaaactccgcataaaaatcacgtttcatttctaaaagatagcgcaaatcattcataaattggaataaaatggctctattttcgaattcttcacgtgtttctgggagcttactactacgaaattcatgcaccatcgttgtaatctctgccactaaatcttccgccgtattatgttcatccaacgtctgcgctgttttttcagtaatttcagcgagcgccatactttgctctgaagaatgatggaacgaaaccagatgtcgcttcatttgtgtcaaaattcggtactgaaccagtcgcatatccacatactgagaataatagtgtgacgaagcaaaaaattgattgtccaaatttcttgctgctttttcttgtgcataatctaatgtaccctttaattgatttaataagccaaactcatcaagatattcagactgatttcgaagcccttgcgtcatttctgttaaaatctgtctcatgatggcttcaattttttgttgactgcgttttaattcgtcttccatttttggcatgtataaatttaaaataattgcgatacctgcgccgaccgccataagtaaaagttcatttttaaaccaaaagaatgatagcgattgttctaataaaatgtgcgatacaagtactgaacttacaacaatcccgtcagcaacatgtagtctcacagcaagcggaataaaaatcagtagataaagtccaaaactcactgcgttataaccaatgagcatgaaaaatacggcggcaatagaaagcgccaatacagtcgaataaacccgctgaatcgcaagttgcagagacccctttttcgtattttgtacacttaaaatcgcgataattcccgccgaaactgcatattccaaatgaagccattccgccaaaataatcgctagtgtcgctgcaattgctgtttttactgtccgcattccaatccgcatatgtcccgtcccctttctatgtccaacttatcatagcacgaaagcgaaaatcgcaaaagaaaaaccttgaagattcctcctcaaggttagacattattcttcgtctagtgtttttttaaagcgtgctcggaaaaagaatcctaggccaagcaaggttataacagcaatgatactataaatcactgtcgaaaaactatccatgaaaacaacaatttcgccccaagattcgccaagaagagcgccaagaccaattaataccgtattccaaagcaagctcccggccgttgttaaaattagaaatcgtgacattttcatcttcgtcatcccagctggaatggaaatcaaactccgtataagtggaatcatccgacataaaaacactgcccagctaccatatttcaaaaagaaactttcagcgcgttcaatatccgattccttgagtcgtaaaacccggccatacttcaaaacaatatgcgttagccgttctttgccaaaataagaggccactttgtaaagtaaaatagctcctacaactgaaccaagtgttgctacaataatcaccatcactacattaagtgatgaaactgtcgtcataaatccaccaaaagttaagataatctcagagggaataggcggaaacaagttctcaatcataattaacaaaaaaatacctatatagccaaaatcagccataatacttgtaatccaagtttccaaaaaacacactcctgtactttatttcccttttaaagtaagtgcttgctttttaagtttactacactcgttctactttttcaatcgatttggtaaaaagaaaaagaacttgatacgttttccataccaagttctttgttatttacatttttaaatcggcttttgttgcgaaaaatcctgctaaacgatctttcactttcttgatgccaccagcttcatcactttctaaattcattggcattacaggttcgtgcaagctcattcgaagcaagaaccaaccttcaccaagcgcacccttcgtattcacacgaatgccttcttggtttactggttctaattccatgtccgcgtcagcttctacaaatgccagaaaatcagctaaaacttctttgccataagctttaaaatctggtgctgtaatacttaaacgaatttcttcgctttctgcaggttcttttaaatcagctattaaatcaggcaaatcttggccattttttcgtaaagtggcgtacgtcatcaaaattttggcaattaagtaagcaccgtcatctaagaaataattttcttttaatgcagcgtgcccactcacttcaatagcaatttctgatggtgttccgtttgcattaaggcgtaaagcttcattgataacgttacgataaccacgtttaaagcgatgttgtttcccaccttttgcttcgatgaatgtttgcagatgtccgcttgttgttgagtcagtcacgatagttgttcctggcttttcttccaaaataatactagaaataacagcaattaatggattacggtttaaactttctccatttttatccataatcgcagctcggtctacatccgtgtcaaaaatcacgcctaaatccgctccgctcgcaagtaccgcttttttcaagctagccatagcttcttcattatcgggatttggaatatggttaggaaaattgccatccggatctaaaaactgactaccagatatgtctgacccgagctctgccaacactttttcagcaaaaaagccgccagcgccattccctgcatcgacaataatgtggcttccttgtagtggcttcattttgtccgctgcatccgtgattccagctctaattttatccgttaagtctgccgcatatgtagaaagtaaatcttgttttgtaacttttccggcgattagtccgttttctatgaaagatttacctgcgtgagctacgatataatcaatatcttcatgttcagctccaccagatttcgtaaataattttagtccattatacataaaaggtaagtggctcgctgtaatcataattccggcatcgcagtcatagtcttcgtactgggttgccataaacatggccggcgtagttgcaagtcctacatccaccacatcgatacctgagaaagtcaaccctttgataagtgccgcttttaatcgttcagctgaaagtctgctgtcatgaccaatcgccacttttccctgaccttccacttttttctcctcttttagccatttcgcaaagccataagcaatcttttctacacgttcgtctgtcagcgtaatctgatatttttccgtagcgattgctattccacgtatgtctgatccgttttgcagtgcttctaacgctttcgtttctgattgattcatgtcattcctccagcatctgtatttttccccttcattatagcttaaattgcgcataattcacatagcttttacaaaagatgtgctctatttgcaataatgatttttagatctaccgttaattcttttggcggatttattaataattcactttttttatctttatcaatgtgccaaccaagtggcgtcatttcaagaaaatcggcaaataattcgtttgcgattggcgctttatatgtcacccgttcaacgtactcgactgttaatttttctgctagccgagatgtaacggactcatttgaataactactcttctcatcaacataaataaattcgcgcaactcccgcaaataattcgcttctggaactacttttaacaaaaagccatccgtttttaacagccgcttgaattcctcataattcgaaggtgataaaatgtttaaaatcacatctgccgtctctgtctgggttggacaattggctaaatcagctactgtccaaacaattccgggataatctcgagcagcttgtttcacgccttctttagcaatatctagcccaattgcttggacatggcgtcctttttcttgaagattttttacaactcgcgctaaatgacttccttcaccggaaccagcatcatatatcactacttcttctttttttgtctcagcaatgatttctgtcactcgttcgattaatttttcaaaaaagccactcgcaatcactttttttcgtgattcgaataaggcttgatcgtatttggttttatgtacttgcttaagtaaatgtaaatatcccggcttggcaatatcaaacccatgatggtttttacatataaatgaattcggctcgctaaatgagaattctcccccacaaatcggacaagcaagcagggtcatactttctttcatcgcaagcttattaatctccatttttgataacaattaaacgtcactccactcgaaaaacgttgcccgcaaataggcaacgtttctactaatttctttcatacgtataaaatgtgtaattatatttatttttctcatctttttcatgaggttctttcgctacttctgaaaagttttcccagtctacttctggaaatgcggtatctgcatcaaattccgcgtcaatttttgtgacaattagcttatctgccacatccataaataaacgataaatttccgctccaccaacaacataaatcggttcgccggtttcagcaagcgccagaacttcatcccgtgaatgaagaatttctgcatcgtctagttgtaattcattgtccctagttaacacaatggtctttctatttggtaaagctttacctagtgattcataggttttacgtcccatgacgagcgtttttccagttgtcgtttttttgaaaaattgtaaatctcctggtaagtgccacggcatcttgttgtctttcccgatattaccagcgcggtcttgtgcccaaacaaaaattatcatctaagaaaacctcccttatactgaaattggtgctttaattgcaggatctggattataaccatctagtgaaatatccgctacttcaaaatcaaaaatggttgcaggtttatctgaaagaactaattttggtaacgcatgcggagttcttgataattgttctttcacttgttcgatatgattgttataaagatgtgcatctcccatagtatggataaattcaccaacatcaagtccaacttcccgtgcaattaaatgtgtcaaaagtgcataacttgcaatgttaaacggtactcctaagaaaatatctgcacttcgttggtacaattggcacgataatttcccatctgccacataaaattgaaacaatgaatgacaaggtggtaaagccatattcggaatatcttcaggattccaagcagacacgattaaacgacgcgagttcgggtttgttttaatcatttcaattaagtcagctaactgatcaattgtttccccttgcgaagttttccattcacgccattgtttgccgtaaatattacctaattcgccgtatttattcgcgaacgtttcgtcttctaagatccgcgttttaaacttctccatttcagcttgatacacttctttaaaggccggatcacgctcagcacgcagcccaaagtcagtcatatcttcgcctttataatcagcgcttttcacaaaacgctcaaaagcccattcattccaaatattattattatgctgtaaaaggtagcgaatattcgtatctccatgtaaaaaccatagtagttcacttactacaagtttaaatggtacccgttttgttgtcataattggaaagccttcctgtaaatcaaaacgcatttgataaccaaatgtgctgattgttccagtcccagtgcgatctcctttttgtgttccattctctaaaacgtacttttctaaatccaaatattgtttcatcgttcgcactccttattccgcgtattgtgataaaaattcccagcgttccatcatttgttccaactctgattctttcgctgtaataagttcactaatttctgctgcttttgtaaagtctgctccggtttgttccaatgtttcattgagcgattcaatgtcttgctctaagtcgctaatggcatcctcaatcccgtcccactcaagttgttcttggtaggttagtttgactttctcttttttctcaggtgatgacttttcggccgaagtattcgccatttttttcattgattttgctggctttcctttagcctcaagttctttcaaataatcactatattcaccatagaaaatttctacttcgccaattgcccggaaaacaagcaatttatttacaactttatcaaggaaatatctatcatggctgaccgtaataaccgtaccgttaaaagattctaagtaatcctctagaacagttaatgtttgcgtatctaagtcgttggtcggctcatctagtagcaacacgtttggtcgttccattaaaatgcgtagtaagaacaagcggcgtttttctccacctgacaagctaccaattttcttcccgtgggaatttggtgggaataaaaatcgttctagcatggcgctaacgctaatcacttctccaccagaagtcgttacttgctctcctgcctcttgcaaataagcaatcattcgcatatctggatccatttcttcattttgttgcgtataataaccgatttgtactgtttgacccgtaattacctcgccggcatcgggcgttagttttccagctaacatattcagtaaagtcgatttaccagttccgttattaccagtgataccaagacgttctcccggttgaataattaaactaaaatcttgtaacacttgtttttcgtcaaagcgtttttctaaatttttcaattcgaaaacatctttcccaaggcgactagtgacaaaatcaatcgcaagttctgagtcgtcgattttagttttgacttttttctctaaatcatggaaacggtcttgtctagcattttgttttgtggcgcgcccttgtggaccacgacgcatccaagctagttctttacgataaaggtttttatttttctctgattcgcggacttcgttttccatgcgaattgccttggattccatgaatttttcgtaatttccaacatagcggtacgccgaaccacggtccagttccaccatatggttcgtcacacggtcaaggaagtaacgatcatgggtaacgagtaataccgctcctttaaagcgatttaaatactcttctagccaacgaatcgactgaaaatccaaatggttggtaggttcatctaaaataagtaaatctggcgtctcaatcaagacttgcgccaaaccaacacgctttcgctgaccgccagaaagctcacttatttttgctgttaagtcagtaatgccaagccgttccaagattgttttcgcttcagtattcatatcccaagcagcactcgcatccatttcttggctagccgctgtataggcatcatgtagcttggtattttctgcatcaagcgacatcgctaataagacttcttcatacttacgcattgctcgaagcgccgcagtatcaccgtcaaaaaccgccgaaagaaccgtatcctcttcattaaaaacaggatcttgcgccaaataaccgatcgtataatctttcgctttcgtaacgctacctttatccccagattcacttccagaaataatttgtaacagcgttgatttaccagtaccatttacaccgattaaaccaatgcgttcgccttctgttatcgttagcgagatattctcaaacaggcttttttcgccatatgtttttgttaagttttctacttttaactgtttcatttagtcccatccatttccgtttcgtccttatctattctagctgaaaatatagaacatagcaattgcttgagatgaaaaaagttccaaaagtggcgaatccacttttggaacttttatttttaaaataaaccttgtgcgttaccattttcatcgacatccatatttaatgccgctggttttttcggtaagcctggcattgtcatcacgtcgccagttaaagcaacaacgaagcccgcgccaagttttggaatgaattcacgaatatgaatcacaaaatcagttgggcgaccgagtaatgttgggtcgtccgataaagaatactgcgttttcgccatacaaattggataacgatcccagccgtattttttaaactcaacaatttgtttttgtgccttgctagaaagttctacgccaattccaccgtaaaccttcgtcacaattgcttctaatttttcttctattgaccaagcatcatcataaatgcgtttatagtcctcttctccgctttcgactgcagcgattactttatctgcaagttctagaccaccgtcgccgcctttttcccacacttctgttaacgaaaaaggaatgccatgttcttcgcaaagttgttctaatttcgcgacttccgcatcagaatccgtaataaacttattaatggcaacaacatatggaataccaaatgtttgaatcgattccgtatgtttttgtaaattagtaaagccttttgctagggcatcgacattttcttcactaagttctgtttttaaagcgccaccatgcattttcagtgcgcgaattgtcgctacaatcacgacacaatctggtgcttttccaagtgctggaactttaatatctaaaaatttctccgctcctagatctgctccaaaaccagcttccgttactacatattcgccaagtttaagcgcagtacttgtcgctgaaacactattacaaccatgagcaatattagcaaaaggaccaccatgtacaatcgctggagtatgttctaatgtttgcactaaattaggttttaacgcatcttttaatagcaatgttaatgcaccttcataacccatttcgccaacagttattggttcttttttataattatagccaatcacaatttcacttaagcgtttctttaagtcttttaagtcacttgctaaacaaatgattgccataatttcagaagcaactgtaatatcaaaaccatcttcacgaggaacgccttgaataggaccaccaagaccaacgaccacttttcgaagcgctcggtcatttaaatcaacaacacgtttccaaacgattcgtctcccgtcaattcctaaatcattaccttgttgcatatgattatcgataaacgcagataaagcgttgtttgctgctgtaatggcatgaaaatcgcctgtaaaatgtaaattaatatcttccattggaataacttgcgcataaccgccaccagttgccccgcccttaatacccattgtaggtccaagtgatggttcccgcaaagcgatgactgttttcttatcttttttagagagtgcgtcgccaagaccaactgttacagtcgatttaccttcaccggctggcgttggattaatagctgtcacaagaacaagtttaccttgctccttgtcttttaacgagtgaatcgtatcataggataactttgctttatactttccgtaaagttcgagtgcatctgcatctagtcctaaatgttccgcgatagtcgtaactggtagaatttctgctactgatgcaatttcaatatctgatttcactttatttgacatgatatcccctccgaatatgtatattgtaacaaagaattaagatattttggcttcttcagtgcatcaaaaaagcgtgacaccaagcgatgtaacaccatttttgatttctaaagtaaagcctgattgcgcaaaaatcaacatctcaaccttggattaccgttattcctttgtatctggtttcgttggatccatttccttgagtgtcttaagcgcatctggatgattttcaaaaaactgaacaacatccccgattcggtcaatagaattccaactcaaatgatgttcaataccttccacatcatgataaatatgggacggatctacaccaattatacttaaaaaactttctagtaatgcatgtctttctagtagccttttccccatttgtgttcctttaggcgtcaaaattaatccacgatatttttcatagattaaatattcgtctttatctagtttctgtaccatttttgttacagaagacggatggacaaataactcatcagcaatatccgaaaccctggcataaccttttgtttcaataagggaatagattttttcaatataatcttccatactaggtgttggcatagctataccctccaacttatattctttcacatagccaattgtactataatatcggactttctaaaagcaattaccctttctaaaacgaaatttctcctaggacattcacgtagtttttcgaggtaaatctagcatttaacgacaaaatataacataaaagtaaaaagtaagcctttacaagtccaaaaattaaaaaaatatcgaaaatcaccttgacgtttataggtattttgatttatagtgttagtatcatatgcggcaacgctatgaactgaaaaggtagtatttgcgagaaaaaatttttaaacagaaatgaaagcgtttgaaaaatgattctagcaattattagccatacttaggaggatttatttcaatgcaaaatgggaaagtaaaatggtttaacaatgaaaaaggttacggttttatcgaatcagacggcggcgaagatattttcgttcacttcacagcgatccaaggtgacggctacaaatctttagaagaaggccaagcggtaacatttgaagtagttgaaggtaaccgcggcgctcaagcagccaatgtggaaaaagcctaatccagttgccaattagacacggacttaaaaccggtatcctttgaccggtttttttattgcaaaaaaatagctttccttctataataaagccacatctactcaaacaataggaggcgcacaatatggaagttttcgttgacggtgcaagtgctggaaatcctggtcctagtggtgctggcatagttctaaaagcagcaggaatctatgaacaattcgccatccctctcgaagttatgaccaatcatgaagccgaatttatcgcgattaaattaggtctagaagaagctttaaaaaaacaagccactttcattcgtttgtattctgattcgaaagtcgccattgaagcaatccataaacgacacgctaaaaatcctttattcaaaccccatttagaagcaattttagaaatggctgattcagtagagttattttttgcagaatggcgtaacgttagccaaaataaacaagccgaccaactcgcgcgtcaggctataaaaaaacagaagcaacctggtatcaaataaccagattgcttctatttttattcaatatcccgcgttagggtttttaagccatatttttcaacgaccgcaaaagcgtcatcgcggaaaccgttatatttcaagcttgctaagttcatttctagcggcacttcagtatgaattttagctagtttttggctcagttcaagcattgctaaatcttcttgaattttcaattgttgggctggtttaagcttgtctaaattatttaaaaccccttcaattgattcgaattcttggatgagcttaattgctgttttttcaccgatgccacgcactccaggataaccatctgaagtatcccccatcaatgcttttacatcaataaactgtttcggcgtaatgcccatttcttcaaaaaatgttgcttcattatatcgtttataattgccataacctttttgcataatccatacatcattcgtcggtgcgattagctgtagtaaatctttatcgccacttaaaacggttgtcgaaatactactactagcctgaactgtaatcgtaccaatgcagtcatctgcttcaaagccaggtacgcccaagttaacaaagccaaacccagcagctacttcttttgctaaatcgaattgaggtatcatttcttctggtggcgccgttctgcccgctttgtaaccatcatataattcattacggaatgtttgtgaccccatatcccagcaaataagtgtatgtgttggattactttgacgaatagctgcaaacatgtggcgcataaagccttgcacgccattcgttggaattccgtgttgattaaacataaattgtttggaaacagctgttgcataaaatgctcggaaaagtagtgccattccatctacaacgagcaaattttctcgattttcgttcatatataatcctcctatttccttctactgccatctattgtagcataattatatctggctcgcagaaaaaaaggagctttttaccagcttgcttttttcacgccgggtaattgaccttgatgtgctagttcacgaaaccgaatccgtgacataccaaatttacgcatataaccatgcgggcgacctgttaattcacaacgattgtgtagtcgtgtgggtgaagaatctcttggtaacttgcgtaactcatcaaaacgaccttctgctttaagcgtgcggcgaagttctgcatattgttcaacaagcgcttgttgatgctcatgtttagcaacttttgattttttagccatatgtctctcctttcataaataataatcattccgatttatatcatacgccgatttcaaaatgaatgcaagtctcttgttttaaaaaaaccgatacccacttaaaatgggtatcggttcgttatttatttagtaccaacgattggtccataagcattagagaaaccattattataagctactccggcactatttttaccagcgtcccagttaacggaccaggtcataacaccttttactggagttccttttgcttgtaaacgattgaatacattttggacaatttgagggtctttaacgtaaccagttgctgctgcatctacattggctggtaaaccgaagacaaatttattcgcaggaatttttaaataaccgcgcgtcccgttaatgaaggaatctgccatgtaatataagaaagattcttttaaagtatcattattttgcgcaatccattggttagtttcatctacccaaacaccgtcgccaccttgattgtaaagttgtggggcaatatagtcatagtaattagcaagtgaagttaagtagctctcataagcgctacctggttttaaataaggaaattctggcgccatcgtaattaagaagtttttgccttgtgctttatagtgatctttgacgattttaagcgctgctggaataacagttttattatctcccgcggtaatggcgctttgttctaagtctatgtctagtccatcaaagccgtatgtttctacttggcgaataatttcattcgcgaacgcctgctcatccccagccttcagttccacgtgaccatccgcaccaccaagcgctaaaagtactgctcgaccttctttgtttaatgcgccgacttgtgctctgaaatcgctatcatttattccaacaggtttaaatgttgggatgcgatttactccgtctcccttcataaaggaaacatctaccacgttataagctttcggtgtatccttcagtgctatatcagcggaagtcccttgttgatagccatcttttccggaagatttccaactatgccagtacccaactagcacctgtttgttagaaatatctggcataacagaagcgtcatccgtcgccgcttgcgctgtactgccaaatgctcccagttccgtaccaactaaaagtaaagacaaaccaccaaccattacttgttttccattcatctacttttcccccttactttatctaccccaaacttgcttttttggagctactagaaaatacccatcataatgaaaataaaactagaaaaacagcaaaaaagcgaaattgatatagaccaattccgctttcaaataaattattgcttataagtatatgagaaaaaatagcccaattaaaactgttttattttttactcagcatgttgaggttctggatctgctagttttttatctttacgatgaggaatcatgttgaaaataatatttaaagtaattgcggtaacacttccagcaacaattccattactcgtaaataaacgaacaaaggaagggaaagcattaaataaatctggcacaactgttactcctaagccaacaccaactgcacaagcaataattaataagttttcttgagaagtaaaattaacttttcctaacatcttaataccttgcgcaacaaccattccgaacatagcaaccattgccccaccaagaaccggagtagggataattgttgtcacagctccaatttttggaattaaacctaggacgattaagaaaccagctgccgcataaataactttacgcgttttaatgccagaaagttgaacaagtccgacattttgcgaataagcagtgtaagggaatgtattaaaaactccgccaagcataatcgctagcccttccgcacggtaaccacgagttaaatctttttgcgttaattttcgttcggtaatatctgataaagcaaaatagacacccgttgattccaccatacttactaaggcaattaaaatcatcgtaataatcgccggccattcaaaggtcggagtgccaaaataaaatggttttggcatatgaaaccagcttgcttcactaaccggtccaagcgagatacctttataaagcgccgcaaaaagtgaacctccaacaagaccgattaaaacagcaatagctttcgaaaaaccttggccaaaacgatacactaaaataattaataataatgtcccaaaacctagaccaagattatacatcgaaccaaaatcttttgcccccgccccgccggcaagattgttaatggcaacgggaataagtgttaaaccaataactgttacaacggaacccgtcacaacaggagggaaaaatcgaacaactttagagaagaatggggctattaataatacaaaaagtcctgaaacaataatcgagccgtaaatcgcgccgatccccatatcttgcccaatcaaaataattggtgcaatggcttgaaccgcacatccaagtacaacaggtaaaccaattccaaagaaccgattaaccgttaattgtagcaatgtcgcaatcccgcacataaaaatatcaatcgaaactaagtaagtcatttcttctccgttaaaaccaagcgctccaccgattaatagtggaacaataaccgctccagcatacatcgctagaacatgctgaaatcctaaagctgcaatcttccctttacctaacatctactcctattcctcctctaaaaataagatttcttcgttttcaagtgaggcaattcgtgctagtgaataaactggaatccctgttttatttaataattcgcgaccttgctggaaggatttttcaattacaatcccaatccctgccacttttgctccggcaagctcagcaatttcaagtaagccaagagccgcttgaccatttgcgagaaaatcatcaataactaaaatcgtatctgcatccgttaaaaattgcttggaaacagaaatatcatttgatttttttttcgtatacgaataaaccgtgcttgtatacaaattatccgttaacgtcaccgattttttctttctagcaaaaacaaccggtaccgaaagtgctagtccggcaaaaactgcaggcgcaataccagaagattcgattgttacgatttttgtaatccctaaatctttaaaacgttcagcaaacgcctttcccatttcttgcattaaaccaggatcaatttgatgatttaaaaatgcatctacttttaaaacattccctggtaaaactgtacctttttcttgaataaactcttccagtaatttcaaagatattctcctttcaaaataaaaaaactgcttctctaaatttagagaagcagtatagaagccaccaattttcggagtgacttctttatacaaactactcatagtccggttatttacggtaaccaggtagaaactcgtcgcccaatcgcaactattatataagtatttcggttttaagttatgttgtttattatagctttctaaaggagcagggtcaagctaattttttacttattgaattggtaaacataagcgtatcttttttctagtaaatctaataaataagttgggtttaatccctctcctgttgtatctgttaaaatttctagcggttttttcgttttcccaaatgtatgcacatgcttggttaaccaagtttttaattctgtataatcatcgctggcaatgattgcatcaatattaggaatttctttttgcatttgatgatagaactgcgctgcgtacattaaacctagtgcgtaagaagggaagtaaccaaagtcgccaccagcccagtgaatatcttgcaatacgccatttgtatcattatctggacgaatgcctaagtattcctcgtatttgtcgccccaagcttttggtaaatctttcacttctagctccccgttaataagtgctttttcaagctcataacgaatcataatatgaagtggataagttaatgtatcagcttcaattcgaataagcgaactttcagagatgttcactgcacgatagaaatcttccaatttcacatgatcaaaagccggttttgttatcgcttgaaaatcagcataattacttttccaaaatgctaaactagaaccgataataatttcataaaataatgattgtgattcatgaatgcccattgatgccccgtttgcaagtggggtacctacaagtgctgcatcaaaattttgttcatatatcgcatgaccgccttcatgaatcgtaccaaaaacagccattttaaaatcattttcattgtaacgagtcgtaatacgaacatcgccagtatttaaaccagtcgcaaaaggatgcacggtttcatctaaacgacctgcttcgaagtcaaagcccattttattcagaatgcgaatgctaaattctttttgcttagcttctgatattttggtgtttaaaatggttccatctggcttcacgccttcgtttgcgattttttcgcgaatcgccataattccgtcgcgtactttttcaaatacggaatcaagcactgatactgttacgcctggctcatattggtcgagaagtgtgtcatatttattttcttcataaccccaatactcaacaaacttacgcttcatttcaaggatttttgttaggaacggttcaaaagccgcaaaatcgttttgttcgcgagctgttgtccaagcggtttctgcttgagctactagtttagtatattccgcgtattctttacttgggatttttttatttaaatcatatgttttttgagattcttctaaagttttacgagtgatttcggatagattttctttatcaaggttaagtccagcaataaaagcagccatttcttctgatgtttgcatattgaaaatctcttcagatagaacgccaataacatcagaacggccttccatcccttttgccggcgcgcctgtacgaagatcccaataaactaatgcgagtgcttcttctaaagcttccatttttttaatatacgctaaaaattcctcttctaatgtttctaccaaacttaactcctccattcagtcttcttttttaggacgtggttttcttggaccccagtattgatataaatctgtgcgcaagtaaccattatataatttccgttttttcgtcgcttttttgccataaacttcttcaaaaagttcataagaggtaaggacatacactgaccatgttggcatgcgtttataaacaatacccatttcgcggtacagttggcgcactgcttcctcgtcttctaaccgttccccgtatggcggattcgcaacaacaactccgtactcatcttctgtttggaaatcagccacttgaagttgtctaaaagtaattaaatcaccaaggccagcttcaaccgcattttgtttcgcaatttcgattaaacgagcatcaatatcgccaccaatgatgtttaacggctggtcataattagccaaatcttcggcttcttgacgcgcatcttcccagatttgtttcggcatccaatcccatgtttccgacacgaactcgcggttaaaaccaggcgcaatattttgtccaatcagcgccgcctcaattggaatcgttccagaaccacaaacaggatcataaaaaggtctatccggatgccagctagttagtaacactagtgccgccgccattgtttctttgattggcgcactaccttgtgctaaacgataaccgcgtttatgtaatccggcaccacttgtatcaatcgttaacgttacttcatcttttaaaatggaaacttctagcttaaataaagcgccagtttccatcaaacgaccagagcgacgatatttttcactgacgcggtttacaattgcttttttcacaatcgcttggcagtcaggaacactataaagcgttgatttaactgattttccagcgacaggaaattgtgcatctagcggcaaataatcttcccatggtagagcttttgttttttcaaaaagttcatcaaatgttgttgctttaaaaacgccaaccacaattttcacccggtcagctacacgaagccaaagattcgctcgagcaattgcggataaatctccttcaaaatatactttaccgttttcaacttttggatcatagcctaaacgcgctacttctttcccaacaatcgcttctaaaccagaagccgcagttgccaccaactgaaatgatttcattgtgtcccatcctttaattaaatttctaatgaaaaaagctgttttaagaggaggagttttgttttaaataggcattcaaccaggtcgaacacccaccttaaaacttgcgctccggccttctaaaacagccttcaatgttaaattaaatcctgtaaataacgctctgtaagccatgttctgttctttactacatacagggtaatagtaaagagataaccatctatctgcacaaaaatacatttgcgcctcgtcccttgttcttgattcctcgggaaaagtgcccctaccataagtttgagtttctcgctcgtggggtttacctcgttccacttccgagcatttctgccggaacttcgtcactgtggcaccttcaaggttataagaccatatccgaagacttaggtcattcacctgccgtcaaaccggaaatccggaatgccctggcttattgtttgaccaggcacgatcactacgggcatcacagcaccgtgcgagcatggactttcctctgcttccataagaaaacagcgattatccgaacgttattcatttattcttaacttacttatactagcatacctattcgttatcgtccagcttatttccaaaaacgtgtttttctaaattagaaagacgttttagaatatcaaagttggtcgttccagcaggttgtgcagctgcttggaaagtcggtgctggttgtgttgttgttctcactggtgcattatccagttcttgcactagacgaatattttccgcttgaagtgcttcaatttcctgtgtaaatgtactgtaatctttaataaccatgtctaaaaactcatcaacatcttctggattataaccacgaagtccagttttaaattctttttccaatatttctttgccagttaagtgatactcaaattgttccgaagtcatgtaactccacctctatctctattcttacgtattttttgttctaattatatacttacccttatttttccaaatctcacaccatttgtcaatctattcgagtgttttttataaaataaccgttttcttctatattaaaatgtttgattcatatcctcgacaacatcttgtaatgcgtaaaaatcaatgcattctaagaagtaattagcttgttcttttgctaatttagcacggtcataaaaaaatttaggtgagccttctttttctaaatcataaacaagcaatgccccatctgtattatcaataataaatccatctctagctgcaaattgtgcggggctttcataaggacgttttgtaataaaagcgtgataatccgcagcccctattacttcctgggcccataactgattattttcgttccagttcgcactttgtttttcaaaaggttccagtactgctaatttaataggatattcctcttttaacaaagcgactacctctccggcccaaagttcaatccctaattgcccagagataataacccattcaagcccatcttctattagaggaattaaatggcgttttattgtttctttaatataaacagcttcatccgcatcctttttaaaaattccaagttcaaaatttttatatccggtcactgcgatggatttcacatggattcctcttttctttttaagaaatctctcactcttgttaatgtatacttagtagattgataatgatctaaaaaatgtttataaaaagatcttccattaaaagcacttactgcggtcatctgaacattatcacaagcttggcgaagttgtagttcccccaaataaggaggccgctcagtattaacccacggaatggcaagttctaaaaaatcatcggcacatcttttagcctcatcaacaaaaggtttcatgtctttataaaaatcaaacggcttttcttcttctcgattacttaaatatagttcccagtttttttcattctgaagaagtaattgttccgtacggattaaaagttccattgtatcactcttttcttcacattttcagttacatcaagaatagcataggtagcaaaatcttgcctaaaattcgattattagctaaaatatggtaaaatagacgaaggtacgttctatttataagatagtttcatgccagaaagagctattttgcatttaattgatactatcattttcatttttatttgttataatagatgatagtctgaaattcagaatagaaattttctgatagaggtgaaaaaaatggctattggttatcccggcggcaagaagtatacagcgagtcatgaaggacttccttcaaaaaaacggaaaactcctgtaacttatggtaagcgaggtatgtctttagaagatgacttgaatgatacaattgcgtattatttagcccacgacatcgcagtcatccataaaaaacctacccctgtccaaattgtcagtgtggactatccaaaaagaagtagtgccaaaattaaggaagcctacttcaaaacaccatccacaacagactacaatggtgtttataaaggaaaatatgttgattttgaagcaaaagaaacgcaaaatacaacttcctttccactcagtaattttcatgatcaccaaatgacacatatggcaaatgtcttaaaacaagatggcattgtttttgtcattatcgctttccaaaaacttggagaaacgcatttcattcctttcgaaaagttttatccgttttgggaacgcatgcaaagtggtggaagaaaatcagtcactataagtgaaatacaagatgtatcagaccaagttccttatggtctaaatccaaggcttgacttcttgcaatccatagacaaattatacttctagtcaaaccttttttaaaggagagagatttttaatggcagataaaccgcagacaagatctcagtatcgcaaaaaaccaaagggtagctctaaaaaagcccaaccaaaacgaggaaaacgtgtagtagttaatattttcaaaacgattttctttgtagggttatttttaactttctttggtattgcggctggtgcaactattttttatgattatgcaaaagatgcacctaaactgaccgactccaaactgcgtgatccactttcatccaagttacttgataaggatggcaaggttttcgcagaagttggaaccgaacggcgggaatatattgaatacaaagatatacctgaaacacttaaaaacgccattctaacaacagaagatgcgcgtttttacgaacatgatgggattgaccctatccgtcttggcggggctgttgtagccaacgttactgacggctttggtgcagaaggtgctagtactttatcccaacaaatcattaaaatgtcttatttagattatacgaataagacacttgcacgaaaagcacaagaagcatggttagcacttcaattagaagaaaaatatagcaaaaacgacattcttgaaatttatgtcaataaagtctatatgtctgaccgcgtgcacggtatgcaaacagctgccgaacattactttggtaaaaatgtaaaagatcttacattagccgaaactgcacttcttgctgggatgcctcaaagtcctaacaattacaatccatacgatcacccagaagcagctaaaaaacgtcgtgatcaagttttaaccaacatgtacacgcatgacaaaatttctaaagaagaaatgactaccgcacaaaaatcaccaattacaactggacttcgctcgaaaaaagatcgtgaagacaaaatttataaatacgattcttacgtaacacaagtattgagtgaaattcctaaagaatatgatgtctaccgtgacggattaacgatttatacagcacttgatcgtgacgcacaagaatatacagagaaaatgctaaatacaaacaaagttgttaatttcacggatgatgaaatgcaagccggaattgttcttcaagatactaaaaccggtcgtgtccaagcaattggtggcggacgtaaccaaaaagtaactcgcggatataactatgccactcaagtaaaacggtcggtaggttccacgatgaaacctattgccgattatggtccagcttttgaatatttagattggtcaactgctcatattttagaagatgaaccttatacgtatactggcggaacccctattaataactgggacttcgggtataaaggaccaatttccgtacgacaagcgctttatgattcaagaaacattccagcacttaaaacattacaagcagttggacttgataaatccgagcagtttgttaataaacttggtatcacctatgataaaggacaaaatgtagaatccaatgctatcggtgcaaacagttctaatccaatgcaaatggccggagcttatgctgcctttggtaataaaggaatttacaataaacctcatacagtaacaaaaatcgtcttatctgacggacaaactgaaatcgatacagaaccaagtagcacagtagcaatgaaagaatctactgcttatatggtttctgatgttctaaaagatgtactttctgtcggaacaggtacgacagcagctgtaccaggagttcctgccgctggtaaaacaggtacaacaaatattccacctgaattcacttcgaagtactactaccctagtggtgctgcccgtgattcatggtttgctggctatacaaccaattattctatcgccgtctggacaggctatgacgataagaaaaaatatgtgtcagcgagtgaacaaaagattgcacaacgcatgtttagtaaacttatggctcatgtatctgccaataaaacaacaacagatttcaaaatgccaagtaacgttgtatccgttccaattttaaaaggtagcaacccaatcgctcgtgccgcagaaggtacggcaagcgataaagtaagctacgaattattcttgtcaggtacggcaccaactaaaaccgcttcgacaccagaagatgagaagaaaaaagccgaagaagaagcgaagaaaaaagccgaagaagataagaaaaaaacagaagaagagaaaaagaaagaagaagaagctaagaaaaaagcagaggaagaggctaagaaaaaggctgaagaagaagccaaaaatcttactgcccctgccggcctaagagcaagttatgatgctaattctaaacaggttaatgtttcttggtctccggtaaatggcgcaacctatgaagtaaatgtcaatggttcaaccacaaccgtctcttctacttctgtatctgtaagtggtggtaaccctggcgataccgtatcaataaatgtcgtcgccgtaaaagatggcaagcgaagtcctgccgcctccactacagttagaattccagatagttaattgaataacaaaaagcgaggaagagtaatctcttcctcgctttttattctcttttagcaattaatttccgctgttctaatactaattcatttaactgacgaaatcctaagaaagtattaccgcgttttaacacgtattctagtcgttcctccaaattaagtggcttcgtctcaagcgttttaatttgctctgttaaattatctaattgaactggccgatgattactccaaaacagaatagatagaaaaataccaagcgcatctcttacaataaccggagatggtttttgatgtacttttaaatcagcttccatactttctgctaaattagtcatatgttttgctaatttacggcaagctcgatccgtttcatttttccaaggaatgactccttctccttttgtgaaaaattgttgttcttgccaaaatggtaagccactaacgtaaattgattcaggatcatattcttctgcaattacatctggcgctggaaagtctggatgggttaattctactgcatatttaaattcagccatcaaatcccctcactttcgcttgtttttttccttctctacataaataaagtaaagggcatgtcggacattctgggtttcttgctttacaatggtatcttccgaaaaaaatcatgtaatggtgcgcatccgaccatagttcttttggaagttttcgtttaagtgtttcttctacttctacaacagaatctttccatctacaaataccaaggcgtttactaattcgctctacatgcgtatcaactgcgattgctgggatgccaaagccaactgataaaacaacattggctgtttttctaccgacacctggtaagctttctagttccgcatgtgtccgaggaacttctccgttaaattcagcgagaatttttgcagataagccttgaatattttttgctttatttcggtataaacctatcgaacgaatatcatccattaattcttctaatggtacagctaaataatcttctggtcggtgatatttttcaaaaagtgaagctgtcactcgattgactaaaacatctgtacactgggcggataatacaactgcaaccagtaactcaaacgtatttttatggattagttcgcaatgtgctgctggaaacattttcgccatttcttctatgcataatacggtttgtttatttgataacaatttgtttatgtcacccttttcttttttcgagccagtcgtataatggaatcgaccctgcgctttttttgacttcgctttgattaatcgtttggctagttcggccgttttgatgaaattcttctgctactcgtttggcatcgtctattgtcttaacgccttgtttcgaccaattaagtaatatcctatcaatatagcggaaatttagtttttgtgaaataacagcttctttaagggcctccttgattaaatcaggacttgttctatcttgatcaacccatgcagataacatttctgcctccattggcgaaagcggtctgccaaattccgcttcaaataaactgtacaaattcgtttgttgctccacttccagatcttgtctattatccgcttcgatattttcgtaaaatgcgactaatttgccccaaagcggttctaaattatattgttcagaaatcattaatgaattatctttactttgttcaatagcaaccacgctttttttaagcagtgaatccattgttttaatagtatcttccagtcgaagtgttgttctatctgttaacatctccatcgaaggaaaaaattctgcttctgctgcaaatgattgtatttgaagtaaaagtactaattcattttcatttaggccaattgctgcatagtttttcactaatacttgtggcaaagttacttgcccttcagccatccatttctcaagcattttatgatccattttaaacacctcactccaaaattataacatggttttcaagggaaaaatataaaagtaatgagaaaatcactaaatcagttggaaaagctgttttttactcggtagaaataaaaaagtgaagccaatagatggcttcactttttcttaaggatataaacggttaagtaagcgtgggaatggaattgtttcgcgaacatgttctgttccggaaatccaagctaccgtacgctctaaaccaagtccaaaaccagagtgtggtacagaaccgtaacgagctaaatcaagataccagctatatgcttcttggtctaaatcgaaatcttccattctagcttgtagtgtttctaaatcatgaatacgttcagatccgccaataatttctccgtatccttctggagcaatcatatcggcacataaaacaacttgatcgttttctggatcttctggcatataaaatggtttaattgcttttggataatgtgtaataaacactggtttttcgaagctatccgcaatcgctgtttcatgcggtgccccgaaatcatctccccaaacaatgtcatcaaagcctaattcgtgtaaacgttcaattgcttctgtataagtaatacgcgggaacggtgcaaccattttttctaaatgactcacatcacgtccaaggcgatccagttccaagcgacagttatcaagtactgcttttacaaggaaagccacatagttttcttgaacttgtaagctatcttctaatttgtaaaaagccatttctggttcaatcatccagaattcaattaaatgacgacgtgtttttgatttttcagcacggaaagtcgggccgaatgagaatacttttccgaaagccattgctgctgcttccatatataattgtccactttgagaaagaaaggcatcttcatcaaaatatttcgtatggaatagttcggttgttccttctggtgcactaccagttaagataggtggatcaatttttaggaatccttctttattgaaaaattcataactagcgcggataatttcattacggattttcatgatagcgtgttgacgattagaacgtaaccataaatgacggtgatccattaaaaattccgtaccgtgttctttcggtgtaattggatagtcatgcgattcgctaattacttctacgccagatacagccatttcataaccaaatggggaacgtgtatcttcattaattgtacctgttacaaataagcttgtttcttgtgttaaagctttggcagtggcaaacatatcgtcgccaacttctgcttttacgacaacgccttgcataaatcctgttccatcacgtaattgtaagaaagcaattttcccacttgaacgcttattcgcaagccatgctccaatagttacttcttttccgacaaattcggatgcttgattgattgtaattttcacttgtctacactccctatttcataaaacttttgattcgatttatagcttcttggaataagtctggatttgttgcataagaaaggcgtatataatcgggcattccgaatcctgagcctggaatgactgcgactttcgcttcttctaaaagagctgctacaaaggcatctacatcctgaaaaccttttttatgtgccgcttcttttacttcaataaagaaataaaaagcgccatctggtttttttggtttaaatcctggaatactacttagttctggataaaagcgttccattctctcttcaaaagctttgtacattttttctggaacttcttgactaccaacataagcttctagcgccgcatactgagcattcgcagtggggttacttgttaaatgatctgcaagtttactcattccagcgataatttctttatttgcagctgcgtaaccaatccgccatccagtcatggaataagctttggatacaccattaattacgatagttaaatcatataaacggtcacttaagctagcaatagaaactaaatccgctttgtttccgtagtataatttctcatagatttcatcagataaaatgtaaatctgatgtttttcagcaactgcgccaattgcggctaattcgtcttttgtatagcacatgccagacggattgttgggcgaattcaacacaattgcttttgttttttcagtgatagcatgttcaaaatcagttgctgatattttgaaatctgcatcaaagccagtttcgacaaataccggaactccgccagctaattttacttgttctgggtaagtaacccagtatggaacgggaataatgacttcatcgccaggatccaaaatcgtttgaaacgcagaatataatacatgttttgcccctgtacctacaaaaatctgattggcttcataggttaatgactggtcttttttgagcttatccacaattgcttgtttaagttcgagtattccgcttgaaggagtatatttcgtgaatcccttattcatggactcgatagctgcatcgataatattttgcggggtattaaaatctggttccccagcacctaatccgataacatcaattccttcttgtttcatttgttttgcttttgccgtaatcgcgagtgttggcgacggggcaactcctttgacacgttttgacaacggtaagtccattttattccctcctccagtttaattacaaattctcaatttctctgtaccattcacctgtttcaaagttaatgtcaaagtaatttagcttgtcgtttttgtctagatacgctacttcccaaataggtgtttctttttccatgcctaaagtaacatgcaaaatttttgctggattcttttcttttactactttgtcgcgtgcttgactttctgtaataccatcagatgcgaatttaacatatactttgtcggattttttctttggaacccagacaatgattttcttatctttactgtttttgccagttaagacataataaacttctttcggaccattgtataaataaaatttatctgtggtctttaaatcaacttggccacttattcggtctaaagcttctgtttctgcgttggttactggtttttctgcctgtctaaagtacagaaaagccgccacgataagcacaataattatgccgagaataatcgctatccatttgccaatcttacggttaggttttctatttcgcaaaataatctcgctcatttctatttctaaattaccggaaaattgcccggcgatatgcattttcattttcgcatagatacattatagcaatagcagccatagatttgaagtcatattaggaaaaatttaaccttccttaaagaattcactaacttcttccagtaaatcagcttgatttccttttaaaattggtgcactaggaatagactccaaaaaggttttcccaaatcttgtagtatcgacccgattatcaaacacaaaaacaatgccgcggtccgattcgcgtctaattaacctaccaaacccttgtttaaaacgcaaaacggcttctggtaaggaataggtttgaaatgcattttcaccgcgctcttttcgaagagcaatttgcgctttcgtgtagggatcatccatcggcgcaaacggaagcctaacaatcacaagacatgataaatcttctcctggaatgtcaatcccttcccaaaaactcgttgtcccaagtaaaattgctttatcaaacatttggaactgtttggttaaacgtgcggcgcttcccgctgaaacgccttgcgcgagaaccacatattcttctaatgatttttcatttttcatatgataatacgttttttgcaacatttctgaggctgtaaaaagaactaacatccgcccgtttgttttcacagctatatgacgaatatatttagctagttccgccgtataacgttcaatgggtgtatctttaattggcggcatatcatcaggtatcatcacacgcgcattttctttataatcaaatggcgatggaatacgtttttcaactagctgttccttttctaagccaagactttttcgcaaatagtcaaattttccatttacagtaagggttgctgaagtcataatgacactttcttttttagcaaaaaattctttgccaagcgttggttcgacttccataagtaccgctttcagacgaatactagagatagaatgatttttatctgcttgcaaatagatagttagaataggtgattttttatgaagcatttgctctagttgtttaacaatatttttccaatcaagtaaaaaggcatacatttcttctaaaaaagcgctctcggcttcacctagttcattttcttctcgtttaccttgcgcgagtaaagtttccatatttttttcagattcttgaagtaagcgaagtactttttcagcagcataatatatcgcgtcattccaagcgtctttttcactattttcaactaaaacaacttcttgtaagtttttacgtgcgtaattcagttgcatttttaggagggtaaaaaattcttctactgcctcgcctaacttcatcgcagcaatatctaagtcatataaactatccgcctctggaaaagccattgctagccttgtgagtaatgaatatttttcaagggaaccaagctggtttaaataatatttaagtttgcgataggaaagaataaaactaccttgtgttctagcgctatcagcaaaatggtgggcctcatcaatgaccagaaatgcatacttcggcaatgtctgtcttccagaaaaatgatcgctcaaaagaagcgcgtgattcacaataactaaatcagcatttctcgcctgttcgatgttgaatttataaaaatcatgtgccaaccacggatcatgtttttcagataaaaaccaaccagtatgcttcatgcggttccaaaatagctcaccaccactcgataaattgacttcatcaatatcaccggttgtggtttcagttagccaaacgagtagttttagtttggttacaacgacatcgtattgcgggtcgacttcttgaagcaattgttcgaatttaaataagttcaaatagtgatcccgacctttaagtaaactcgcttttacttcaaaaccagttagtttcgttaaaagtggtacgtctttttcaaataattgggcttgaagtagattcgtatatgtacttattacaacaggtaattcagcttgtttagcttgataaatagctggtaaaaaatagcccaatgacttcccaatacctgttcctgcctcaattagagcatgttttcctgatttcatagcttggaaaactagattcatcatttcaaactgaccacttcttgcataaagtggggctcctgcttttttaaatagtgccattttcgcttcatcagtctcaggaaattcaagcaaatctgctcgactataggttggttttttgacctctttttttcgaattactagaccacggtgttcggtaaaagctggatcaagtggtttattttctcgttcttttttcatttctatttcaaataaaagctctggtaagtaactttttaggctccctgaaatagttgccatttgccgaataatcggaagtggtaaattttcgagtttatctaataacaataaaagtaaatctgcggttacttccgcatcactatctgcgcggtgtggtttgtcatgccctagaccaaattcatctgataagtcttgtaatttatagctatcaatcccaggatacataatacgcgcaagttcaacagtatcaagctttttcattttgcctaatgaaattccagcacgtgtcatttctcgttctaaaaaagtccaatcaaacgagacattatgcgctacgaaaatagtatcttctaacagactagcaataattggtgccacatcttcaaatagtggagcattcttcacatcttttggagaaatccccgttaattcttgaataaaagcaggaattggcttttctggatttaaaaaagtggagtatgtttccaggcgttttccagattcaacaaaacatgcagcgaactgaataatgcggtcttctcgtgaagcttggtttcctgttgtttctaaatcaacgacaatataacgcttctttttcatttgctccacctctttccttcactgcttttattcaaaaataacgtttcaaacaaacgagtagcttgagcagaaatccgctcaagctccccgaattgcttataaagtcgtatgcgctttttcttctggaagaatcatttcaatatgatttttttcgtctaataccacaattttgggttcatgtgtttttgcttcttccgacgtaaacatcccgtagctcatgataataaccacatcgccaacttggacgtgtcttgcagcagctccatttaggcaaatcacaccactacctggctcacctgggataatatacgtttcaattcttgcgccattattattatttacaatttgaactttttcgtttggaagcatatccaccgcttctaaaatagcagagtcaatcgtaatacttcctacataattcagattggcttctgttacagtcgctcggtgaattttgccattcatcatagttctaaacattttttaccgcctcttcacatttattaattcattatcgattaaacgagctttcgaatatttcactgccgcagctataattatgcccttagtccaatctgttaccggagtaaattcaggataagaatataacgctagataggcgattttctcgtgagatgtttgctcattaattttgtctgtcataacttgcactattttcgcttcatctgtctcgccagaatcaattaattgccgaccaagttgtaaagcagcgtgaataactggcgcttctttacgttcggtttctgtgaggtagacatttcgtgaactcttcgcaagtccatcagcctctctaactgtaggaatgattcgcaaattcaccgggaaaaagtaatcttctacaaggccggaaactaccgctacttgttgggcatctttttgaccaaaataagcattatctggattcactaaatgaaatagcttcgttaaaactgtaactacaccgtcaaaatggccttccctgtcagcaccatcaaggacagaaacgcgtttaatgacgtgcaatttcgttgctaattcagtaggatagatttcctcaactgtcggcacaaataaaatgtcgacgccaccttcttcagcaagttttgcatcgtgcgcttcatcgcgtggataggcgtcaaagtcttcgttaggaccaaattgggttggatttacaaaaacgctcataacgacaaaatccgtttcttttcttgcatggcttacaagcgtcatatgcccttcatgtaaaaaacccattgttggcacgaaaccgattgttttattcgcttttttttgttttaaaattgcttctttaagttcttgtctatttcgaatgattaacattggctattcccttccataaaggccttttaagtcttcttcggccattgtaaagctatgtttcacttctggaaacgctagttcttttacgtcattcacatagtttttaagtgctggttcaatagtttcgtcaatatccgcataagctttcacaaattttgctcggcgattgataccataaccgattatatcgtggtatacaagtacttgaccgtctgtttctaaaccagctccaataccaatagttggaatagtaagtgccttagttactttttcagctagctgacgaggaattgcctcaagaacaatagcaatagctcctgctgcctcaaccgctaacgcattgtcaatcaactcttgcgcttcttgaactgatttagcgcgaactttatagcttcccgttaagccaacactttgtggcgttaagccaagatgagcgacaactggtgcaccggcttctgtcaaacgagcaattttgttaacaacttctcctgcgccttctagttttacagcatgtgcgccgctctcttgaataatcttacgtgcgttttgaatagtttcatctactgagccgtgataagtcataaaaggcatatccgttacaacaaaagtatttggcgcccctcgtttcacagctttcgtatgatgaatcatatcattcattgttactggtacagttgaatcgtagcctaatactaccattccaagtgaatcaccaactaaaatcatatctgcttctgcttgttctacattcttagcagaaggataatcgtaagcggtaatcatcgtgattttttctccgttttccttcatagcaaaaaagtctactggttttttcattttcttagctccttttcgtccctgttaaatgaattaatcaaggcaaaaaacaaatttttgtaagtagcgttagtatgatccggtaaaggtatcatccattctttgctaccatatgtataataccataaatagatgcttacttaaagtatgtaaattgaagagaggtttactctgaaacctctccgctcactttattcatccaattagttaacttcgctggttcatctgttgcagcataagtagatgctactttaccgtcctttaaatataccattgtcggaacggaatcaatgtccatcttttttaaaagcgcaatcatatcatctcggcttttttcagatgctttgtcagtattgtaataagccattttttgatctggttgtcttttttcaagttctttctttaaaataggttggaacgcttggcagtcttcgcaagttggacgcccaacataaacaaagccagttgttttgtccgccattttttgtttaaagtctttcgtggaaattgtatttaaaaaggttgcactctctttttcggtttgctttgttttctcttctgtttcttttttattatcaccacatgcccctagagtgagaactacggtaaacagtgctaatagtaatataatttttttcataacaacgactccttcgtgcttattgtactagatttttctcaaaaaagaaaaactcgaaaaagtgattttcacactgtattttcgagttaaaagatatgttttaggctattttattagggtcaaaacaatcttttgatagcgattttattatttttcattatccagcaaaatatctgctgagtaaatcgaatgaatctcgcctagtgaatcttgaagtaagagcacgccttcatcagaaataccttttacttgtccgtgaatttttccttttgtcgtgctggctgttaatttttcaccaaaaggaatcgcttttgtttcccataataactttatcggtgcaaatcctttatctaagaaaagttcataatacttctctaaagaagttagtattgcttgtaataatgcttttctcgatacactttcgcctagttccagtttaagtgaactggctttctctttgatttcttctggaaactcttgctgattcacattaatacccatgccaataataaccgcatgaattgtttctgcttcggcttgcatttctgttagtacgccacagatttttcgtttaccaatataaatatcgtttggccatttgattttcggttcgagtttcgtgatattttcaattgcttctgtaatagcgagcgaggcgataaaagtgaactggggtactttttgaattggaatttgcggttttaagatcacgctcatccaaatgccttccccttttttagaattccagggacgaagcaagcgccctttcccagcggtttgttcatctgctacaataacggttccttctgggcttgaattcatttgttggtgcgctatgatttgcgtggagttcactgattcatatatttctaaatgttgcccgataaattttgtttctaaaccgagtagtagcgcgtctttcgtatactgttcagctgttgctgataaacgatacccgcgatttctgactgcttcgatttcaaaaccttctttacgtagtgcttccatttgtttccaaacggctgtacgcgagcaacctagactatccgcaatttcttgaccggataaataagcgccatcactttctgtaaataatgcaagcaatttttcccgattattcttcatgatagcctagccaccttttaatctgatttttttcattgttaattttgcccagtaatacttggcattcaactttatcaagcgtctcttttacccaaggaccagcgttttcccctgtccatttgagtaaatcagcacctgtaatcgctaaatcttttttggagtgaattggaagtaattcgtatgcttttttcagttcatcttccttgtcactttgaccacgaatattatttatttcatttactaacaaaaaaactgcttcctgagcatgatatagttcttctgttagccaagtttctttcatattaagggcagcttcgtaagctttattcacaagttgaatggttttgttcggtaatttccacgcttttaaaaatgcggtaatattactcggtttaacggcaattacaagtccaagccaaatcgcggtttcagtcgtccgtttttcccagttccaactagcaaattccattaaggctgatttttcacctttaaaacctggcaaataggtttccatttctacttttaaaagtaaatctattgcgcgttttacagcttggcctttgatcatttttatccattcgacagtgattctttcaacagaagtatgctgtaataaggcaatttgatttgtcagagcggtttcggtttctttatctaactgaaaatcaagttggcttagaaagcgcactgctcgcatcattctaagcgcgtcttcatggaaacgttcagacgctttaccaactgctttaatttctttattttgaattgctaattgtccggaaaatggatcgtgtaatttaaaattttcgtccatcgcaatagcattcatggtaaagtcacgacgcagtaagtcttcttccagcgaacgaataaacgtcacttcactaggacgtcgaaaatcttcataagtgccttctgttcgaaaagtggtcacttcatagcactctttgttttctctaactgttactgttccgtgcgcaatcccagtgtcataagtggactggaaaatctcctttacttcttctgggaaagcactagttgcaatatctacatcggaaataggtctatttagtaagtaatctctgacagatccgccaacaaaatacgcttcaaatcccgcagtagtcaatttttgcaaaacaggaagcgcttttagaaaaacgtcattcatctgtcatcgctcctttattcatcgtttcttcttaaatctcgccaatctagaaagccagctcctaaaccgcgaattaaaatttctgctgttccaatattagttgctaaaggaatttcgtatacatcgcataatcgtatcagcgcgcttacatctggttcatgtggctgagcggtcagcgggtcacgcaagaaaataactaagtccattttattttcagaaatgcgcgcaccaatttgttgatcgccaccaagcggaccagatttaaaacgatgcaccgttaagccagttgcttcaataatccgcaaaccagtcgtgcctgttgcgtacaactgatgcggttcgagcaaatgtttatatgcggttgcaaatccaaccatcaaatccttcttttcatcgtgcgcgattaatgcgatatgcatctcattcacctatccttagtctaaaatattttctaagccataaataagtgtttcaagttcttttgttttacgaacagaaagagcaacaccagacataaaggaaattcggtcatatgagtcatggcgaatcgttaagccttgtccttccgctccaaaaataacttcttgatgtgcaacaaggcctggtaaacgaacgctatggatacgcattccttcatattctccgcctctagcaccttcaataagttcgacttcatctgctgcaccttgtttaacgaattcacgtgtttctgccatcatttccgcagttttaacagcagtaccacttggcgcgtctagtttattatcatggtgtaactcaataatttcgacgttcgggaaatatttagccgctttttgtgcaaattgcatcattaaaacagctcctacagcaaagtttggcgcaattaacgcaccgatttttttcgattctgcaattgattttagttcactaatttgttctggtgtaaaacctgtagtcccaacgaccgcacgtacgctgtgttctaaaatcgttttcgtgttactataccctactttagggatcgtaaaatcaacgacgcaatccggttttatttcttctaacatttcgcttaaatcgccatacactggtacatctaacgagctaaactccacaatttcgcggatgtttttttcttttggttcatggtcaagcacagcaactaattccaagtcttcttctcttaaaatagttttaacaacctcgtgtcccattcttcctttaaatccagatactgctactttcattttgatttgtcctccttttttgtccagcggtctttatcgcgttctttaaatttcgccatgaccgtatcgtgtgctttttccatatcaatatcaagtgagtttgccatgcaagtaagaacaaaaaggcaatcgccaagttcctctgctacggttttagtaggttcacttgttttcttcggtttttcaccataataatgattaatttctctagctagttcgccggtttcttcagtaattcgtgccatcattgctagtggggaaaagtatccttcctcgaatccaccaatgaaatcatccacttctttttgtatttctgccatggttttcgccataggttttccccctttttgtgttaaactaaaattggttttaagtctaattgttaacttcatttcattatacctaaacaaatacatacaagtccatgattttttacttacttattaaataggttccaaggaggaaaaaagctatgttaaaaacactgcgcacgaaaaatatttgctttattatgcttggtacggcaatctatgcatttggattagttaattttaatatcgcaaataatctcggtgagggtggccttgcaggggttacattattcctgcttcatttctttcaaattgaccccgcctactccaacttagtcttgaacattcctttatttattataggttggcgtgtattaggtagtcgttccctcatttatactggaattggtactgttagcctttccttatttttatggattttccagcgtatcccttatacattagatttacatagtgacttacttttagtagccctttttgctggaggttttagcggaattgggcttgggcttgtgtttcgatatggtggtacaactggcggtagtgatattatcgccaaattactgaatcatacaaaaggaattagtatggggcgtacgctcttcgcaattgatgcgatagtgcttgctgcttctttatcttatttggatgttcgccaagtaatgtatacacttgtcgctgttttcatcggttcacgcgtcattgattttgttcaagaaggtgcttatgctgcacgcggcgccttgattatttctaaagataatgatgccatcgcttcccatgtaatgctctcgatgaatcgtggtgtaacagtacttgaaggtcgtggtggcttttctaaaaatgaacaagatgtgctttatattgtcgttgctaaaaatgaaattgtgcaattaaagaatattgtccaagcgattgaccctcatgcttttgtttcagtgagcgttgttcatgatgtgatgggcgaaggtttcacactcgacgaaaacaaaaatcctatttactaatgtattttcttggatcataattttctaaagctaaatcggttgtgtttaatagtgccaaatcggctagcagtttaccgacatatggtccagttgttaagccagaagcacccagcccattcgctaaaaagatcgagtcaaaaccaggtagctgtccaattagtggcgcaaaatccggcgtataaggtcgtgttccaaccgccacattagctattttatgttccaactcaccctccataaacttactgacttctgctaatatttctgccttaccttccgctgttggctctatattgaagccagcagctttttcatgtgttgccccgacaattatttttccattatcaaacggaacaatcgattttgcacttggaggtaaaatcactggccattctgctgtttcgtattcactaaaatcaagttcaagcaattgacctttctgtgctaaaacatccgtatgaaagcccgcctcctgtaataaattaggtagccaagcacctgctgaaataattagtttatcgtaactttctttttccccatcaaccaaaacctccccttttggtgaaaaatgagccaaaccagttttgatttccacaccattttctttggctgcatagcgtaaagtttcacaaaacaaaccgccattaacccgcgccgccccgcttacataaacagaactaaatcccggtttcactaaagggaatttttgctttgtttcggcttctgataatttttcaatatcacccattactggtgctcctgcttgtctttccattgccagattaaaaagttccgttgctttttcctctgtttgccgaagtgcgagcacgccaacttgtttataaccagaatctcttccagtttcttcactaagactttctgcaatttctttataaaacgccgcactgttctttgctagttcgtaccaatatttatttcgtcttttggaaagccatggacaaataattccggcagctgctctcgttgcctgcccaggttcattagaatcaattagcgttacttgaacattttcttttgatagtaaatatgctgcactggctccaacaattccgccaccgattatcactattttttgcattgttacacccctctatatcaattgtgacacaagttgacttttttataactctttgtaataatatgtgaaaatagttaagtttacagtctactaaaaatcctctacttcattctatccattgtactgaaatccagctttaattacaaaaaggcagattttggcttatctcgtcgtcattaccacatatcctcttagagatcgctttcgccgattggttggttctttgtactgcgtctcagctaaaaattcatttatttttttattctgcctatattaacttttcagctgattcattatgctgagatatgggagatttttttatgccaaatattcttgattcattatggaacagcatggcgctttttttatcagcgcttttttttcacggaatggcactgcggtcaattagagaaaaaaagcctgcttggttccaaattaaatttgcaaatgaaattattaattatgcactgggcatttactacggcttattaggtgtttattttattgtccgtggattacctgggacggattctgggatttatacagatatgttattagatattttaattgttttacacttgttttcatcagcgggtccagctactatcgcgttagtactcattgtggcaggaaaactctttcttggtgatgctctctttgccaatttaatttatgtgtttttaattattggttttcactttgtttgtatggaagtagctaaattacgtcttagctctgttcaaaaagtagtactcgtcaaacttagcgccattccactaatgcttatttatttacatcaaaaaatacatcttacatatacaatacatgatgtgccagtttggacactctatttcttggtttctttttttattacctttattattatttcagcggcttattatattgatacatcaaataagctgatttatgaattgcagcaatcgactattcttgatccacttaccggtctaacaaactttcgtcactttgaaaaaacgttcgaagctgcttttcactatgctactttaaaaaaatcgaacttaagtttaattattattgatattgattattttaaacgggtaaatgatacatatggccatttagttggaaatggtgttttatctacttttagccaaatgcttttaaaaattagttttccaccaaatacggttatatctcgcattggcggggaagaattcgctattattttgccaaatattaatgtcagcgaaacagaacacttagcagaaaaaatccggcgtaaagtcgagaaaattgatgttccgatagcaacaactggctcggttattaccatttccgctggtatcgcaaattatgatggtaaaaattatccaaacgctaacgaactaatgcatgcagcagatcaagcactttacaatgcaaaacgaaatggacgaaatcaagtacatattcgtgaaacaacagatccagttatttaataaaaaggagatgagtccatttgttcgagctagttaattcatacatagacagtttagcgctctttcttgctatcctttttattcaaggtatgtcttttcgaaaaataagacaatatcgtcctaattggttccaaaatggtaataggcgattttttctctctattcttcttggtgtttattatggtttagcagggatttattttatctatgaaggtgcatatgaacataatcctgttatttatacgaatatgcggattttaatattgatggttacaggtgtatttgctggtcgtactccgcttattgttgcttatgtcgtaatgcttttcggacgaattagttttgatatagcatcgcccgttactagtcgctacgttattttaatgacacttatttttgcggcttgtttacttattactttttggaaaaaacaacgcttttcaaaatttattgcgttaattattttgaacttcccagcaatcctctattattttgtgaataattttgatgaaggacgaattttgcggggcgttgaaattgtcgaatacttcctgctatttttcgtcactgctttgctggtattttatgcgtgcaattatattgataaaagtaatttagttatccaaaacttgaccgaaaccgcgatgaccgatagtctaaccaacttacctaacatgcgatttttcacgcaacagtttgcttggatttttaataaatctcaaaaaagaaaaaaagcgttatccttatttattattgatattgatcattttaaagaaattaatgattttcatggacatcaagcaggaaatactgttttagcgcagtttagtagcattctcaaaaatcgaacctttccaccaagaacgatgtttgctcgaattggcggagaagaattcgctgttttactgcaaaatgttggaacagaacaagctgccttaattgctgattttttacgggatgaaattgaacgagctaagtttccgtacaatccagttagtggtaatgtaacggtctccatcggggttgcttctatggggtacaactatagaacgaccgaatcactttttgaggctgctgaccaagcactttatcaagcaaagcaaaatgggcgtaaccaaattgccattcatcaggaggaaagcgaatgaagcgaacaattattatcacttttttactgctcttaattggcacaggtatatactttttccttcgcccagaacaaaaagatactctaagcgcacctaaagagacaaaacccacttcaagctcggttcaaacttatgtaaaagaaaattatatgaccaaaaacggtttaattattgattacaaaaatgcccaagaaccgcattatttagccgagagcatcggactttatatggagtatttagtagaagtgaatgatagcaagactttccaagaacaagtggctactttacaaaaacattttataacaacagacaattttattaaatgggaagcgactgatagcacaactaccaacgctattgtagatgattttcggattacagaagcactttatcaagcgagtaaaaaatgggaccatcaagcgtatcaaacccttgccgatacacttatctccaacacgaaaaaatatagcgccgttcaaggagttccagtggatttctatgattttgttcataagaaaaaagcagatacacttcatttaagttatctaaatatccaagcaatgcgccacattaactatagcgcaaaagcctatgctcctatcaagaacgtcagcgccactcctttttttacagaagtgtttcaaaatggacaatttcaaaatgctgacgcaaacgaagtcaatatgattgatcaaatgctcatagctatcgcctattatgacgaaaatggtacagttgagccaaatttcgaccaatttttacaaacagaactggcttcaaaaggaaaaatttatgccagatatgatagagaaacaaaagagccgaactctgaaaacgaatctactgccgtttatgcctttttgacacagtattttaacaagacaaatcaagctaaaaatggtaaaatcaccaaagagttgttagagaaaatggacacgtcaaatcctgaaacgacccattttttcgattatataaataaagaaataactcttaagaaataacggaaagaagttggacaaatgaaaaagccctccgtaagtgagattattgatcaaaacctctttgatacaatatacgaaccgattgttgctgtttcaaatacacaagttttcggatatgagtcactcacccgcttaaaaacaaatcactggaacgccattagtgattttattgaagaagcggaacaggaaggtcagcaaaaagcttttgaactgctcacgcttcataatgcagtcaaacgctttgaaaaaggtgaaaacacgccattatttgtcaatatttcctatgatacatttttagaaaatcaagaagaactacacgatacccttcttgataacgggaaaatagtttttgaatttttggaaacatccaagttaccgcaagaacgaatgaacgacttagaaaaacaactacgcttattccagaaaaaacatgagactaaatttgctattgatgattttggctcaggttacgccgacttgcatcgcgtatttgcgcaccattctgactttgtaaaaactgatcgcttattacttcgagatttatttgaaagtgacggcaagagaaacttctttgagcaacttcatcactacgtcaaaaagcatcataaatccttgattgttgaaggagtagaaacaaaagaacagttaaagttccttcaagaaattggcatcccctatgcacaaggttactattttcattaatatgtaaaaaaagaaaatctgattggtttcaggttttcttttttgaatcagttgttattctccttccccccatgtaaaatagaatagaatgaaaaggagtgcttgaaatgactttaaaatcaggttttgactatatgaataacccactattaaataaaggaacagcttttacaagtgaggaaagattaaactataaattagacggattactgccgccaattatcgaaacaatcgaacaacaagctttgcgcatcgaaaaccaactagaaaacttagaatcccctctacataaacaccaatttttaacaaacttatataacgaaaatcgcacactttattattacgttgttaccaaaaacgtgagcgaatatttgccaattatttatacgccaacgattggggatgcggtaatacattatcatacagactataccgcgcctgatgaagctttatttattgatgcttttacacccgaaaaactaagagcatctgttgaaaattatgcgcaaaacaatccaaatattgatatgatcgtgattacagatggtgaaggcgtgctcggcattggtgattggggcgtgaacggcgtcaaaatagcagtcggaaaattagcagtttatacggttgcggctggcctttctcctgaccgtgttctcccagttgtaattgatgcaggaacaaataataaaacactacttgaagactcgcgttacttagggaataaacgtccgcgcctgtcagaaagcgattacgatacttttatcgcacaatttgtggaagtcatgagtgatgttttcccaagcgctattcttcactgggaagattttggccgggcaaatgcaagtcgtatcctccacaattatcgtgataaaatttgtacgtttaatgatgatatacaaggaactggcgcgatggttgttgccgctgctcttgcaacaattaacgtttcaaatattcctttaaacaaacaaaagattattattttcggtgctggaactgctggcatcggtattgctgatcaactcagtggtcaattgatgcgcgaaactggtcttccttttgaaagtgcaaaaaaacatttttacttactggaccgtagtggtttagtgcttgataatatgaccgatttaacggatggtcaaaagaaatatgcgcatcaagcttctgactgggctagcgtgcctactgatacattagaacacttagttgaagcaattcatccaacaatgctaattggctgttctggcgttactggagcctttaaagagagcatcgtaaaaaaaatgacggagcatacagaacgaccagcaattttgccgctgtctaatccaaccaaattagctgaagcaactgccgcagacttgattaaatggacagatggaaaagcgctaatcgtaacaggaagtccatccaaacccgtgacttatcaaaatattacctatgaaattggtcaagctaataacgcccttctataccctgggcttggacttggcgcacttgttacacgttctaaatttattacagacggaatgctagccgctgcatcaagtgccgttagtgatcaaatttctacaaacgaacttggagctgccctcttaccacatgttcgtacacttagagaaacttcccgcgcggttgctattgcggtagcgaaccaagcaatcaaagaaaatatccaccaagtcgagttagcaagtgtcacaaaagctgtcgaacgtgagatgtggcaaccaacttataaaggagtttaagtatgttttataaaacgaagcaattactagatcaacttgtccaaaacgggtccactccaggaattagctatcaaatcaaaacaaataacctcgaagaaaatagaataatgggtttaaaatccgttttccctgaagcgcaaatcctccctagaacgacagacaacatttatgatattgcttctttgaccaaggtaattgctacgacaacacgtgtattacaacttattgaacaaaaacatttccagttagaagatccagtacaagcctatcttcctgattttaagtacgagaatgttactattttacatttactcacccatagctctggccttgcacaaaatattccaaactacaaaatgggtgctaaagaagatgttagaagctatgtttttgcaacgcctcaagtgaattcacctggaactcaggtcacctatgctgatgctaattttctcttgctcggttatttgattagtaaatttgatggaaattatgagcaatcaattcaaaaaaacatcttagaaccgctgaaaatgtcacacactagttttcatccaactgataaaagccaagtcattccaactgaactagaccaaacgcgcggtttaattcaaggcgatgtgcacgatttcaaagcctggaccgccaaatcgggcactggacacgcgggactttttagcaccctcgctgatctttcaaaatttcgagatgcgctaattttacaaaacggcgaccctattcttactgaaaaaactctacaaataatgcaaattaatcatacgcctgggctaaaccggacgcgcggccttggctgggatctccgcggcgactctgttttatatcatacaggatttactggcacttttatggcgctcgatttacaaaatcaagcaagcctcatcgtgttatctaatcgcgttcacccaagccgtgccaaccctaattttgtcttaaaaagagatagcatagtcgatacttttttagaagaagtgactgcaaataaagaagtctagccttaacgctaggctttttttctataaaaaactgtattaacacagccattcaaagccttttttagttatataaaagaaatttattttctttccatttttatattgttttcgttttcacaaaggagtatgctgttcaatgaagaaagattctaagaacaagtttctggttgtaagtgaaaagaaacacaattgaaggaggaaataataatgacaaaagcatgggatggttttaaaggaaccgcatggcaagaaaacattagtgtaggacaatttgttcaagacaactacactccttatgatggcgatgaaagctttttagaaaagagcacaccaagaacaactaaacttaatgaaaaaataaataaacttgtagaagaaatggacgcaaaaggtggcgttcttgatatggataacgcaatcgtatcaaacgttgcctctcacaaagctggttacgtggacaaagaaaatgaagtaatcgttggtttacaaacagacaaacctttcaaattagcatttatgccaaatggcggtcttagaactgcagaacaatgtttaacagacaatggttattctatcgaccaagaattacatgacttttacgtaaaaaaccgttccactgcaaatgatggtatttttagagcatatacagatgatattaaacgtgcgcgtcactcgcatatcgttagtggtcttccagatgcatactctcgcggaagaatcatcggcttataccaaaaaccagcactttacggagtggatcgtttaatcgctgaaaaacaacaagatttgaaaaaaatcgcgatttcttctgatgaaaatattcgtctacgtgaagaaatctggttacaaatcaaagcacttaaagacttaatcgttttaggtaacgaatatggcttagaactcggccgtcccgctgaaaacgcaaccgaagctgtacaatggacatacatgggctaccttgcttcaatcaaacaagcaaacggtgctgcaagctcatttggtcgtattccgattttccttgatatttacatccaacgtgatttagaaaaaggaattatcacagaattcgatgcacaagaattaatcgaacaattaactttaaaattaagaatggtccgttttgcaagaacagatggttacaacgagctttacgcttccaacccaacattcgtaacaacttctatggctggtatgggggcagatggtcgtcaccgcgttacaaaaacagattatcgtttcttacactgcttagataacctaggaaactcagcagaaccaaacttaactgtcctatgggatgctcgtttaccagaaagctttaaagaatattgtatgaaaatgagtgtaaaacattcctccattcaatatgaaaatgataaattaatgcaagaagaaggctacggcgatatgcaatgtatcagctgttgtgtgagcccacttaacccagaagcagacaaagacaaaggtgaaactcataacctgcaatatttcggagctcgtgtcaacgtactaaaatgtcttctaggcgctatcaacggtggtaaagatgatcttcataaaaaccaagtattcgacgttgtagaaccaattacaacagaataccttgaatacgacgaagttctagataaattcgataaatcaatggactggttaacagacacttatgtagatgcaatgaacatcattcactttatgacagacaaatacaactacgaaagcatgcaaatggccttcctaccatcaaaagtaactgccaacatgggattcggtatttgtggattcgcgaatgtagtagatagcttaagtgcgattaaatatgccaaagtaaaaaccatccgcgatgaagatggctttgtatatgactatgaagtagaaggcgacttccctcgttacggtgaaaatgatgaccgtgctgatgacattgccgtaatggttctaaaaatgttcaaagacaaattagactcccataaactttacaaagatagtgaagcaactgtttctgttttaacaatcacttcaaacgttgcttattctaaacaatgtggtaactccccagtgcataaaggacctgtattcgatgaaaatggtaaaatcatcaaagaaccagaattcttcagcccaggagctaacccttctaacaaagcaaaaggtggtttcttagataaccttgccagtctttctaaattaccattccactatgcaaatgatggaatttccttaacaatccaaggagctccaaaaatgttcggtaaaacaaccgaagaacaataccataaccttgttggtattcttgatggttactttacaaaaggtggtcaacacatcaacttaaacgttcttaaccacgacgaagtaatcgaaaaaattaaagctggtatcccagtaatcttacgtatcagcggctactgcttaaatacaaaagatctaaacgaagaacaaaaaatggaactttgccaaagaatgttccacgaaaaattaatcggttaataataaaaagtaccaagccttagaaaataagacttggtactttttttatatgtttgacacttccgccgcgtaagctccagccgtgtgtccagtcactaatgcacacgtaatattataaccacccgtgtatccattaatatcaagtatttccccgcagaaaaacaacccttccatcaatttagactgcatctcttttggtttgatttccttcacagaaaccccgccgcctgttacaaacgccttctcaaaatcaagcgtgccatttacttcaaaagtgaaatcctttaataactggataaattgctcaatttttttcgggcttacttgtttgtattcagccgtctcatccagttctgctttttccagtaaaaacaataatagtttttcttgtaaaagcgaacttaatgaatttttcaatgctttttttgggttttcttctagcagcttataaacctctttcgaaagttccgcagctgatacattcgggaataaatcaagacgcattttcaccgtacccgcgcccgttttctttagttcacgaaggacaaacatactacatctaagtgctgctggtccagatacgccaaaatgggtaaaaatcatatccatttgatgcgtaataatcggctttccttttgcatttaaaacagacaaagatacatcccgaagtgacgtcccttgtaacactttttgcttaataaaaggctcactggacgtaatcggcacttctgtcggatatagctctgtaatcgtgtgtcctgcttttttcgcccaagcatagccatctcctgtcgagcccgtccgaggaacagatttaccacccactgcgacaattactgcgctcgctgaaatctcttgcccgtcttttagcgtcacaccttttacatggccatcctcgtaatccacttgcttcacagcggtttgcatatagattttcacgccaagcttttccatccgctgaatcatcgcctcagcaacagaacgcgcgctgtttgatactggaaacattctgccgtgatcttcttcttttagtgccacaccaagtcgttcaaaaaaacgaataatatcttcattgtcaaacgcatgaaacgcactatataaaaagcgaccgttacccggaatatgtttaatgatttcttctgctggtcgtctgttcgttacattacaacgtccgccaccagacataattaatttacgtcccagtttcggtcctttttcaattaataaaactcgtttgtttttttccgctgcactgattgctgccataagtcctgatggtccgccaccaatgacaattacatcataatccattatcccgctcctttactttatccgagtataagtatagcaagcattcggctcagtgccaagcttttttcaccaaacaaaaacccgagaaaattctcaggttcgtcgtttattctaatttcgattcatattggtaaaaatgaggagtaatcttagaagttcaagtaccgcaacagccattgcagcaacgtatgtcatcgccgcagcactaaggacttttttcgcttgtggaagttccgatgatgatactagtccgccactttctaattgaacaagcgcacgtttactagcgtcaaactcaacaggcagggtaattaattggaaaagcacccctactgccatcaaaataatccctaataacataaaactagctacatttgcgagcatcccgataatgaggaacacccaagaaatattcgaactaaacatcgttacaggaacgagtgcggaacgaaaacgcataaacgcatagtcctgttgatcttgaatcgcgtgtcctacttcatgagctgcaactgctgccccagcgatagaacgaccgcggaaattagcttcagaaagaaacacggctttttttctaggatcatagtggtcacttaacatcccttttgtttcatgaacaggaacgttggttaatccatttgtatccaaaatatgacgtgcaacctcggcaccagttaaaccatttgccacaccaactttggaatactgggcataggtagttttaactcgatactgcgcccaaagagggattgctgcaacgataataaaataaataatatactgactaaacgacatctaatcatcttcctcctactacaatttttcggtaaatatccttatctcttagtatagatgaacccgtactaagactcaacatctttcactcatgatgaggaaattctaatgaacggtgacctttttttatcgttttatcatatacaagccataaaaccataaccgttagccaaaaagttgcataaccgatttcaggtaagtatttttctaatcccatataaatcggcatttggccaaataaataatcaatcacatcattatgaaacacccaaacagccgctatcataaaatgccctatacggaaacgataaaatggtgcatataaaatcccttctagcgccataaaaccatgcgttaaaattagaacgacaccagcccaaacaatcgtcttttgctcaaacatataaaaaatattcatgccaattgcccataaaccatattttactaaacagacaaaagccagtgcctccattagcggccagtgctttttggcaagaaaggctactaaagttagagtgaagaatagaatcgcggttggactatctgggacaaatagccaaaaacgcggctctgtaatttgtaattgtggtaaataccatatgtatccgtaaatcgcccctagtaaattaccgaaaaacagcaatcgtaaaaaagagcgatttgcaagtaaactataaaacaaatgattccaactccttaaaaaatcctagcatagcaataaaatgaagcactatttcactccattttattactaactaggatttatttcttattctttttctgtatccatttgctgtaaaatacgaacgagcttatggaatgtcgcttcatcacgagtatcaagcgcttcatcgatttgttgtaataatttttctcttgaaaattggtgcacagattgataaataagcgcatccgccatttctttttcctcttcagcaagcttcactgccgcaaaaggattgtcttcacgaacaagggcatattcaggtgaggtcattgcctcttcaaaatgaagttcgacatataattcctcgtcccaatttagccgaatatcatgaaaagctttttctggatctgttgtcattatgctacctttgaaaaataggaatggttcggattcaaccccgtgagcactaagcgaaagcccacgcgcacatccttccaaattatcaacaaaatgaacatattttacaatttgatcatggccagcaatataatttaaaacccacattgcttctctagttttcatctggtgtttgtttaaaaaccagcgaataaaatctttcttctcgtctattgaaatggatgccttcatctttcctcagtcccttccttcattcttttgatcaatcaaataaagataaaatctcagtatcttctggttcaagttctaaatagctacgcaaaacttcttgtgatttcgcgtgttcgccttcttctcttaaaaataaaccatattcctttaagaacgtaggattattcgtaaagtgtggataagcgagttcataatttgcttttgctttattatattgttctgtttcctgatatgcaacacttacgtcccagaaaatttgtggttcagaaataacttcttccccgagcccttctactaattcaatgacaccttcgtagttttctttcgcaagtaataatttgttcagttgcataatcgcttctgagaactcttcatcaagcacaatcgcttgacgataaaactcttctgcttcttccggcaaacgaagcgtaacagcgagtttccctgcttctaggaacatttctttgttgaattcatcttgcgttaaaccatccctaagtactgcaatggctttttctggttccccattttcttcatagcttttcgctaaataggaatataacgttgtgtacgacggatcatgttcgcgcaaatgttccaaggcgtgaattgctttcgtataatcttttgcctgataagccgttaatcccattccaaaaagtgtatcgaccgattctttgtcttctaaggcacgttcatagtagggtagcgcttcttcaaatgctccgctagctgcaaaagcttcggcaatacgttcatatacagacacggcgccatttgagataatcgttaaccctgcttctacagcggtttgataagactgtacagcagaagcgaatcgggcttgtgataaataatattcccctaaagcaaaatcaataatcggctcatttggcgccatctgtttggcttcaagtaatttttgttcactaacttcaaacaagccttgcatttgatacaaatcagctaatacgagtaaactttcaatgtaggcttcatcttctttgtttactttttctaaataatcttgcgcagcatccatatcgtctttttcaagtgctacttcggcggcacggacaagtaattcgccctcatctttatattttgctaacagaagttcgtataaatcttctgtttcatctaaaaatccaagtgcgaacaactcttctgctaaataatattgttcctcatcagtccccgcttgcactacttcatcaaagtatttcttcgcaagcgccatatcttcatgctctaacgcatgtaacattttattagccaattccatttctgcaccttctttaattataagtcgtttttctattataccattacttccctcataagaaaaagtgattgcctctcttaaataaaataccagcgccgatgtatttagcacacagcactggtagtcattattattttaaaagggagcgaatatcttcaaaaaatgttgggtaagaaacggatactgcttctgctcggtctaactcaacgtcaccatcttctacaagaagtgccgcgatttgaagcatcataccgattcggtgatctccgtaacttgtcacgtttgccgcatgaagtggagttttaccgcgaataattaagccgtcttcagttggtgtaatatccgcgcccattttgtttaattcgttagcaactgcgtcaattcggttcgtttcttttacttttaattctgcagcatctttaataatcgttgttccttctgcttgtgttgccaaaagagcgataacaggaatttcgtcaattagacgaggaataatatcgccaccaatttctgttccttttaactcgctagatttcacaacaactgtacccgctaatttaccggtacttctgctagaatcttttacaaccaaactaccacccatttgttctacaacatcaaaaattcctgttctagtcggatttaaaccaacatgtgttagttcaatttcactgcctggcgtgattaaacctgctacgataaagaaagcagcggaggaaacatcgcctggaacggtcatttcttgtccaatgaacttttggccgcccttgacacgaattgttaaaccgtccatttcgatttcaccgccaaattgacgaatcatgtgttccgtatggtcacgcgttttttctttttcatggataatcgtttcaccttctgcttgtaacgctgcaaaaataatcgcactttttacttgtgcactcgcaactggcatgtggtattccattcgttttaatgattggttaccgataatagaaatcggcgcaaactcagaaccatctttgccatgcatttttgcgcccatttcttgcagtggaagcataacgcgattcatcggacgtttggcaatggattcatctcctaaaataacggtatcaaaatctcgccctgctaaaatccccatcattaagcgaatagttgtcccagagttaccaatatcaagtggtccctctgcttgttttaacccatcagagccagtaccatgaacaataatttcttcatcggtttcttcaatttttacgcctaatgctttaaacgccttaatcgttccaaggcaatcatctgcacgtaagaaatgacgaatgaccgtttttccttctgcaattgccccaaacataatgctgcgatgagacattgatttatcgccagggactgtgatttcgccaaccagtccttgtttatttgtaattaatttcatcgtcatttctctcctattcgtagtggcatgtatagttacttctagtttcaatgcaacgtttcgcccggtccctgtcttcatctgtttggaaagtaatttgtaacaccccgaaaatatcttcgcgtgtttccaaaatcttgatgttcgttaaactaatttcttcttcgcctaaatatctagttacctcagagataacacctggatagtcaggtacatcaacaaacaaatcgtaaaaagatggaattgcgccaccttgatggacaggcagagaatctcgaaattcttttgcaccatcaaaaaaggcataaatcgaatttgcatcttcactttcaagcatttcaagcgcttgattcatactatcgcgccaaatggtcagttgcttcgttaatgttttttgattactaatagaaatgtccgtccacattcttggatccgaggaagcgactcgtgttatatcacgaaagcctcccgcagctaaccggaatgcagcaggatgttcctcagtaaaactttgcgtctgattgactaaagctgccgctacgatatgtggcaagtggcttaacatacctgtaatttcatcatgttcatttggtgataatactaagaatttagcattcgtaccagacagccacgttttgagttcagctactttggcttctgctacgtcttttgttggtgtcaataaataataggcattttcaaacaatagctcttttgccgcccgtacgccacttttatgcgaaccagccattggatgaccgccgataaaagtaataccactttctctaagcgccgtggatgcttccataattgttccttttgtacttcctgtatcagtaacaatcacatttttctttaaacgcagcccaggtaagcgtgtcaataactgttctgtttcttttactggacaacaaaaaataagtaaatctgcttttggtccatctattaaaatactttcgccaatttcatcaatgactcctagagactttccaacttctaaggaatgataggaaacgtcaatcccgatgatatgtgcttctgggtgtttggctttaatcgcaagggcaatagaaccgccaattaacccaagccccacaataactaccgtccctttcattcaaaaacgcctccaaacacttacaataatttttctaaaagtgcaattaccgcactgttatcttcttcttttccgattgtaatacgaacagctgttggaaaaccaagtgctgcgccagaacgtgtaatatagccatttttttccaaatagctaaaaatagtccccgcttcaatccctaaatctattaaaacaaagttcccgttcgccggatacaacttaactttttcaaaacgtttagcgaatgcttcgtattgtttaattccatttgcattagaagttctacattctccaataaaagcttggtccttaatagcttcaattgctaatttttgtccgatactcgttgtattaaaaggcggacgtacaatgttcagttgacggatgatttctttatccgcaataccataaccaacgcgtgcacttgccaaaccataaatcttactaaaagtccgagtaataattaaatttttataagtacgtactagtttttcgtgtttttcaggctgaggagtaacatactcaatataggcttcatcgagaaccacaagaacatcgctcggtactctatctagaaaagcttgaatatccgctaattcaatgtaatttcctgttgggttattcggattacaaatccaaacaatcgtcgttttctcgtcaatagcgtttaacataccttctaaatcatgttcgccgtcttgaagaagaggaatttctcttacttccgccccttcgattaaagcattttgacgatattgtacaaacgtcggagtcgccataacagtattagttgtcgtatcaagtagaacccgagttaacagttcgattaattcatcgacaccagctgtaaaaatcaactcttcttcttccaattgataaaaatcggctacttctttacgtaaactagaagcccaaccatccggataaatttctgtttccacgcttgaattagcttgaatagctgctactttttttgaagttccaagtgggttttcattcgatgagagtttagtaatttttgttaaaccaagctctgccattacttcttcttcgcgtttcccaggtttataagaagatagacctgcaagagattttttccatttcattacgcatcctcctctttcactaaatctgggcgcaatacttttgccccgtgtaagtagacatgattaattgctgtaaggggcttatgtaaatctgtgaataccatgaaacgaatacacattggaagcgaattcggcaccggaatttcttgcattcccatcacaggaacatattcaaagccgtgagtttcgcgcactgccttcgcaggaaatgcagcaaaaatatcttcagtcaccgtaataataaccgatgtaagactttcactgtccgttatcccattttgcgtcaggatttcctcaaataattctttcgttgctgtataaatttcttctggcgtattactttctattgtcgttgccccgcgaattgctctcaaaataaatcccctccatttcgcatcacgcttttgtaagtgtcaaaaatcaattcatcttctgctttaaaaataaccggtttaccaatgtcttctagtaaaaccatactaatttcattaaaagttgttttcttgtcatgacgcatattgtccagtatgttactaaaaggaaccgtcacatcaaaagtcgtattgtaacctaaacgttctaaccatgtagtaaacttagctaaatcgaaatccagtccgtaaaccgtctcactcatcgtaagcgcgtaaatcataccataagtaattgcctcgccgtgtagccatttgccaaagttaccgtaagcttctaacgcatgcccaaatgtatgaccaaaattcaaataagcgcgcacaccttgctccgtttcatcttgagcaacaatattcgctttaatctcaatcccacgctgtaaaaaaggcgtcaaatccttcgtataaaagtcttttggttccgtaaacgtgtccattaaagccgttagcaacgcatgatcactaataagcgcatgtttaatcatttctgcaaaaccagaacgcatttctctttctggtaaagtcgcaaaaaactgcgtatcataaataaccgcttccggctggtaaaagttgccaatcatgtttttgccaaggggatgattaattgcaaccttgccgccgaccgcactatcatgagcgagaaccgttgttggtacttgataaaacggaattcctctcatataagttgcagcgacaaaaccacctaaatcaccaataacccctccaccaaaagcgattaaaacggcttttcgatcaagcccagtctcaatcatttttgtcatcacatcttcatacactcgaaatgtctttgcttcttctccgtttggtgccacataataagtgactacaggtaaatcagcaagtactgcatcaagtttcgctttatgaagatttgccacgtgttcatctgttaaaacaaacacgtgggaatatttagctaaactttttgtccattgttccttaacatctgtcaaagcgaactcatttatatatacaggatatgttttacttttagcacggactgtaatttctggcatgtttaaaactccttcgttaagtttcggtgttcctccacatgttttttaagtgtatcaaaacgatcaccatcgaatttttctaacacagcaactgcaacttcccaagcaactacagcctcagctacaacgcttgcagcaggtactgcacaactatcagaacgttctacactagcattaaatgtttctttggaatcaatatccacactttgaagtggtttgtataacgtagggattggtttcattaccccacgaacgacgattggcataccatttgtcattccgccttcaaatccaccaagattatttgtacgtctagtgtaaccatcttctttactccataaaatttcatccattacttcgctaccaggttttctcgcagcttcaaaaccgacaccaaactcagcgcctttaaatgcattgatacttacgattgcacgagcgatttttgcatctaattttttatcccattgaacgtagcttccaagtccagctggtacaccaccgacaacaacttccacaattccaccaatcgtgtcgccatttttcttggcatcatcaattttttgcatcatttcttctgcagcaacctcgtctaaacaacgaactggggaagcttcggatgtttcttggatttctgaaaccgcgtaatcacgtttcaaattcgcacgagttccgccaatttcaagtacatgaccagcaacttcaatacctagttcatgcaacagttttttggcaacggctcctgctgcaacgcggacagttgtttcacgcgcactggagcgttctaatacattacgcatatcgttgtggccatatttcatgccaccaactagatccgcatgtcccggacgtggacgagatacgcgacgagatttttcatttttttctggaactggttcaatgctcataactgtttcccaatgtttccagtctttattttcaacaaacattgctacaggtgcgccgagtgttttaccatggcgaattcctgctgtgatttgtacttggtctttttcaatacgcatacgtgcaccgcgaccatgtccaccttgtcttcttttaagttctttatttacatcttctgcaagtagaggcattcctgctggtaatccttcaataattgtcgtaagccccggtccatgtgattctcctgccgttaagtatctcatttcaacaactctcctttttctatttaagctagatattctagcaatgatattttagcgctttaaagtatatgtgtaatatcttaacatatgccaagcgagaacacaatactttagtctcattctttcatcataacaaaaaaccgcgccaaatggtattttctctatgaaaaaagagcctaggtttccctaaactcttacttattttaaatccaagtatctactgccttttcataacttaaaatttcatgtggttcaaaaaataactgaatttcccgcttagcactttcaggactatcagaaccatgaatgacatttctattcgtatgtattgcgtattccgcacggattgttccgggatcggcttcaagtggattcgtttttcccatcatccgacgtgctgttttaatcacatcatcgccttctaaaaccatcgcaaatacaggcccagaagtgataaatccaattaaatcctcaaaaaaaggtttgccgatatgttctgcgtagtgctgttctgcgagggtccgatcaatctgcattaatttaccagcaactagcttaattccttttttctctatttttgctacaatttccccaataagtcctcgttctacaccatctggcttaaccattacataagtttgttccattatagaatcctccctcacgttaataatttcttttatctaaaacacggacgatttgcttcagtggctttaattcaggaacttgtggtaaagagtcaagtgttgctacggctttttttagataagctgttgcgacatcttctgctttttttgcccctgatttttttatttcttccactaaaacggcaatttcttctgcttgcgtatcctcagttacttggctgattcgttttttaagaaaaggatcttccattgcaaaaaatactggcaacgtcacatttccttgactcaaatcttctccagccggcttaccgagttctttttcagttccaacgaaatcaagtacatcatccgtaatttgaaacgccatccccacgtaatatccgaaacgatatagtttcttgtaatctgcttcactttgaccagaaacaacaccaccaagaccacaactagctgctattaataatgctgtttttcttttgatccgtcgtaaataattacgcacactttggtcaaaattatatttatctttgagctgttcgatttcaccggtagataactcaactgtgacatgtgataacatcttgtgggcagcaacatctttaatttccgtcatatactctaacgacttagcaaacagaaagtctccagtatacatcgcaatatggttcccccacttggatttaattgtctcacgtccgcgtcttaaatcagcatcatctaccacatcatcatgaacaatcgatgccatatgaattaattcaatcgctacacctgcatttttcactgcttcaaaatccgcgtcaggagaaagccttgcagataaacaaacgaacatcggtctgattcgttttccaccagcttctaacagatgaagtgccgcatcagaagtcgtttcggcagccgcaccagtaagagctctttttagttctttttcaactaagtcaatgtctttttgcatattcgggtataaaaagttaagtttcatgcttgccaccttattgttccttctttttaaatccaaagtgggttgcacttgcgccgccactgtgtgaaatatatcttacgtatgaaaatccggcttcttgaaacatttccgcaagtcttgccatccctggaaactcgcgcgttgattcttgtaaccagctatattctttgtaacttttcgcaaaaaactttccaaaaacaggcatgacatatcggaaataagcattaaatacttgtttccaacctggaatatttggttgcgaggtatcaatacatgcaagttgtccgcccggttttaagacacgatacatttcacgaagcacttgcatataatcaggtacatttctaagcccaaagccaattgtcacataatcaaaactattatctgggaaaggtaattccattgcattcccgtgaatcagctctacattatgcaaatctgcttcttttactttttcacgaccaacttttagcatattttcactaaaatcaagtcctgtcacatgaccttctggaccaatttcttccgccatcataatcgaccaatctgccgttccacaacaaacatcgagaacatttgtccctttttgaacacgcattagcttcatcgtttctttacgccatttcacatgtagtttaaaactaataacactattcattcggtcataacttggggaaatcttctcaaatactttatgtactttttcttctttagtttccgtcatatcccgaatctccttctatttatcagtcgttaataacttcaataattcttttttcaagtatagtagaaagcggttcagactcttcttttagtcgttccacttccatcttcacgtcacgaataattgctactaaccaactttcaaaattagtgacagcttctttcgcaaagtacccatggtcataagcacgcttcaacctagacgcaccaatttcttgataagtcgcaagttccattttaagtcgtttaagtaaaaagaactgacaacctaaagcaataaatgtttcatccttcataaaatacttcgcaaacttggcaaaaatcgccgcattggtcaaagcaagttgtgtaagatattcttcatctgtcgcaacatgtaattggtaaatattagtttttgctgtatttgtttcttgaacaccactttgtaaggctctgaggagtggaatcatttctaattccgcaagtgtccggtaatagagagcactataaaaatccccagctaatacggttaactcttgttctttccgagttagctgtacaacatcacctggttcatcaattttttcatgcgtgtcatgagctaatatcatgtaaagcgttgcactaactacacgatacgcagcagcatcagccaaatcagagccggaaatcgcttcatgaagaaacagcatttgatctttgtccatttgcccgccttcattattctcttgtaaatactgatagactgcttgctcatgtaccaactgctccacttcctttagcccagcctctctcgcctgataagtcatttaacaatcccctttgaatctccttattacgtaaaataaattataccataaaggatatttaattatgcttaattaaagccaaaacttcacttctaagcttatcgtcatttttaaaagcgcctcgtactgcgcttgtaattgttttagttccaggtttattgacaccacggatggtcatgcacatatgctctgcttccattatcaccatgactcccagtggttttaatttatccatcataatttctgcaacagtcgtagtaatacgctcttgaagttgcggacgacgactcacatcatccactacacgagcaagtttactaagccctgcaactcgtccattttgaggcaaataagccacatgtgctacgccaaaaaaaggaacaagatgatgttcgcacatagaggaaaaacgaatatcttttacaagcactagttcttcatgttgttcttcaaaaatagtatcgaaatgaacagaaggatctttcttgagtccagcaaaaacttcttcatacatacgagctactcgcattggtgtatcaattagtccttcacgttctggattttctcccactgcttctaaaataactttcactgcgtcagcaattttttgtttgtctatttgctccatccttaattcccctatctttttagcattatataccttgtatatcttaacacagccgaacttcaaggtaaatttaatttgcttaaataagagataataatgatgttttactattttgttctctttattccctatttcgtctggaaataatcaccaaaaaaaaactagcctagcttaattataaaattaaggccagactagagttagtgcttaaaaagtctatgtaacttatttaacagcttctttaagcgctttaccaggtttgaacgctggtactttacttgcagggatgtcgatttcttctttagtacgagggttacggcctttacgggcagcacgttcacgtacttcaaagttaccaaatccgattaattgaactttttcacctttagataaagaagtttgaatagtttcgaatacagcttctactgctttcgctgcgtcttttttagaaagatcagctaattcagctacgctatttactaaatcagttttatttgccattgtgtttttcacctccttcacagaatacttcaaaataagcaggcactatgagacacctgtatttctcgtttttttccaaaagtaaaattaattttggaatttaaggagaattgtgactgaaatggcttaactacaagccttaacagtaattctgataaaagattatcacataatcccagcaactgcaaggaataatgccaaactgacactgtttcttaacattttcaatcacatatgtttttctcttatggcttgaaaacgtgatagtatcaacctgttaaccataatactaacttggaacccttagaatagcaagcgataccaccataattggctaaaatagttcttttttcataaaaatagaagcaaattcagagctattacctgacaactctaggtttctgagcctagttttattctaataattgttgttggatgatggctttttcttccgcagtaattccgattcctttttccaaatagccatctactgaaccgaattgttttttcatttcatcaaaggctattttcaaatattctggacgagcttctgccatcggacgaaaagcttccaagtcgattttttcgtttccatttgaaaataatgacacaatcccacccatttcttgtagaatgttgtcctgatagcggttagtgattgcgtaatcgtcaaaaatcgttttttctggtacatctagtaatgttaataaaagtgccgctaagacccctgtacggtcttttccagcggtgcaatgaaaaacaaatggaagacccgctttagcatccgttaatatctcactaaaaatttctttaaatccgtctactgattgcacaaatacacggtaactctcccccatcaaaggttcatagatcgctttgtcatttgatactgggagggtagttttttcattttttgctgtaccgattgggatatgtttattaagaacaccttggatttctggagtgggttgcgcctgtacttcagaactacttcgcaaatcacaaatccatttaatatgtaacttttggagcaatgcggcgtctgcttgatttatgtttactaaattggaagaacgatataatttaccccattttacgtgatgcccatgcttcgttttgtaaccacccatatctcggaagttaaaaacactttctagcggtaatatccgttcagaaacaactcttttgtctccgttcggtgcctgtaaaaagaaataaactggaatgtcctttgtttcaaaagtataatgttttgctgcattagatactttaaagacaggttcactatttgcctctagtgacggactactacttacaaaaaccaacgtaccttcgctgacttcttcattttcccatcttaatgttacggctttatctgtacgagtaacttccatattctccacctactttttcaaatttggctcttctgcttcattttagcataactcataaaaaaagagccaacataagcggaaaacttatcttggctctctctattaaaatgactctttttcgattttctttttacgacccatcaataaatcaacggcttctcgagcatctttattctcgaataaaatcgcgtaaatcgattcggtaattggcatatcaatatctagttttttcgcccaaccatgaactgctttggctgtacgcacaccttcaacgaccatacccattttttctaaaacttcatctaaattctcgcctttaccgagcatgtttccagcacgccaattacgtgaatgcacacttgtacaagtaacgattaagtcaccaataccagttagcccgtaaaaggtttgtggattagagcccacagcaactccgagacgagtaatttcagccattccgcgtgtcattagtgccgctttagcattatcgccgtatccaaggccatcagagattcctgcgccaagtgcgataatatttttaagcgctccaccaatttcagcaccgatgacatcatcattcgtataaatacgtaaattattattaataaaacgatcttgcacgatttctgctgctttcaaatctttacagctagcacaaagcgttgttggatgacgaagagctacttcttcagcgtgactaggccctgaaagaacaacaagagctttacgttttgtagcatctacttcttcttcaattacttctgacattctaagatttgtttctggttcaatccctttactaacatgcactaaaatagttggttctttcagcgcttcatttagctgcttacaaaccacacgcattgcatttgttggaatagcaatcacgacaatttcagcaccatctatagcttcatcaagtgataatgtcgcttttacctcagttggtaaaataatatctggcaaatagtgactattcgtgtgcgattcgttaatttcattcacaattttatctaagtttccccaaataactggtttatgattattatcagctaggacaagtgcgagtcctgttccccaacttccagcgccaagaatagcaacttttttctgtgtcattatatttttcctcccgaaaactttacttacgcttacgagcaattactcgaattggcgtaccatcaaacggaaatgcttctctaatccggttttctaagaaacgttcataagagaaatgcattagttctggatcattaacaaatacaacaaatgttggcggtttaacagccacttgtgttgtatagaatattttaagtcgtttacctttatccattggtgatggattcattgcaaccgcatcactaataacatcatttagcatactagattgtacgcgtaatgaatgattatcgcttacttggttaatgagcgggaataagttgtttaagcgttgttttgttttagcagatacgaaaacaattggtgcatagcttaagaattggaactgctcccgaatatcttctgtccatacattaattgttttttcatctttgttaattgcatcccatttgttcactacaataatgatagcgcgtccggcatcatgcgcatatccagcaatccgcttatcttgctcacgaataccttcttctgcgttgataaccacaagaacaacatcggagcgttcaattgctctcattgcacgtaaaacactatatttctctgtgctttcatacactttcccacgttttctcattccggctgtatcaatcatgacataatcctgaccatcaaacgtataagttgtatcaattgcatcacgagtagttcccgcaatgtcagaaacaatgacgcggtcttcgccaagaagtgcgtttagaatagatgatttaccaacatttggccgaccaatcaaactaaatttcactgtttcatctgggtattcttcctcttcttcttttggaaaatgagcacgaacagcatcaagcatatcaccaagccctagtccatgagaaccagaaattggatacggctcaccaaacccaagagaataaaagtcataaatctgatcacgcatttctgggttatctactttattaatcgctaaaacaattggtttattagaccggtaaagaatttttgctacttgttcgtctgcatcggtaaccccttcacgaccattggtaataaaaataattacgtctgcttcatcaattgcgatttccgcttgtgcgcgaatttgctctaagaatggttcgtcggaaagatcaataccacctgtatcaataatgttaaattcttttccaagccattccgctgaattatatatgcggtcacgtgtcacaccgggaacatcttccactatggaaacacgttcaccaacgattctgttaaaaatagtcgatttgccaacgtttggacgtccgacaatcgctacaactggttttgccattatttcaccttcttttttctcgaatcctatttatcaaactttctttagtttatcagtaaaacagcttactggcaatgaaaagttcgatgtgaaaaataaaaagagcctatgggaacagtctccctaggctcttttacgaacaattatttatcgtcgttttgaagtccttttaatttatcaccaattaaatcactcatttggaatccagtactttcttctggaagttcataatcagcttcttcaactggagcatcttgcaagtctttaatacttaaagataaacgtttgtcatcttcattaacttctagtacttttacttctactgtttgaccttctgaaaggacttcttgtggtgttccaatatgttcgtgggagatttgagaaatatgaaccaaaccttctacgccagggaaaatttccacaaaagctccaaaagttactaaacgaactacttttccttctaaaacagaaccaactggtgctttttcagaaataccatcccaaggtcctggtaaagttgctttaatagaaagagaaatgcgttcattttcaggatcaatcccgataacttttaccttaactttttgaccttcttctaacgcttcttgcggcgtagctatatgtttataagaaatttgtgaaatatgaacaagtccgtctaccccaccaatatcaacaaatgcgccaaagttagctaaacgttgaacagtaccttcaatcacgtcgccttctttgatttcatttaatagtgcttgtttttggttagctttttcattttccacaactgcacggtgacttaaaattactcggttgttttctggttcaaattctactactttgaaagtaagggttgtacctttataatctgcaaaatcttcaacaaaatgatcttctactaaagaagcgggaacaaaagcacgtactcctaggtcaactactaatccgcctttaacaacatcactgacaactgcttcgaacacttcaccagactcaaatttagctttaatatcatcagacgctttttctgcatccacttttcttttagataaaacaagtacatcgtcttctactttagtgacaatcaaatcaagtgtgtcgcctacgcttacaacgtcagaagctgtctccacatgtatattggaaagttcacttattggaacgacaccatcaagtttgctatcgggaataccaacataaacttgtttatcttccacgcttgtaactgtgccagtgactttgtctccttcttcaaaatttctaacttccacatcaaataaatcttcagacatgtgtagccctccattcgttagtcgaattttaggaatttctaattcagaagcaacttttcacgtttgcctcatccgcttgactagttttcctcaataggcaatttctaattacataaagaaaaataacaaatacaccctcagtaaaacttatcttccagctagaaaatcctttcaagatacttttcacaaagtaaaaaatctctcttataacatcctacaaatccaaacatttgtcaagctcttttaagggggttaaattgcctatagaccgtgaaatcgctcaccttgtttagactttcacggttaaattaaaatagtgctacatttccatttagttctgaaaatgtagcactttttcattaattttggattttttgttcagcaagtgaaagaattttatttgcgacttcatcaattgacatcgatgttgtatctacttcaatagcatcgtttgctttttttaaaggagaatgctcacgagtataatctaagtgatctcgttcttcaatttctttctttaattgatttaaatcgccagcaaaaccttttgccatattttctttatagcgtcgttctgctcgttcttctacactggctaacaagaaaattttaagttctgcgtttggaagtacagcagttccaatatcacgaccgtccatgacaatcccgccctctgttgcaaaaacttgctgacgttcttgaagtgcttctcgaatagctggatgtgcggcaacgatagaaacatgattagttacttctagtgaacgaattacatctgttacattctcttcatttacaaatacttgttgtacctcaccaggttcgaaacgaatcaccgtttttttaagtaaagcatcaattgccatttcgtcttcgtacgccacattattttttagcgcaatatatgtaaccgctcgatacatagctcccgtatcaatataaacaaaacgcaattttttcgcaacaatttttgctactgtacttttacccgctgcagctggcccatcaattgcgatacatattttcttcgtcatagaataaaactccttttatctgaaattggtttgattgatctcttcttgggacgctaaaagcaccattaatttcatccgcgcttttttgctatcataatcttttcctaaaataacacctcgattgtataaatcaaacgtgctaccttcgtagtcatatgtagtatagacatttccttcttccgcgctcgtcgtaataacaacaggaatgttcgcatctaaagcacgaataattgctggcatcattttcggagcaacttgtcctcgccctacaccttcaagtacgattcctgaaacgccactatcaattgctgcatcaatgaatagaccatctgcaccaaggtagcatttaataactactacttccggtaaatcaaggcgaatatcaaaacactcgtgttcaagtggcttttgataaagaaaaacttgatcgttatcaataattccaagataaccaaatccaaatgcactaaaaccttgaatattcgatgcatgcacttttttgacatagcgagcggcaaaaatccgttcattaaaaactactactgtaccagcttgtcgtaaattcacttcgcatgcagtataaatagcatggcgaatgttcacgtaagcatctgtccctggttcttctggcgctcgttgcgaaccggtaacaacaattggtcttgcatcagttacagcaaggtcaaggaaataagctgtttcttccagtgaatcagtaccatgcgttacaactataccatcatatgtttcatccataaaaatagattctattaattgttttaaactaataagatctgggagtgcaatgtgcatagaaggaagttgaaaagttgaataaatatcaatttggatttctgttggtaattggcataatgcagctaattcttctccagataattctcctgatgcaagttttcctgatgctgtttttttacttgcaatcgtaccgcctgttgtaattagtgctacttttgccataatcatatccccctacatttttccatttaaacaaacaaatgagtctcggaagcgtttcccagacccattcagtgttgttattactgtggaattgttaaaactgtaccaactggaacattgttactaccaagtccatttgcttgtttgattttctcaacaccagcagcagccccagcttgtccatagctagaacgcgctatgctgtatagagtatctcctgcttgaactgtatgagaacctccagctttcttttgtgttgattcatttgcttttttctgagcggcttctgctgcggctttttctttagcagctttgtctgcagcggccttctctgcggcagctttttcttctgctgcttcttgttctttcttagcggctgcggctttagcagcttcatcttcttgggattttttatctgcagcggctttctcttctgctgctttcttttcttctgcagctttttcagccgcggctttttcttctgctgcttttttagctttttctttttctgctttggtttgtgtgttgtcagaaacattaactgtcgattcagtctctgttttcacttcattagttgatcccatattttgtactgttacaaatacaattactataacgattgggattaataagaaaaacacaatcaataaattaagcaatgggtatctaaaaatagttttcttttttccttttctgctatcagaacgggatagcatcggcggttcattattaaattcgtcttgtccttcagaattcatatcaaaatcagccggttcttcatattcccgtttactttttcttgtttttgccactcaaagttcctcctttagtgctttctaatattatcctatgcactattattggcacagagaagtgttacataagatgtaaataaatgaaatacctttgaaataattataaccataaaagcaatatacaacaacacttaaaccgcttttttagaagaaaaaagcaataatcattataatttagtacttctggcatataagctttttttatttcatacagattactgaacaaaataataacaattttttcgccaataaacaagtcttttttttacaaaaaatgtgaaataagctactttttgtcaaaattcgtaacttaatatttattgaagtagataagataagtaattttcccaagtcaaaatttctttggcgcttgttttttcttctttttcaaaacttattgtaaaggtactatctaaatcgcagcaattttctggtgttacttctagcggactttcttcaaaataacgcataatattgtttctacgacactcttcttcatgtaagtatccgataaattgttgtaaattagctcttttccagctttttcgatattccattttggttgttaattcggctgtagttaaaccacttttttggtaataatcaataaagcgttgttctgcttctggaagagttttaagttgttctttcgatagatgcataagattaacatctggtatgtcttgatctgctaactgcatttggataaattcatctccacttgcatacagtaaaatcgcaacactttcttttccgtcacgaccagccctgccaatttcctgcaaataagcttctaagtctgctggcatgtgataatgaataacaaaacgaatatctgacttgtctattcccatgccaaaagcgcttgttgcacaaataatatctaactgaccataaacaaattgttgctgaatcacaattctatcttccgtttccatatcaccatgatagtaggcagcatttaatcctaatacttcattcaactcttgcgcagtactttccgctagtttcttactagaaaaataaatgattcctggcgtttttagtttggaaactagttcatatagacgttcttttttagaaagttgatttgtaaatttttccacttgcaaataaatattaggacggttaacggaataaatcacctgttcacagtcgtttagacgcaattgttttaatatatcggctcggacttttttagttgcggtggctgtaagtaccattgacactggaaatttagcatcttcaataaactgtcccaacatcaaataatcaggtcgaaagtcatgcccccactgagagatacaatgtgcttcatctataacaaataagctaatcttttgttgtagaagcgtatttttgacgaattcattgtttaacatctctggagataaaaagataaatttataaaaatgaatatttgcaaggatttgttgtttttcttctttctttaaaaaactattaagcgccgcaacacgtttttcaccgtgagctcgcattctctccatctgatcttgcattagtgagagtaacggagacacgattaacactaatccgtccattagatggcccgctaactgataacaaacggttttcccggtgccggttggtagcattgcaaaacagtttttcttagctaatgctttttcaattacttctttttgtccaggacgaaattcatcaaaaccaagataggcctttaattcttgttctaaattcattgttcgtcctccttactaacgacagctaagcgaatttgataataatctaaatctggaaatgcagcttttatgtcgcgaagtaaatgccagtttctcgaattaattgattggattaattcttcctcaggtaaataaggaacttgtgcttctttcaaagtagctctaatttccacaaaatggtcttgtatcgtacttgtttttaaatttcggattcgttcaatcatctccaaatccattccttttgcccatagtgtataagtttttatagcagaagaagtcaggctcatcagctcattcggtattaaactagctaaaagtggccactcctcttcgctttcttttatggcagcaatcaagcgatgaagttcatgtaacacttcaaaataaacatcccacttctctacttgatatttagtagcaatttgttctgttgtatagcccattagtttcccgccagaaaatcgttccactaaaaattctggtctacttaccgctaaactattaaaccacttgatgagttcaatatataatctgtcagcaaggtcctcttgttgctggttttgtagccaaattttgataaattgctgtactttcttatcgcggataactggtaaataatatttctcagcatggtgtttattactaacaacttgaactgcaaggcgtaaatgggcgaaaaaggcaaaaacttgttgttgaaaagcaaatccatgaaaagaaggaaaactcatttcaaacgaaaaattcggcttctgtttcactgtatagccattttcagtaacggtaattataccttgtcgcattaattctttaagtcttgtttctaaataatttaatttcaaatttggtactagtccaaataaatgctgcatttgaaaaagatgagcatcctgaacagcttgaccagttcttctaccggccaaaatagtatgtaaaaatggcgattttctaggagtaatactcttttctaaaattgttacaatataattatctagcttatccaagacgttctcaccacctttttttctaacatcaatcataccacagaaacacttgttctacattacttttcccgaaaaaaactttatcaaaatatggtacaatagaaaaagaaaaaatcttgcttcaaactgttattttagaaaggaagcgtagaaaattgaagtattgtctcgttgaaaaagacacttgtattgcttgtggtgcttgttctattcacgctccagatgtttttgattatgatacagaaggtcttgcctataatttattagataataatactggaacaaaagaaatcccagaagacttagaggaaatggtcattgacgctgaatttgcttgtccttccctttcgattaaggtttctgattctccgttccattaaaaaatccgtgagtcgcagtggactcacggattttatttatgttaatgacttgtttcctgctgtcttttttcaaatttacgacgttcttttacagtttggtttttagcaatccattttttaagtctagagtacagtatcaagaatacagcactaacgatgactccttttaataagctaaagggtataatcgtatatgtgactaaccaagcaacatctgtatccgccggaagtccaccaagtttaatgtaaaatggtaataatacaaaataattaaatatcaccattgcgcctgtcattactaaagttccaactgctgttgaaagcaccattccttttgttgagcggaaccagtgaaataaataataaatcggtaatacataaaaaataccattaataaaattggctaattctccaaccggaactccgactggactacctgacacaatgtaaagcaggacatttttgattagttctactaaaatcactgcgagtggtccgaataataagccaccaatcaaagctggaatatcactaaaatcaagctttaaaaatggtgcactcggtagcagcggaaattgtagcatcattaaaataaatgctaaagtaccaagaaccgccacacttacaaaaaccttcattgaataattcttcattgtcatttctcccttgatgttcaccaagaagcgagtgacatcactaaacgaatgcaacccaagcaaataaaaaacctcaactaaaaaaagtcgagggagagtttgtgattaattaaacaagcactgaatactcaaataagcatcacagcttgctaacacatgctcgtgaagacaaacgaaaaggtctgccaacatcttctcccatccagactatactgtcggtcctggaattacaccagagtcaactgctaagaaagcagatcgtggactttaaccaccggtcgggaattgcaccctgccccgaagatgaacgaatattttattacaattttcattttaccatgaaaatattttttcgcaagtccttttgtatattttttcacgtaagcgctttcttggttacaaaaataaaaaccagatgattatctggtttttatctatttaccatggaatattcgtagacaatgattccgctaatgattgattttcttttaaacgaattttacgcgcaatgcttctcgcttctgctccagcgtggattcttttttgttcttctgtttctggtttaacaagaggtacttccactgttttgccatcattatctagcgcaacaaaagtgagaaaagaagtggctgctaaatagcgttcccctgtttttaagttttccgcaatgattttaacaaaaatttccatggagcttctacctgttgaggcaacataggactctaggcaaacagaatggtcgtttttaattggctttaaaaagtccaccgagtcagtcgaagctgttacgatttctgtgcgacaatgacgagatgcactgatagaagcagtatcgtcaatatacgtcattaatcttccaccaaagagtgtattatgattatttgtatcggatggaaacacccgactagttttaattactaaagattctttacaaaatttcgtttgtctattttccatgattttcgctccaatctatttatacaaaggcaaggtaatgataaagtctgatcctttacctagcacactttctactgaaatttttccgttatgagcttctacgatgttttttacaattgcaaggccaatccctgtccccacagcttttccgcgttttctagccttatctactttataaaaacgctcgaataggtatggaatgtcttcttcagcaataccactaccattatcggatactgtaattacgagattatttcttgtttcatcaattgtttgttttaaaataacttttccagcgtagccctctttcccggtgtggcggatagcattcatgattaaattaattaacacttgctccatccggtcggggtcataggaatactctaaatctggtgtttcaagttctaagccaagttctacaaagttttctttcgcaagaacatcaaaattagcgattacttttcgtagtaatggagctagaggtaatttttgattgtccatttgattaaagccggcttccattcttgcaaggtcgagcatatcattaactaatcgaccaatgcgaagggattcgtcataaataatttgtgcaaattcccgcacttcttcatccgactgagcaactccatcaataatcgcttcactgtaaccttgaagcatagaaataggcgttctaagctcatgcgacacattgttaacaaaatcgctcttcattttctcaagctgtttctcttctgtcatatcacgaataactgcaacaatacttcgaacatgctcacctgtatataataatgtcaaaattgctacatacgtccggtcagaaaaagttatttcgcccacttgcgattctttcttgtctaaagtatcattcaataaatcatttaaagctgttggtatcagtactttttccgtattctcaggtgagaaaaaccaattatgtaaaaattcttctgcaggtggattacttaaaataatcgttttatctacactgaatttaattaccccatctgccattcctactaaaatattagataattgctctttttcttggcgaagggcactaatattatattttaattgtttagccatatcattaaaagcgaccccgagttcaccgatttcatcatgcgtgtaagtcggaacacgattatcaaaattcccttttgaaacagctatggcaatctttttcatttcacgaagaggaaaagccattctagatgagaagacaaaagataaaatcgaagtaataacaatagctatgatacctgaaacaataagtgttctcatcgttttttgattcacttttaaaatatcatgatacgattggtaaacataaacaacaccggattctccgttacttaaaacaaacttctgtgcagaaatttcgacaggtaaggagctatcttctgttttgaaattatacttcattgtaatgctgttatctttttctaaagctttatttaacgttttatcatgaatgagtttgttggcagatgcgctagaaaccgtgtcaggagattgagattgataaatattctttccgttttcttcaataatgacgcccattgtattatcaagtaacgtcagtgcggaatcattatcattttcgttggagataacttcatcgttttctttcataatggtgataatacttgatgtcgtctcttctaactcttttgtaatatgagccatattatttttttcataaatcatcgccactaagaatcccgatataactaaaatcccaatcaataataaaatgattgtactccatattttgccaacgatactattccaaatcttcatctatctcacctcacttcacaaaaaaataacgaacaaagcacgtgcggcataacacttgccgattaaacgtctttgcccgctatcttaatactcgtcattaatcttctggaacttcgaatttatagccaaggccccatactgtaacaatcattctagcagcgtcttcagatacatcatgtagtttttcacgaaggcgttttacgtgcgtatcaattgtacgtaaatcaccaaagaattcataacgccacacttcttttaaaagtgattcacggtcgaaaactttatctggagatttagctaaataataaagtaaatcatattctttcggtgttaggccaatttcttttccatctacaataacacgatgagcttcattatcaattttcaaatgtgggaatgtaataatgtctcctggtgtacctccagcagcttcttcagatgattgttttgcacgacgaagaacagctttaacgcgtagcactacttcccgagggctgaatggtttaacgatgtaatcatctgctcccacttcaaagccttgcacacggttagcttcttctccttttgcagtcaacataacaactggtgtagatttatattcccttaattcacgacaaacttcgataccatctttacctggcatcattaaatcaagcaggatcacttcataattgttgttcagtgccatgtttaatgcttgatcaccatcactagcttcttcaatacgatagttttctctttcaagatacatcttaagaaggcggcgtatccggtcctcatcatccacaacaagcactctaacttgttcactcataagtactcatcccctaactctcatttacataaaaacgcatcatttaaattcaaataattaaatggaatttctcgtacccacatacggaaaaccatacaattgcctataccaaatttactacgatttaaattatacatgtttttcacaaaacacgctatcagaaagtatattttatgtcgaaatgtcactttttattcttgccaaatctcgcttctgtttttaattgttttacttcatgatgtgataattctcttctttcacccgcatttaaaccacgtaaattcaagaaagaatattcttctcgagctagtttttgtacttcaaaaccgactgcttcgaacattttacgaacttggcggtttcgtccttcatggatagtgatttcaactatcgctttgtcttttgctttatcagaagaacgtacttttacttttgctggagcggttttacgaccatcgataacaactccgcgctctaactcacgaataacttctcgttctggaattcctttaatccgagcaatataagttttggacacttcatttttaggatgcattagcaagttcgcaaagtcaccgtcatttgtcattaataataagcccgatgtatcataatcaagtcttccaactggataaagtcgttctggaatatctgtaaaataatccgctaccgtcgtgcgtcccttgtcatctgttacagctgacaccgttcctcttggtttataaaaaaggaaatagcggtgttcttcttttgtaagttggattccctcgacttcaattcgttcggttcctgaaaccttgacaccaagttctgtaactacttttccatttactgttactttaccttcttgaataagtttctctgcttttcttctagaagttactcccgcattcgcaatcactttttgtaaacgttccattcttattcctcctcctgttctttactttggttaaaccggtcaaaaaacaggtccatttcgctttgatctgggtcttctgcttctgggtcagcaagctttggtaaatcgtctaaagaattcagcccgaatgcatccaaaaactcacttgtagtcacgtatagttttgcacgtcctgccccgtccacgcgacctttatcagtaactaatccttttgcaacaagcgttctaatcggtccatctgtttgcacaccgcgaacttcatctacttccattcgggtcacaggctggcgatacgcaatgattgccaacgtttctaaggatgcttgtgataaaactgtattgctcggaacttccactaatttccgtaaaaattccgcatgtgcttttttcgtagctaattggaaagttccagcaagctctagtaaaatcagccctctgtcctcatttccattatatcgttcacttaaaagctctaataaattgagtgcttcaatatgcgtgatttccatgacttccgttaattgttctgttgaaagacctgcatcccccgctgcaaaaagcaagctctctaatacgcctaattgttcttctctgttcacgatagttcttcccctttaccttgcacatataaatctgcaaaacttgctgattgctctacttcgactaattttcgtttcattaactccagtagagctaaaaaagtcacgacaagttgttcttttgtctgttcttcaaatagttcatcgaaacgtaaacggtgatttgtttgttgatgtagttttccgagtacggaattcattctatcatcaatcgaaatttcttgagttgtaattcttgtatgcagtggtttatttaatttcttgcgtcgtagcatcttgttaaaagcacttaacatatcatttaacgatacatcgagttccgccactttggttccttcgtcatactcggccaaatccattggtggtttactaaaataaaagctacgttcggcttctttttctttcagttcttttgcagcttctttaaatcgtttgtattccattagtttttcaactaaagcatcacgtggatcttcttcctcttctagtgtatcataatcgatttctagttcttgttttggaagaagcattttacttttaattgctagtaaagtagcggccatcactaaatattcgcttgcaacatctaattccatttcttgcattgtatgaacaaattccatatattgatccgtgatttcagccattggaatatcataaatatcgacctctagttgaccaattaaatgaagtaataagtcaagcggaccttcaaaagcctctactttaaaattcatttctaccatgtttgtcccgccctactataatgaaagatcattttgtactaaattttcataagtttcgcgggcaacgattaatttatccattccgttttccacaaaaactactggtggtcgtggaatccggttataattacttgccatcgcataaccgtaagcaccggtacaaaatactgctaaaatttcgccagcatctgattttggtaacggtaaatcccaaattaacatatcaccagactcacaacattttcctgcaatagctaccgtttcttcagcaactttttcaggattggctgcaagaacagcatcgtaatgggcatcatatagagctgggcgaatattatccgacattccgccgtctactgcaatataattccgaatacccggaacttctttacgagagccaactttataaagggttgttccagcttcaccaacgagcgaacgacccggttcaatccaaatttcaggaatagcaatatcattactattagcaacatcacgcacttcatccatgatttgacgcacatattcacttggttcgagtggctcatcttcagcagtataacgcacaccaaaaccaccgccaagattaagaactttggaatcaaaaccgagtgttccgtgccattctactaatttatccataattcgacgagctgcgagtttaaaaccagttgtttcaaaaatttgcgacccaatatgacaatgaagcccaattaagtcaaatgaagcacttgcatgaagcacttgcttaattgctttttcagcctgcccgtttgtaagaccaaatccaaatttcgaatcatcttgtccagttaaaatataatcatgtgtatgagcttcaatacctggagtcacgcgaattaaaacagcggctttttcatttcgttctattaatatatcttctaataaactaatttcataataattatcaataacaaagcaaccaatcccataatcaagcgccatatgtatttcttctgcacttttgttatttccgtgaaagtgaattctttcaggagggaaattcgctttaatggctgtatagagttcgccgcccgatacaacatcaagagacaagccttcttccgccattaattggtaaattgctacagcagaaaacgctttactcgcataagctacttgggcttttacacccaactcttcaaaggttttcttaaatcctcttgctcggtcacggattagcgctacatcataaacgtacagcggcgtaccatatttttcagtaagctttaaagtgtccacccctccaatttcgagatgtccttctgcatttacattcattgttccaagccgttcaaacgtcacgccaatcccacctttacattatagatttttaaaagttcttttatatagtagcatactaagaagccgagcgacaataactatctgaaaatattatcaaatacataaaaaactcagcccatattcattatttctcgcttcagaaaataacgaatttggactgagattagctaccaattattttaagaaattttagcaacaatcgcttttacatattgtaaaaacgtgctacgaacttggtcagttgtttcaattacttctgtatgagaaagtggttggtcgagaatccccgccgccatattcgtaatacaagaaataccaagcactcgtaatccagcgtggttagcaacgattacttctggcactgtcgacattccaacagcatctgctccaagtgttctcatcatttgaatttcagcaggtgtttcgtatgttggaccgctaaatccagcatatacaccttcacgaatcgttaaattaagttcttgtgcaattaatctagcatcgacacgtaacgccaagttataagcttcagacatatctgggaaacgaggaccaaaatgttcgtcatttggtccaataagtggattagtaccagtaaagttaatatggtcagaaattaacatcaagtctccagcagaatacagttcattcacgccaccagcagcattagtaacgataagtaattcaacacctaattctttcattacacgaaccgggaaagtaacatcttgcatggaatatccttcataaaaatggaaacgaccttgcattgctactacttcttttccttctaattcaccaaaaacgaattgccctgcatgaccttcaactgtagaaacaggaaaatgtggaatctcgctgtatgatagttttgttgggttgtttacttcatctgctaatacacctagacccgatccaagaattaaaccaaccgttggcgccccagggtaattttctctaattttcgcaacagcttcatttactttttctaaactcattgttgttcctcctctttcctatttcaaatcttttaagaagctttttccgtattcaggcatttttacatcaaaattgtccgctactgttgcaccaagatcagcaaaagtttggcgtaattctaattcagaaccgccgtttttaaagcgcggagagtatacaagtaaaggtacaaattcacgagtgtggtctgttccagtgtatgttgggtcatttccgtgatcggctgtaataatcaaaagatcgtcatcggttaatttctccatcacttctactaagcgaccatcaaaatcaacaagtgcgtccgcataaccttgaggatcgcgacggtgaccaaatagtgcatcaaagtcaactaaattaaggaaactcataccattaaaatctttatctaacacatcgataaattggtccattccatccatgtttgattttgtacggatagattcagttacaccttctccgtcaaaaatgtccgaaattttaccaatcgcaatgacatctttcccaccatcttttaaagcatccattactgttggtttaaaaggttttagggcataatcgtgacggtttggagttctgacaaacgcgccaggttcaccaacaaatggacgagcaataatgcgaccaagcatatacggatcgtctaatgtaatttcacgacagaattcacagatttcatatagctcttctaaaggaacaacatcttcatgcgcagcgatttgtaatacagagtcagcagaagtgtacacaattagcgcacctgttttcacatgttcttccccaagttccgccataatttctgtaccactagcaggcttgttgccgattactttacgacctgtttttgcttcaatttggttgattaaatcgtctggaaatccatcaggaaacacacggaaaggagtatcaatataaagtcccataatttcccagtgacctgtcattgtatcttttccgttagaagcctcttgcatttttgtataataagcaagtggtttttcagctttttcaattccttcgatttcacggatattggataatcctaatttgcccatttcaggcatttttaagccgccaacgtgttttgcaatatgaccaaatgtatccacatcgaagtcaccaaatttagcagcatctggtgcttccccaataccaactgaatccattacaataacatgtactcgtttaaatttatctggcatatttactcatccttttcaactttattttttaagcgcgcgggtgaaattgtttgtaaacatctttaagccgcagttttgttacatgggtataaatttgtgtggtggagatgtcggcgtggccaagaagctcttgcaccgaccttaaatcagccccgttttcaagtaaatgagtagcaaatgaatgacgcaatgtatgcggtgtaatcggcttttcgatgcccgactccttcgcgattccttttaaaattttccagaatccttgtcttgtcagtccttgcccgtggtgatttaagaacacaaaatcattccggtatttcggtcttctaagtttaggtcttgcttcttctaaatattgttccaacacagtggttgctgtttttccaagcgggataattcgttctttatcacctttaccaatcgtttgaataaagcccatttgaagatgtaaatcatccattttaagctttacaagttcggttacacgaagccccgtcgcgtataaaatttctagcatcgcttggtctctgagtccgagcggagtgctagtatctgatgaactaagtaatttttctacatcatctaagtttaaaacttttggtaggctttgcgcttgttttggcgtttcaatttgaatcattggatcgtgcgacatttttccatcatgcattaaataatgaaaaaaagatcgcaatgaagcaatatatcgtgctacgcttcttggtgattttccttcttttctagcaaatgccatgaatccaactatatcgtttcgttcgagtgtatccgggtccgttaaagttctagaggtatccatgtatgaaacaaaatagtgtaaatctcgttcgtaagcttttattgtattcgcggataagcctttctctacaattaaaaagtgtaaaaaatcatcaatcaaatcattcataagcatttcctccacaaatcctattctaccatgttccttcctcagtgaaaacgtttaagcgatgaaaaaaacttataatacttttcgcacaattcagtccatcttttttgccaataaaaaaagtttgagatatataatcccaaactcaactattattttttttagatttttgtctgcaatctgcgcaaattccttggaaagttaaacgatgatcttttacaaggaaattccattttgattccacgattttttctacatcttctagtaaatcttcttgaatttcttccacagatccacattccaagcaaacaagatgatgatggaaatgtttggcgccttcttgtctcaagtcataacgagatacaccgtcaccaaaattaattttatctaccacgcgtagttcggttaaaagctctaacgttctgtaaactgttgctaggccagtgtcaggcgcaatatctttcacacgcaagaaaacttcctcagcacttaaatgatctttttcattttccagtaaaacgcgaacagtagcttctcgctgtggggttaatttataactagcatcatgaagttgtgctttaatgcgtccaatacgaccttccattatggttcctcccttagttgcgataacaagttgtcgttctaaattatcatcattatcatttaacaataaatacagtttataataattataattaaaatgcaagttcaaaatccacttatcactttaaaaatggcacctagacaattcctattccttatgtttactaagatagcacaaaagcaataggctgtctacaatgattatcaattactagttaatttctcgttattaataataattattatttagctttagcaagaagaaacaagaagtacggggctccaatgatcgcgacaacaattcccgcaaagatttcggaaggttgaataatcaagcggccaatcgtatcagcgagtagtaacaatagcccccctgataaagccgccgtaaccattacccaacgatgcgctgagccaacaagttttctagcaatgtgagggcctattaaaccaataaatgcaatcccgccgctaacagagacacaagccgctgctaaaccaaccgctactattaatagaacaaatttttcgcgttccactcggacacctagcccagttgccacttgattgccaaatgacagcacatcgagcgtttttactttcataaaagcaatcgctccgagcacaatcaaccacggcaaaagcgcataaacatattgccaactcgaagcccagatatttccagccatccattcagcataacgctggtaattttgcggatcaagtcgaacagtcaagagcgtaatcaaagcagcaatcgcagctgcaacagcaatccctgtaagtaacaagcgattaggaagtaacccctcgctcctactataagaaagcccatatacaacaaatgccgttaaaatagctccgacaaatccaataaatggcataaataaaaccggtacatccatcgttgagggaaagaaggaaatataaagcataactgccaaacctgcgccgttgttaatcccaagaatccccggatcagccagtccatttccagaaataccttgtaaaatcgttcccgaaaccgcaagtcccgcaccaactaaaagcgcaataacaatacgtggcaaccgaaattctgacacaatcagttgcgttccggcatccgccattccaaagaaagacttaatcacttctataaaaggtaatttcgaatacccagcattgacactatatgtaaacgtacaaaatataagcacacttaaaataattaaagtccaaatacgccgtgatttctttcgtttttcagcaacagtcatatacattataagttcctcctttctttacgagctacatataggaagaaaggaaccccaattaatgcaaaaataacactaattggcgtttcatatggaggattaattgttcgggcaacaatatctgctgctaaagtcaaaaacgccccaactacagccgaacaaggaataataaagcgataatccaccccgactaaaaaacgtaccaaatgtggcacaatcaatccgataaagccaaccggaccaacaactgaaactgcaagtcctgctaaaattaaaacaactaccatcgaagctattttaacaaaagtcgttttttcaccaaggccaactgcaatatcatcacctaaacttaaaatcgtaattgatttgcttaataaaattgccgcaataagcgcaccgagtaaccacggccaaattgccgcaagctgactccatttcacaccagcgacgcctcccgcataccaaaacgccaaatcttgactcagctgaaaatagatcgcaagcccttcactaagcgccgtaagaagcgaactcaccgctgcccccgcaagtactaatcgtgtaggagacatcgcacttccagcaatggaacttactccaaaaaccaagaacgctccaatcgctgcaccaacaaaagaaaatataattagcgagttataactaagccatggcataaaagcaaaacacacagctaccataaacgtcgatccagcattcagtccaagcaaaccagaatcagccagtggattgcgcgtaatcccttgcataattgctcctgccaccgcaaaagctgctccaatcgccatatcagctatcacacgaggaacccgcaaactccgaataatctggtgctgtgtgtccgaactattataatgaaaaagcgcgtcccaaaccgtactcaaattaatattagccgcccctactgcaatcccgaataacgctagaataagaagcaacaaaatcccacccgaaagtatgaatatagcaacagtcggtcttgtattcatttttatctgttttgacttatccatctgtacatgttccttccatctaaattatccgctcatttttagtgataataattatcaatcgcaaagaaaattatatcaatatcattcactaagcgcaatctttagttggattcaagtaacttctcgacaacaatatccaactgcccttctactgctaaaggatcataataaaacatcgtgtcaaaatccatttgatagacatttcccgctttaaatgtcggtaaatttttccaaattggtgagttggttaaatcttttaaagttttctctccgtctttagcacttccagaagaagtatttgtcacaaacattctatccgctgcaaactcaggtaatacttctaatgaaattttttgccagtcttgtccgtccaatacatccgtttgaattttagctggtgctttcagttgtaaggcattataaatcgcttgacctccgcgccccatattttgccccattacataaaaatctttatcttgaacttcataaatgcccaccgtttcattcggctttaattttcctgctaatttttctctgctttccttcgctttttgatgaaatttatctagccaagcttctccagctttcttttcaccaactaaatctgcaatttggcgcacatcttcttccacatttttagaagtcgcgtacgggattaacacagttggcgcaattttggacattttttcatattcatcttctttggaaacaacaattaaatctggttttaattctgccactttttctgctgaaactggatcaccaatatctgtaattccttccacttttcctttcaaaaacggattttcgatttgtttcgctctagccccaaccggctttatcccaagcaaaacaatatttcctagatattccgatgccacaatgcgtttcggatgtgccggaatttctactttcttcccatttgccattgtatatgtacgcatttcaaccttgtcatttcctgccgttttatcatctccacaagcagctaaaactactgtagttaaaagcattaatacgagtaaacttaaaccttttttcaaatgaacccctcctgtaactgataacaattctcagttagtatagcaactttgttcttaaagtgcaaatcctctctgacaaagtatcacttgcatctttaacgtaaaaactctatacttaaccattgagaatgattatcaccttaactttaaattggagcgatgaaaatgaaagaccttcatacagataacttacaaatttcatacgacaaacgaatcattgttgatggtttagatatagccattcctgctaataaaataactgccttagttggggcaaatggttccgggaaatcaactattttaaagacgatgtcccgcttgatgaaacctagcaaaggcgctgtttatttagacggcaagaaaattcataatgaaccgacacgagaaattgccaaacaattagctattttgccacaaaatccttcagcacctgatggtttgacggtgtttgaattaatttcttatggccgctctccgcatcaaagcagttttaaatcaattaccgcaaaagatcgggaaattattttctggtcattgcgtgtaacgaatttaactgaatttgcggaccgaccgattgacagtttatcaggcggacaacgccaacgtgcttggatagcaatgtcgctcgcgcaagaaacagacgtactattcctcgatgaaccgacaacctttttagacatgactcaccaactagacgtccttaacctactcaaacaattaaatcaatcagaaaaccgtacaatcgtgatggttgttcatgatttaaatcacgcatctcgttacgctcatcatatgattgctattaaagaaggaaaagtagttgcagaaggttcgccagttaacgtaatgactgaagaaacgttagaagacgtatttaatattaaagccgatattttaattgacccacgcagcggtgtccctctttgtctcccatacgaaacttgcaacgggtgcgaaattgtaaaggagcttgattccattgccaaatgaagtgtatgatgtaacgattattggcggcggtccaattgggctattttccgcattttatagtggtttacgttccatgaaaacaaaaattattgatgctgaaccagatgttggtggcaaagtccgctactttttcccggaaaaaatcattcgagatattggcggaattccagctattactggagctaatctcgttgccaatttaaaagagcaagcagaaacctttcaccctactattgtatgtaatgaacgagtagttgatgtaactaaactaactgatggcgtgtttcaactaacttcacataatggcagtattcatttttctaaaacggttgttatcgcaacaggaagcggcacttttgaagtcaataaattagaagcgatgcatgtggacgatttcccgctagccatcaattatgacgttaaaaaccttgagcaatttcgtgacaaaatcgttacggtttctggtggcggaaattccgctattgactgggcgcaaacacttgaaccaattgcaaaaaaagtgcatctaatatatcgtggcgaagattttaaagcgcatgaagaaagtgttcgtgaacttaaaaattcccgcgttgaaattcatatccatcatgaaatcaaggaattaatcggagcaaataatcaactagcaagtataaaaatttgctgtaaccagacacaagttactaaaacgattgaaacagaagcactttttattaatcacggtgtcaaagttgaccttggaacgatggctgaatggggctttgaactagcagatttcggtattgttgttgatgacgaaatgaaaacgactgtaccaggtatttttgcttgtggagatagcgcgacctattcacgaaaaatccgcattatcgcagctggattacatgaaggtcctattgcgattaatagcgccaaaaaatatttagaacctaccgcaagagacgaagcaatgattagtacccatcacgaaagctttattggttaaaaaaggattcgggctcactcgcccgaatcctttttttcttcacatataccaaattcgacaattcgcatcatttccgtaaaatcattggcaagtggaataaaatcttccatcgtcgcattcggatgtctttgcaaaaacaccgtacttttctctgtaatatgctgaaaaagtgcttccatcacttttcgcgccgcatccatgttcacatctttttttaactgcatttcgtttaaaacttgattcatttgcgcttcagaccgctcaattgccttatcgaaaaagccatctaatttacctttcaattctggcggtggatttccgtaagcttgcataatcaaaccaaaaatcgcaggatatttacgattaaaatccagtttcattttcgtcgaccaaatcgccatctcgacaaaatcactccatcgtttctcttccaaactaacctcattcgtcgcaaaatcaaccgcgtaagacactgctgcaatataaagtttttctttagagccaaaataatgaaaaataagccctttggaaacgcccgcttttgcacaaattttattagtactagctgcctgatagcctttttctgtaaattcttccatcgccgcttctaaaatttttagtcgtttttcatccattatactttcaaatcctttttcttataaagaacaaaagtagctgctaccgctacaataatcaccgcgcaggaaattagtgcattcgttccagtaatccctttatccataatttctgatggaatcgcataattgattggcgaaaagtatttgaaaaagtcaacattatcatttaacccggccattatacctaaaatataagttaagaaaacaagagcaagagcgacgggagaagcttgtttagcggaacgtaacactgctgacaccataaagcccacactcataaatacagctgcaacaagtaactcacttgaaaacactcgaacaagctccatcactaaattcccgctatctaccccacttggttttaaaacaagaacgagcacaacagaagctacaaacgtaatcaaccaaaaagccacgaaagataataaattcccaaccattttccaaaacacaagactagcccgagtaatcggctgggcatataaaaattcaattgtgccatctgtttcttcttttattaaagcctgtgcaccaatcaatgctgcatatacgcatgccgcaataaaaatatactgaaaaacatacgcaaaataagcatcaatattcgttaaatccgccattgaatccatatgcaaaattttcatcatatcttgcggaagtgcattcatctttgtattcactaaatcttgcataccgctactttgcatactagggaagaaagccataaacacacctaaaatcacaattactacaacggaccaaacaacaaggctttttattcttgttttccattcaatgtgtaagatgttcatttgatttctcccccttcatatagtgtcataaatttatcttctaattcctgatttgtaatcgttaaatccgtaatttctttttcctgtaatagtggcaaaattgttttaatatcatcatcaaaaataagtcgtgctttgcctgtttcattttcgataattcttgcacccgcattcgttaatttttcaaggggcaaattcgtccctttgagtgcaatcactttgccagtcatttgctgattggcaatatcttccaccgcgataatgttcccgtttcgaataaaagccgctctcgtgcagtattcttgaacctcacgtaaattatgacttgaaagaaaaatcgtcatcccctctttattccgctcggtcatttctttaaataaataatgttgcatcaaaggatcaaggccgttcgttggttcatccaaaatgaataattgcggttcggtaataagtccagcaacaatcgctactttcttcttatttccaagcgacatttcaccaaagcgttttttcggatcaatcgaaaacatttcataatatctattcattttttgtgttgcatttttgatttgatggaatttagcagcatagtggataatatcatttgcagtcatttgtggataatagcgaacttcactagggacatatccgaccattttcttaatctctgctgactgtttcactacatcttttccgagaaccgtggcacttccgctcgttgcataaataaaattcaataagactttgatagttgttgatttcccagctccatttggaccgataaaaccgtataattcgccttcatttaccgacaaattcacattttcaattgctcgttttttatgataattttttgtgagtgattccaccttaattgcttccatgttctctcctccacctttttattgaccacttagtcaacttgagtataaccacttttgaccaggtagtcaatcaaaaactataatcaataatagtatccaaattactgtttttcatgctatctaaagtctttaaaattccacttttagcttgataatactaatttcaataatcgctttattacggatagaataactaagttccaggtgatatagcaagtttatggtggtggctagctctttcaacaagaaagggggatgcctatgacttttttgttaggaactcctggaaaggataacccatgaccgtttatgaagcactctcttttgcagttgcttttacaactttagtgttgttactaaacagtcaaaataacacaaaaaaataaccactcataaactttggcgagtttagtggttatttttataccatattagactagctgccaccttaaatggggcttacatttgagggtcatgttcttgcatggctctcttttcatgtttatgataacatatttccattctttatgccaagtattcccaaagaagtttttcatccggtttattcgttttcttctattaatagttgtaatttccagtactgtatcgcgtacattgtttttgcgtcatgaatgaattgttgtgctattaactgttctgcttcttccatcgttactttgactaaattaataaattcatctgcatcttgtgctagagggtgttccattttccgaagatcccgtgctacataaatatgtaaaagttcactagcaaacccaggtgatgtataaaaagaagtgagatatgttaaatcatcggactgaaaaccagtttcttcttctagttcccgttttgcggtcacgagcggatcttcccccggctccattttaccggctggaatttcgataatgtttttttcgagtggctttctgaattgttctactaagtacattcttccatctgctgaaaaaggtataattgccacagctccgggatgcttgacgatttcgcgcttgctcttttccccattcggcaactccacatcatctacttgcaattcaataacatttccactaaaaatcttttctgtatgaagcgttttttcctctagtgagtccatttctgccacctacttctcgttttttttcattataacataactaagtccgagtttaatttacatcgcacgactgataacatctgttttctaaatatggtatgataagaacaaataaaggacactttctaaaatataaaaaccatgctacttgcttagtgctcacatactaaatatacttaaatggtagttacattccatcaatctttatttttagaaaaatatactattaagaaaaagcggaccttttaaacaggtacttaaaggagaagatgtataatgaccgtttttaaaaagatattagcattcacaggttctattttacttgtcattattttgggtggtattcttacttcacttatccatagtggcttggtaattgcaacaattgttatcgctgttgcagctatcctatttttcttttcatctaaagctggagaccgggcgcaaatgattgcaactggattaaccaagaaagaatataaatatattcgtactaacttagaagaagctcgtgtgaaaattatccgccttcaaaaaatcatgacacaaaacaaagcgctatattctttccaagagcgcaacaaaacacttttacttactaaaagaatttacggcattgtaaaagaagaacctaaacgtttttatgaagcagaagatttctttttctctcatcttgactctttagtagagctcaccgaaaaatatgctttcttagaaaaacaacctgtaaaagacaagaaaatttatcaaacgctttctgatacacgcacacttttaaatgatttaagtcgtgttattgaaaaggatttatttacacttttgaatcaagatgtaaacaatctcgattttgaattagaagtagcgaaaaactccatttccaaacagaaaaagaaattcgaaaggggtacaaaagatgaccgagaacaagccaagtgaagaaacaaatgaattaaaagatttagtagtggagaaagagtttaaccaaacattagatgatcttctagctaacccattcggatcagacggcgaatcagctgcaagtatcgtaaataacgaaacagatgcggctccccgcctagttgatatgcttactgaaacaaataaaaaacaagcgttagagttatccaaacaaatcgaacctggaaatcaagcagcgattcttggttacggagcacctgcccaagctaaattgcatgacttttctcactcgatgttagctcatgtgcaaaagcaagatgttggaccaattggcgatattattagtgatttaatgttccgcttgcaagaagcggatccagatgaactagctgctcgcaacaaaaacgtcttcacaaaaatgttccaccgagttaaacaatccatcaatgaaattacttctaaatatcaaaaaattggtacccaaattgaccgcatcgcgttgaaactggaacattccaaaaagcgtttaatggaagataactctttcctagaacagctttatgataaaaataaagattacttccaagcacttaacatttacattgctgctggagaattaaaattagaagaaattaatacaaaaatgctcccagaacttcgcaaaaaagcagaacaaactggcgatcaaatggattatcaagaagtaaatgatttaacacaatttgcggatcgacttgataagcgtgtatatgatttacgcttaagtcgtcaaatcactatccaacaagcgccgcaaatacgtttaatccaaaatacaaaccaagcactcgctgaaaaaattcagtcttccattatgactgcaattccgctttggaaaaaccaagtagccatcgcgcttacgttgcttcgtcaacaacaagccgtagccgctcaacgccaagtttctgaaacaacgaacgaacttctaaaacgaaatgccgatatgctaaaaacaaacgcgatcgaaacagcgcgtgaaaatgaaagaggtatcgtggacatcgaaacacttaaagaaacacagtccagcttaattgaaaccttgcaagaaacacttaaaatccaacaagaaggccgtgctaaacgtgccgtagcagagaaagaactagttacaatggagcaagaactgaaagaacgtttactggaaatgaaataatcaaaaaggctagcacttaaatcgtgctagcctttttttaaagtccttctaaacgtaaattttcaaaataaacgggttttaaattggttacggtaagtccaatcaaacgaatgctatcttgtcctttgtagctttctcgtagaagtaatgcagccgcttggtaaatttgattcgcatcattggtatattcgtttaaagtaagccgtttggtaattgtggtaaagtcactatagcgcaattttagtactactgtcttgccgtgtttttgtaacttaatgagacgttcttccactttcttagcaaacttcattaaactttgctcgagtatgcggttatccaatacgttaaattcaaaagtcgtttctttgcctactgatttgcgatcacgatgcggattcacaatgttattcgaacgacctcgaacatgtcgatacaactgatagccatgcttatgcaattcacgaataaggtcccattcgctccacttcttcaaatctgctccagtttctattccaaggcgatgtaatttttccgctgtcactttccctaccccataaaatttggttacaggaatttgttctaaaaaggcttctgcttcttcaggtgcaaccacggtaatcccagcaggtttcttaaaatcagaagcgatttttgcgataaatttattaaatgatacgccggcagaagcagttagaccaagctcgcggtaaatcgtctgctggatttcacgtgcaaccattgtggcggatttcattccttttttattttcagttacatccaaataagcttcatctaaagagagtggttcgataatatccgtatatctggaaaagatttcgcggatttgattagaaacctctacataatgagccatattgccgtgaataaaaataccgttcgggcaaagtttagcggcttgtctggtgggcatagctgaatgcacaccgaatttgcgcgcttcataagaacaagtcgcaacaactccacgtttattaggatccccaccaataataagcggctttcctcggaactcaggatggtcgcgttgttctacagatgcataaaaagcgtccatatcaatatgaataatttttctactcgtatccataactgcatctcccttaaaacgaacaagcgttcttattcaattataaaggttaaactcattaattacaagaaaaaaataccctattttcataaggtattttcttctgatttatttctttaaaaatgcccctttaccgaagaattcgataacttgtggcattacttgataaagtcgtgtcgcaatattcattacaaaaggtaaattgatttcgcggcgcttagttcccataatttgcactgttttacgcgcaaccttttctggctgtaacactaatttgccaactgtttctaaatagttccctgatttatccgctacatcgaaaaagtttgtagcaattgggccaggattgatcgttgtaacatggattttgtctggcattagttctaaacgaagtgcattagaaaaacctaaaaccgcatatttcgttgctgagtaaacagttgattttggtgtagctattttagcagcttgggaagcaatattaataatatgtcctgctttgcgtgcttgcatttgcggtaaaatcagttgtgtgagttgaattaagcccagtacattcgtatcaaacattttttcaattgtctcaaatggaatatctaccgcgttttcaaataaaccaaaacctgcacagttgactaatacgtcgatttgatacgaagcatttatctctgcgctgacttgtttcacttgctcgaaatccgtcatatctaaagtaaaataagtcgcttctactgaaaaattatcatgtatatctttttgtaaatctagtaatttttccgtacttctggctgttataataacattgccaccggacgcagcaacttgtcttgcaatttcagcgccaagaccgttagaagccccggtaattaataccgttttattcttcaaaaaagggttcattttgtcactctcctacttgaaaaacagctaagtcataagctatttcagtattttcaaaaacagtttttgcttctattaatagttctttacttgcatctcgatcatatcttgagctgatatgggttaaaattaattttttgacattggcagctttagcaaggtttgccgcttgaagcgttgtcgaatgcatatattctcctgccatttttgctttatcaccttcaaatgttgcttcatgaaccaaaatatcggcgttcattgctaattctagttcgctaacagtttcttttgtatcaccaaaaatactaataatcttccctttttgtggctcaccgatataatttttaccatcgattacgcgtccatcagctaatgttacgatttcgccgttttttagcttttgaaaaactggtcccgcttcgacgccgtccgcctttagtttttcagcattaagtgcgccctgtttatctttttcaacaatgcggtaaccaaaactgcgtacgccgtggtcaagatcgtcagctgtaactagaaacatctcatcttcaaaaatcacacctggctctatttcttcaaaattgattttatatgtaagccttgttccactgagtcttaaggaagtttcgacatattcagctattccagctgggccataaatagtcaaatcggagtctccaccttgaaaagaacggctacttaataagcctggtagtccaaaaatatggtctccgtgcatgtgagtaataaatattttttctagcttgctaagtttgatatggcttcgcaaaacttgatgttgggttgcttccccgcaatcaaaaagccaaattgcatttcgttcatttaacattgaaagtgcgatggatgtgacattacggcctcgcgacggtacgcctgctccagttcctaaaaaaacaagttccattttgttccattcccttcccagttcgtgtcttattttatcacattcttaatcgaacaggaaataaacattttcatgctaaaaacccttataattcagaaataactgtcaaattaaaaaaatattcgaaccaaacagttgcacaaatgcttctttatggataaaatagtatggactaatgaggaaaattaatagctcatttaataaggcctttttttgtggggttcttttcaaactaagaaatctttttcttagcagttaattttttgccattaagagaataagaaagagggtaaatgacgtatgacagatgagttagaacaaaaagcactgattactatttttggcggtacgggagatttggcaaatcgcaaactttacccttcgctatatcatttgtacagtaagggatctcttggcgacaattttgctgtaattggaacggctcgtcgtgaatggagtaacgatttcttccgtgataaagtaaaagagtctatcaaagacattgacggttccgaaaaagacgcggatgcatttgcttctcatttctactatcaatcccatgatgtaacaaataaagaatcttatgtaactttaaaagatttgtctgatgaattagacgctaaatatgaattaggtggtaatcgccttttctatcttgcaatggcaccgaacttctttggaacgattgctagccgcattaaatctgaaggttttgtagacacagacggtttccatcgtttaattatcgaaaaaccatttggtcatgatttagctagtgcggaagaattaaataattcgcttcgtcaagctttcaaggaagatgaaatttatcgtattgaccattatttaggaaaagaaatgatccaaaatatctcggttattcgttttgccaattctatcattgaatcgctttggaataatcgttacattgataacattcaagttactttgacagaagtgctcggcgttgaagaccgaggacgttattatgacgaaagtggcgcattacgagacatggttcaaaaccatattctccaaatcgtttctttacttgcgatggagccgccaattaacttaacgacacgcgagattcgtcatgaaaaagttcgcgcgcttcgttcgttacgcgtttttgaaggtaaagaagttcaccaaaactttattcgtggtcaatacgggcctggtgaagtaggtggcaaagaacttaaaggctatcgtcaagaagataatgtggatcctcattccaatacggaaaccttcgttgcagctaaacttgaaatcgataacttccgctgggctggtgttccattttatatccgtactggtaaacgtcttgcgaagaaaacaacccaaattgctattcagttcaaagatgtgccactgaatttattcgggcaacaacaatcgcttggtggtaacgtacttgttattcatatccaaccggacgaaggtattacacttcatttgaatgtaaaagaacctggtcaaggaatggttacaatgccagttaacttaaattacattcattcttctccagatggtatgaatacacctgaagcttatgaaaaattaattttagactgcctacgcggtgatgcaacttacttctctcactgggatgaagtatcgctatcatggaactttatcgaccatgtggcagatgtttggacaaatactaaagaccacttccctaactacaaatccggttcgatgggtccaaaagaagcagacgaccttatccaacgtgacggattccagtggttcccaatcgattaatcaaaaaaccagaaatatggctattttagcctgtttctggttttctttgtttacttgcaaaaacccctatgcatgttagaatagagaggaaaactaactagttaaaggagctcatataatggctgaaaatattgatgactacctagaaaaaggcatgtatggggcaaaagaaattaatcccgctgagaagaagaaatacttaggaacttaccgcgaacgagtattagttgcgctcacaaaagaagaagttttaacccaagaatatcttccagaactagaaaaagcaatactagaaaacagtgactcgaagcttttgttaaatggattactgcactataattctctgcgcccttacattaagctagcggaaaaatgtaaacatgaattttctatcgtcagtcgtttagaaggtgaaacagatatttatctcgtccttgcctgtcaaaaagcggtcaataaagaagatattcatttgtataaggaagaacaagaaaacgccgaagaagaacctacctcgttactcgagaaggttcgtaaactatttaattaagtttttccgtgtaaacatataggaggtcgatctatgctacaccttattactgtatcactcgctattttgatggcgctacaaaccatttatttcttcattcggaaaaacgtcaatatgggagttatgtttttactaataactgccgcccttcttctacttagcacaatttagtggaacattcgtcgcgacagcttgctttaactcctgttgcataataccaattccagtcgcaccttcaagtggaaaactgaatggctgtttaccgtcagtaatactcattagtaaccctctgaattttttgccgcctaacatcgggattggttcagaagggtttatttgtagttgcttccactgttctttcagttcatcaagctgaattgtgtcttcccctacccctttcatcgtaaaacggacatcatagttttttgcaacaatatcatctggttttaaaaatccatattttggggataaaatcaaataattatccgcaaactgttccgcataagctttacttaaacgatgaaacgttccggtatatacttcacttgccttaactggaccaatatccggaagcttatccccaatttttggttttccagaggcgataataatcaggtttgttttattggatattcccacatcatcactcttccttgtttctcttcagtatctttttctttaatatgtacaaaatgattatgctttagtacttggatagaagcttcgttttgctcataacatctagcaaatatgcggttaatgacgggttgatgttctaaccaatcaatcatactaatgagcgcttctgacatatatcctttattttgataatctgggacaatactgtagccaatttcgatttctcccgtttcatctgggtttccttgtccgccaatttcacctataattttattttctgtttttaatacgactaaacgtgtccatttgatcattttatcgtctttttttacattttctaatacatatggcaaataaaaaaagaaatcaattccgggccagtcaggcgacacgtggtagccgcttgttttttctaaagcttctgtcccatttatcgttgcttgaatcatttctaatgtgtagtttattaaaattaatcgatctgtttccaaattatccacagcaaaaacctgactttcctactaatttattactttcaatttagcagaatttgctataaaaacgcaactaatgtgtgattttttatccaaaatattaattaattcgagtaaaactataaaaataaaactattctgactatatacttgacctttcatttttgaatgcgcttccatttaagttataagtcaaatataagaccaggtactaatttagtataaaagagtaagttgcttgaattgtgcaaactgacggaaaactttcaaaataacaattgacaatcgcatggcaaccatatatattaaataataacataacatttcttgatattaatttttttcaaaaatgtgcgactaatcggaaatctaaaaccatttaacgaaggggataatgacttatgaaaacgaccaaatcagtcattacaattttattactctaaaaggactttgagcactgtagaaatttacagtagtttgagtcctgtttacgttaaatgggattctggcaaagcatcccattgttttcatcattggggtgctttttctttagctagatttcaaggtttaagcatagaaaagtaactatcaagcaagcaactacttattcatatatattaatgccacgctattttgcaaattctaaaaattcagcgtcggcaaataattcttaattagaaatggggtaaagtcatatgcgtagtgacaaaattaaaaaaggtgttgaacaggctccagcaagaagtttgctgcatgccacaggtcaaatcaaaagtccaggtgatatggataaaccatttatcgctatttgtaactcttacattgatattgtaccaggtcacgttcatttgcgagaacttgcggatgtggctaaagaagctattagagaagctggcggtatcccatttgaatttaatacgattggtgtagatgacggcattgctatgggacatatcggtatgcgttactccctcccttctcgtgaagtaattgctgatgctgctgaaaccgtcattaatgcacattggtttgatggtgttttctacattccaaactgtgacaaaatcacaccaggtatgctacttgcttctgtccgtacaaatgtacctgctatcttctgttctggtggtcctatgaaagctggattatctgctcacggaaaagcccttactctttcttccgtttttgaagcggttggtgcttttaaagaaggcagtatgtcacaagaagatttccttgatatggaagcaaacgcgtgtccgacttgcggctcgtgtgcaggaatgttcactgcaaactcaatgaactgtttaatggaaatcctcggtatggctgttccgggaaatggtacaacgcttgctgtttcggatgcacgccgagaacttattagagagtcagcattccatttaatggatttagtgaaaaaagatattcgtcctcgtgacattattactaaagatgcgatagatgatgcatttgctctagacatggcaatgggtggctctacaaatactgttttacatacactcgcccttgcaaatgaagctgggattgaagattacgatttagaacgtatcaatgacatcgctaaacgcgtcccttacctttccaaaatcgccccttcttcttcttactcgatgcatgatgttcatgaagctggtggtgtttcagctattattaaagaacttgttgatcttggtggcgctattcatccagaccgcataacagttactgggaagacaattagagaaaatgttgctgatgcaaaaattaataatacagatgttatccatccaaaagaaaatccttatagcccagttggtggactttccatgttgtttggaaatatcgcaccaaaaggagcaaccatcaaagttggtggtgtagatccttccgtacaagttttcaaaggggaagctatttgctttagttctcatgatgaggcagttgaagccattgataatcatacggttcgcgaaggtcatgtagtagttattcgctatgaaggtccaaaaggcggaccaggaatgccagaaatgctagctccaacatctagtattgttggccgcggtttaggtaaagacgtcgcactcattacagatggccgtttctccggagcaacacgcgggattgcagttggtcacatttctcctgaagctgctgctggcggtccaatcgcacttgttcacgacggagatattatcacaattgatttaccaaatcggacgttaaatgtagatgttccagatgaagttttagaagaaagaagaaaagaattaccgaaatttaaagccaaagtaaaaactggttatcttgcaagatatactgcactcgtaacaagtgctcacactggtggtattttgcaaattccagaagatttaatcgactaaaaaaatgaggtgataagcgtgattgatacgacgaagacaaatgaaaaagcgacaaaaaagctaaataaaagtggagctgaacttttaattgactccttgaaaaaacaacaagtcgaaatgatttttgggtatccaggtggcgctgttttacctctttatgatgccttttatgactgtgatattccgcatattctaacgaggcatgaacaaggagcgattcatgctgctgaaggttatgcccgcgtaactgggaaacctggtgtcgttgttgtaacgagtggacctggtgcaacaaatgtattaactggtattgcagatgcgatgagtgattctattcctttagttatttttacaggccaagttcatacgcctggtatcggaaaagacgcttttcaagaagcagatatgattggactcaccatcccaattactaaatacaactaccaagttcgtgatgttcgtgacttaccaaaaattgtcaacgaagcttttcatatcgcaaatactggtcgtaaaggtcctgttgttgttgatattccaaaagatatgggtattactcaaacggatacggttcgtcctgatacgattgacttgccaggttatcaaccgacttattcacctaatccactgcaactcgaaaaattaatgcaagctctttccgctcgtagtaagcctcttattcttgcaggagctggtgtaaaccatgctagagctacggctgaattactcgaatttgctgaacgttatcaaattcctgttgttaatacactgctcggtcttggcagttttccgcaaaaccatgatttatttcttggtatgggaggaatgcacggttcttacgcagcaaatatggcgttaactgactgcgatttactcattaactttggttcaagatttgatgatcgccttgctagcgcgccaaaagattttgctacgaaagcaaccattgctcatatcgacattgatcccgctgaaatcggcaaaattatcgaaacccaaattccaattgttgccgacattaatgaaacactcacacaactgttacaaatggaactaccggttcacccagatacatcacattggtacaaattaaatatgactcgtaaaaaccgtcatccttttaattttgataggacgaaaaaagcggaaattaaaccacagcgtgtaattgaacttattggtgaaattacgcaaggtgaggcgcttgtttctaccgatgttggacagcatcaaatgtggacagctcagttctatccgttccaatttgatcaccaaattattacaagcggtggtcttggcacgatgggctttggatttccagcagcggtcggtgcacaacttgctttccctgacaaaacagtagtcgcggttgttggtgatggtggtttccaaatgactaaccaagaactagcaattttaaacgattatcagattaatgtaaaaacagtcattatcaataatggatctctcggaatggttcgtcagtggcaagaaaaattccacgatgaaagatattcccattcgattttcacgagtcaacctgattttgtgaaattgtctgaagcatatggggttaaaggcgttcgtttgacgaatcctgaaacgcttgaaaaagatttaaggaaagcattcgcgcaccctggcccaattgtcattgatgttcatgttgcaaaagatgaactagtacttccaatggttccaagcggtaaaccaaatcaccaaatggaaggagtggaataaatgcgccgaatcattactgctacagtgaataactcatctggcgtactaaatcgtatcactggggttatctccagacgccaatataatatcgatagtatctctgttggctggaccgaaatcccgaatgtttctcggattaccatcgtcgtccatgtcgactcactatacgaaattgaacaagtaaccaaacagcttaacaaacaaatcgatgtgctcaaagtaagtgatattactgacgatgcgcacatcgaacgcgaactagctttactcaaaatcaactcccccgctgctttacgttctgagctaaacgcagtaatcgaaccatttcgcgccaccgtcattgatgtcggtactaaaaatgtcgtcattcaagtaactggtacaagcgaaaaaattgatgctttcgttgatacagttcgaccatatggcattaaacaaatggctagaacaggtgtaactggctttacaagaagtcctaaaaaaatgggctgaaatcattaactacagagcaattcgttgctttgctagcatcagaatagcatctcgctcttctgaaatataaaaagaaactagttggaggttaggaaaaatgacaaaagtttattatgaagatgcagtaaaaaataacgcactagaaggtaaaacagtagcagtaatcgggtacggttcacaaggccatgcgcattctcaaaacctacgtgacaatggcaataacgttattatcggaattcgcgaaggtaaatctgccgaatctgcgagaaatgatggctttgatgtttattctgttagtgaagcagctgaaaaagcagacgttattatgattcttttgccagatgaaacacaaggtgaaacgtatgaaaatgaaatcaagcctaacctaaaagctggcaatgcacttgttttcgctcatggttttaatattcattttgacgtaattaatcctccaagcgatgtggatgttttcctagtagctccaaaaggtcctggtcacttagttcgccgtacttttgtcgaaggtggcgctgtcccttccctattcgctatttaccaagatgcaactggaaatgcacgtgatacagctctttcttacgcaaaaggtatcggcgcaactcgtgctggcgttatcgaaacaactttcaaagaagaaacagaaacggatctatttggtgaacaagcagttctttgtggaggcgctactcatcttatccaagctggatttgaaacactagttgaggctggctaccaaccagaacttgcttattttgaagtactacacgaaatgaagctaattgttgatttgatgtatgaaggcggtatggaaaaaatgcgccactcgatttctaatacagcagaatacggcgactatgtttccggccctcgtgttgttacagccgatacgaaaaaagccatgaaagaagtacttaccgacattcaaaatggtaactttgctaaatcattcattgacgacaataaaaatggttttaaagagttccatagaatgcgcaaagaacaacaaggtcatcaaatcgaaaaagttggtgcagaacttcgcgaaatgatgccatttgtaaaaccacaacattaatacttaccgcggattgctaggcgagtttttcgcctagcaaccgtttatcctttttcaatatgagtttaagcaagaacgtgtttcttccctaaactgatactgaaagcaggaaaaatccacgcttccctatctaatataaaacaagaggtgaaatcgaatgaagaaaatccagttttttgatactacacttagagatggcgaacaaacccctggagttaattttgacgtaaaggagaaaatccagattgccttacaactcgaaaaacttggaattgatgtgattgaagccggctttccgatttcttctcctggagattttgaatgcgtcaaggcaattgcaaaagcgattaaacattgttctgtaacagggctagcacgctgtgttgaagcggatattgaccgcgcggaagaagcgcttaaagacgcagtttccccgcaaatacatatcttcttagcaacgagcgatgtgcatatggaatacaaattaaaaatgagtcgggcggaagttcttgcttccattaaacaccacattagttatgctagacaaaaatttgacgttgtacagttttcaccagaagatgcaacgcgctcagatcgtgcttttcttattgaagcagttcaaaccgcgattgatgctggagctaccgttattaacattccagatacagtcggatacactaatccaactgaattcggacaattgtttcaagatttgcgccgggaaataaagcagtttgatgatattattttcgcgtcccactgtcatgatgaccttggaatggctacggctaacgcgctcgctgcaattgaaaatggtgcgagacgcgttgaaggtacaattaacggtatcggtgaacgtgctggaaatacggcgctagaagaagttgccgtcgcacttcacatccgcaaagatttttatcaagcagaaacaaatattgtcttgaatcaatttaaaaactcaagtgatctaattagtcgtttgtctggtatgccagttcctcgtaataaagccgtaataggtggaaatgcatacgcacatgaatccggtattcatcaagatggcgttctaaaaaatccagatacgtatgaaatcatcacccctgctcttgttggtgttgataaaaattccctccctcttggcaaactttctggaaaacatgccttcaatacacgaatggaagaaatgggttatacgctgagtgaacaagaacaaaaagatgcttttaaacgtttcaaacagcttgcagatgcaaaaaaagacgtgaccgaagaagacttgcatgcgctaattcttggtcaatcttctgaatctcatgatgctttcgaattaaaacatttacaagtacagtacgttactggcggtgtccaaggtgccatcgtgcggattgaagaacgtgatggcgcgttaatagaagatgcagcaactggctcaggaagcattgaagccatttataatactattaaccgactaatgaaacaagatattgaattaaccgattatcgtattcaagcgattacagcaggccaagatgcccaagcagaagtccatgtcgtcattaaagatgataatggcactgaattccatggtatcggtatcgattttgatgttttaacagctagtgctaaagcttatttgcaagcatctggaaaaagcaaatctacaagtaagcaagctgatttcgaggaggtaaagtaacgtggcatataaaattacttccttagctggcgacggaattggtccggaaattatggcttccggaatcaaaatactagaagctatcgctgccaaatacaatcatacatttgaaattgaatcgcacccttttggaggagccggaattgatgcagctggtgatccaatccctcctgaaactttaaaagcatgccaaaatgccgacgcaattttacttggggcaatcggtggtcctaagtgggataatgcgcctaaacgacctgaagacggcttacttgcacttagaaaagcgcttggtcttttcgctaacatccgccctattcaagtccctagttcgataacacacctttctcctttaaaaaaggaaattgttgaaaatactgattttgttgttgttcgtgagttaactggtggactttactttggggaaccgaaacattgggatgatgtggctgctgttgattctttaacctatactcgcgtggaaatcgaacgaattattgaaaaagcattcgaaattgcatcgacacgaaataaaaaagtaacttctgttgataaagcaaatgtgctagcttcaagtaaattatggcgcaaaattgctgaagaagtagcaagtcgtcatccagatattacattagagcatttgtacgttgatgctgctgcaatgctaatgattcagcggccaacgacattcgatgtaatcgtaacggaaaatttattcggtgatattttaagcgatgaagcatctgttatcactggatcacttgggatgctcccttctgctagtcacgctgaaaatggaccttctttatacgaaccaattcacggatctgcaccagacattgctaatcaaaatatcgccaatccaatgtcaatgatttcttctgtgtcaatgatgctccgtcaatctttttcactttttaaagaggcagatgcgattgatgcggctacagcaagaacgatgcaagctggatttttaactgctgatcttggaggtaatacttccacaaccgattttacaaatgaagttctaaaacaaattgaaggaggagaataaaatggggaaaacactttttgataaactttggaaccgccatgtcatttatggtaaagaaggtgaaccgcaattattatatgttgaccttcatttgattcatgaagttacttctcctcaagcgtttgaaggacttagaatggaaaatcgaccactgcggagaccagataaaacatttgctacaatggatcataatgttcccactgaagacattttcaacattcaagatttagttgctaaaaagcaaattgaagcactacaaactaactgcgaagaattcggggtaacactagctgatatgggtagcgaccgtcaaggaatcgtgcatatggttggacctgaaactggtcttactcaacctggaaaagtgattgtatgtggagattcgcatactgcaacacatggtgcttttggcgcgattggctttgggattggttccagtgaagtagagcatgtttttgcgacccaaactatttggcaacaaaaaccaaaatctatgggtattgaaattaatggaaaacttcccaaaggcgtttatgcaaaagatataattttgcatttgattgccacatatggcgtcgcttttggaacaggttatgcggttgaatattatggcgaaacgattcgcaatatgtcgatggaagaacgtatgacgatttgtaatatggctattgaaggtggcgcaaaaatgggcatgatggcgccagaccaaactacttttgaatatgttcgtggtcgtgaatatgctccttctgacatggaaaaagccattcgtgattgggaaacgcttaaaactgatcctgatgcggaatatgaccttcatatcgaaatggatgctagcattttagaaccatatgtcacttggggaacaaatccagagatgggtgtccctttttcaaaagcatttccggaaattaaagatatgaactatgagcgagcttatgaatatatgggactaaaacctggtcaaactgcagaagaaatcgagcttggttatgtgtttattggttcttgtacgaatgctcggctgtctgatttagaagaagcagctcgtatcgttaaaggaaataaagtaaaaaataatattcgggcactagtcgttcctggttctcgccaagttcgtaatgcagcagaagcaatcggccttgataagatatttaaagatgccggttttgaatggcgtgaacctggttgttcgatgtgtctcggaatgaatcccgaccaagttccagacggggtccactgcgcttctacttcgaatcgtaattttgaagggcgccaaggtaaaggagcacgtacccatcttgtttcaccagcaatggctgcagcggcggcaattaacggacactttatcgatattcgaaaggaggcggttattagtggaggcaattaaagtacacattggtaaaacagttgcactaatgaacgataatattgacaccgatcaaattattccaaaaagtttcctaaagcgaattgaacggactggttttggcgaatttctatttgatagttggcgctaccttccgaatcggaaaccaaacccggattttccgctcaatgctcctgaccgtcaagaagcaacgatattaattacaggagataattttggttgcggctcttctcgtgaacatgccgcatgggcgctacttgattaccgtttccgagtgattatcgctggaagttatagtgatattttttatatgaattgtacgaaaaatggcgttcttcctattgttcttcctagagaagcccgtgaaaaattagcgaaaatcactgccgaggaaaaagtgacgattgacttgccaaaacaacaagtcattagttcagttggtacctacccatttgagattgatgctacatggaaaaataaatttattaatgggctggatgatattgcgattacttttgaacatattgacgcgattaaagcctatgagcaaaaagtggattccatataagaaaaggtagtgaggatgatggagttagttgatttattagtgacagaagaagatgtcgaaaaagcctatgatgtattaaaaccagttgtcaagcataccccgcttgaatacgatttttacctatcagaaaaatatcattgcaatgtatatttgaaacgtgaagatttacagcgggtgcgttcttttaaattacgtggtgctttttatgccatttctcgactgtcagcagaacagttagaaaaaggagttgcctgtgcaagcgctggaaatcatgcccaaggagtcgcctatacttgtaaacgtatgacggttccggcaacgattttcatgccaactactaccccacaacaaaaagtatcgcaagtgaaatttttcggtggaagtaatgtggaggttgttttagttggtgacacgtttgatgcatctgctactgccgcaaaagaattcgcagcagaacatggtcagacatttatcccgccgtttgatgatccagatattatcgcaggccaaggatcgctcgcggttgaaatggtaaaagatttaaataaagcacatgagcaagcggattatgtttttgcaggtattggtggcggcggcttaattagcggtgtggcatcttatctaaaagcgaaaagtccaatcacaaaaattatcggtgtagaaccagctggcgcgccttcgatgacagaagcattaaaacaaaatcaagttgtgactctagataaaatcgataaatttgttgacggggctgcagtgaaagaagttggaagtttaacatttcagcatgcaaaagtcttagttgatgaagtgacaaccgtttctgaaggagcagtttgttcaacaattttagatatgtatacgaagcaagcgattgtcgccgaaccagctggtgctctttccgttgctgctctcgaaacttatcgtgaggaaatcaaagataaaacagtagtctgtatcgttagtggcggaaataacgatattaatcgaatgcaagaaattgaagagcgttccctacttcatgaaggattaaaacattatttcatcgtcaacttctctcaacgccctggtgctctaaaagagtttgtaaatgatgttcttggaccgcatgatgatattactaaattcgaatatacgaaaaaagtaaatcgaggcaatggacctgttatcatcggtgtacttttacaagataagaatgattatgaaggcttgcttgaccgggttgctgcttttgatccgagttatataccgattaatgataaccaaacactttacacattacttgtttaaaatgggttctcgcatgaagcgggagcctatttatattacagtttatctgtctgttatagtaacagtttattttgaaaactggtttaaaatcttttgtttaaggatataaagtagtataatgaacatatagaaattagactgtattatttaaaaacaactttttatatataacaattcaaggagtggcaatgatggacacagtaagaaaaaatcgattatttcagcattctacaatggcagcacttgttggtggtctttttagcggaacgacaagttttaaagaattactacaacacggtgacctcggcataggaacgcttgaccaatttgatggcgaactgattattttggatggggaagcttttcaaatacgctcggacggtcaagcttataaagtaaaaccggaagacacaacaccttatgcgagcactactttttttgaagccgatacgtcttttactgtttcagaacctacttctaaacaaactgtggaagaaaaaatcgccgaattagtgcaaggaccgaacgttttttacgcggtgaaaatgactgggaatttccgttatgtggacactcgcgttgttccaaaacaacaaagaccatatccgccacttattgaagcggtgaaggaacagccaacgtatcactttgagtatattactggtacaattgttggtttttggacacctgcttatattagtggtattggggtttccggctatcacgtacattttattgatgatatgcgcaaaatcggtggtcacgtatttgattacgaaatgcttgaaggtactgttgaagtcgcacaacaaactgaattcgaacttcagttaccacaaacaacagaatttcttagaagcgatttaagcacaccggatatgttagaacagattgaagcagcggaaaattaataaaaaaactcctctaaaaagttttagaggagttctttttttattttgctgttaaagttaaataatcatctgttagtggcatatagcctgttttactttgatacgttactttgtaccaaataccatcatttgtatccatttctacttttaccggagtacccgcaggaataacttgaactatgtcgctatcccatttagattcaccacgtaaatttaaatctcctactgcataatacgttttcaagttcaatggtttttcgactaaatagttatcacttaaaatcatataaccttttttaccaccgtaagttacttcatgccaaccatttatacttgttttcgaattaatagttactttttcacctttttctactacttgagaaatttcactatcccattttgcttcgctacgtaagtttaaattatcttttgcataataagtttttaacacagcagtttcagataaatataaatcatttagcggcatataacctgttttattttgataagttactttgtaccaattaccatcacttgtgttcatttcaacttttactttagcgccttcaggtaccacttggcttatgctgctgtcccatttagattcactacgtaaatttaatgtgttaactgcgtaatatgttttcaaatctagtggttctgctacaagataattattatttaaaatcatatagcctttcttaccaccgtatgttacttcataccagccatcgatacttgttttcgaattgactgttactttttcacctttttctactttttgagtaacttcactatcccattttgcttcgctacgtaagtttaaattatcttttgcataataggtttttaacacagcggtttcagataaatataaatcatttagtggcatataacctgttttattgtcataggttactttaaaccaattgccaacattcgtgtccatttcgactttgacagctctaccttctggaaccacttgacttatgctactatcccatttcgcctcactacgtaaatttaagctactcaccgcataataggttttcatattaagcgctttttcgactaaatagttatcatttaagatcatgtaaccttttttaccaccataagttacttgataccaaccatttacacttgtttttaaattaactgttactttttcacctttttgtactttttgagcaacgtcgctatcccaagttgcttttgttcttaggtttaaattatctttagcgtaatacgtttttagaacagtagttttggataaataatcatctgttagtgggatgtaacctgtttggttttgatatgttactttataccaaggaccactatttgtatccatttctacttttacagctctgccttctggtacaactaagctaatgctactatcccagtttgctgcactacgcagatttaaggtaccaaccgcataatacgtttccatattcaagggattttctactaagtaattattatttaaaatcatatagcctgtttttccgccgtatgttacttgataccaaccattcacattagttttaaggttcacagtaactttttcacctttttgtactttttgagctacatcgctatcccatgttgctttcgttcttaagtttatattatccttggcatagtatgtttttatcacaggtgtatcggagaaataattagttgtatttaacatataacctttagtattattataagttaccatacaccaaccattcttatcactgtctaagtcaatagatactttagcgccttgtggaacttttccagctactgaactatcccagttattgctagatcgtaaatttaaatctgacacagcataggcggatttagatccttttttctcggagaaattgaaaaatcttccgtatccaacaaaaatactctgccaataactactattaatgttgtctattttgactccatcattttgagcattaatcattttaccattacctatgtatattcctacatgacctttgaaatatactaaatcaccaggtttttgattaccatttttcactttatcagcagctgaatattgaggagctgaagtattaggaattcttactcctgttactttttcataaacatattgtgtgtaacctgagcagtcgaagtaatttggccctcttctcttgtcctggtcttgcgaatatggtttacctaaatgttttttagcttctgcataaagctcttcaaatgttttatttgtattggttgctgcacttgctttaattgtgaatgggctaaacaatcccagtacaatagcaaaaatgcacaatacagatataattcttttcatttttccatctccctttatttatgtttcaaggtaaaaacgatcgagttctgcaatcgttttcatcttgaaaaataattatatcacaaaggtttgtgaaaaaagtatcattattaaaaatttcttcaacaaaaaaactgtaaaaatttctttaggaagagctaaagaatttttacagttaaaatttttattctgtaataattttatgaatgagtgttggtgctgttgcttggtcagcgattttgatgttttcgtagatttttgcttttacattttctacgtcttcttggtcggcaaaaatcgttacgagtgaatcgccttctttgacttgatcgcctacttttttgcgtagcattaaacctactgctaggttgatttcgtcttcttttgttgcacgaccggcgcctagaatcattgctgcgattccaatttcatcagcaacgatttggcttacgaaaccggatgttttagcgggtacttcgatttggtattttgcttgtgggagtttttctgggtggtcaacaatacttgcatcgccgccttgattagaaaggaaggttttgaatttctctagtgctgctccgttttcgattacttcgattagtttggcgcgagcttcatctaaggtttcagcttgtttagcaagtacgaccatttgacttccgagtacgagaactaattcagttaagtcttctggaccttgaccttttaatgtatcaatagcttcttttacttctaaagcgtttccgattgcttcaccaagtggttgagacatatcagaaataactgccattgtatttctaccaacgttattaccgatgcgaaccattgcatgtgctaggttttctgcatcttcgtcggttttcataaacgcaccagcaccggtttttacatcaagtacgattgcatctgcgccggctgcgatttttttactcataatggagcttgcaatgagtggaatagagttcacggttcctgttacatcacgaagcgcgtacatttttttatcagctggagtaaggttacctgattgaccaataacagctactttgtcgcgatttactaagttaatgaaatcttttttatctagttcaatatggaaaccttcgatggattctaatttatcaatagtgcctccagtgtgacctaggccgcgtccagacattttggcaactggaacacctactgctgctacaagtggagcaaggacaagtgttgttgtatcaccaacgccaccagtactatgtttgtcgactttgatgccctcgattgcagatagatcaatcgtgtcgccagatcctaccattgccattgttaaatctgcgcgttcttgatcgttcatatcttggaaaaagattgccatggctagagcacttgcttgataatctggaatttccccatttgtatagccatcaatgaaaaactgaatttcttctgttgataaagctttgccgtccctcttcttggaaataatatccaccattctcatttctcttcaccctttctttttgtccactttagcattttatgtacctttattgagaacggttacactttttaagtaaaccgttttactaaacaagaacatgtgcttaacatgctcactatatcgtactcgctcacttcttgtcaatactttttgtactactgcgttcgattagagaaatatcaagtaagcggttctctaatttctcggttggattttggagattttttagtaaaagttctgcggcaatttcgccaataccatagactggttggcgaatggttgtaagtggcggggtcatgtattcggaaagttctatatcatcaaatccgataacgcttagttctttagggatgtgaatattgttttctaatgccgcgcggtaagtccccattgccattagatcattggtagcaaaaatggcgctaatattttcttgcagtaatttttgcgaggcgatatagccaccgtgcatcgtttggtccccgctcacaatccagccatcttctacagtaagttgataatctttcatacaagccaaataaccttcatagcgttcatgtacgttataaaaagatgtatcagaaatgatgattccgatattcgtatgacccagttcaattaaatgttcggttgccatatagccgcctttgaaatcatcaattgcgatattaccttcttgtctaggattgcgctgacggtcgagtaaaatatacggcgaccgcttctcttccatgcgtttaataacaccagagagcagaatattagggctggcgataattaagccatcgacagcccggtgtaataattcttctacgtataaatcttctcgttctttatcattagaagagttacagagcataatcatataaccttctttatttaagtaatcttctgcccctttgaccatttgggaaaaaaatggatcggttacttccgggacaatcattccaattgtgttcgtatgactaacaatcatgttttttgcgaaaaagtttggtttgtaagacatctcttttgctgttttcaggactttttcacgggttaaatcgctaaatcgttcccctttaccattcaaaatttgagaaatcgtcgtaattgaaacgcctgtcttttctgctatttcgcggatagttgcagccatttaaactcccccagtcagattatctattctccttattttgccacatttaagaataataataaaggggtttcatccaaaattagtaattatctggtttagctggtttttcgccggaaacaattgcgacacctgcacttgcgccgatacgagttgcacctgcttcaatcattttttctacgtcttcttttgtacgaactccgccagatgcttttacgccgatgtttggtcctacagttttacgcattaaagcaatatcttcggcagttgcgccacctgtggagaatccagtggatgttttaacgaagtctgttcctgcttttacagcgatttcacatgcgcgaactttttcttcgtctgttaataggcaagtttcaataattacttttactaatgctttccctttggcagcatcaactacagcacgaatatcacgttctactaattcatcgtctttgtcttttaatgcgccgatattaataaccatatccacttctttagcgccgttttcgatggcatttttcacttcaaaagcttttacttctggtgtatttgctccaagtgggaaaccgataactgtacatacaacggattctgctcctgaaagctgttcagcggataatttcacccaagttggattcacgcatacggaagcaaaaccatattctcttgcttcttttgttaatgttaaaatttgttctttcgttgtgtctggttttaaagcagtgtggtcgatcattttggcaattgtcattataaaaactcctttaaaattggatttgactttatcatatcgcactaaagaacatttgtaaactaattgctgaaattttgttcaagtagttgttttgctgtatattggtcggtaataaaatggttggcataaccgccacggagcgcgccatgaattgcttttattttccgttctccgcctgcgacaagaatagctgtttctttttgttttaaatcttgtaagtcaatgccgatagtccgttcattcattttttcgtcagcaatttcgccgttgatagtgaaaaatcgagaacaaatatcgccaacagctttttcttttaagcggattttctcttcgtctgaaaagtatcctaatcggaaaagtagtgcctcttcgcgtactgtccctactgtgaaaatggcgatattagcttttttgccgagttcgatgatattttttatatgacggtcagcttccaccatttgtttcgcaagtggattatctaggacgacggggagcgggagcgatactggtgctgtatcataggctgcaccgaaaagagcaagcgtttcggccgcataggtattgacatctgaatgactcacgccgccttttagctggacgactttgatttcagctttctgtggtgaaagtttttgggcaatcttatacatggttgttccccagctcacaccaagaatatcgtcatcatggataatttcttctaaatattctgctgcactttggctaatttgtttagagatttcactatagtcattggtttgactgaaagcaacggtgacatttttaagttggtatttttcctttaatgcgtttgctagttcggtaaggttagaaaatggatcttgtacttcgattttgacatatccttttagtttcgcgttttggagtaacctggaaacagttggtctagaaacacctagacgtgtggcaatttcttgttgaccgagatcggattgataataaagtctcgcaacctcaatactcagctgttctttttgtttatccatttcatccctccatctttttctttttagtataacgtatgaaggaggatagttcgagagggaagataaaaaaaaagacagccgcggctgtctttttttcttaaaagtcttcttctatttcttcaagcggcgcggcatattcataaattcctagtcggccagtttcggcgacttgattcgctagttcttttaaaggtagcatttcccggcttaggaatgcttctaataaaagaggtatattcacacctgcaactagttccacttcattaaagttttcaagtaatcgaacgaggacattaaacggggttccgccttttaaatcagttagaaataaaagcccttctgatacatcaagtttagctacctcattaactattttcatctgcaaattttccgcagattcatttacttcaaaaggaacaaaacttgtattttcttgtttaccgcaaatcatctcagcagattgaatgagttcttttgcggcgtttccatgggtacaaacaaaaattgctttcattttctaaaccgcctttttaatagtctaactgacgataatatcttctgatttccattgggtggcagttaattttttccacatgtacatcgatccggttattaaccgcgtggataataaatggcgataaagcccctctgaatttagcggaaatgcctggcatatcgtaatcttttgcatcaataactgtataattagcgcaaatttgtggaataaaatcaaccactcgctcacttaaagaacgctggctatcttccgtcacataaatagtaactggtgtatcgcgttccacaatttcaaacatcccgtggaaaaactcatgcgattcaatcgatttcgttttaatccagtgttgttcttcccagtagcacattgcgtaagaataggttgcgccccactggttccccgcgccaacaaaataatgaatgtcatcttggtggtgtttaagagcaaattcttgtccaaatttatcagcagctttttctacttcgacaatccctttagcaaaatgttgatccatttcttgataaaacgcatcgtaatcatcaaattcacctgctaagtacataaaacgatctgctaccatgaagaatttcaattgctcgtttaacggatatgaaattaggtggtccactaaagtagctagttctgcttctgctttatcaataaatccaaaaacagttgcgccaatttcattacattttttcactgcatcaactacttcttgcgtgcttcctgttactgacgaaatgacaacaagcgtatctttcgtgacgcgtttattgccagttgttaaaaatacagcagcattctcataaaacgtttctaatgctgttttttctttcatatgcacaacagcttgcattgcagatgcgtaggttcccccaatgccaagccagcaaatattgctaaatcctcggttatgaatttggtcaactacttcattaatttgcgggcgtaattttaacgccccttccatattttctcttactttttgttcatcaaattttagcactgctcattcctactttctttgattaaattttagatttagttatttggtcaaattccgggaaagctgatacttctaaattaatgcctttttccttagaaattttaaaagataataagtgaactgggattgtcataaatagcggtgttagcagttcagctgtatttaagccgagtaataaatcatccgtactttcaccaccagtgttcgcatagattgttcggattttctcaacatgtccttttaaaaattgtttaagtttgtccgcacgattttctaacaaaccatgtggctcaatgaaaatgatatagtcacggtcggataatccaatgtaagggccatgcatgtattcctctaattcttttccaaaagaggtaattcggatggtttccgttacttttgtttctccctcacgcgccacgccataagtagcaccatatccaatgaaaaagattcgttccgcttccattaattcattaaaatgggcttcaatccatttttctgattgtgcgatagcttttggtaaatgagcggtgattttttgtaattccgctatttccgattgataggttgtttctgtaatttttgtttgcaataaggccatttcgagtgcgattaaatttagcattaagatcgtggcgctgtatccaagggtgacataaggcatctcttctatgcccattccaaggtcaatcgtatgcgttcctgcttttgcaattgggcttgttaaatcactcgttaatgtgaaaacattgccaccctgacgctcgatttcttctacaagatggatggtagaataactatgtccaccttgtgatatggcgatatataatgtgtttttgtttaaatgaagcatgtagttagctgctgtagatggttcttctacataaaccggtatagctagtttcgccgacatatataactgtgccgcaaatgctgcattagaacttgagcctgttgcaaaaattacgatagcttcatagtccgcatgcttcatttgaatgatgttttgtaaaagttccttccgattttggataatattttcataaacatcttgttctgaccggatatagtaatccatatttttcattttttcacctacttattttaataaacctgtaaatgctcctaaaataccaataccagcaattaaaagcagaatccaatgcgcttttagaccttttttatctaaccaaaagataaagaaagtgaagccgagtgcgagtatgcctggaacaataccatcaaaaacgctttggattgtaacagcctcgtcgccagaaccgaatttcattggcatattgattgttaccatcgtggcgaccatagcccccactacaccaagacctataatagaagcgccgtatgacagtttatccatcaaaccagtcttttgaattttttcaataaaattagctccaatgttataaccgatgaataatccataataacgtgtcagaatagctggaatattgaaaataagaaggaacaaaatcggtcctaatatattaccttgaagcgcaagtgaggtcccaatacctgttgcaattacgcgtaaagtgccccaaaagaatgaatcaccaattccgcttaacggtcccattaaagctacttttatattattgatagaatccgtgtcaaaatcattatctttcgctgattgttcttccatcgcaatcgaaatcccgagtggaaaagtggaaagccaaggtgttacattataaaattctaaatgtctctgataagaagaaattcgtttgtctttatcatttttaaaaattttatttaaagctggtaacatggaaaagccgtaacctaagttagattgtcgttcatagttccatgaccattccatcgtgaacgaacgccagaaaactttcattaagtctttttttgttaatacatcagaattcttcatcttcatagttaatacctccatcattcgcaagtgctggctctgtattattgttcgttggtccattgtcattttttagagttgcataacctgttaaaattagtgctaaacaagctccgaaaatcgctactccagttacaggtactttcaagtaaacagctaaagcaaagccaaatacgaaaaatactgcattcttcttgttgaccattaattttagtagcaaagcaaaaccgtatgctggtagtaaacctgttgcgatacctaggccggctataacaaaagctggaatggcatcaagtacgttttgaatcactggacttccaactaaataggacgttgcaacaatgataccgattggtaagttaattgataaaaacccacctagtaattgcattcggctaatccctcttgaatttccctcgagtgcgtatttatctgctttatgaacaaagtatggtagtacgaaaataaagcatagattttttacgacaagtactaaagaggcgattggaataccaagtgctaatgctacggctgtactttcaccagttgcaattgcaaaggcagttcctaaaatacttcctgaaataatttctggtggaatggatgcaccgatagaaaacgatcctacaaaagctaattccaaagttgcccccataataattcccatttgtacatcgcccatgatgaggccggcgagcgtacaagtcacaagtggtcttgatagcatcgatgaaccaaataaatattctccatttgcaagcattgctgcaagtgcaagcaaaatcgctgttccaaactgttccataatttatcccttctttcgtcttttatgcttcaaaggttacttttttctcatttggcacttgttgcataaatacatcaattttttctttttgaagctctgttagtttttctacttcttcaggggttaaattgactgctttcgaatagttagatgtcccttctcgttgtttagttccgccgagatttagcatcgggatttttccgtttgtaccgcggattagtttgtaagcgtcttcaacagattccacgacaataagtaaattatacttatcagtcactcctgaattaattgagtcaatactttcagcgatacttttcattactagttttgcggcctcaggtttagctaaacggattgccgacttgcgaaaatcgtccgctgctaccccatcatttgccactaaaattgtatttacatctaaagcattgaaccaagataccgcaacttgcccatgtagtaaacgatggtctactcttagaaattgaatcattttttcttcctccttattgttagttaaaatcaactacatatttggttgactcagcatcttcataatgatattggatggcaattggcatgtcattttccgcataaaaaacgctgcttaatttaaaaacaggatcattttcatttaaatgcatatttttgatttgctcattcccagctaaaataagttgaagttcctgctcaagctcaaataatttatatttacctgaattaacaagctctataatattaataatttgaaaatccttcgcttgtaaatcagggtataaacccagtggtaaaattaagcgatctagtgtggcaccgtgctcgcttttttgcacaaacttaatggagtaaactaactcattttctttcattccgaatatttctgcgtaaaatttcccagctttacgaatgtaaaagtctttaatgtctttctttaaattttcattggtatcatttttcataacacctgtcatttctaaaatattttgcgcggttaatttcggttgcacgtaaagtcctactccatttttacgcacgacgagaccttcctccactaataaatctaccgcgcgacggattgtggttcggctactggaataaatttcttgcagcgcagtttcgtttggcataagcattcccgttttatattcatcacgattaatactatcttttattttcgaagcaattacttcaaataatggttttttagctgccatgttcactcgtcctccaagtaatcaaatatatttttcgcattaattttgtatttgatttgattaccgattagatattgtttgctgtactcaaacggttcatcattttggtcaaatgctttactcacaacttcaaaaagcggggtgtttagggggaccttcaaagcttctgccagtttttcgttcgcggatacaaaacgtaattcttcgcggccataagtaggtttgataccaaatttttcttctaaaacattgtagagcgaggaattatttaaatcaattttctcaattccagaaaatctagcgctgtctacaaatgaaatctcataagaaaacggcttttctgcaacgattcttcgccgaactagtttaaatacaggcttatcttcatcaagtgtcaaaaagcgatttactttatctaccccttcaactatttcttgggataatacctcgactctttgctcgccagggagttgactactcatggaattcattttcaaaatgttgattgtttgcttttggttaatttcgatgcctttacggtttcttttttggattactgcttctttttcgagcgtatcgagtgatcttctaagtgtggttcggctgacacctagttcattctcaagggctcgttctgatgggaagcttgtttctcctactgctactttttcttgaataagctgtcttaattgttcttcactttgcacagctggcgataagtccttatactccatgtctccacctcttattttaaaatcgtctataacatttaagtttataaaagatacagctttaactatttttaataccactttattgtaaacggttgcaaattatttgtcaatagccttttccataaaaaaaagcacgagttagttttttctaactcatgctccatatttttatttacttgtagggagggcgccaacgactggatgcgggatatatagttcttctaaataattaacttccgcttccgttaatttaatatctagcgctccaattgcgctttccaaatgactttctttttgagcaccgataattggtgaagtgatttcatctttatttaacaaccacgctaaagcaattttatctcgtgatacttcatgttctagagcaagttcagctacgcgttcaataattcctttatccgaattcatcatgccgtcgtatttagatttttgaattgggtctgtttctgaacgattagttgtttctgcaaaatcacgcgttaaccgacctgatgctagtgggctgtaaggtgtaatcgcgattttctcatcccggcaaaacggaatcatttctcgttcttcttctcggtaaatcatgttgtaatggttctgcatggaaacgaattttgtccacccatttctttctgcgacgcgttgtgctttttggaactgccaagcgtacatcgcacttgcaccgatatagcgtgctttacccgacttaacgacatcatgtaaagcttccattgtttcctcgattggggtattttcatcaaagcggtgaatgatatataaatcaacataatctgtttctaagcgttttaaactatggtcaatttcacttaaaatcgtttttctagataaaccgccactattcggacgatcagggcgcatcgtttggtgtatttttgtggctaagacaatatcatctcggttagcataatctttgagtgctcggccaacaattttttcactttcgccgtaagaataaatatttgcagtatcaaagaagttaatgccaagatcaagcgctttttttataattggacgactattcgcttcatccaaaacccatttgtggatccatttatctttgtcgccaaagcccattgttcctaaacaaattttcgaaacatccatcccagtattgccaaatttcacatattccattgaaaaccctcctagttaatttctagtactattacagcatataccttgaagctcactccaagtcaacctttaactaaaaaaatctcccggaaagtccgagagattttttgctttttaataaaattggtctggtagtaatgtttcaccaagtttgatgttgtcgcggtaatcaattggaatatctacaacgactgggccttctgtttcaagcgcttcttttaatacgtcactaagttctgatggtttagttacacgaagtccttttgcaccgaagctttcggcgaatttaacaatatcgacgtcgccaaaacgaacagctgcttctttgccgtatttcattttttgttggaaagcgaccatgtcatagcttccgtcattccacacaagatgcactaatggagcacgcaagcggacagctgtttctaattccatcgctgaaaataggaagccaccatcgcctgaaatagatacgactttttcgcctggatgcacaagtgtagctgcaatcccccaaggaagagcgacaccaagcgtttgcataccattactaaataataaacggcgtggttcataagaacggaagtgacgcgccatccaaatgtagtgcgagccaacatcgactgtcacagttacattatcatcaatcgccgaacgaagcgtttgaatgacagataacggatgcacccgatttgtttcatcactttctggtggtacatctctttcttctaattgcgcatgaagttcttttaaagtttcaagttctttatcagctaattccaaaccactaaatttcgcattaacacgatctaatgtaagagcaatgtttccgactaattcggtcactggttggtaataatggtcaatatcagcacggatgtcatctaaatgtacaatcgttctatcgcctgatgcattccaagctttcggatcgtattcaattggatcataacctaccgtaataactaaatcggctttatttagcaaaatatcacctggttgattgcggaagagaccgacacgtccaaagaagttatcttctaaatcacgtgaaattactcctgccgcttggaaagtttctactactgggatacttgttttttgcagtaaacgacgaatggcgcctgttacttctgggcttgaggcacgcattcctaataacaatactggtaatttcgcttttttcaaacgagcaactaatttagcgacttgttctttggaagctggtccattttctggtttagcaagtggacgaattgcttttacaggtacatttggttcgttcacaatatcttgtggtaaacttacgaaagccgcgccttggttcggttctgctgctgaacgaaatgcgttagtgattgcttccggaatactttcagcgtgaactacttcttcgctatattttgtaatcggacggaaaagtgcagcgttatccatcgattggtgggttctttttagacgatcttgtctagttacgttccccgcaatcgcgactacagggtccccttctgctgttgcggttacaagtcctgttgcaaggttcgaagctccaggtccactagttacaagcacaacaccaggtttaccagttaaacgaccgatagctgcagccataaaagcagcattttgctcatgacgactaacgattaattctggcccgcgctcttccattacatcgaaaactttatcaattttcgcacccggaataccgaaaacatgcgttactccttgatttattaaactatcaacaactaagtctgcccctgatttaccttttgtttggtctttttcatgcttttccatctttatcatccttttgttatataaattatttatatttcagtagtacagattataataaaatctcattcactagactcattatactactcaaaagaatttttgcaaggttactgactcaaaaactgttatataattacataaaaactgttatacaaaaaaagaaagaacttagtcaaactaagttctttccgtttcttattcttgtgtggcgcggtattcgtcgtattgtttttgcatttctttcattacttttttcatacctgcatcatttaatttagctttgaatttctcggtgtattctactggatcgactgttccggttagaagcgctggagcaaattcattacaaacatttgtaattgaagcgatttctgttcttacttttgatgagtcaaaatagaaacctaagcccggtgatgctactgattttttattaaatgttttaaattgatcccatttatcggctggttcatcttcatataatttaaggataaagtgatttcctagtgcataagttggcatgctataacgttccacacgtgctggtaaatcttgaattttgccatcatctaactctttataatgggtgccttcaattcctttatcaaccaaattgcgtaaatattcatctgtgtttagtaaatcaaggaatttcactgcttcttcaggatgttgacttgtcacggatacagcttgaattgcgcctgtgactgagttatttttaatgattggtgtttcggcaattggttgtgtgactactttatatttaccgcctgtatttttatcccaaatgttttctgcgtatggttggtatttctcaatacgcacaaaccagttttctttatcgtaagaccatggatcagttgaagtggcaatatctttagtaacataacctttttggtagaagctatgaagcgattttaaggtttctaatgtatctggttgttcatagaagttaacgattttaccagtatcttcgtattgattcacggcaaaaggaagcggcacagcattatcgattaaataatcatatgaaaatgctggtttaaaatctttgttcccgccaattggtgtgatgctaggttcgttttctttaatggtttttagcattggttctaaatcgctgaagttttttactttcgatatgtccattttatatttatctactagatttttattgaaaacatagacttgttgttcgccgacttctttgttggaaggtacaccgtaaatattgccgtcaatcgttgctccttcccaaagaacttcatttaattcagctttcattttcttgccttctttgtctagatatttatttagtggcaagaatgcgcctttttgcgaataagaaacgaattctcctgctgctgaataggcaatatcaaagttttctccagagttaataactgtttgcatccgtttgccgtagtcgccccagtcaatttgtgtcatttctactttgacaccaattttttcttcagtatatttatttacttctttcattacttcttccgtgtctttttgtggtgtcccaatcatgtaccatttcagtgtcggaacttcatttgcatctgctttttcatcgcttccgcacgcacctaaaactagtagcaagcaaagtgatgcgatgattactccccatttctttttcattaaattccctccatctttttattcttttacgccgccaattgtgagtccactaatgaagtatttttggaaaaacggataggtaatcgcgattggtaaagttgaaataacaaccatcgccatttttgccccgtcttgaggaatggacttaaatgcgccggcagtataagcaatttctgagttttgccgcataaattctaaattgttttcaattttcataagcagagattgtaatggaactaaatttggattatcaatataaagtgatgcttggaaccagtcattccagtaaccgagcgtagagaaaagcgcgattgtcgcaagtcctggtaaggaaagtggcacaaccatttgtaaaaagatccttagttcccctgcgccctcaatccgcgccgcttcaaggattggttccggaatcgaccgtaagaaaaatgtacgcataatcataatgtaaaaagcattcattgctagtggtaaaatcattgcccaaatactatttcgtaagtgcaaaaattgtgtcataacgatataagctggcaccatcccgccactaaacagcatcgtgaagaaggcaataaatgtaaattgacggcgatacttaaattgtggtctggatattgcataagaataaagagcaatcattgcaacactacacacagtacctataactgtaactacaatcgtgatgccgtatgattgtaaaagctgacctttcatcttccataaatattcgtacgcttccatgctccactctttcggtattagttgaaagccatttgccgccagagatgtttcactcgaaaaagaaataacaataatatataaaaatggaaaaatacagatgagcgctaagaaagcgagcataacattcatcgccacattcatctttttgccaaaaccgataatatcttttgccggcttgttttttgctggtttttccatttcgcctcgcacttgttctatttcactcactgcttcaagctgttctgccaaagcgactcgcctccttttttaaaataagccatattctgggtttatttttttcacgatgtagttagtgagtaacactagaataaagccgacaatcgactgatagaaaccagctgccgcactcatactcatatcaccgagcgacgttaagccccggtatacatatgtatcaataacatccgtcaccggataaagtggccctgaatttcgcggtaattgataaaataacccgaaatccgaattaaaaatcttcccgacattcaaaatcgttaaaataaccatcagtggtgttagcgcaggaatcgttacatgtctaatttgttgccatttgccagcgccgtcaatcatcgcggcctcgtagtaagttcggtcaattccggcaattgcagcaaggtagacaatacttccataaccaagccctttccagacattcatcatgattaaaataaacggccaatacttcggatcgttataccatgaaacaggatcttgcccgaatgcaagtaaaatattgttcatcagtccgctatcttcacttaaaaagctaaataagaaataactcacaacaacccatgataagaaatgcgggaaaagcattcctgtttgataaatttttgctcctcgtttatttagtaagctgttaaagacaatcgcaagtgccacgccaagaaacagcccaacgataataaatactaaattataaaggacggtgtttcgggtaataataaaagcgtcgtttgtttggaataggaatttaaaattttcaagccccacccagtcgctgttcataatactggataaaaatcctttcccatcaatcttgtaatctttgaacgcaataactgtaccaaacattggtaagtatgagaaaaccagaaaccatagaaggcccggaagtaccattaatagccaaatccgattagctcgaatttgtgataaaacttttttcaatccatccacccctcttttttgtaagtgctttcaacatctttagtttatcgtttttaagggtgttaaaatagttgcggatgtttagatttatagacaaatattagaaataattttattgatggattttccggtaacgatttggtgtttcgccagtatgttttttaaactgtctatagaaataggccatatctgtatagccggatttcccagcaataatcgttaaattatcttttgtttgcagcaactcttccttcgcatagtttactcggtagcgatttaaataatccgtaaaatgctcacccatttctttttggaaaagttgcccaagatagactgcattaatgtgaaaatcgttgccaagcgtttttaaggacatgccttctgaaaaatgttcggtaatatacgacaatacattttggataataggacttttcgattcatcggtttgttttttacgattgtaataacgaatcgcataggtgagtgttgcttcttctagcccctcaatacttgtttcttctgcgattcgtcccattgactcacttaattctttagggtctgattctgccatcatcacaagtagttcatttaaaatatggagcatttgatgcggatcgctttctaatttgtgatcgttccattctttaaaaaagttgttaatccatgctttgatttctttttcattattcattacgagtagttttgcaagttgatgttgttttctttttggtcgccaagtgtgtttcgttcgtttttggtaggcaatcaagctgccggactcttttacaagccgttctggaagtaatcttgtcagttgtcggaatgcttgcggatacatcatttccccttgtactttttcgctaacaaaaatataaaaagcttcgtttgaaatgcgttgcttcatatcttgatgaaccgctaaaatttgttcggatatagaggtttgttcggttactcctaagatgatttcattttctggcgtaagtagcataaatggataggtgcgccggtagtgttcagaaagctttttccattcagccatgtcggtttctttagttggttgaatctggatgaggacggcactctcgttttgatttaaagtcatatcgtataacgcaagtcgctcttcccattcttctttattaattcgtaaatttagccagcgccaaatcgtattgtcccgtaaaatgtagtacgcttcttcccttggtacgacattatctgtcacttgttttttctctatttgtacgaatgtttcttttaattcttgttcgtttaaaggttttaataaataattttcgattcccgctgaaagtccacgttttacataatgaaaatcttcaaatccggaaagaacgacggttttggtagtcggttggcgttttttccatgcatcgattaattctaaaccattcatcacaggcatttctatatctgttaaaaggacatccacttcttgatccgcaaataactctaaggctagtgcgccatttttggctgtcccgacaatttcaatgttttgctcaaactctggaataatgctttctaaacctttaagaataaggggttcgtcgtctactagtactatttttagcatcacttttctcctcccgtattttgaggtacttgaaatagaatgatcgtaccttcatttggcttacttgtaatcgttaatgagtaagcttcaccatataaaagttgcagtcgtttgtttaaattagctaggccgatgtggcttgtttcagctttactttcaatcgtcgcttggacttcttttagcttttccgcgtccattcctttgccattatcttttatttgaaattgtaaattgttattttccgccgtgaccgtaattgtaactactggatgttggttttctttataggcatatttgaaaaaattctcaatgagcggctgcaaggcaaatcgtggaatatgggtatgattaaaacgtttttcaatatggatttctaacttaatcggctgttcatggcgcatttccataaaccgaacatattgttttacataattgatttcttcgcctaaagtcgtgatttcgcggtggttagcagtatagcgtagcagcgtcgcaagttggtaaatcatatcacttgtttctttcgctccttctacgcgggcattcattctaattgcttctaaagaattataaagaaaatgaggttgcatttgcccttgaagtgctttgagtcgcgctttttgttcttccatttcaaggctatagaccttcttcacatacgcgtcgagattttcagtcatatggttaaatcgctcactaatcatcgtcagttcatccccgttattatcgacaggtagttttgcatcaagcgttccattttccactcggttcatcccaccaataattgtcaaaatccgcttggagtagcgcctgcttattacaaaattaacgctaatagaaaaaataacgagtaacaaaccaatcccaaataaagtcaactcgattaatggcgcgctatcatccgtgacacgatataaaaatgtattattttttaagccagtagtttcatcctctgttttttgaaagtatattttcttattatctacattcatccagccttgtttttcgggtggggttatttgttttgcaggatgattggaatataactcagccccttttgtattatttatttggaaaatcgagtttttataatctttcgtaatccatttgtttaaaaaggttggatcaatataaagtaatagatagcccatttgttttaatgtactcggatcgttaatcggctgtttcacgacaattttattttctatcgtataaaaatttccttgtttcgatgcttgactagcaatattttcttcaccatatgtatcaacagtttctttccattcacggtaacgactcgggaatgtataggagtagcttccgtcatctgaaataagctgcaaagcaataatatcttcatcatacgaaaaataagactgtaaataggtttgcatatctacagaataaaaatttttacttttaaaatagttgtcgatattttgctcagtgtagctaccgtagtcgttcgtcatcgcgatttgaacatcttgcatcaaatcactatttcggtaaatatcttgggttaaactaattaatgccttttgcttttcagttaaagcttccaactgcttgctagcgatagtttctgcgcgctgaagatttgtatcgagctgaatgttggtatagtacttataaatgaaaaaaagtaacaagctcacggtaaaaagactggttaaagaaaaaattaataacatccttttaaaaacgcgcttacgtggtaattcttgtgtcattctaattcattgcccccttttcctttctgattattgcatactatcaaaaataatgtaaggggttactttggctccatctgtttaaaacgttgcaagttgattttcattatccaataacttggtaaaacgcccgaaataaacaaaataaaagctggcattttagaaattaaccaagcacaaaaaacaaggccaatcacaatcataaaggtatttttaaaactagtaatagctagtaagaatgcttgcccaacataagcgcgaacatttttcatttggaagtgaacaaatacggtaaaatactgcaaaaaggcaataccaacgagaaaaagtaagaacatcaagaaaaagtataaaatggtcgaccaaaatccttgcatcagttcaaaaacaatccgtaaatcagcataaagaaatatcccaatggctacaaaaatcccacctgctaaattagcagaaacaaatacttgcttataagtttgccaagctgatttccaaacaggcgtgtctaaatcacctctcgcccattttctcgtaatcgtaaaaagagcaactgtcgctggcataaatccaagcacaatcccgcctattaatacaaggaaaagccatactaaattcgtccaaacaagccgtattatccaatcactaataactgagaatttatcaataagtttcattcttttttctcctttgatagtaagagaaagcctgagtttttcgcccagacttttcttttttatttacttaatggacttccctttacgtatacaccacataaacttaggacaaattcactaaacatcgcattcgaccaagcaaaccagtcgcgagtgaattcagctgggtttgaagcattaactccttcatgcatgtaatccgtgccaccatcaccagctattaacatctctaaaatagcttgtttctcgctttctgtttctgcggttaaaccttcaatgctgagcgcaatcggccatacataatgatccggcgtatgagggctaccgattccagtaagtacgctaccttctacaaaataaggattttctcgacttaaaatgagttttctagttgcttgatatgctggatcatttttctcacaaaaacctagatacggcgcagcgagtaagctcggtacattggcatcatccataaataacttgcgcccagttccgtcaacttcataagcataaacatcgccgtaatacgggtgcgcttgtttagcatatgtttcaataccagttgcgacttcttctcttaactccgaactagcttggattaattccttatcgtccgggtaaaactgtgccgctatttcttgagcgtaatccatcactacgaccaaaaacatattacttggcacaagataaccgtacatacacgcatcatcactcggtctaaatccactccaagacatccccgtataacttacatctgttcctttgccattattatttaaagtatctgattgacgcacattttctcgttcaaaacgatatggactttgctccgtatgcttttgttccgttttaaatacgtcgataatctggtgcaaagcctgtctgaattcctcggtaaaatgacccgtgtgattagtacttttccataatagataagctaactggactgggtagcaaagtgaatcaatttcgtatttacgctcccaaacaaggtctgacatctctgttttatcttgttgaaaaccggcaccattcgcagttttattaaaagcattcgcataaggatcatgaagaatatactttgtttgcagttttacgagattctcaattaacgtcgccatctcttcatcttcttctgcaacaattaaataagggcggatttggctcgttgaatcgcgtaaccacatggctggaatatcgcctgtaataacaaacggaagcccttcttctgtttcctgcaaagtagttgtataggtgttagtaaaacatttttcaaacatgcgatgtaatttttcattttctggaaaagtcgtttttactatatcaatccatttgttaaaacttgttggtactttctttgtcatgaattacactccttttaatgtgataatttcgtttggtttaacggtaaattgattttttgcatctcctgccgtttcttctaaaatggtcgattttctccacagattaaccgtgtttaatagttttggctcggatgcggtttgatagaaacgaataattggttgattgtctttcgctagtttaaatgcggaaaaaacaagtccgtctgctactttccatttcgcaaaatcttttgtatctgcaagaattttttcttttgatgatgacgggtgttgaatggcaaaagtaggtgttaagagtgcggtaacttgtgcagggacgttgacgcttgattcgtctgttaagaatacatggaactcggctgtgatttcgcggtggcattctgcttcatatgctgggaaatcaccccaatcgccaatttctgatactgcgcgtaacagtgttagttccaatctgtccccttgctcgcttacttcatattccggtaagtcgaggcttgcaacaacgatatttccactagtaacaaaaccttgtttccggttatcattagcaggatttgtccattcttccacttgtttattcgcgcgcgttactacttcaaaaacactgcccgcttgatgtgtttctgtttgtttcccagttggtaaaagtacgcgaaggcgatggtcatccacctggttatctagtttaacgcgaacagttagttgcttatcatgtttatttagcgtcaattctgtagtgattttaaaagtagtacggttctctgaacgatgtgacgtccggtctggatgccatactagtcggcgtttttcttcagcaaaagtcgcacttgcgcttactggaatttctatttcatgtttaatttcgattgtctttccaagcttatcttcacgcaacacgcgaatctcaggttttgaattataggtatttatgcgtaaattatcgcctgtttctttaaacatatactcattaccaatatcgccaacatcctcatatgccccaagtcccgcgacttctacagccttttctttatccaaaatggagtaagttccgttcggcgcgatttccacttttaaatattgattttctaactgtaagtcccctgttagctctttttcgtcatccgaaactgcgaccggatgcgcatagattgtttggtacccaactgctggtaaatgttccacagtaaaggttagtttatactttcttgcaaaataagaatcgcggaattttcgttctggtaaatcatagttaaaatgaataccaagtggctcaactacaaccggaatttcctccccattacttgtttccatccgaaaactttgttcgggaagttttgctaattcatctggtatcaattcaaaatgcatctcagaaaaatgaatcgcgtctgtttcaagttcaagttcgacagttctagttgcttctaccccacctgcatggaaaaccgtaattggaatacccgcatcattcgttacgatttgttccgttattttacgtgcggcgttttgaataatcgccatagttgtttgttctactttttcaaaacgagcttccatttcgcggtgcacttcatccaaactacatcctgtaatgctgtcatggatttgattttccatgagtaatttccaagcaaaagccagatattcatgcggataactaacaccagcttctgttgccattaccgaaatcggttcagctaaacgctctaataaacgttcaattttagcattggcttgtttcaaataaatacgcgaggaggccgtgttagcaagcgttgaccaaccatccgattgttggcttgttaattctccgtgaactgtttgtaatttttcaggttcaagcccagccttgacagcatcttggtatttttcaaaatgactatgaataaaatcaatctctggatatagttcccgcgctacttcaagagcttccgctaaatctgtttggacaggctggtggtcacaaccgttcataaataaccattcatctgttgacgcaaatcgttccacgtctgccaattttttatcccagaaaatttttgctgcttctttatcagttggaatttcattaccattggaataccaattagcgagtaaaattcctaaaactttcgaaccgtccgggctttcccagaacatctctgaatatttcgaggcaaaagcactatcaaatacttggttattaaagccagttgggttaacacctcgtccaaaaacaaccgtgtcaaaaccagcttgacgcattaattgcggcacttgaccatataaaccaaacgtatccggaaaataaccaattttttccgcttgaccgaattcttctgccatttctaaaccatattgcaaattacgaatattcgcttctccactcgtcaaaaaagcatcttgtaacatataccaagggccgattcgtaattttccatcagcaaccagttgtttcattttttctcttttaccaggttttacagctaaataatcttctaacataatcatttgtccatccatatgaaaatgattaaaaccagcttctttatcaagtaaatcttctacttcatccataagtgtaacgagcctaaatcttaagctttccagtggtaaaaaccattctctgtcccaatgagaatgcgatataatatgcgctttctttctagtcattttgcccctccaaatatcctttttgtattcgctttcaagctaagtatagtaagggctaaagcgaattgcaatgctacgccaaaaactactatgaataatccattttcccttgatttgtccatttcaaaaaagcttattccttaccgctctaaagatgagaaaaacgcccctgccaaattcccttcaaaagccaaattgacttcttttcccgctatgatatattgaaaccgttctagacaaaaaagaaaggatttgagtatatagatgtttttcacaaaagataaattacgcggtagactagatgaagtcgccctttaccgctatgagaaaacgcatccgattcagaagttccaagcagctgaggatatggacggaaacattgcagcgcgtcctcaaaatgtcatttatgataacgaattaactattggagaaaactgggccggccgcgatcgctacgtctggttaaaaacaacgattaccttccccagtgccaaagaaggtactcgcttgatcggttactttgattttggtaatactggcgacggtcataattctggctttgaatccttattattcgtaaacggcgaaccattccaaggcgtcgatcaaaatcaccaagaagttctttttccagataattttgccggaaaaacgaccgaacttgtctttcgtttatggtctggtcttgaaggtggcggcgttccttccatccaaacacatcagttaaaagaagcatttattggttatttaaacctcgtgattgacgatttatattttacaagtaaagctaccttaaaaacactcgatcaactggaagaaaataatccgacgcatgctcccctgcttcaagctattaaccgcgcttacctagcgattgattggggaacaccaggctctaaccaaaatctttcctccatggaaaacgccaaccaaatcttgcaagcagcaataaaagaaatgccgaaaaactttcctatcaaagtggcagcagttggtcatacccatatcgatgtagcatggctatggcgtttaaaacatacccgcgaaaaagcagcgcgctcattctcaaccgttctccatttaatggaagattatcctgaatacttatttttgcagtcacagccccaactgtacgcctacatcaaagaagattatccagaaatttatgccaaaataaaagctaaaatcgaggaaggcaactgggaagctgatggcggaatgtggcttgaagccgattgtaatatccctagcggagaatcactcgtcagacaaatgctctacggtcagaaatttttacgcgaagagtttggcaaaccttctagttttctatggttacctgatgtatttggttatagctgggccttgccgcaaattctctgtaaatcaggcatcaaaacttttatgacgactaaaattagttggaatcaatataaccgaatgccgcatgatacgttccagtggcgcggtattgacggaacggaaatcctaactcacttcatcactgcaccagaaaaaaacagccgaatttctacttataacggtaaaatgaccgcgcgtgaactggtgggactttgggataaatatcaagataaagaaataaaccaagaattattacttgcttatggttacggcgatggaggcggcggggtaaatcgcgaaatgctcgagatgcgtcgccgctatgataaaatgccaggaatccctgaagtaaaaccaaaaagcgctaccgattattttaataatttacatgaaacgattcagagcactgatcaatatgtccacacttggaacggcgaactttactttgaataccaccgcggaacttacaccagccaagccttcacgaaaaaaatgaaccgtaaaatcgagcttggtttaagaaatagcgaatggctttctgttttagcgaacttaaaagaaggaactacttatccgaccgaaaaattagcgaacatttggcaaatattacttcgaaatcagtttcacgatattatccctggctcttccatcaaagaagtatatgatgatgcgctaattgagtacactgaagcactcaccgaaaacaatacgattatttctaaacaactagaaaaactaacccagcaagcttctgaaaaaataacgctatggaatagttccacttggaatcgtccgcgctatatcgaaatcaaagccgataatcctgctagcaacttagtcttttatgatcaaaaaaataagcgactccctgcacaaaaattagctaatggcgcgtggctcatccagcaccataacttgccagcgctcggtgccacaagtatttccgttaaagaaacaacaagtgagctaacaaaatcgcctttcacttacaaagacaagcaattagaaacaccctattatcaaataacttggaatgaaaacggtcaattcacttccatttttgacaaaaaaaataaccgccaagtattagcagaaaacgcgagggggaatgtatttcaattatttgaagataagcctatgtggcatgatgcttgggatattgatttattttatcaagaaaaacagaaggaaataaccacattagactcttttgaagtaatcaataatggaccacttgaactcactatcaaacaggtgcttcactcagagaaatcacaaattacgcagtggattcatttttaccatgagagccctgaaatcagatttgaaacagaagtggattggcgtgaccgtaaccagttgctgaaagtcgctttccctgtttccgttcatgccagtgaagctagttatgatattcaatttggtaatgtaaaacgaccgacacactggaacacaagctgggattatgctcgttttgaaacagttgggcatcagtggaccgatctttccgagaaaaattacggggttagtttgctaaatgattccaaatatggctatgatattaaagactcgacgattcgactaaccttactcaaagcagctggataccctgacccagaagccgatttaggtcttcaccagttcacgtattcactttttccacatcaaggagatttcttagacggaaaaacagtccaaactgcttgggaattaaacaatccgattttcacatctaacggagaaatcgaaccattctcgcttttccaagttactaatccttatgtgatgattgatagcgtcaaacaagctgagaacggtaatggtcttatcatccgactgcatgaattcgcaggcacacacggcgaagtgacgctaactagcgattatgctattacttccatcacagaatgtaacttactggaggaaaacgaaacaacacttgaaacagcaacatttgccattactccgtttgaaattaaaacttaccgaatttatctaaaataaaaaaacacgcagcaaggcttctccctaagaagtccgctgcgtgttttattagtttaacgtgatcagattaaagtttagtaactttttctgcttgtgggccacgttgaccttcaacgatttcaaattcaacgctttgaccttcgtctaaagttttgaatccttcaccttcgatagcgctgaagtgtacgaatacatcatctccgccttctacttcgatgaaaccgaaacctttttcactattaaaccatttaactgtacctgtttgcatatttcacaaacctccaaaaattttcttaatatgtttcttttactaacgaaaaagatgttaacaacaagctaatcattttttcaattacaaaattcacatattagcaaagatactcatttacatcaatatccttactaatacataaatatacttcctgcaacacttatatattaacgccaacggacaaataaatcaagtgaaaaagtcgcacggttacaaaatagagtattcagtttattaactaaaaaaccctgctataagtcaattcttataacagggttttctattaatcgacaatacttttatctttaatacgccatttcacaagtaaattatgtaacggtttacgaactaagaaataaacgcctaaagaaatgagtacagaagccgtaccaagtaaaaatccgcccagtacatctgttgggaaatgcacacctaaataaacacgtgtatacattacaaacaagataaatccatagccgataattccgataacgattttttgccacatttttggcactgtgaaaattaagaacatcgctgcaagtccatagaaaaccgccgtagcagtcgcatgtccactaggaaaactaaaacctgactcatctattaaccagttaacgctatctggacgtgtacgagcaactaatgttttcaagactagattaaggacaacaccacaagcaagcatcgttcctccaaaccatagtccaacaacaaattttcgtaaaaagaataggataagaacaacaacaatagttaaaataatagttgtttctgcactacctaaattggtcactagtttaacgatagctgttttatcaggttgaatcccgccgcgaatcttttcaatccagcttagatcaaaacgtgctacccagttactttctgttgcaatagctgaggcgattgtaataaataaaatcagacaaaatccgccaataacgaataacggtgtcgctttttttcgatttgtattcatggttaactccttttcattcggttgtttttaaaaattgctttacttcttttacaagctcctgatactgcgcttgttctggtgtcgcttcatttgtaagttcagttacagtgcctctttcgtagctaactgaccccgtgctaacaaatgttgcattaccaattaattgtagcgaaatttcaccagcttcgtcttttttggcagtcacctgtactcgcccgccatcattataaacattaagtggtgtttcaaaagtatctttatctaacatttttttaattaaactacaagctgacatcgctgtcccgcatgcattcgtaaaacctacaccgcgttcaaatgtccgcacataaatcgcatcatcgcttaatcgtttcacaaaactaacattgacaccatctggaaaataaggattttcgctgtttaaataactcgctaaagtttcttgtttatccgaatctaacacagtttggtccacaaacgtaatcaagtgtggatttggaaccgacacagcagaaaaagctaattccgaatctagttcaggaacgacttgattaaataatttttccacaccgacattcattggtaaactttctgcattaaatttaactggagaaatttcaacttggtacgttggtatatcaaaaccaagtgaagttgcttttttgacatccagtatcgctttcattgtttcgacttttgcttctgttaatgcgtgcttttcaagtaaataacgagctaccgttcttaggccattcccgcacatcgacgcaattgatccatccgaattaacgacgcgcatttggccaattggtccagcttcattactttttgtgacatataaaataccatctgccccaccaagcgaatgctctctatcacaaagctttattgcaaaatcagcacgtttcgcatccgaccaatccataatttgattttcttcttcatcaactaagaaaaaatcgttttgcgaaccatgtacttttgtaaagtgaattgttgccattccttcaagcaacctcctttatttggaattacgtctataataccacatcttaaattaaaaaagcttggggaacctcctttttaaactactaggattttccccaagcgagcattaagcttcgtagtgttttacaacaatatcagcacaacggccacaaagtgttggatgttttggatttacgcctacatcttttttcactacacggcaacgttcacaagtttcgccttctgctacagtaatttgaacagctacttgattcgatttaaatgcggattctggtgcattttctaaaccttccactagttcaaaatcagaaacgatgaatagttgtgcaaaatcgccttctaatgaatcaaacaatgtttttgcttcaccgtctacatatagagttacttttgcaagcattgatttaccgataagtttttcattacgagcgaattctagcgctttttggacgttatcacggatttgcatgaatgcgtcccatttcgcagtaatttcttcactatcagctaatacttttacatctggtaaatcttgtaaatgaatactttccgcgccttcaccaatcaagctattccaaacttcttccgtcgtatgcggtaaaattggagcaagtagttttgtcaaagtaacaactgcttcataaaagaccgtttgcatagcgcgacgatcatgactatccgctgcttcaatgtaaacaacatctttggcaaagtccatataaaattggcttaattctactgtacagaaattattgatttggtggtaaatagtagagaattcaaacgcttcatagctatccttcacatttttcactaaatcgtttaatttaatcagcatgtatttatctacttcacgtaagttttcataagaaacaccgttagtagttggattaaagtcattgatatttccaagtaagaaacgcattgtgttacggattttacggtacacttcggatacttgttttaagatttcatcactaacacgaacatcagcttgataatctacagaagcaacccaaaggcgaacaatatccgcaccaagttgtttaattactttgcctggaagtaaagtatttccaagtgatttactcattttacgaccttcaccatcaagtgcaaaaccatgacttagcacattacgataaggcgcttcgccagtgatcgctacagctgttgttaaagatgagttaaaccaaccacgatattggtcagagccttccatgtacaaatcagctggacgacttaattcaggtcgagcattcagcacggcttgatgacttgaaccagaatcaaaccaaacatccataatatccgtttcttttgtaaattcgccatttgggctacctggatgtgtaaacccagctggtaataagtctttcacatcacgctcaaaccaaacgttcgaaccatgctcacggaacagttctgaaatatggttgattgtttcgtctgtgataatcgcttccccgttttccgcatagaaaataggtagtggaacgccccacgcacgttgacgagaaataacccagtcgccgcggtcgcgaaccatattgaataaacgtgtttcaccccaagcaggagtccagttaacacctttaacagcagcgagtaaatcatcacggaatgcgtcaattgaagcaaaccactgcgctgtagcacggaaaataactggttttttcgtacgccaatcatgtggataagagtgagtgatgaattccatttttagtaatgcgcccacttcttctagtttttctgtcaccattttattcgctgtatcgtaaaatacgccttcaaatcctggagcttcttctgtaaatacaccacgatcatctagtggagcaagaatttctaaatcgtattttttcccgattaaaaagtcatcttccccgtgtccaggagccgtatgaaccgcaccagtaccggcttcagcagtggcatgttcgccgttcattactaaagagtcacggtcatagaatgggtgtttagttacaacgcggtcaagttcagaaccacgaactgttttaacaactgtcgcatcttcaaagcctagtttttcacgtaagcttggtaaaagtgcttctgctacaacatatttttcacccgcggattcaattactacataatccaaatcagggttaacagtaatacccatgtttgcaggaattgtccaaggagttgttgtccagataacgatattcgtaccttcatctagtacaccttttccgtctgttactttgaaagccacgaaaatcgacgcagatgttttatcttgatattcgatttctgcttccgcaagcgcagattcactggaaggagaccaataaacaggttttttacctttgtaaatgtaaccttttttcgccatttcaccgaatactttgatttgctctgcttcgtattctggtaaaagagtgatgtaaggattttcccagtcgccgttaattccaaggcgtttgaaacctgtacgctggccgtctacttgcgtcattgcatattcggcacacagtttacggaattcagcgatcgacatttctttccgtttaacaccttttttggcgatagctgtctcgattggtagtccgtgtgtatcccaaccaggaacatacggggaactgaagccagccattgatttataacgaacgataatatctttgattgttttatttaacgcatgccccatatgaagctctccgtttgcgtagggagggccatcatgtaaaatatacgccttgcgtccagcatttttttcttgaattttctcatatagcttttcttcttcccattttgcttgccattcaggttctttgtttggcaaatttccacgcattggaaaatctgtttttggcattaataacgtatctttatattccatactctcttctcctttaaaactttatttttaaacacaaaaaaatctctcccaaaaaagggacgagattcgcggtaccacccttgttgacatgcatgttaattgcttgcccacttcattaatgccataacgccggctcgcgctaacacttactcaagcagttgctttttcgggttagaactaaagagtgatttcgattttttagaggatagctggtctcacaccttgcaccaactcgctttgtatcctatatctaaaaaatttacttgtctcttataatcgtttttaacgttcttctgattcagcagcttcgacttctttaatagacgctagttctgttgcatctacatcgtaagccatcatttgctgccagtcttcacttttaattaaatccatttgcgcttctactaacatacgaagacgctcgcggaatactttagattggcgttttaggtcttcaatttcaatcgcgattttacgagctttagaaagtgagtcgcttaaaattcggtctgcatttttttcagcttcacggataataagttttgcttctttttcagcggaagctttcacttcttcggcagctgtttgtgccacgattaatgatttgtttaatgtttcttcaatgtttgtaaaatgacctaaacgttcttcactattatttaaagtgtcctcaatacgctttttctctttgataacttgttcataatctttaatgatttgatcgaggaagtcatttacttcgtcttcgtcataacctctaaaaccacgggtaaactctttgttatgtatatccagcggcgataatggcatatctagcacctccatacgactattgtttataaatacctaacatacattctaccatagttactagctttttcctagaatttatattgaaaaatggttagattaaaaatccagctttatctagcgccttaatcgcttgctctaattgttctttcgtatctgcttcaatcgtatgtaaatgggttccgtccgttaaaccagaaagcatcgttgctcctgttgtttgcaatttccgcacaaatttttctacatcaaaacggctttttaaatgcagtgaagcagtaatttcgccgtatattggatgatccacaatcacatcaataatggaaacaccgtgatccaccaaaatatttagttcctcggcagcttgttctttcgtatgttttacagcgataacgcgtctttcacctgtataactcgtttctttagcataaatataaccttgtggagtagccataattggttcattgccagcttttaacaaagaaatatcttgaacaatcacttggcggctaacatttgttttctgtgctaattgatttccagaaattggagcctcggcttcttttagccattttaaaatcatttgcctacgcgtatcgcctaatatttttttcatcttatcacctttttcgtagtaatttatcgatttcttctttaaaaataatactatcgtttaattcattttcttttccaaaagatagccggataaaacggtttgcttcttctgttgtttttccagtagcgattaatgttctggacggggctaaatcacgtaaactacatgcgctcgtcgtcgagatttgaatatctgcttcgtttaaagcaagtaaagcttcctgaccttgcatatttggcaaagtaagtcctaaaataaacggcgatgtatttggtccaccttcgactttcacccgcgtttctaatgtgtcgcaaatcgcagcttttagtttcaaagctctaatcgcttcttgctctctattttccattatatcataggcggcagttgtaaaggcagcaatagctggaacatttaccgtccccggtctaaagccaaattcatgatgtacatctggcaaaactgcctgcaaaggagaatctggtttcataaaaagtagtcccgccccttttggcccataaattttatgcgatgaaatactaaaactagtgacatcacttaaatctaaatcaagttttccaaaagattgaacaatatcggtatgaaaaaagacacctgcttttttagcaatgtgagctagttcggcgattggttgaatggttccgatttccgaattaacatgttgaataataataagccccgtctcagtagaaatcattttttctaaagtagctggatttacttgcccaaacgaatcaactggtaatgctttcatacgacacttccccgcttgttcgagtgccattagttgctgccaaacagaagcgtgttccagcggacttacgagcacttctttcttatcagttgtatggagtagcgtttgaatcgcgatttgattactctctgttccaccactcgtaaataaaatcccgcggtttggaacttgtaataactcagcaaaactttcccgacatttttctaaaagggctgctgatttcgtcccggcatcgtgtaaactttccgaattagcgaagaattctcgcgaggcatccataaaaacttgtaaggatgtttcactcattttcgtagttgctgcatggtcaaagtaaatcatctctttatctctcccttaaaattttatacttgaatttagtttgattttgtgtgattatagatgacaagacaactgtatattcattaagaagtatacaattaatcgaacctactatgcaagaggtggaaatgatgacaaaagaacgagttattatcattgggagcggtatcgcaggttgcactgctgccctcagattaatgcaggactatgatgtgacaataatcacaaaaggtcataaagaacaaagtaactctatgcttgctcaaggtggtgtcgccgcggctatatcaaaaagcgatacaccaaaaaaacattttagcgatacctttcaagctggctgttttcataataaagttcgcgctgtaaaccaacttgtgacttgtggcccgattgtgatccaaaaattaataaatgaaggaatgacttttgacgaaaaagatggcgaactttcgcttggattagaaggtgcgcaccaactgcctcgtattttgcattcaggaggagatcaaaccggcaaattccttactacatttttgcaagaaaaattgacaaaggttaactggcaagagcaaaaaatggctatagagattattaaacatgacggtagagcaattggcgttcactgtttagataaagaaaaccagctacatacttattacggcgaacatattattttagcgagtggcggacttggacaactttttcctgtaaccactaatgctgcaactatttctggagacggcttggctcttgcttaccgagctgatgcgacactatccgacatggaatttattcagttccacccaaccttactttttctaaacgggcgttgtcatggcttaatttctgaggcagtccgcggcgaaggagctacacttattcgcgcggatgggtcggctattatggaaaccgtgcatccactggcagatcttgctccacgtgatgtcgttgcagccacactttttgaagaaattgagcgtggtaaccaagtgtttcttgatattactaaggtggctcattttgagaagcgatttcctgcaattacaaccagcttagacgaacatcaagtaccatttcgcgaaacaaaacgaattccagttcatccaggtgcacattttttaatgggtggtgttcgaacggatttgaacggcaaaacgaatatccctcatctttatgccattggtgaagtggcaaatacaggtgtacacggcgccaatcgtctcgccagcaactcccttcttgaaacacttgtttttggtgaaaaagtagcggaatatatccacacgcaaaaaaacaaccgaataatagctccagagaatccccccacttatcaaacaacaatgccccatttacctgaaaaacatatactccaagaaaaaatttgggaaacattaggaattacacgaaaacctgagaaaatcactgaatttctccattggttagaaacatttgattatgctaaccatacgagagaaacagctgaaataagtcatatgattattacctcaaaattaattgccgaaagcgccttaaaacgaactgaaagccttggcgcacatagaattttaaaaggagtaacgaaatgaactcaatacttatgaatcaagcaattcaagcatttttattagaagatattggtcagcatgatttaagctcagatagtattttctccagtgaaacaatgggagaaggcgtttttattgcgaaggaaacaggtattctttgtggcatcgctatcccgcccaaagtatatgaaatccttggtggaaacgtgcaatttgaagccgtaaaaaaagatggtgacacaattaaaaaaggagacattatcgcgactgtctcggccccagttcgcactttactttccggtgaacgtgttattttaaatttaatgcagcgaatgagcggtattgctacccaaacccatattgccgtaaaacagttagacgattcgactattcgaatttgtgatacaagaaaaacagcccccggtctccgtgccttcgataaatacgccgtacagagcggtggcggctttaaccaccgaaatggtctgtacgatggagtcatgctaaaagataaccatatcgccttctctggtggtataaccgaagctgtttctactgttcgtgaaaaactgggacatatggtaaaaatcgaagtcgaaacagaaactgccccacaagtaaaagaagccgttcaagctggtgcagacatcattatgtttgataaccgcacaccagaagaaatcaaacaacttgttacactagtgccaaaccatattactacggagatttccggaaatatcactttagataatattaatcattatagaggttgtggggcgaattatatttctttaggatcactaacgcattctgtttctgcccttgatattagttttaatagtaaaggaggtataaaagcatgaatttactggaaaaagtggaacaagatacgatgccggctcgatataaacatatgacctcgcaagaaatgatagctcgtgtcacggaaatcaaagcacaactcggcgaagatctttttattccttgccaccattatcaaaaagatgaagtcgttccttttgcagatgcaattggcgactctttacagttagcacaaattgctgcaaataataaaaaagcaaaacatatcgttttttgtggtgttcattttatggctgaaacggcagatatgcttacgacaaatgagcagattgtgacgctaccggatatgcgcgctggttgttcgatggcggatatggcggatattcaccaattaaccaacgcttggcccaaactacaacatctgtttggtgatactattttgccagttacttatattaattcaactgctgcaattaaatctttcgtcggcgagcacggtggtacaacagtgacatccagtaatgcaaccaagattgtctcatgggcacttcagcaaaaagagcggattttctttcttccagaccagcatctaggtcggaatacagcttttgaactaggcattccgttagaacatatggccatttggaatccgataaaaaacgaactggaatatgacggtaacctagatgattgtaaagtaattttatggaaaggctactgctccgtccaccaacattttacagttaaaaatatcgaaaacattcgtaaaaatcatcctaacatgcgaattattgttcatcctgaatgtacgcatgaagtcgtttcactagcagatgactctggatcaacgaaaaaaattgtaacagaaataagtaacgcagcacctggcaccgaatgggcggtcggcacagaagccaatttggttggtcgcattattcaagaaaatcccgataaaaaaatcgtctcactcaacccttttatgtgtccgtgtatgacaatgaaccgaatcgacttacctcatttactttggacactcgaggctattcaaaacggcgaacaaagaaatcaaatcaaagtggatgaacatacaaccaaatttgcgttaaaagcattagaaagaatgctccaattaagctaataaaaaaacgaaagcagtggctgctttcgtttcagctccatgatatttaaaagctttgaatatccaccctaattatatatcgaaaacgtgcatttacagtgacggttttgtgtatatttttggtatacctacttttcacattattttaatcttataaaacagtttttctcaacaaaagtaagactcaaattaaataaattttgtagattagcaaaagtaacttatgttgttttgaagttatcatttttagttagtattttcattcaaaatctccctttttaaatataaaataatcatattctattattcacataaactcaaattccactaataccctttttgcgattgtacttttactaactatttctacatgctataatatgataggtaagcaagtttatggtggtggctagctctttcaacaagaaagggtgatgcctatgaatatttttgttaggtttgcctggaaaggataacccatgaccgtttatgaagcactgtcttttgcagttgcttttgcgaccctggtgttgctattaaacagtcaaaataacaaaaaaaaataaccacttgtaaacttttggcgaagttagtggttatcttataactatttagctagtggccaccttaattgggcttacactggagagtcatgttcacgcatggctctcttttcatatatataataacataacataaaaccatttgacaacatatgacactaggtactacatatgaaacgaaagcaataactgctttcgttttttattttaaataaccaatttcaattcgaattttatcttttttcgtcctaccaccagtcgataataccttcactcttccgtatccacgagctgataatacgtcttcttcctcacattcaaaatccggattttccactgttttccagtttacttttacaaggcccgcggtgactaattgtttcgccttttgcctagagatatggtgcgcattgctaataataacatcgagtcgcatactagaaacagttaggcccatttcttcccaaacaactggcgcatagacagcatttgccaagtcagtttcttctaacatcacattcactttaccgattttttcaagctgtaatgttaaataatccttcatcgtactttctactaataactgccattcactaccattatttaaaatatcaccaaaaatatcgcgtttcattccaagcgacattaatgtaccgagaattttttgatgcgtgagtgtcgtgaatttcaccgggtagcgaatatggaacaaagccacctcaaaatcagcttctgttggggtataataatcaggataaatcagtgcgcgccgacgttctgcatgcggaaccccaccaaaaaactggacgccaatatgctcataaccaccaacaactgtctcggtaatataacgttgcctcgggtccaaaaaatccgttagttgcggtgtatattcattttcaacttgcatcgtaattcctaatatcttatcaataaatgcgtattcttccgcgcgaaaatgctgatatattccatccatcatcttttctccctttcaatccattccgagtctttagccctattataccatgaaaaaagctgctactctgctaatcttgcttcattattcaaaaaaagcacacccattagaaaacgggtgtgctttttaaaatagcattggaataacgtacacttgaattaatccagttaaaactctcatcgcatattggaaaatgaaataagccacaagggacgaaatatcaaacataccaatcggcggaataattcttctaaaaggctctaaaatcggttcaaaaatacgtgctaaaaattgaccgattttcgattctcttgcacctggaaaccagctcatcaagaaataaataaacattagtgttggcaaccatctaataacaaataaaatgacttccaccacttgatataaaatactttgcaatctagtttacacctctaattcattacataaagttttgttcatcaagcatttcggaaatagagccatttacttcaacgttatctggagtacataagaaaatattatttccaacacgttgaatatctccacctaacgcataaacagtaccgcttaagaaatcaacaatacgtgtcgcttggtcatggctaatgcgttgtaagtttacaacaaccgttttataatcttttaagtaatccgcaagttcttgggcttctgcatatactcgcggttctgcgagtaccatacgactagaaaactgtgctccctgcatactaaccaccttcgcatcttcttcttcaacggcataaaaacgatttttactaggtttttctttcttcgttttcttttgcataggttctggttccctcgctacttcttcttcataatattcttcctcttcatctaagaaaaagaatgacttaaatttattcgatagtcccatttgttacacctccatattatcgtcactcaccaaagctcttcctactcgtataaatgtagcaccttctgtaatcgcaattccgtagtcgtttgtcatccccatagataactcagtacacggaacattttttaactgaagcgcatgaatttcttgctgcaattgctttaactcatgaaatacgtgatgcagctctttgtcactatttgtaataggtgccattgtcattaaaccaataatctcaataaaattgaaatctgcttcttgtaaaaacgacaacgcctcttcttttgaaaagccatgtttactttcttccccagaaatattcacttgtaagaaacatttaattggttttgttgctcgcttttcaatttcttttgcaagagaagatcggtcaagcgaatgtaaataatcgatttctggtaacacatcttttactttacgtgtttgtaaagagccgatgtagtgccaacaaatgtcatctttacccgcaagttctctagttttgtctagaaatacatctgcccgattttcaccaaagtgacgaattcctaaatcataaagttctgtgattccagctacatcaattgtttttgtaacagctactaaagttacgtctgcctgttgacgattgcttttttcacaagattgttttatttgtgcagttactttttctaaattagcttgttttgtcatttgtttaatcaccttatataattcccgaagtgcttcatttaaaacgcttcttgttataatcagatacccggtcacttaatcacgcattaacagtggccgggtgaaattgtgttataagtattatccgcgacggttacgattacggataaatgctggtacgtcaacgtctgaactgttttgttgtggttcagcttgtggttgttcgtgtaccggattatttccttgttgcggtgcattttgcgcgtaatcattttgcggctcatcttgcacagcatagcttggacgattcacttgaatggattggttaggacgacgattcgcttgcgcttgttgttgcgcttgtttttcttcatcaaaacctgttgcaataacagttacaatcaattcatcttttaattcatcgttaataacagaaccgaagatcatgtttacatcttcatcagaagcgctagaaacgatttctgctgcttcttgtacttcataaagactaaggttagatccaccagtaatgttcattagaacgcctttagctccatcaacggaagtttcaagaagtggcgaagaaatggcttttttggcagcttctgcggcacggttttcaccagttgcaatcccgatacccataagtgcagaaccacgattagtcataattgtttttacatcggcaaagtctaagttaattaaaccaggaacggcaatcaaatcagaaatcccttgtaccccttgacgtaaaacattatctgcttcacggaaagcttcaagcattggcgtatttttatcaacaatttgaagtaaacggtcgttagggataacaattaaagtatccaccgcttctttcattgcttctgttccagttagggcttgtttcgtacgttttggtccttcaaaaccaaatggtcgtgtaacaacaccgacagttagagcgcccatttcttttgcgatttgagcgataacaggtgcagcaccagttccagttccgccgcccatcccagcagttacgaataccatatcagagccttttaaagcttcttcaatttgttcgcgactttcttctgctgcttttttaccaatttcaggtacagcacccgcgcctaaaccacgcgttaattttgtaccgatttgtaattttgtttctgcttttgctaaattaagtgcttgagcgtctgtattaacggagataaattctactccttgaacaccatgctcaatcatacggtttacagcgttgttaccgccgccgccaacaccgattactttaattgttgccaaactttctgaactagtgtcaaattctaacatattattgcctcctatttgccgatttatacaatttgtttttcttgctgccttaccagctattcgcttttattcaaaaaatgcgccgaaaaaattcttcatttttgttgatactttttcgtcatctgatttttttggtttttgtttaggttgttttggtgcttcgtcatcataacgaggctcacttgcggtgctgcttacatcgcgaccttctaattcagccatttggtatgcatattttatcaagcctaccgctgttgtgaaggatggttcgcgaacaccgatataatcaggaattgccagtctaacatgtgctgccaatgttttccctgctaaatcaatagctcctggaattgccattgagccaccagttaatacgtagcctcctggaagatgcgttttacctacgcgattcaattcttctacaactaattggaaaatttcttccatacgagcttcgataatatccgctacttctacttgtgtaaaatgttgtttttggtcactaccgataacatcaattgcaaaaacttcatccggagaagcatcatcataaaatgcgtaaccgtgctctaatttaacacgatctgcattggctgtagatgtatttagtccaagtgataagtctttggtgatattatctccacccactggaataacaccagtgtaagttaaccttccttgctcaaacacgctaacagttgtcgttcctgcaccaatattcacaagagcagtaccgaattctttatcgtcttcagataaagagatagatgcctcagcaagtggttgtaaagcaatatcagaaatctctagaccagcacgttccacacaacgtaacgtattatgtaaaattgtttttgagccagtgattagtgtgccttccatttctaaacgaacaccaatcattccacgtggatcggtaatcccagttaaaccatccacaacaaattgatcaggaatagtattaataatttctcgttcaggagatagaggaacgacttgagcggcatccatcacattccagacatcttcatctgtaatttcccggttttcgctacctactgccacaattcctcggcaagcttctaaatgtacctgactcgatactaccccaacgattacttgagaaatttcaacgccaaccattctttctgcttgttcaattgcctttttaatggattctacagtcttgtctatgtcgataataatcccttttttaattccggatgactcgacattcccaacaccgataatattgagtctatcgtcagccatttccgcgatgattactttcacagaagctgttccaatgtccaaacttacataaatttcgctatcacccatttatcggcacctccttttattctagtcatttaaagtataatatttcattttttataccgagcaaagccggtttttttaacttgcttgaaaaagcggtgttacttctttatttatatggcgtcagtgtagaatgattccccattctgcctaacatacaaaatcacttatttacagtctacactaagaaagaaggtaataaaagcacaaagaacaatttttggcaaattcttaagatatttttttcattttattcaaaaagcgaacaagtgttggtatcgcaagcttgcaggtcatcattttgtcacctttttgacatatctgttaagtgctagttcgccaaaaatgcgagagaagaaacaagtctttattcgttttcttttttcttctccgcggctttttcttcggcagcttttttttcggcgttttgttgataataactttggaaataagaacctacttcaatatcaatcacgcctttttgtcctttcgctagttgagcgacaattgctggataatgctgcatcttatctgcaaaactacttatatccgctgaaacttgattaccatcattcatatataattcaatatgattttgatcggtcttcgtaggactataaatcacttcggaaatagaattcactacatcttttggtagtttattaatttgcgctaccattttttcgagcgttttaccatttttaaaattctggaacagtaagtcgttccctattggaaattgtcttggttggtctgttagcataatgccattttcaaggacatcatagtatttaccgtcattttgttggtaaccaatcgttttatattctgtaatgttaattttcacatcatttaggccatctttagaaacggttgcgttttttattaacgtatttttctcgagcttttcttcggtttttccgtttcttattccaaggacaaattcaccggcagtaagcccgctttctttacgaacttcattttcagttagttgtttatttccacttacagcaattttatctaacttgctcaatggggaaaggaaataaagtgtaattaagattaaaatcgcaaaaattccgattaaaatggctaaatgtcttattaacttttttttgcggtatttttttaattcaggtatacggttttcgatggaaactactcgtttgttttcagccattttattcgcccccttctgcaatttatttcataatactaaggactgtttctaccagttttagagctgcatctgggcgccccatttgtttagcacttaatttcatactatttaattttgcttcatctgttaaaatcgcatctactgtcgccattaaatccgtctcttttaattcagactcggtaataaccacagccgcattatttttttctaacgcgcgtgcattatattcttgatgattcgcggtcacataagggctaggtattaaaatacttggcaccccaagcgctgtaagttcagctaatgtagtcgctcctgctcttgaaacaacaagtgtcacagcatttaaaatcttaggcatatcataaataaatggttgaacactaatatgattccctaaattcatctctcctaaagaatcttttatcttttcaaaatggacatcacctgtcacatacaacaattgaaaatctcgtttattccattccggcaagattgcttccacagcttcatttatacctcgagcacctctactacctccaaaaacaagcacagtaggttttcctgaaactaaaccatatgcttctagtgcgccttcaccgtccacaccaactacttctgaagctcgtggatttccagtgaaaacaattttctcagaagcaaacgaatcacttacttcttcaaaacaaatcgcgactttatctgtgtaacggcttaaaaatttatttgttaaaccagcaatactattctgttcatggattaaagttggtattttaagtttagcggctgcataaaccacaggaccgcaaacataacccccagttccaattacgacatctggtttaaattcgcgtagaatttgtttgctttttttagctccacttagaaaacgcatgactgttttgatattttcaagagataatgaacgtttaaacccggtaatttctattgattcaaaaggaataccttctcgtttaacgattcctgcttctaagcctttttctgttccaatgtataaaaattccgcttctggatgtactttttttaattctcggatgaaagcaagtgctggataaacgtgacctccagtaccaccaccgcttattgctactttcatttttccacctcttctattagttcactgattgcgtccatgtaggcatttccgcgaacttcgaatgtccggtattgatcccaacttgcacaagccggtgaaagtaagattatatctcctggtgctgactcgcgatatgcaaccggaacagctgcctctacatcatccacataatgcacttcaattcctgcaatttttcctactcgaccaattttatctgccgtttcaccgaaaacaataagtgatttcacatttttgaaaaatggtagcaattcgtcgaacgagtttccacggtccagtcctccagcaagtaatactactggatttttaaaacctttcaatgcgctttgagttgctaaaatattagttgctttagaatcgttataaaatttacgtccttgccattccactacaaattgagttcggtgctcgacgcctttaaatgtttcaaggacatacataatttcttcatttgtcacacctaaagttttggctactgctacagatgctaaaatgttttctaaattatgttctcccggaagtaaaatgctatcacgtgatccgattacttcatcgtcaaacataatattgccattttggacgtagcttccttgttctaaacgctgcgttgttgagaaaggaataacttgtgcttttgtttgtttagttaaattcttcaattcttcttgatcccaattaattactaagaaatcgtctgctgtttgattttgttgaatgtgccattttgcttgtacatattcactgcggtctgtatggtagtctagatgcgcttcatagatatttgtaattacagaaatatgtggcttaaatgtttgtacacccattaattggaaggaagataattccatcgaaatatattgatcgcttgttgcgttttctgcaacagctgatgccggaaaaccgatgtttcctgcaagcaaagagctattttctttgtgtgcatttaacatatggtgaataatcgttgttgtagtagttttcccgttagttccagtaataccaactatcggcgcttcagaaatttggtaagctaactctacttctgtaataactggaattttgagttttaaagctttttcaatcatcgggttgttatacgggatccccgggtttttaattacgagttcaaatccttcatctaataattcaatcggatgcgatccacaaataactttaatcccttgttcaagtaatccttgtgcttctggattttcactaaaaggtttttgatcgtttactgtgacgaatgctcctaatttatgcataattgttgccgcgctaacaccacttcttgcaagacctaaaacaagcacttttttgtgatggtacatttcaatttttttcatttcctttggttcccccatttatatcaaaattggcggtcgattctatgagattcacaaaaacgacggaaagcgccaaccagattctgtaaaaaacagccaactagagacgcttttgccgcaaaaattacggcgctttatttaaaagataacaacacagactgaaataattgctccgattaatccgattccccagaacgttaaaacaacacgccactcggaccaaccaccaagttcgaaatgatgatgaattggtgtcatacggaaaattcgttttcctcccgttgccttaaagtaaaatacttgtaaaattacagatgcagtttcaataacgaaaataattccgattaaaagtaacaaccattcttgatgaactaaaatcgaaacagctgcgatacttccacctagagcaagcgaaccagtatctcccatgaaaattttcgctggatttttattaaatagaagaaatccaagcattccgcctacaattgcgaaacagaaaatcgctacgtccatttgttcttggtaaaaagcaatcacaccaaaagcagagaatgcaataacagatagaccagaaacaagtccgtctaaaccatctgttaaattaactgcattggagaaaccaactaaccagaacaagataaagataatgaagaaccaaccaagatcaatttccgtattcgtaaatggaatcttaagcgtttctgcaaaatcactaaaatgatacacaagatagaataaaatcgaaatcgcaacttgacctaaaaacttctgcttcgaagtgagacctaagttacgtttttgaactactttgatatagtcgtccagaaaacctaatgcgccaaataatgccagcgtaatgaatagtagccaagtagccgcactaacttcaccactgatgaatgaaaaaatcaaaaagctaatgagcatggcagtaataaaaataaccgcacccatagttggtgttcctgatttcttttcgtgcattttcgggccttcatcccgaatactttggccgaattttaatttcaccaagaaaggtataaatagtgggacacctatcaccgtaatgataaaagccactgcaaaagttgatactaacatgtataaagacacaataaattctccccaatctgtttgtcaaagcacttcacttcatattttatgcgagtccgagttttttttcaatagctattcgagcttctacgcgatcatcgaaatcaataacctcatcaccaatcacttgataatcttcatgccctttaccagcaatcagaatgacatcccctgcttctgccatatttactgcataacgaatggcatcgcgacggttctcatgaacaacgtatgaatcgctccctggaacaccttgaatcatatcttcaataatcgcatgtgggtcttcactacgcggattatctgatgtaaaaattggatttgtcgcatagtcaacagcaatttttgccatttgtggtcgttttcctttatcacggtcaccaccacatcctacgacaacaaagacacgtttttcggcaaattcatcaatcgtttgtagaacatttaacaagctgtcaggtgtatgagaataatccactattactggaaaatcttgtcctgcatttacaagctcaaaacgtccttttacccctggaatgctctcaaccgttgcaattgcatttataactggaatacgtagcgcaaaacttgtagcaatcgcggctaatacattatatacgctgaaatttccaatcatttttatttttaatgcgaaatctcccactggtgtttttaaatcaaaagttgagccatgacttgtaatttggatgttagatgcgctaaaatcagccggttcttttatcccaaaagttataatgtgcgcggctgttgctgtttgcattcgaacgctttctttatcatctgcatttaaaacagcaatttttggattactcaagttataactgttaccaagctgcgcgaacaacaagctcttagcgtaagcatattcttccattgtatggtgataatctaaatgatcttgagataaattcataaatactgctacgtcataatctgaaccgtatacgcggccttgaactaatgcgtgagaagagacttccattactgctgtactcacaccactcagaagcatatcgcgaaaagtttcttgcaaggttagactgtctggcgtcgtattttttgtttctaaaatttcatcgccaattttacgatacatcgtaccaatcaagccagtttgctcgccgttttcgcgaacaatttgttctactaaatggctaacggttgttttaccatttgtccctgtaatcccaactagttttaacgcttgggttggagaaccataaaagtaatccgctagcattgccattgctcgtttagaatctctaacataaagaactggcacggaaacatctaattgtttttcagcgataattgctactgcaccaagctgaacggcacggtcagcaaactgatgtccgtccactatttctccatctatacaaataaataaggtacctggttgtacttttctactatcttgcgcaatttggttaacttcaattgctgcacttgcttctccagtatagaccgggatagcttgcattagttcttttaacttcattcttgccatctcctcaaacttattctttctgttagttttgctaaaatcaaaaagaatccttttctatcttagcaaaaacaacaaagtatatctaccacgactaaagacatagattgcttttaaagttagaagtatgccactttactcagctgacatacttctatcttcctattattcattcaataaatcacctatacctgcattttctcggatgtctgtcgcttttttattttgctccgctgtatcttggtcatgattttggttgaaatcaccaatttgttctggcgaggcgagtgttatttccattttcgtttcactattgattacgctacctgccgaaacgctttgacttttcacataaccatttccactaaactcaaaaggaataccagtgatttctgagacttttagcgcgtcaactttcgaccaattcaccatatctggagcagtcatatctccatcagtcatcagaattactttttgtccttgcataatttcgctatttgctagcggaagttgttgaacaatttttttgccattaccaacaactactggttcaagccctttgtcttgtacagcttttttagcttcgtctactgttttttcagctacaacaggaactttttcactagctagtttttcaacatcgcccggtttaatgttcatgtattgtaagctgtttttcattacaggattaaatacttcggaaactgcttccccacctgtttggctaccagatagttgcggttgttgcatagtcacatatatcacgagttcgggattatcagcaggtgccattcctaagaaagaaaaaatataattttctgccccagtcatgtacttacctgtttttgaatctggaatttgtgatgttcctgttttaccagctacatcataaccaggaatcgcatatagtttacctgttccgtttcgaccgctaataacattttttagttcatctcgagttttcttagctgtttcggcgctgattggttttccagcgattttggtttttgtttctgtctcttctccagtattcgtatctttgacgcttgaaaccacataaggctctttcatcgtgccgtcacttgcaatagcagatgcggcttgaatcatttgcatcatcgaaactgttgtaccttgaccgaagacagtcgttactttttcaatcgggtagttataaagaatttttccttttgtttcatttggtaaagcaatgcctgttttcttgccaaaaccaaatttatctaaataggttttaaatgtatcagtacccattttgtttaggagtttagcgaacgcaacgttactagaacgttctacgccttcgcggtatggaatcaagccccatccattcccattattatggtcatgaattgcgatatcgccaactttataggaacctgattgatagtattcgtttggattataaacgtttttatcaatagcagatgctaaagagataattttcattacggaacctggttcataagcatattccactggtaaatcttgccaaatgcttgaactgtttccagtaattgtcgacctgtcagctggattaaatgaaggacgttgactaattgccaaaatctctcctgttttcggatctgcaactacggccatcatatttttcggtttatattttgcatcgacagttgtcattgtatcttctaaaaaggtttggatttttttatccaatgttaaggtaatatccttaccgtcttttgcttctgttactttgttttttgaatcaggcaaaatatagcccattcggtcggtgctataatcgattttcccatttttgcctgttagtatatcattatagctggattcaattcccattttaccttctaatttggtagtgtttttttcttcttcttgttgcgcaaagccgattaattgtgtcgcgaaagtaccattaggatagaaacgttctgattgacgagtaaattcaatgcctggtaaattttctttgtcgattttagcttttgtttctgtagaaatattttttcccgcagagccaaattcaacttggtatttacctttttcattgagtttatctagaatatcagattcgtccataggaatatattttgcaagaatacgagctgttttttcttcatcaactactcgcatcggatttttcgttgttttggataatttatcactaactaccgctgcaatcgtgtaagaagccgtatcctctgctaacacttctccttttcgatctaaaatggagccgcgttttgcttcgagaacactgcttttcaaatgttgtttagatgctttagctgctagcggaaccccatttgcttctcccgtaatttgcaaataaagaaaacggccagaaactaagagaaagagaatagtgaaaaagataaaaagcactaaagctccccttctcatgttacctatacgccgtttcattgaccatctaccactttcacattatcgccatcaagttttaaccctttttctttagcgattttcaaaatacgttcatatcttcctaaatcttttacttctacttttaagtcttcatttgatttttgttgttcgagaatttttgtttcttttgtttgaatttcttggttcactgtataaatttgagcttgtacactgatgattcgaaaagcaacaactaaaacaatcgcaagcgcaatcgtgatgattactttttctccaagtgtcatttgaccacgttttaggatttgttttttaggctgttctgcttctctatgtactctatttggctcgagatttgatttataggcgacattgctcacattttttcaactcctgctatttaataattttttcgattacacgtaattttgcagaacgtgctcggttgttttgttccagttcctcttcacttggtacgattggctttcttgtagcaagtttgaaatctggtttatattcatctggaatgactggaagacctggtggtaaatctggtccttttgtcgcttcttggaataagtattttgttatgcggtcttctaatgaatgaaacgtgattacgctaattctgccgcctggttttaataatgttaaggcattttcaagagaatcttctaccgcgccaagttcatcgttaacggcaattcggattgcttgaaaagtacgtttccctggatgtccgccttttcttcttgctggcgccgggatagctgttttgatgatgtctactagttcgccggttgtttcaataggttttacttcacgacgacgttcgatttcacgagcaatttgtttagagaatttttcttcgccgtattggaaaaagatgcgaatcaagtcttggtaagaccattcgttaacaacttttttcgccgtcagttcttgctcttgatccatacgcatatcaagtgctgcatcttggtgataactaaagccgcgttctctttcgtctaattgaggggaagaaacacctaaatcatataaaatcccatcaaccgcttcaattccgcgctcgttcaaagcttctttcatatagcggaaatttgatttaataaaagttactctatcgctatattctgctagtttaatttttgcattatcaattgctgtttgatcttggtcaaaagcaaataagtgcccttgttcattaagcttatttagtaaatactctgagtgacctgcgccgccaagtgttgcatcgacatagattccgtctggttttacttcaagcatatcgactgtttcatgtagtaatacggtttcgtgcttaaacatgcaaattcccccttaaatatcaaagccaatcatattttcagctaaatcagcaaaggactcttctgcctcgttaaagacattatcccactctgatttactccaaatttcaatacgacttgaaaccccgataattactgtttctttttccaaatccgcatactgtagtaagttggatggaatgtttatccggccttgtttgtctagttcgcattcagacgcaccggaaaagaagaaacgtgtaaaggaacgagcatcttttttagtaagtggtaaggtttggagcttttcttcaagctttttccattcctcttgtggataagcaaataaacacttatcaagtcctcgggttataacaaaattatcccccaaaagctcacggaatttagctggcacaattaatctgccctttatatcgatgttatgttgatattctcccatgaacattagacttcacccactttcctaaataccactttaccacatctccccacttcgcaccacccaaaacctaaaaaagtgtaaaaaaaaatcattctactatttaagcagaatgattaaacccttgtttaaagccattttaactacaattcctttttaaaaatgattgtggggccgggtggagggattccccacttctcacccaaaaactattttgctaatacttttttccagcccgattttaatgcagccgcggaaaaaacaatacttagaaccccaagtaaaatcgtaaaagtcgccataccatatttgccaataaaaggtgcaaatacaaggctcaccgaaccaatcattttaccaatttggaaaataataccgttaaacgccatatatgccccgcgtctgttatcgtccacaattgcggctaaaatcgtttggcgcgtaggcacgtaaagtaactctccaatagaaaggactgccgtggctaataataaaactgccagattatttgcaaaggcacacaccgcaaaacctatagcaaataaagtaaacccaacgtacataataggttgttgcgctctttttgttacgaaccttgcaaccggaactgtgaaaagaacgataaacaaagtattcactgccgttaaaacgctgactatttgtacgccatttagtgtaatgtttccgagtggaccgaaatgaacgagcaaagcctgaaaatcttcagctaaacgtacggaaatataattgctccgttgaaattcaatcgacataactgcaattccaccaagagtatatagaagaaaacggcaatcatgtaacacttgcccataatttttaagcattcctactaacccgtaagatcctttttttaatactgctttttgctttaaggtttctgaaatcaagcttatagtaagccatgcagtgacgaatgacataatgaagagcgcaacgagtaacggaaataagtaatcgatgaaaaaccaaccacctacaataatccctatcatcatagataaattatttgcccagtaactaaccgaatacataaaagaacgattttccggcgtacttacatcaatcaacatcgcttctccagcaggatttatgagtccttgcgccacaccaataagaagtagcatcacaaacgttatccatggtgaatggaaaaccggcgaattacaaagcaccattcctagaaaggcaaatactttaagaagttcccctgccaccatcagttttttacgaccaataatatccgccaaatgcccgccatacatacccgcaagaaactgcgccaatacgttaatcatcaagagaattcccgcgaccttactattaatttccattgaaaaataaattgccataaaaggaaaaatcattgacccgattattttacttaaaaattgaatcaatatccgcgcacgaatatttggatgtaactctttaaacatggaatcccctccattgcaatttttctgacttctctgttagtataaaagggaaacagaaagataaaaagggtatttaaaaacataaattgtccccttttagattggagctggctcatggacaaagattatttcactatgcgcgcgcatttatatgaacaaactacagatttagaagtaccttttaaactaaataatttagcagatatttggttttgtactactaaaaatgccaagcgaaaattgcagcaataccaatcaaaggacatgctcacttatttaccggggcttggtcgcggaaatgtttcacggcttattttttcgaaacaattagaagatgaagttctggaagttttggagcaaagtttagcaaaagatgcatttagcgatatattatttctactacaattaccaataccaaaaagttggttttcgagcatatctaccgaaattcagcacatgtttggtttacaagtaacagaaaatcagcaagaaatactccgctctattgtccggcgcaaacttactacgcttgatccgttgcaaacctctgtttcaatggaagcttttttaattacacaaatcagtgatactcttgtaaaatatgatgaacaaaaaaagactatcattccccatattgcccataattggaaagtttccgatgattacacagaatggactttttatttacgaaaaagtgttttatttcatcatgggcgtatgcttgatagcgaggacgttaaatacaccttgctccgttcgaaggaaacaaattcggtaagcgcctggcaactaaaatcaattaaaacaattcaatgtggaaataaatttaccattacgatttatttaaacaagccagatcctttttttattcgctatttatgtactgccaatatggcgattttgccacgcgacgtggttttcgatgaatacaaatggatttcaacggggccttttcggatagtagagcgaaatgatgaacgtctagttttagaagcatttgacgcttattttttagagcgccctcttcttgaccgagtagaattttggacagctcaaaccggagacactttaacaaacattccgatgcagtttacttccgttgattacgaggaaaataaagcttatgttgaacgtcgcaaactaggtgtcggtgtcaactttatttgctttaatacccatcggcaaggcgtcccgcaacatccagcttttcgcgaagcaatttatcaactaatagactgccaaatagctagtgagcaaggtttcgaaaattacggcacaatcgcttcgaattactttccagaaaaatcgattgctcccattaaaaaccctgacaaaattgccgacttattaaaagaagcaaattaccaaggagaaaaagttatttttgcgacaacacagcatcctaccgctttaaaagaatcgaaatggatccgcgaccgggcagcacaattcggaattacgcttgagcaaaaaatcataactcatcatgaagcttcttattcaaatgtaccaaaagaggaaacggacttgatgatgatgggagaaattccagcttctgataacgagatggcttatttggatttcttaaataacccttaccttttaccacaacagctacttaatccaagtattctcctcgaactttcgaaaaaattagatgcaatgaaattagaaaaaagcgcctccaaaagagacgctttgcaaacgaatatcgatcgttatctaaccgaaaataactatttaatttatttacatcatccagaaaaaagccaatcgctccattccatgataaaaggtattgcagaaaatccatatggctactttgatttaagtaaagtatggattgaaacaaaaccgcttaaaaaagtaaaatcaaactataaataatgccatataaataaagaacgacatatagtaaggcgaagatgaagaaacaaagtctccagtaaccacgaaggattttgcgaaactgaatctcgccttctttttttgcagctaacaccacaataacgatgcctaagataaataaaaacaacaaaatataaagtaaaaacgaacggttaaagataacaatcataaaaaagtgtaccgcgataattaagaaaattgtcgataaatccgctgccaacataattctccgttgcggtttccgaaatttaaaacgcgctaaaaacaaagtaagtacaaataccactacgggtaaaataataataatagcagttgaattagttaaccaatcaaacatgacgttctccttccaatcctttaataatctggtaaagtgtccgaagtgtaggaagggaagtttctgttttgtcccctttttctaaaattggtagcacaatcccatcaatttctgtcatccgttcattcatacagtcaagtgccatcgaagaaaagttaagcgcagtcgttcggcaaatcgtctcgactttctctaatgcattttctatcggtaagacagtttcaacttcatttactacccttattaacaaacgatgccattcttgattttctaaaagtttcccattttgaacaccaagtaccgctgttaaagggttaatcactgcatttataaataatttttcttggataatcgcttgataattcgcatgtttttcaatcggaaaagctgggctagacgttagtaattcttttaggtcgtcattcagttctccttggaaaatgctatattttgttcggccgtgtccgcgccaaataacggtcgtatcatcctcgcgacctgccccgtgctcactaatgcctaataaaatcgtgcgtgttgtcccaagctcacttaagcgttctagatgtcctgcaccattttgaatgaataaaatcgggatttttgtcggtagtttttgaagtattggtattatttcatttaaggaatactgctttacagcgataattagtaactgttgtttagttaactgttcttcttcggtaatctgtgctgcatgaatatgtatattttttgttgtttcattgtctattaatgaaattcctttttgatttaataaatccgcttgttcttttcgatgtgtaaaaagggtgagcttagatttatcagcgaaattagctgcgtataacagtcccattgctcccgcgccaataatcccaacatttatttggttttccattgattttcagctccatattggttgatgcttttattttatcagaagtggcgagtctttgcacttttgcgcgcaaacaaaaacctcgaaagacccatggcgtctttcgaggttcgtcttcaacaagtgaaacgtcacttgtttttaacaatattagctgtttgctacatctttgccatcatattgtccacattctggacatacgtgatgggaaagtctgtattcgccgcaattcgagcattcgttcatgcccggaagttgaagtttaacgtgtgtacgacgcttacgctttttggcttttgaagttcttctaaaaggtactgccatttccttacacctccttgacgataactaagtacttgtatcgttaatctaagaaaaataaattccttaatatattccagcttcacggggaagtttagtcttcttttttcttatcgaaaaaatcggctaatcccgcaagacgaggatccacttttggttcttttgctatttgttctagtaggttaccttcttctgttttcatttcccattctttgcctcgtggaagcttactcatttcgagtgcgtcttcactgaaaacttgcatcggaatttcaactagtaaaagttcttctactacaggggttaaatcgaccatatcctgttccatcacatgccaagattcatctagaacttgttctttggatttcacaaaggtttccgtcgcatgcacttcataaggataaataacatcctcaagtgtacgagcacatggaagtgtccactcgcctttcattgtaaggttagcggtaacttcttctgggtgtacaattagttccccagttacttgtacggggcttgcatcacgaacgtctatattgttctcttgaaagaacttttttaggtcagctttttcattaatcgtgaagttgctgtcacgatattttttcaattgactgatagaccatttcatcctacatcactccaagcgcaacacaaaatattatagcttttttaaaggcttttgtcaatggtttttcagggaccgaaactagcggctgaattttatgctaaaatagattatctaaaggagggaaccgaaatgaaagcaactggaattgtggtcgaatataacccttttcataatggccaccagttacatttaaataaggcacgtgaacttacaaaaagcgatgtggtaattgcggtaatgagtggttcttttgtacagcgcggcgagccagcaattatacctaaatgggaacgaacaaaaatggcccttgcagctggcgtcgatatggttatcgagctccctgtttcgtttgcgacacaacatgcgactatttttgcggaagagtctattcgactattagatgcacttcatatagatacactttttttcggaagtgagcacggggttagtgaagatttttctaccgctgctaaaaccgttgttgaaaatgaagccgcttttaatgaaaccattcagcttgctttaggtgataagaaaacatcgtatgcgagagcttatacagacgcttttacgcacttatttggaaaagaattattagatgtcactaagcctaataacattctcggtttccactacgcactcgctattcaaaaacaaaatccttcgattgcacttcaaacgatgccacgtgaacattcgggctatcacgatgcggaagcaagccatgattatattgctagtgcaactgcgattcgaaagttactccttgctgggaatttagaagaagctagtcgctaccttcccgattcctctatagaagttttaaataattatcgcggaccatttttatcgtttgaagattattggccacttctaaagtttcgtttaatccaagctagttcggatgagcttgaagggattcgcggggttagtgaaggaattcaaaatcgaatgcaacttgcggcaaaaaaagcgcatagtttttcagattttattgaaataatgaaaacaaaacgttacagcaacgcacgattacaacgaacggcgttacaaattttattaaatgcccaaaatacgcctccagcagagccctacatccgagtacttggaatgagtaaaactggtcaaaaatatttatcgctccataaaaaaaatatttcgctgcctattgttacgactgtttctaaagcagaaccaagtcttttaaaagaagatttacgggcgacagacatttatacgctaataaatggattagaagattatcaagcgggcgactttcatactccaccaattctaaccttgtaaaactttacaaggtttttggttgactttcatcgttctattttgctaagatgtttgtccgactcaaaaaacaggaggtatgtgtatggtacaagaatatattcgattaagaggagctcgtgaaaacaatctccggaacatttccctagatataccaaaacgaaaaatcactatttttacaggcgtatctggctctggaaaatcttctattgtatttgaaactattgccacagaatcgcaaagacagctaaacgaaacatacagcgcttatcttcgtaattttctaccgaagtatacgcaaccggacgcagattcaattgagaacctctccacctctgttatcattgatcaaaaacgacttggcggtaattcccgctccactctaggtaccatcacagatattaattccattttgcgcttacttttctcgcgcgttggaaaacctagtatcggtacagcaaatctattttcatttaatgatcctgctggcatgtgccctgactgccatggtgttggtcaaaaagtatccgttgatctagtcaaattactcgatccaaataaatcacttaaagaaggcgccatcttatttccgacgttttcagtagactcatggtactggaattcctatgcttattctggcttttttgatgtgaacaaaaaaataaaagattataccgaagaagaatacaacatgcttttaaacgggaaagatgtgaaagtctttttagaaacaccaatgggtagcatgaacgcaacatacgagggcttaatccctaaattcaatcggctttacattcaaaaagaaggcgaaatgtctgcttctactaaaaaactagtagataaattcactcatattgccccgtgcacaacttgcgaaggtacgagactttcgaaagaagcactatcttgtaaaataaacggcgcgaatattgctgactataccgcgatgcagttagatgaactcaaagaaacacttactagcataaaagaccaagtagcagctccgatggtcaaaagtgtaacagaacgggtgcaacatttaattgatattggtcttggttatatgacactagaccggcaaacagcttctctttctggcggggagtcacaacgcgtcaagatgattcgtcatttaaacagtagcttaactgatttgctttacattttcgatgaaccaagtattgggctccatcctcgtgatgttcatcgtttaaatgacttactcgttaaattacgtgataaaggaaatacgattctcgtcgtcgaacatgatccggatgtaatcaaaattgccgatcatattgtcgacgtaggtcctcacgctggaaaacatggcggtgagattcagttcgttggaagttacccagatttactcaagtcggatactttaacaggccggttcctcaatcgccacttgccaattaatgataaaccgcgggcaccaaaaggctttttatctactgaaaaaagcagtcgttttaacttaaaagatattcaagctactattccaaaagaagtacttacagtgataactggtgtggcaggctctgggaagagtacattaattcattctgttttcctaaaagaatatccagatgccattgttattgaccagtccgctgctcatgcgaatatccgctccaatccagcaacatatacgggcattatggatccaatcagaaaagcattcggaaaagaaaatgatgtgagcccttcactatttagttataattcgaaaggtgcctgcgaaaactgtaagggacttggctttacaacaatggatttagcttttatggactcgattcgtacaccttgcgaagtctgtcatggcaaacgattccaagattccgttttacagtataagcttgatggaaaatcgattagtgatgtattagaattaaccgtttcagaagcccttgaattctttacagataaaaaaatcttgaagaaaattacggcaatggaagaagttggaattggctatgttacactgggccaagcacttagcacactttctggcggagaatgccaacgcttaaaacttgccaatgagctccataaaaaaggatccatttacattatggatgaaccaacaactgggcttcatatgtcagacattgaacacattctgtctattattcactctcttgtaaataagggaaatacggtgattgtgattgaacataatgttgatattattcgaaatgctgactggattatcgaccttggtccagaaggcggaagttcaggtgggcaaattctatttgaaggcgcgccactcgatttattaaaaaacaaacaatcgttaactgcgaaatatctttaatatgaaaaaagccgttttgtctatactcagacaaaacggctttttttattgtagtttttctaaataatcaacagcatcttggaatgttttcactgggacaattttcattttagagtcaatgtctttcgctgttttaactgctgtatcgtaattgctttcaatgcttggatcgctttttttcatttcttttgtaattggatctttcggagcaaagaagattttcgcgccacttttatctgctgcgacaactttttggtcaattccaccaattcttcctacagttccatcaggatcaatcgttccagttccagcgatttttttgccatctgttaaatcatttttttggaagcgactgtaaatttctagactaaacattaaaccagcagatggtccgccgattttttcagagtcgattttcacagttgggtctgcagtgattttttcatcatccactagtgtgataccaattcctggcgtgccttttttatcgatagctgttagtttaatacttgcttcttcatttttattgccatgtttgtatttgattttgacagtgtcacccacttttttgctgtggatgtagtcaataaattcttggcttgatttaaaagattgtccgtcaatttcagtaattaaatctcccgcatgaaggataccggctgctgggacgtcctcttttacacttaatacgtatacaccatcataagtaactttgactttttggtccgctgctttatatgcgacttggatggcattgttttttgattcgttcatcatttgcatttggcgaacgttgtattcttcatcagtttcgttgtcgtatttaatgtcactgtctttttctaattcatgatatggcaggaatttagctgtcatatatgtataaatattagcttttcccattgcaatcgtaactaggctgagtgaaccgtcttttttatttggatggtcatctaccgtaacgagtggtgcaagttcttccgttccaccaggttttgaaatataatacggaaccggaataaaaaagcccgctataataatgattaacagcactatcgccgttatttttttccactctttacgcattatctgtccatctcctacttattgaattttgcttttaccgctttgtttacgacttcaggtacaagttcacgaatatcaccttgatactgagccacttcttttaccatacttgaacttaaaaacgagtatttcgtattagtcataacaaaaaaagtttcaatgtctgcattaagtgtgcggttcatcgaagctatttgcatctcatactcaaaatcactaactgctctgagtcctctgacaatagcagtagccccgcgtttagcagcataatcaactgttaatccacttgcactttccacatgaacatttggtaaatgagcggttacttgtttaatcatttccattcgttcttccacggtaaaaagtggttttttagacgaattatttaaaacggatacgtaaagtacatcgaatattttcgctgcacgttcaataatatctaaatgtccatttgtaattggatcaaatgttccgggaataacagcaattttgtttcccatttctacgcctcctgaaattcaaatatggataaaacagtaattccgtaagaaaccgatttgattttctcaaatttaccaattgtatctggcatcactgcttctttatcatgctcgcaaacaattcttccattttcactaactagctctaatttttctaaggctataagtaatttttctagttgttgttttttatagggcggatctaaaaatacaaggtcaaatttccactcgtttttatgaagcaatttgagtgctcgttcggcgtcatttcggtatacttctgcgcgctctgtgaaatggcaaccttcaatattttgacggattgttttaattgctagtgtcgcttggtcaataaaaactgcgcgctccgcacctcgactcagtgcttcgattccaagtccgccacttccggcaaataaatcgagaacaatatcgccatcaaaaaatggaccgataatcgaaaataaggattcttttactttatctgtcgttggtcttgtattgtttcctggaacagcttttaaagcgtgtccttttcgttctcctgcaatgactctcatgtttttgcacaacctttacttcaatgtcttttttactttatcataaataggtgcaaaaaaacagcaagactagttgaaatagtctcgccgttttgattaaatactgatttgcacatcttcgtttttatgttcgtacatcatttcttttttggattcgtattctgtttttaagaacggacggaaagacatttccacgcgtttcacataatgaaaacgagaaactttgttagagatatcttctacttcggccatatcacaatataataccgcatatttcaacttgcgcgatacataatgaacatttccaaatcgcttcaaagatctaacttgtttaagatgattcatccaaacgacgatagcttgtctatcattttccattgtttaagccccttctttttaggataagctttacgctgaacaaccgcagcctcccccgctgccacatccacctgtagaacaagcagattttgtttcaaaaaatggattaccggttggtactttgatattttctgaaactgcacttgcgagaagcaaactgatttcgtccaagagagattgtaaatccatctctgcccggcgaaaagttgccacattttgatccatatcgacttcgcgtttataagcacgagtctttctggttacttctttataatcaggatgataccggccgaaccgttgtacttcctcatattgttcttttattcgtataaactgacgaatatttttttgtgaattggcgtcatctagtaatacttgtctagtatacttataattctgtgcttcttcggagtctagaatcatgctagcaagctcatctgataaatcgagtagcgccatattttccattgtagcgagcaatctagccacctccatcttacttactttttcattataccatagaacgattatttaataataaaattttgcgtatagtacttctgataagttcccgcacccatataagtataagaaccatctagtaagttttctctatgtcctttagagttaagccaaccttcaacagctgcggcactgtctatatagttgtaagcgatgttttcgcccgctttagtatattttacattaccggcacttaatcgcttgcttaaatccccttgcgtcggtgaagtatgatcaaaataatcatttttcttcatatcgacactatgaccataggcgacttttgcgacttcctcatcccacgccacttcttctataccgtagcggtcgcgaatgacgtttgtaatttctaacacttgtttgctagaagcttggtcaatcgcattccaatcttcttgagataatttctcttcataaatttcgccttgataagataattcataaggtcgcatttttatgaaagctaatttattcaagtagcggacactaactaattttgacttaaatttatcaaaatttagttgcgcatacacgccacttccgatattaacaattggtcgagcatttaaatcttcttcggaaagttcaaatttataatagctatctttgtaattaaaagatatttctgattgtaaattcgcgtcagtaaatactttttctgtcgacattccgattgaataaggcataacatttaaatcttgtccgagcgcataaatagtttgaacgacattatttgtcactccaactaacatgtaactagttcctggttgactgtaaacgtaattatcataaccgtatgctgttttatcaacacgcaccgggtcgccaaattcttttttcaactcgcttacgtttttatttataaacctcgccaagctagaactatcttgcacttgtttcggattttcatttgttgtttttttatcatcaggaaaatcggattttgtagcagtatcttcggccgtatttttttcaactgatttactaaaaaaaagatctgtgttatatccaatgaacaggcaaatgattaatagcacagctactcgcataataaacttcacattttgccctcctcggcagtatttggtttatcttgatgtaactttcattttaccaattctagtatcatttgaaaagctttaaaaaccataaaaaaacaattacgaaaatccgcgacaaaatgcggttctccgtaattgcagttatttttataagaaaatcgaaataacgaccatcgcaacaaataaaattgtcatgtagtttagcgagtaaacaaacatccattttgcccatttgatgctgtcgtccattttaaatccgtaaatgcttagtgcaagccaaccaatattaagtaaggttgctaaaataacatatacaagccctaaatcaaacataaagaatggcaatacggttaataaaatcacccagaaaaacatgctttttttcgtgcgttcaatcccttttacaacaggtaacattgggattccagccgcagcatattcttctttccgtttaatagcaattgcataaaaatgcggtggttgccagcaaaacatcacaagaaatagcataattggcacaatactaaatgatggttcaactgcaaaccaaccaattagtggtggtacagctcctgaaaaactaccaattacggtattactaactaattttcttttcgcataaagtgaataaacgactacatacaaaaagaccccaataacaccaagaacccctgcttgccaagtcgtcataaataacataattgttccgacgacacctagcacaagtgcaaccattaatgcacgtttaccagaaattttcccggtcatcgttggtctgtttttcgttctttccataattccgtcaatatcacggtcaatgacattgttaaaagcgcccgaagcagcgacaataagtgccgaaccgacgatagtgaaaaatattacatctacattttgaataaaagaaattccatttaactgaaaggctagccacatacctgtaaaagcagtaatcgtattcgaattaacgattccgattttcacaagctcggtaaaatcacggacagtaaatctactcgaagttaactccccagtcttttctatctgattcaatttttctccccctaacacttgctgatataaaccagtgattgcgaactgatacatatcttatacccttattatgtgaaaaatacgcaccctttgtcaataaatcggctttagtcttgtacgctttacttctttaaataaacacgctacaattagtttgatgtgtactcatgaacttatacatataaacaaattttagtaaaatctcacacgcatctaaaggagagattggtagataatgaaaaaattcttaaaagtttggtccgtactaacgattatttgtatgacagtcgttgtgtttggcggggcgctggtgacgaaaactggttcagcagatggttgtggtaatagctggccactttgtaatggacaattagttcgtttaacagatgttacccctgaaaaactcattgaattcatgcaccgaatgacaacgggaatcagttcgatttttgttattgtattagcgatttgtgcttggatttatatgaaaaatcgtcgtgaaacaaaaccgcttgcaattatcgctgtgttatttttaattattcaagcgttaatgggaatggcagcagttgtatggggacaaaatccgtacatcatggcgctccactttggtatttccatcatttgttatgcgtcgatcgtgttacttgccttaatgatttttgaggtggacaggaaatttgatgctagaaatcttgtcatggggacaaaattacgcattaatatatacgcgctaacgatttacacgtatttagccgtttatactggtgcacttgtacgccacgaaaaagcaagtatggctgttccggtttggccgtttgaaaatgggcactttattatgcctacttcagtacaagattatgttcagtatttccacagattagccgcatttattttaattgtttggttgctttatgtaacttggcttgtgttccgcgattatagaagataccgcgtgttaacttttagtatggtattgtcgcttgtgtttatcgctcttcaagcggttactggtgcgctttctgtttatacaggagtgaacttgtatatcgcactggcacatagcttaattattacaatgctcttcgccttactttgctacctatgcttactcgcatcaagaagtaaaagtaatcggctacgaattaaataaagaaaacagctgatgaccaaaaatcatcagctgtttttgttttatctacagttttcagccgtttttatgctaaaataagtgagagtataagtcaaacgaggtgaataacttggataaaacaaagagaaaaatgatttatgagatttttatgcttggtctcatactactttcccttgccctattgccgtacagaaacaactttacttttattttaaattggattatttgggtgatatttacattagattattttgttaggtttcaccgagcagatgataagtggcattatgtaaaaacgcatcctttccagctgattgcaattattcctttttacggtggtttcagagcggctcggattgtaagttttgtccatcttctaagtattactgcgatgggaagacgttatattatgccgatttatagctttttccgttccaatggattaagtcgatttttaatgatttttgtgttactcgtgattattattcctgttccaatggtttttattgaacctgaaataaacaactatcctgatgcactttggtgggcaatcgttacggcgaccactgtgggctatggcgatattgttccagtcacaccaattgggcgaattttggcatcgataatgatgctatttgggatagcgtttattgggatgataactagtactttaaccaactttttccgcgctaaaaaaacgtctacttctagcacacaacgcgcaagtaaaatcacccaattaattgccgatacgcctgatttaacgaaagaagaaattgcagtagttgagcaatttttaacactgagaaaaaatgaattaataaacgagaccaaaaaaagtgatagcgaatgacgctatcacttttttattagcttttcgacttgattccggtaacgttcggataaagcctgaacagctaaaatccgctcaaaatcttcttgtgtgccttttttatgcaatactttttcatgacaaaaggcaactgttactccgtgcgactcttgatgaatttgtttcatttcagccgattcactaatttcccctggggtaattgttcggcacagataacctgttaaacctgtttcgcgaattgctttatagagatttggtattccattaaatttctcaatcgtgctacacggatttcgtgcttctgttacttgtattacggtttctccaatttgaaatttatcaccgatttggaccgtactttctaacatattagtgacaatgagattctcaccaaacgcggttacttgtaattcttccccaaacatttcagcccattttgcgtaatgctcatatggataaatgcataccgttcgatccacaccaccgtgatatttcaaattatgaggtgcatcgttttcaaagccattcatagttaattgggcttttttaacgagctttttttcaattccagtcatcattcgtttattacttggaaggattaaatttttgggttttccaactgctaaatggatgattttcggtttcatctgtttactcctttgatgttatttttttcggcttaagatagcaagaatgcttgtaattaatgcgagcacaccaatggcaagcgccgtccatagcaaaatggtattgtcattagactcgcttgtatccccagcagtattctcggctcctgcaaccatttctccgtgtgagccagttgtttgtttggatgagtctttcaaaattttcgttgttgcatgaggggtttcggaatcttctgcgccaacccactcgacaatagagccatcttcataatattggtaggcattccaagcaacttctccttcttcacttggatttttggcgataaaactaaaacgttggaattgacctttttcaatcccgctgccttccgtttgccatgtcactgtactgtttttcttatctactgtagtcgtccagccgggaactggttcatatgattcaaatgaaacacctttcgctacttttaaaacgattttctttgatgcagcgtctttttcagaaggtactttcatcgtataagtctcccaagaatcaacagtggactcactaggtaaaactgacacatgtgcacttgcctcaaatggaataataaaaactgctaataaaacgacgagcgaactaataatttttttcattgtttttcccctttactgtgtaatattggttgtaaatgtctgattaatatcggtaaaatctttcgttaggccatggaccgtaatttcccattttccagtttggttaatataaagtccttctgcaaaatattggttctcatttgcaagttttgcttggaaagtggctttttcatcggttttagtagattttgttgtgatagtcacttgttcgaaatctgttttggttgctccatctgcggaagtaaaagtgataataaattggttttgtccgactgtcgctggctctactcgtaaattgatttttgcattttcgccttttgctgcaattgtttcatcaaatgcttttggggcaggtggtggcggggtttgtacgtttgttaaaacacttgcgacgataagaatgatcgtcccaatgataagctcaattaaaatcgttttaaatggcaactttttgtttttgagtttgagatagatgtaatgtcctaaacctaataatgccattagtaaaaatagaccgattttgaaaagaagaattttgccgtagttggttgtaaataaattagacatttgaccaatgttcatcactgccataagtaagccactaacgagtattgaagctaccgcgatgattgctacaatggcaaatctgctccaaatttcacgcgcttttccggttttcggtaatacgaataatagtactaaaatgccgccaacccaaacacttgctgcaatcatatgaagcatatctgctgtgatacttactattttatcggcactggctgcagcgtgtccattctgagccttcgcaaaaatcaaataaccaattaatgcactctctgtcagaagcgcgaaccagctccattgtttatttttaaagaacatcatgatggtaaaaatggcaagtagcagccatacgataaattcactgatccaaatataccctgttttcgtagtcaagaaagcagctaacttactcggcccaaaactttcactgatggaaacgcccgttgtgatacttgtctgtacgaaaagttgcatgaagagagccacacctagaagtgctagcgctatccaagttacttttttcaaacgtccagaaattttttctgatatctgttcttttcgtggataaagtcctaacccaaaaacaagcacaccgataaacaacgaaaatcctatgtataaaatggctttttgaatcgaactaatttgcaagtccgctccacttgagggaacttccgattcttggaacgtcgctttcgtatcgcctaacttaaaagaaattatccccgtaaccgcatgtccatccgctgacacaacacgccatgaaacagaatagacatctgcttttaattcagccggtagagacgcttcaaccatatgattattctttttagaaacagaggttttgccggtttctacccgctttccacttgaatcttttacttctattaaaggaaaatccgcttcaatttcttcattaaaaacgagcgttactttttctggcgctgtttttatatgcgattgatcggctgggtttgaattttccaaataagcatgcgctgaaacatgctgaactggcacaattaatatgtataagacgattaaaataaaactgatccttttaaataatttcatttgctgctcctttttcgaacgaacggttttactctttttaacttatcacgtgcaagaattgaatggaaataattggctcactcgctattgcaaaagatatagcgattatggcatagtgaaagaaaaggaaaagggggattttatctatgcttcgttatattgaattattttttatgtttgcttttgttacactcatcacgatgtggcttcaagcactcttagctaaatggaaaccaaatattctgggctctttctggcttcgaacacttacttttattattattggttatgctttaatggccccgacactatacatcggcagtttattactaaaataagttcagttgctttcacatcgcagttagatgttttatactgagatgtgggaggtgaattttatgaaaaaaatgttagttgaatttagagacttcgcgttaaaagggaatgtactagatcttgcggtggccgttgttattggggctgcttttggaaaaatcgtttcatctttagtgaataacatcatcatgccattcgttggtgtactcctcggtggtcttgatttctcagatttaagcttcaaagttggaaaatcagtcattcaatatggtgcatttattcaatccatcgtggactttgtcatcatcgcttttgccatttttatttttgtcaaagtacttactagttttatcaagaaaaaagaacaaccaaccgaagagacaccagtacctccaacagaagaatacttaaaagaaattcgcgatttattaaaagaacaacaaaaataagcacataaaaaaacaggaacctaagtcattatttctgactaaaggttcctgtttttttattgttgttgtttctttaattgtaccgctaagaacatttccaccacagcgactactaaaaagataatttgtaaaataaatacataaccgataatgattatttggacaaccatccaaactgcgagtacagccgctgctgcaaacatgacttcttttgttcgtggtaatttttttagtaaataaattagtgctgctaaatggaataacccaacaaatatgaataaaaatatgcctgggattaaataatcgacaaacggtgaaccatcaagcaatccggtcgaaagtgataaaagactaccactaggcttaaaaaccatcgataatcccccataaattgctccaaatgctgtaaaaccaactattaaaatactacttatacgtgtccagttcatggcgttctcctagtcgtttttctagtagtataccacgaaaattatcattctgctgcttttcttcgtattatttttttgattaaatcgatcagtacgaaaaccgcaattccgcatgcgacaactgttgtaagataccaagccggcccagattccgcgcgtactccaagccaataagtcaccgttttcggattaaaaaatgcaaagcaaatcgcacaaaatgcaataattcgaccaataatggaattttctctcatagcaagtgcatctccttttcttttattataacaatggttaggagagaactgattactttttaggtcccaaaattgtatgccccgtgacaagttttggtttgttgttataaaaatgtggcagctgacttctatttaatacaaaaaaagacccctgaaaaaattcagagatctttttattgttcggttgatatgaattacatcataccgcccatgccgcccattcccatatctgggcctgctgctgggccgttttcatctggttgatctgctacaacagcttcggtagttaatagaagagcagcaacagatgaagcgttttgtaatgcggaacgagtaacttttgttggatcaacaataccagcgtcaatcatgtttacccattcgccattagctgcgttgaaaccaacgccaactgcttcgtgtttcaagcgttctacgataacagaaccttcaagtccagcgttatgcgcgatctgacgaactggttcttctagggaacgaagcacgatgttgatacctgtttctacatcgccttctgcttctagtgctgctactttattgtaaatacttacaagggcagtaccaccaccagctacgataccttcttctactgctgcacgagtagagttaagggcatcttcaatacgtaatttacgttcttttagctctgtttcagttgcagcgccgactttaacaacagctactccacctgcaagttttgctaaacgttcttgtaatttttctctatcaaattcagaagtagtttcttccatttgcgcacggatttggtttacgcgagcgctgatttgtgtggaatcgcctgctccttctacgattgttgtatcatcttttgttacaactactttgttagctgttccaagttgatcaactgttgctgttttcagttctaaacctaggtcttctgtgattacttgtccaccagttaaaacagcaatatcttctagcattgctttacggcggtcaccgaaaccaggagctttcactgcaactacgttaaatgttccgcgaagtttgtttagtactagagttgcttgagcttccccttcaacatcttccgcgataattaacattggacgaccttgttgaacaacttgttctaaaactgataagatttcttggatgttgttgatttttttatctgtaattaaaatgtatggtttttcaaggactgcttccattttgtcggaatcagttaccatgtaaggactagtgtagccacggtcaaattgcataccttctactacgtctaattctgttgcaaagcctttggattcttcaatagtaataacaccatcgttaccaacacgttccattgcttctgcgattaatttaccaacttcttcatcaccagaagaaatggcagcaacttgagcgatagactctttgctttcaattggtttagagatagcttttaattcttcaatagcagttgctacggctttttcgataccacgacgaacgcctactggatttgctccagctgttacgtttttcaagccttcttgaatcattgcttgtgctaaaacggtagcagttgtagttccgtccccagcaacatcattggttttagaagcaacttcagatacaagttttgcgcccatgttttcaaatgggtcttctaattcgatttcttttgcaatcgttacaccatcatttgtaattaacggagaaccgaattttttttctaaaacaacattacgaccttttgggccaagcgttacttttactgcgtttgctagttggtcgacaccacgtaacatggcacgacgagcatcttcactaaatttaatatcttttgccattttatatttccctccgattatttctttttttattatttactaattgctaaaatatcactttcacgtaaaatcagatagtcagttccttcatacgtcacttctgttccagagtattttgcgaagataaccgtgtcaccttctgcaacttcaagtggttcttttgtgccgttatctagcacacgacctgaaccgactgcaacaattttccctgattgcggtttttctttggcagagtctggtaatacaatcccactcgctgttttttcctctgcttcaagtacttcaattacaacacgatctcctaatggttttaacaatgtaaatgacctcctctgatataattacatttttcattttagcactcgacacattagagtgctaatacagttattatgataccaaactaaataaaaattgcaagcaaaaacgtttaaaaattaaagaattcttatttgcggtaaagcgtgataactagtacaataagaagagctatttccgctatttttaagcatttagctggagcttgtttttagaagggatgcgtattttttgcctaaacgttatattactattgtattagtttatttattattactattttctgcatctattgggattcccgttgttcaacatattttacttagtatgacttcgatgtctacagcggatgctcaaacttatggggtaattacatggtcgattttttctaatttattatcactggccattattattccaatgctttatagaaaaccaaaagaaaataaaatcgaactcggtgaaaaaactgcaccatttctgagtattgtgtggattattggtggagtgattgggttatacgtagcacaatttatttgtagcattattctaacgctaatttctgggaatattggtgaatcggcaaacacagaattacttgttgatttaactagatctgcgcctattttcttgattttcatttcagttctcgggccaattttagaagagcttgtttttagaaaagtggtttttggtgggctgagtaatgtgatgaacattcatgtggctgcagttattagttcgctattctttgggctacttcacggggatatttcctttttacttacttattttgtcatcggtctaattctttgttttctttatacgaaaacgaaacgaattgctgtttcgatgggcgcacatattttaatgaataccattgttttgctcgtgagtcttggaatcattggaggataatatgaaaaattcattaataaagcaaagttttctttattttgcgcttggtcttgtatttgtctattttgttattgttcgagtggctgaatatggttatgatcttgttgcctatatacttatactcatgatgttaattgattttggtattggtattggccttattatcactgggcttaaaagacgtaaaaaaaacctgtagaaagtaagtgttgcttaccttctacaggtttttttattctgttttcgctggatagttttccaggaaatagattaacgtttgtaattccgttgtaagatcgatatggtgcacacgaacttgttttggaacgctaatacgagctggcgtaaagtttagaatacctttaacatctgcttcaattaaacgatctacagttacttgtgcttcatcagctggaactgtcagaataactacttccacaccattttcacgaacaatttcttccatatcatttaagtgataaattggaatgtcttgttgaacactaccaactttcgctgggtctacatcaaatgccgcaacgattttgatattattgtttttcatgaaattataatgtaataatgctgtacctaggttacctacaccgattagtgcaacatttgtctgtttgtcctgactaagtgttttactgaaaaagtcgagtatgtaagaaacgttatacccgtatcctttcttacctaatgcgccaaagtacgaaaaatcacgtcgaatagtcgctgaatcaactttcaccgcttcacttaattccgcagatgatactcgttccttacctgattcatctaggtatttcaagtaacgatgatataatggtaagcgttttgctgtcgcttgtggaatttttgttgtttcctccatcatgccttctgtcccttcttcttttaaattttttctgaagttgaagcttttgtgaactgtacttcctttcacatgcttgcttatatactataaacatttcacaaggaatgcacaaactttttgctcatgattttcaagcaatagtttgtcccgcaaaatatctagtgttttccttcttttccattctacgctaaaatcacaaataatgcgagtgttttcacaatctatcttatacgtgaagcccttcttctctcattgcgattacttggcttttaagataaactagtaaggagaacgttcgaggagagagattatgatattattacaagttcagcaaatttctaaattcttcggtgcagaagttattttagataatattaaattagaagtaaaaacaggcgaccgaattgccttagttggccgaaatggcgctggtaaatctactttacttaaaattatcgctggaaaaatgagttatgacggcggaacaatttctaaacctaaaagtgtcgaaattggctatttggctcaaaatactggccttgaatccacgaaaacaatctgggatgaaatgttaagtgtttttgattcacttagaaaaatggaagcagatttacgcaaaatggagcttcgtcttggggaacctgagctttataataatccggaaaaatatcaagcattgatgaccgattacgataccttgcaacacacttttaaagaagttggtgggtatacgtatgaagcagaaatccgttccgttttaaacggtttacgcttttatccagaagattatgaagtagaaatcgcctcactcagtggtgggcaaaaaacaaggcttgcgctggctaagttattactcgcgaaacaggatattcttgttctcgatgaaccgacaaaccatttagacattgaaacactagcatggttagaaacctatttgcaaaactatcatggttctttacttatcgtttctcatgaccgctatttcctagataaagtcgttaaccaagtatacgaaattagccgcacaagaattgatcactacaaaggaaattacagttcatttgttagtcaaaaacaagctaaacttgaacaaatgtggaaagaattcgataaacaacaaaaacaaatttccaagctagaagattttgtcgctagaaatatcgttcgcgcttctactactaagcgagctcaaagcagaagaaaacaattagaaaaaatggatgtactcgcccgacctcaaggcgacgaaaaatcggctcattttggcttccaatttgaaaagcaaactggtaaagatgttttaatggtagataaattaagtattggttacgccaaagacaagcgcatcgcttccaatctaacattcgaaatgaaacgtcaagatagtctagcgctcgttggtccaaacggaatcggtaaatctacccttcttaaaacacttattcgtgatattccagctcttagcggtgaatttcattttggagcaggtgtcaaaatcggttactatgaccaagaacaagctaaactaacatccaacaaaaccgttttaatggaactttgggatgattatccagaattaaatgaagtgaacgttcgaacaacactgggtaatttcttattttcagatgatgacgtcctaaaaaacgttcaatcccttagtggtggtgaaaaagctagactcgctcttgccaaacttactttacttgaagccaatgtgctaattcttgatgaacctaccaaccatttagacattgaaagtaaagaagttttagaagctgctttgattgattttgaaggaacgattctatttgtttctcatgaccgttactttattaatcgcatcgcttctaaagtagtagaactagctccagaaaaagcgaccgttttccttggcgattatgattattatcaggaaaaaatcgccgaagcaaaagaactagcgcgccttgatgcagaagatcgtcgtaaaaaaggggaacctgtcgaagcaactgcctcggttagaaaactaaattatcaagaagaaaaagaacaacaaaaactacttcgtcaaagaaaacgcaaactagaagaagtagaaaagtctatggaagaaacagataaaaaaatcgccgaactagaacttcaattaaccaaaccggaaatttttcaagaccatgagaaagcttttgaaattacgcaggaacttgatgtggtaaaagcacgtggtgaaaaattgatggaggaatgggaaaaagtaagcgaagaactagaatctatgtaatctacataaaaaaaggagctaacaatgaaaaagattttaattatttctggttcaattatcgttgggttacttgtaattattagtatttgcgcaagtttttacttatatagctatgcgctatctcgtgataattcaagtatgaatgataaaccgactgccgatcaaactacaaaaacagccaaacttgcgaagaaaaatcgccaagaaaatatcgcttggatggagcagcaacgtctaacaaaatggacagaaacctcagcagatggcttgaaactagtcgctaattatttagaagcaccctcaccttccaatacaaccattattttggcacatggttatcgagggaaaagcggcaaagtcgaaatggctggtctagcaaggatgtataatcaaaaattcggctataatgtattaatgcctgacgcaagagcacacggcgaaagtgaagggaaaaatataggctttggttggccagaacgtaaagattatgttcagtggacaaaccaagtactcgataaaaatggcgatgatacagaaattgtccttcatggtgtttccatggggagttccaccgtcctcatgacaagtgccgaaaagctgccgaaacaagtaaaaagtattatcgcggattgtggctatacttccatggacgccgaactagcttatcaattaaaagcaatgtttcatttaccgaaattcccaatcattccaatggctagtcttatcaataaagtaaaagaaggtttctttttcagtgaagcaagtgcgattaatgccgtagctgaaactgatttacctattttctatattcacggtgattcagatgcatttgtccctacttctatggtagaagaactatatgacgccaccaaaagctacaaggaaaaatgggttgtaaaaggcgctgaacatggtcaagcattcactgttgagccagaaacttacgaagaaaaagtacgacaatttttaactaaaacaatgtaaaaaaagactgcaagcaaagtgagaaattactttgcttgcagtcccgggcatgcgaaatttaactccgcatgcttttttaaatgtcttccagcaataaacctggatttgcattcatatcataattgcttcgttttccttgtaagaaactcactgtccctgcagcggcaatcatagccgcattatcaccacataacgataacggcggaataatcagctcggtatccggaagttctagttttacttcttgaataagtcgctctcttaaaccttgatttgccgccactccaccagcaagaagcaattgtttcacgccatgttgtttagctgcgcgaatcgtcttacttactaaaacatcgactacactagcttgaaaactagctgccatatcattaggatttggttcttccccgcgctgtcttaaattatgcaacgtattaataaaagaagacttcaatccgctaaaactaaagtcaaacgaaccatcatccatcatcgcccgcggaaaatggaacgtgtcttcaccatcttttgcaagtttatcaatttgaacaccacctggataagctaaaccaagtgtacgcgccactttatcgtatgcttcgccggccgcatcatctcttgtttccccgataatttcaaattcattatctgctttcattaaaacaagttccgtatgcccaccactgacaactaacgataaaagcggaaattgaaattctgtttcaaagcgattcgcataaatatgtccagcaatatgatgcacaccaactaaaggcaaattatgcataaaagcaagtgtttttgcagcattgacgccaattagaagtgcaccgactaaaccaggtccttcagttaccgccaccccgtctaaatcgtccatcgttacattcgcttgttttaaagcttcttcaatcacaagcgtaatttgttccacatgatgacgagatgcaatttctggaaccacaccaccgaatcgcttatgactttcaatttgcgaagccacaacgctagatactatttcacaaccatttttcacaacagaagcagctgtttcatcacagctcgattctatcccaagaattaatgtattttttttcataagtccacccacatcactagcgcatcttctttcgtatccggataatagtttttccgaatggcgccgtcttgaaatcctaatttcttgtaaagcccttgtgctacatcgtttgaaacgcgaacttctaatgtcatccgaacaacaccgcgctcttttgcaacacgaatcatttcccgtaaaagtgcctcgccgtagtgattaccttgaaaatcgggatgaatcgcaatattcgtaatgtgcccttcatctagcaccagccatacacccgcgtacccgacaacttgatccttataagtcgcaagtaaatagtaggcatattgattaataataaattcatttcgaaaagcggcttctgtccaaggtactgtaaatgcagcattttctacattcataatactttttaaatccgcaacagttgcctctcgaaatactaaggccgcgtccaaactcactcagaacccctcgattccaaccatttgctttccgcttctgccagttttaaataatctggaacaaaattgtctgctgggtcaccgtccaagttttccgccagttttacaagcgagctggcccgcgcataagtataatcagcttgaccaaataccgctcgttcccctaaaacttccgtcacagtaagacgaatttgttccgttaacgtgccaacaaataaaatcgcttccttctccgccgttaattgttcaagtaaatcagtaagtgcgatatggctatccgctacaacgtttttcattacgccgtcacttgcacgataaacacccgcatacacattcatacgacgagcatccatcaaagcaacgacttttccggggaagtataaaccattttctgctaaaagtgctaaggaagaaatcccgacaattggaattccagcatcccacgccattgttttcgcaacggttacaccaatccgaagtcctgtataagaaccgggacctttagcaacagcgattttttctatatcagttggttttacggcacattcttccattaaagcagcaagcgctggaagtaatcgcacgctatgattttttttcaaattcgtcgtatattcaccaagaacaacaccttcattaaaaagtgctatcgtcatcgtatctgaagacgtatccattccaagtatcatttcccaaaaacctccatcgccagttgctcatatcgttctccaactggcttcactatcatcttgcgcgtattctcatctatatgaaaaagcttaatttccaagtattcttccggtaaatcctcccgaacaaactgcgcccactcaaccacactcacacccgctccgtagaaatattcttccaaaccgagctcatcagttgaagcatcctccaagcggtatacatccatatgataaagtggcaagcgcccttttttatattcgcggataatcgtgaatgtcgggcttttaatcatttgcggaatcaaaagaccttcaccaagaccttttgtaaaagtagttttccccgcgccgagatcgccttcaagtaaaattacatctccggctgccaattgttcaccaagttgttttgcgagaagcctagtctctacctcacttgtcattattaattcgaattccattacctcacccgtccatcattttctctacatatcataccacaaagccgcgccaaaataaaaatcaaaaaaacgcaacgacctaagccgctgcgtctttcggatgaattaataaccagttccagttaaatccattccaccgtacattttcatggtaacttcagtaataattttatttaattcttcgctcgatataagttggtctttggttgggaaatctgctattggaacaaatttctccgcttttgttttcacagtaaaactaattgattgctctgcattagcatcggatttatcatcgattttggttttaagagtgattgcatcaaatgaattgtctttgccaggttttacagaaactttaatgtgaatgctcgtgtctttattgtcttttaaagatttagctgcgtcttttatgcttgtttgcatttctgtataagtcgtatcaaaatctgttaccgcttctgaaccttgactttctacaataactttaaagtctgcttttactttttcatcgtccatcatttttgctacttgattcatcatattagcaaggtcggcgtttgtaagtgtgattgtaagtgtgccatcatccgcttctttaaaacgatctttttctaaaccactgaaataactatcaattaatttagtcgtttttttatttaaatctttggaagctgcttccatttcttttgtgttagcagcagtcttagcttctgatttgcctgttaatgaactggttaattcttccgtgctaagatatttgttttttaaatctggatattcggtattaatttgtgaccacatgccaccagttgattggtctaaataacttagtaatgaagcatctggctgaacaatagttttaagtggaataaagacattacctgttttgctgtctaataagaagtccaaattaatggaaactggaagtaaattattcgtggaagttaagtttaatttagtttctgatttttttgctgtcttatctgttgaagttgtcattgaaagcttaatatcttttaaaatccccatcgtttgagcgctggaatcagcactcgcaacatctatatcggttacggcaaaagaagttgtatatgtagattgatccggtacattagttgcatttttcatggtttgaacaaatttttcttgcggtgttttcgctgctgaatttccaccacaagcactgattactaacgctaaagctaacaaaattgaaaataatatcccttttttcatagttctccccctgtatcgttaatacatttaaactaacacaatttaagtacagaaaacaaggagaattatagattattcactagttagtcacaattaacttaacttttcacttagttaattaaaaaacgccccctaaaaagggaacgttttattttggtgttacttttaatgaagttgcattttcagaaattttccctggtgccggtgaagttacatttgtgccttgtgggaatgtagctttaatcgtatcaccatctttaatatccgaaagtttcatcgtttttccagtggtagcgtttgttaccgccgtattgctattaaccgttacaattagttcgctcgcataattatttttttcgccgctccatgttaacgtgccatttacagttaattgtttattattttctaataaactagcatctgtcactgttccatcaaggactaaagcaggaactacttcctgattacagcctgccaaaaatattacgactagtaaaaccgaccagattaccttcttaaaacctgtcatctcttgttctcgtcctctctgaagcttttcgttctttctagcatagcatcttgcgtaaatacaggcaatcgttttcttattttcttaaacaattcttatacaccaagcatgattccgataaaagctgcgattaaaccacataaataagtcaaaccaacatatgaaaataacacctgaaaatttgccttccactttaattccatactctctactttaaaagtcgaaaatgtcgtgtatccgcccataaaacccgtgcctaaaaaaagctgccacattggcccaagcgcagtagaaacaagaaatcctagtaaaaatgatcctgtgatatttataaaaaaagtcgcataaggaaaatccgttttccatttacttttgacaaatatagaaataccataacgcaacatcgcaccaaggcttgcaccaaaaccgacaagcaagaaattaatcaacatgatgcgcacctcgcctcaagagcttattactaaatcttctaccaaacttcaccatcacaaggccgccaattaagctcaccaaaatataactaatagctaacaccacttcaccttgttgcaataattcaatcgtatccacactaaatgccgaaaaagtcgtgaatgcgccaataaacccagtcccaattccgtttaaaagcaccaatgaaatacgcgatttttccgccaaaaaaggcattatgaaagctaataaaaaacaacctattagattaactgctaaagtcgcagaaggaaaatctccgccgccaagccataaattcatcgcataccggcacattccgcctaacgcaccaaaaatccccacatataaaaaatacatctttaaaaaccccacttcacaaaaaaactaccctgaaatatttacatttcgggcagtcgcctttgtcctatttcttctatactataacgcaaaacattccaattattcaactcactggaagtcgaaggatggtcttcattttttccggatttgcttttcgcggatcactcaaatagatttcatgatgtttccgaatagctccggtgtcgttccgaagcccttctgtttccataaattgatgcatttccgccacagtatgcacttcctcgctgaatggccccacatgcatcatttgcacacattccccttcctcaaaacgaaccaatttcacgcgactcgtatcaacgtcaggctttttcttccttgcaacctctttcgcccactccaacacttcttcggtaacaaagtccggttgtctaagaatcgatgtccaaagccacgcatctctgtcctttaaatcaaatttcccctcagaccaccaaaaaccttccagcggcggtacaacaaaatccgagtaaccatccagacgcgtctcgcccatcttgctcattttaatcgtgtacgcaatcgcataaagagactgcaccgccttttggtactcttcaccatccgggtcacctttcccatccaccatcaaaaaattcatctcaggaacaaaaatccgctctggttttcttttaggcgcatagaatttcttttcctcttttttaaaatcaattttcttttcagtcatttgaattcctccttgttcatccagtctggcatcagcttctgaaaattatcatgactagctgccgtctttgctgcgtaattcattaacttattaaaattacgagattcattttttgccgcccaattaacggccgaagtaatatgcatcgccgtgtaaagcgcataaagattccaaaaatccgtaacttcttctttatcaatatagcctaaaatatttcctcgcgcaaaaggtatactgacctctgttgtaaaaaagccgattttagctaaatcaaataaaggatccccgaactctagccgattaaaatcaattagccccgcaaactttttgttctttaaaataatattcgctggatgaaaatctccatgttgtaaacaaaccggtctattttttaatctagctatattctcataaacaaactgttcggtttctgttaaaaaagaagctgttatttctaattcttttaattcctccacttttcgtttaaatttagccgtttgaaaatccaaccagttcatttttggtatatctagcggtattttatgaacttctcgtaaaatttcccctgctgaaaaaccagccttaaactgttcggaatgtgataatctaaacatgccattttccgcatcttcaccgcgcacataaccaataatcatatagccttctccgccggtacagccaaaatcatatgctcgtggaacaaatggagtttgagaacctaacgcttggattatttcaaattcttgctttcgtgtttggagtaactcttttggaaaaacacgtacaagataggtttcatccacctgatatttcttatcgatagaaaaacccttttttatttctgaaaccactttcgcattacgcaacattttcaattgggtcacatccataattagctctccctccaataaattcgctattctccattatacaagaatacgcttacttttttccaattatctgtgcagaatttattgacaaaataatagaatcaatattataattagttttgctacgcatacgcggtcgtggcggaatcggcagacgcgctaggttgagggcctagtgaggtaaaactcgtggaggttcaagtcctctcggccgcatagagaactacaagtaggtttcgtaattgttcatacagttacgaaaccttttttgatagaacaaattacactccaacgaaaaaaggaaaaccacgttaattactgaactggtcttccttttttatactaagctaaaatattatatgccattttatatttcgttgagtcagcgaagtgcttacttgcgtgtttttttacgcgttcaattaatgctggatcattggattcatcaatttttttaagcaagtctaacattttcttttcatagctagattgcttgttttgatggtacagcagtaatgtttccgtataggttacaaaaaaattgatttccattacttgctcagttactttgttaataatagccagtaaattacttgcttctagcacagacccttgttcagcaaaaataaccatcagttctgtaattacaaggtagtcattgttattaaaacctatctcggaagcctcatgcgccattaattcctcgtataaacaaactatcttctcatcaaacaactcatgattaccttcaactctttctatttctgccagcttaaagcgaacaagaaaagaatacattgttttagcttctggatacatgttaaaaaatactagcacttcttcaaatttccgctttgcttcagtcataaagccaatttgaaagtttatataaccatacaaatataaaatggccgtgattctttcttggtctttgctcgggaatctcttaattaagttccaggcacattcaatgtgttttaaagcaggttcatagttatttagacatatgtaattaatacaaagccccacttgaaaaaccacttgaaacgcagctttatcagttaaatcaatgcttttttcccagtactccactgccaattgatagtcgcaagtagcatgagaatgtttcacagcttgcccatagtaataataactaagcaaatccggtgggaatgactccactacacgcttttcattactattcaaatactttctttctatttctctagctttagaaaattcccatgttttatagtaaaaacctgcttgaagccagtaaaaactaagttctataacaggagattcacacagtaaatcgacattcgcagctatttgatcaagtctatctcccgcttcttttgtatttgaaaaaacaagtaaatcaaatatctgcttgagttcttgtaataattctttatttaaatcttcattacctattaaaagagcttcttccggtatttccagacgtttcgctatatgcattaacgtttcaaaagaagccactttcacaccattttctatattagctaaataagggacggaaatgattcctttagccgcctcttttaaagtaagttgttttattttacggatatttctaattcgtaaaccgattaaatccatgatgtcaccgccattacttagaaaacttttcttttaattatatacatttatttttagaaaacaaataccttatttaatagttttagcttcttttcataacgaatgttttttcggttataattatccagtcttacacaaggcttaaaatcagtactagacttgatttcaagcatctttacacgcttcactaatttgccatatttaatgtttttctttactttcgccattagctttttacaccaatggcaaagtaaagacattaaaaaattccttgaatcgctattattttattttgcattttctgtaaaattatccctcatacatttccctacagagtttccattgctcccacatgcaactataaaacagcaaagtaaaacaggattcctaaaacactcaggagtccataaaatagtaactattcattccctttttaaagcattcctacgtaaacggaaacgtagaacaatattttaccatttaaatcgccatactgaggaaaaaggaaacaaatggaaatatactctttttaatcttatttttttgccaaatcatcctaaaaagacgaagatactagatctccgtctttgttttatttaaataagatatgtttcttcttcatgtaaaatacaatcgatatagctacaatcatttctgaaattggaattgctaaccaaacacctggaatgccaataattggtggcaaaataagcaagaaaatcaccatgaaaataatttctcgtgaaatcgtaatccatgttgccattttgactttatcagaagtttggaagtaagtcatcataacaaagttaaagcccataaataagtaagctgaatagaataacttaattccgttacttgcaagttctcgaatttctgcactaaagtttccgaacatcgaaacgagcagattagaaccaaataacccaactaataagaaagcaaccccggtaccaaatgctacgacaatcgcaattttcaatgtttcaatttctttttctcttgcccttgcaccgcggtaataactaataagtggctgaatcgctgaacccataccaaggaacaacattaaaatcacactatgggtataatttaaaactgagaatgctgcaactcctgcagtaccagcaatggctgcgatggaaatattatatccgaaagtaaataccgacacgccaacttctgctaaaaaacttggcaagccgatgcccagtgtttttttgaaaaaagctttattccaattcacttttacaaatttcaagcgactggattttttaaagaaatgggtagttaggataagcacaccgataataattgcaatcatcgtagcaagcgcagatccggttacgccccattcaaatacaaataagaataaataattcaaaataacattactgattgctgtaacaataagggcaatcattgataaattcggatcaccgtcattacgaacaaaaatacttaaaatattttcaagtgtaagtgcaaacccgaaaataagtagtatattcatatattccagtacataaccaatcgtttcatcattcgcacctaaaaaatacgctagtggtactttaaaaataaaagcgaggattgcaataaccaccgtaatcgaaacaactgctaaaattgcattcgtaaatattgattgcgctttaggaacatttttttctccaatagcaaacgaaaactgggtcgcggcaccaatcccaatccaaatcgaaatggctgtaaaaatcgtaaatacgggtacagcaatatttatccctgcaagcgccactccgccgagcttatgcccaacaaaaattccatcaattacaatattcaaagacattaataacattccgaccaaggaaggaactaaatatctaaaataaatctttttaactgaatctgtttctaatatttctatattctttgccatgttacacctctaaattaagcttttagcgtaattcctctccagaaaatttgccataaagctgtgattttcttttttgttcgttcggggtcgttcacataaacaatgtccacgataaccgcgtcaagaattcccatgtacgcttctttcatcgtttcgacatcttgcattggaatcaacttttgttcaatccaatcgctaaataaatcagtgaaatcttgttccatttgcaaaatattctcggtaatatctgcctgaacaatatcatacaaatgtttcggtggataaaacccgtatcgcaaccaaaattggtaagcctcatcggtatcatataattccttcacaccaaaaagtaaactagataacactaagtcgggcctagataaatcactatctcgaagtttcgctcggtaataatcaatttccgtagatttcgcgtccttcataatagataaaaacaaatcatccttatctttaaaatgagaatagatggattgtttctttagccctacaactcctgcaatatcagcaagggatgtcccttcaaaaccattatttgcaaaaagtgtcagtgctgcttgctttatttcttcttttctcatcttttcacccctttcaaaaaactgacgaccgttcgtaagtaattctctcatgaataaaattctttgtcaataaaaaaatccactctcgtgaaagagtggattcaaagatttatttttcttctaaaaactcgctaatcaattcgtaagtctcatcagttgcttcagatgttgttgtcataaagccgtgcggaactttttcaaaacgtttcgcaaatacttctacaccagcatcttttaatttcttcgcatacgcttctccttgatctcttagtggatcaaattcagcagttgcgatgaatgttttaggaagaccagctaagtctttactacgaattggtgcaatcagaggatcatatttacggtcgcttgagttcgcaatatataatttaaagaatttgtctaaagattcttttgtaagtacatatccttccgcaaattcatccattgacggataaagcactgaagcatcacgactgaaaatatccgttgctggataaagtaaaatttgtgccgtaacatttggttttcctttggctttggcaatttgggtcactactgttgctaagtttccgcctacgctatcccctgcgacaataatatcggaggatttagcgcgtaaactagtacggtggttttgtacccaaagtaatgcagcataagcatcttccactgctgctgggaaaggattttctggtgctagtcggtagtcaactgtgacaacgcgagcacctgttgtttgtacaagttttcttgcaatcgcatcatgtgtttgcaaaccacctaacacaaatccgccaccatgataataaacgataatctcgaatggtccatcctcttttggcgtataaatccgaatcggaattttaccagctggaccgtcaatttttttattttcgacatcgcctatttcaatatctttagcagaaggcaaggcttttgtcgcaagtctcatatatttatatcgcgagtctacatctgacaatggtgaagtattttttacaaattcctgggaagcctcatctaaattctcaagtacctcgggatcatattcttttttcccaaccgcttttttgtaaataaagaaaacgattactaacggaagtagaataattcctgcaaaaccaatggcaatccattttattgcatttttcatattcgttcaactccttcaatataacttcaatatcaagtatagcagttttacgaacaggaaccaatttattactatttgaaatggctatttttcttgtgaaatgtatttttaatcataatgatgaatattttaaaataaaaaggttgatatatgagagtataggtgttaatataaatacaaatgtttgtatatttatgaataggggatgtttacaatgacgaaagaaaaaatcgtattagcttactctggtgggttagatacttctgttgcaattcagtggctagtggaatcaggttatgaagttatcgcatgttgtttagacgttggtgaagggaaaaatttggattttattaaagaaaaagcgattactgtcggtgcaagtgcatcttatacaattgatgccaaggaagaatttgccgaaaactttgctttaatcgcccttcaagctcatgcttattatgaaggaaaatatccacttatttctgctttaagtcgtcctttaatcgcgaaaaaattagtagaagtagctcgtcaagaaggtgcctctgctatcgctcatggttgtactggtaaaggaaatgaccaagttcggtttgaagtagcgatccacgcccttgctcctgatttaaaagtcgtttcccctgtccgggactggaaatggtctagagaagaagaaatcaattacgccaaagaacataacatccccgttccaattgatttagataatcctttctcgattgaccaaaacctttggggtagaagtaacgaatgtggtgtgcttgaaaacccatggacaacgccaccagaagcggcttacgacttaacagttagcttagaagatgcacctgacacggcggatattgtcgaaattacatttgatgccggtattcctatttctcttaatggcgaaaatatgagcctagcaaatttaattcttactttaaacgaaattgctggaaaacatggcgttggtagaattgaccatatcgaaaatcgtttagttggtattaaatcacgtgaagtatacgaatgtcccgccgcagtcactttgattactgcacataaagaattagaagatttaacttttgttcgtgaagtggcacatttcaaacctattattgaacaaaaaatcagcgaaacaatttacaatggcttatggttttcgcctttaacagaagcattaattgccttcttaaaatccacgcaaaaattcgtgaacggtacgattcgcgtaaaactatttaaaggtcatgccatcgtcgaaggaagaaaatcaccgaattcgctttatgatgaaaacttagcgacttatacttcttccgatacattcgaccaagatgcagctgttggtttcatcaagctatttggactaccaacgaaagtgagcgcagaagtcaattcaaaagttacaataacaactgaggtgtaaaaaatggaaaaactatggggcggacgttttcaagggaaaagtgaagcatggattgatgactttggtgcttcgatttcttttgatcaaaaaatggcaaaagaagacttggcgggaagcttggcacatgtcgcaatgctagcaaaatgtggtattatttctgattctgaggcgagtgaaattacagctgggctaaaaatcctccaagaaaaattagcgcttggggaactggaatttagtactgtaaacgaagatattcatttaaatatcgaaaaactgttacacgaggaaatcgggcctgtcgcgggaaaacttcatacggcgcgtagtcggaatgaccaagttgcaacagacatgcatttgtatttaaaagaagcagtcgcagaaattattcaatcgttaaaacatttgcgcgcggtgcttgtccaaaaagcggaggcgaacgtcgaaacgattatgcctggctatacacacttgcaacacgcccaacccatctcttttgcgcatcatttattagcttattttggtatgtttacacgtgatttagagcgtttagaagaaagcgtcaaacggattgatatttcgccacttgggtctgcggcgctcgctggaacgacttttccaattgatcgggcctatagcgctgaacttcttggtttttccgctgtttatgaaaatagcttagacggcgtgagcgatcgtgattttattatcgagtttcttagtaacagttctattttaatgatgcatttatcgcgtttttgtgaagaattgatactttggacgagccatgaatttcaatttgtggaattaacggacgctttttcaacaggaagttcgattatgccacaaaagaaaaatcctgatatggccgaattaattcgtgggaaaacgggtcgtgtttacggaaaccttttcggcatgttaacagttttaaaggggctgccgctcgcttataataaagatttacaagaagataaagaaggcatgtttgatacgcttgagacggttcatacaagcttagatatattcgcaggaatgattgaaacgatgaaggtcaatgcagatataatggaagaatcgacgcaaaaagatttttccaatgcgaccgaactagcggattatctcgcgaaaaaaggcgttccatttagagaagcgcatgagattgttgggaaattggtgcttgaatgtacgcaaaatgggatttatttgcaagacgtcgcatttagccactaccaagaaatccatccgcttattgaggaagacatttatactgttcttgcttcaaaaacagcggttcaaaagagaaattcatatggcggtacggggtttgatcaaatccacgttgcactcgccaatgcgaaaaaaacattataaagttggctggaatgcatgatgcgttccagctttttaattccagctgactttgtggtttgatttgtcagagcagtactttttttgttactataaaatagatgttacctttgtgctaacatggggaaatacatacttagactataaagggaagtgatgcaatgaaaaaattaacgaacgtcttttggggagctagtctattagttctcatagcagttttgtttggtgcttttttgccagaacaatttgaaactcttacaacaaatgtccaaagatttttaacaagtaatttcggttggtactacctttttgtagtcgcaatcattatcattttttgcatatttttaatattaagcccgattggctctattcgactcgggaaacctggcgagaaaccaggatatagtaataagtcatggttcgcaatgttgtttagtgccggtatgggaattggacttgttttctggggagctgctgaaccgctatcccattttgccgttcaagcccctggtggtgaagttggctctcaagctgcgatgaaagatgcgcttcgttattctttttttcattggggaatttccgcttggtccatttatgcaatagttgccttggcgctagcttactttaagtttcgaaaggatactcctggtctaataagcgccacactttatccgatattaggtaaacatgcgaaaggaccacttggacaattaatcgatattatcgctgttttcgctacggttatcggagtagcaaccacgcttggacttggagctcagcaaatcaatggcggtcttacatatttatttcatgtccctaacaactttacagtgcaactaatcatcattgtcattgtcactgttttatttttattatcagcaatgtctggcttagataaaggaattcagttattaagtaatgtgaatatttatgtcgctggcgtattacttattctaacgttaattctaggacctacgctttttattatgaataacttcactaattcgtttggtgattatttacagaacattatccaaatgagtttccaaactgcaccaaatgcgcctgatgctagaaaatggattgattcatggaccattttttactgggcatggtggctatcgtggtctccatttgtcggtatctttattgccagaatttcgcgcggtcggacgattcgtcaatttttattaggtgttatcgtgcttcctgcgttagttagcattttctggtttgcagtgtttggtggttcagcgatttttgtcgatcaatacaaagatacggccctttccactttagcgaccgaacaagtcctttttggggtatttgatcaatttccatttggcatcgtattatctattgttgcgatgattttaattgccgtgttcttcattacttctgccgattctgcgacctttgttttaggtatgcaaacgactggtggctctttaaacccaccaaactcggtaaaagtaacatgggggcttttacagtctggaatagcgagtgtacttctttatgcaggcggtctaacagcgctacaaaacgcatcaattattgccgcttttccattttcgatagtgattatcttaatgatagtttcgctgtttgtttctttaacaaaagaacaagaaaaactcggcctgtatgtccgaccgaaaaaatcacaacgttccaaactataataaaaagggatgaaaatctagttttagattttcatcccttttttcatccttttttctgctttgccgcgattatttcacgatagctacgtgtttttttaggatattttttccgaaagaaatgttgcgacactactgctaaaacaagtgatatggcagtaattggaatagaacttctaaaaataccgaccattagtaataaagcactggcaaataaggttgcattaaaaaggaatttttccattagttactcctccaaattataatttaattcgcggtcatgagctaattttttaatacctaaagcatcaaagaccatcgctttttctgcaatataagcattatattcaatccgttccaacatatcatatgctttatgcagggatgtttctaaaacaacaatgccgtgtttatttaataaactcgcactaggaacagctttttcaccaagttcgatgacatgtttacgtacgatttcagcaagttctggactagtcgctggtgcaaattcaagtgttggaattcgaccgattttttgcgttgcttctgttaaattcggaagttccatgccaagtgttgcaaataacatcgattcttttggatgagcatgaagaacacagccaatttttggattttctacatagcaggcacggtgcaagttgatttctcgagtaattcttccgtctccttctacgacttcattattgttatctactacaagaatttcatatggggaaagatcgcaaagttttgcttggctcatcagcgttggtgtcataataatatgctcattattcatgcgcacactcacattccctcccgcagcatttgtttcaaagcggtcaaacatcgtcttcactattttggctaaatcttcacgttctttttggtataacatattatctctcctccaattgtataatacttacttgattcttgagttttccagcggcttctaaatcaaagctcgaactgtcttgttgcatgactttactggctgaacaacctgtcgcaacttttaatgtttcagtaattggcatgttcatcgcaagtcctgcaataaatgccccgacaaacacgtcgccagccccagtatcatttcgttcctgcactttcggtggaataacttgatacaatttgccattatgtgcgcaaatggacccttttgctccaagtgaaacgaccaggtaagggatcttttcggctaaagtgcggatattttcttcgagtgaattcgttttttcgtctaaaatggcgattacttcatcttcatttggtttaatgaaatcgacgcccatttcgaccgctaaatttaaatattcacccgagttatcacatccgagaaaagcccctgttgctttgacagttcttagtagttctttaaaatcagataatgtataatgaggaggcggagatccagcaatcaccaccatatcctcttttttaacttttttagcgatttgttttaaaagattgtctttgttggtctgacttacggtaaaaccagcttcaggtatcatcgtgctgccattcgtgtcatcacttaagacgacgaagcattctcttgtcgaagttccagcttctacaaggaaatcatggttgatatgtttttcttttagaatggcatatagtttgtcgagattgtctgatcccgcaattccaagtgcttcatttttaataccgaatttggataacactcctgaaacatgaagcccctttcccccgcaatcaaattctgtttttatgactcgatttgtcttccttttttctaactccccacgaatgaaaagcaaccggtcaatagctggatttaatgttatcgtgtaaatcatctcatcactcctatttcttaagagctagctttttctagttcaattgttcgttttttcatcattttcacgtaaaatactagtaataatacccaaattgcgacaaaaataaatcctaaaatagtgaactgacttgcttctgcaaaaatataacggaacactggatattcaagcgtactccaagtaatttgttgtccagcttttagggaaatcgcgcctgtagaatgcgctaaatccgtgattgttcctgcgaaaaatgtagatacatacaagaagataggtgttgtaatcgttccaagaataatcatacgaatcaagttcccacctgtaacaatcagagccggcgcacacaaggaaatatttagaatcccagcgaacggtaatacgccatttcctggtagaataagcgcgaagataagtgtaactggtaccataagaacgattgccacccatacttcactacaccctgccaaaattggccaatctagcccaataaaaagttcacgatttttaaatttacgtttcataaattcagaaataccatcagataatggtgataaagcttgcataaatagtttcgcaaccattgggaaaagtgttaatgccgctgctgcttgcatggctaacatcaacgtttttgctacatcatatcctgctgcaatccctaaaagtccaccgataataaagcccattacatggttttctgcaaaaataccaattttatcttttaacgcgttggcatccatgtctttacgtagtgctgggattttcttcagtagccaatcaattggcattaagaaaatacagaaaatcatcataccgtgggaaactgttacacccggaatgccgtttaattcttggatttgacgttggttggcatcacatagaataagttcagtaacaatttgaattccggcaacgataaaagccaaataaacattttgcgttacaccaataataagtacagctgtcaaaattttaccccaaacattccataaatcgacgttcaaggtttttgttttgttgatgacaagcataatagcattaatccccagttgtagtgggaacattaggaaggcaaatggccatgcccaagctagtgtcgccattgaggtccatccaccatctaaaatgcttaaattaattcctgttcgttctgcaagaccttgtgctgcaggcgttaaagcttcaatcataaagccaataacgatattcatcccaaggaaagcaaccccgaggataatccccgcacttaccgcatctcttactttcattcgtacaataagcccaataataatcatcagtgctggaacaaaaacggcagctccaagattcaaaataaactgtataactgattgtaatgactccattttttcacgctccctgttttgtcttgtttattttaaggcgttaagtaatttttctgtttcttcgtccatgcccatgccagttaagaacgcaataccatttaatgttggaatatcaaattccttattcgctttagtaatcgccacatatacatcactcgttttaatatgttggtctaatgatttaatgtctactgcttctactgttgcgcgaactcctttttcttttaaaatacgttctactttagaggcaactgtttgacttgttgccactcctgatccacacgctacgataacttttttcactgtaatcactctccaaattgtttttttagaaaatcacataatgcgctgctatcatttatttcctttatttgttccacaaagtctgcttccataaatttttccatgatacttgaaagcagtggaacttgatctttgggatttttaattcctaacatgaaaattacttccacatcaatccatttctcacttgttcccatttgaataaaaggaattggtgtagaaagcttgtttacgagtacaaaaggccgttttacataaatcgtatcggtatgaggaattgcgattttgataccattcatctcaagtccagtaggaaaaataacttctcggtttgttactgcttctctaaaagtcgcctctacatactgctctttttctaaaatattgctagtacattcaaaaagttctgcctgactctcgtagcttgaatttatcagggttaactctttttgaaacaaatcatggtaatccacgtgacgctcaccccctttcaaggatttcaacgattttctttttgttagtagaagcgagaagttccgctaatttctctggttgtaagaaaatttcgttcaattttagtaataatggtatatgtttattttgttcggacggtgctagtgcgatcataattttaactgtttcatttgccggcgttcttgtgtccgctttcattatcatcaactgaatatcctgctttattacaccatttaccggcttggcgtgaggcaaataaatattcggtccgatcatcatctgctcatagttttgatagaatatttcttcacaagtcttaatatagcttgccgccactgtccctcgttctaacattggtgaaaatgctgcaaaaacaagttcttcccacttgagtggcgtttctaaaaaatgaatttgttctggggtaatctgcatcttttctggctcttttttctcagcaggttgctcttttttactaaaaaatgattctactttttcttgaactaaatggatattttcttcaggaatatcatcttttaacatagcgagcagttctttggtttttttatggctgtccatttcaatagctttatcaacttgttctctgaggatttgccgactatctttacttaaaatcgacggaataacaaaaatggtcgcgctgctttgaacgggcacagttgtaaaaacaaaatcaatatcacgtgccactgaatttaattgccgaaccgcataagctccttgaaaatcaatatttgggaacatcattttcaagttttctaagagtagtttggagatggatgtaccgcttttgcacagaacgacggcgcggaaaattggctgctctgtttcttcaatttgatacatccatccaagaacaatcatagaaagatacacgatttcctcctctgaccacttatgaccaacgagcttttcaaatggtttcgaggctttttctacaatgttaaatgttggagtatattctttaataaattgttttttaagtggattattgatttgaaaacctaaaatcgtccggtaaattgctggtctaacatgtaaaatcactttttctttaaactcatttttcttcatgatttcagttgcaaaatacatttcaagtaagccgatgaactcatcaactgcataggcgatttcttcactgtctgagaaatgaagtgccgactcgactaagttcgaagcaagtacttgtagcgataggtaaagcaaatcattttcacttaaaaagtcataaccccaaaacatttctttcattatcgggaactctcgggtatttttgatgtcatacatttcaattttaaaagtccatttcctattcgttactttggcccgcttgatgatgccgtggagaatatagggcaattcttccatttgctcatcggtgaatgtaatttggagcttactttcgactttttccagccgtttctttagtaaaaagacttcgcttacggtaatgagttttttttcatccagcacgaattttccgtatggggtttgaacgacttcgcgaataagttctgccagtaaattacgaatcagaaattccgaacccgaaaccgcataaccatcttttcgtgaataatcaagttgaatttcaaactcatgcaagctttctttaatactttttacatcggttaacatcgtgtttttacttacataaacataatctgcaagtgcgccgagtgacatgtaatgattatgaagcagtaatttaatcatgatgagtttgcgacgaatattcacctcataaaacgaaaatagctgttgttcttccgcagttaaaagccggtaacaagcttccctacatacatctgtaacaaaaatcatgtcatggtcaattaaaattggttctgactttagtagatggtttatttgtgtaatctgtgcgccaattgcttctttggatactttaaaattcttggaaacatttctaagattcacttgccgattcaagagcagataagtaattaattccttacaatcctgttccatctactttccctcccttatattaatagtaaatgataacccttacataaaaatgatgattcatcacaacttctcttttggcagaaagatttattgtgatgaatgatattttagggttactttctattatagattagaaggttttcaaggggaatatgaaaaagtgcgaatcagccttcaatcaagcttcatcgcacttttttctattaatatttgctttattgtttatgctacttgtcttgaatcgtcctgctcaagtcgggcatatgttacgcgaataaccgccccttttaccccgaataaaaccccgggcatcactagtaaatcgttcgctaaaaaaatatcaaactcacgaatggagcgaaattctaccggtaatttcacccataaatgaaagcccccttttggcctgatgaattctagttcgttcggtaaaatttcctctagcgccgcgatcaaataatctctacgcacttctaaaacttgatgtaattgctttaaatgttctctatatccagccgtatttaaaacgctattagctaatacttgcgggaaaatacttagtccaaaatccatctcttgtcttgcgagagctagtcgttcaatcactgccgccggtccaattagccacccaatccgtgtagttgaccccattattttagagagcgagccaatatataaaacattatctgaatctagttgttttaaaggaacggggatttcactatcaagtgctgccagttctgaaaacggatcatcctctacaatcggaatttgcaaatgagcgcaaactttcacgagttccttgcgccgttttaaactcattacaagtccagttggattttgaaaagttggattaacaaaaaccattttaactcgatgcttatgatataaatcgcgtaattcagaaataatcacaccatcatcatccattggcaaggcaaaaatccgcaagcccgcagattgaaataacgatagcgaataaaagtaagacggcgactcaatcgccacggcatcacccggttttaataaacattgtgtaattaaaaataacgcttgctgcgctcccgatgtaataaaaatttgttccgggcgtgcatttaaaccataggcatcctgcatttgcttttgaacagtttcacgtagcggtctgtagccagcttcgtcttccagttgttcttcagcaataaacgactgccacgaaagacttggcgtttccatcttaggagtcatttcaagtggaagctcccctgtcgaagcatcaatcacttgttccaaatcagcgcgttccattacacctgtttgcctaatataaggaacagctggtgtaaaaccaccttgcgttaaatagtggcgccaattcgttgactgccccgcaaaaagcccccacttttccgcattcactattgttccgctaccttgcttccggacgataacagcccgtgcagtaagctcatcaagtgcccgaacgactgtcgagcgattcacaccaaaaagttctgccaactgcctttccggaggcaatttctcttctggtaaaagttcgccgttcataatttttgtttctattaaatcaacaatttgtaaataaatcggtaaattagaatttccagtaagtttccacatctactacaccccttttaaaattggatggagaaaacaacatccaattggctgtttttacgaaatggcttttagcttatcataataatcaggtattttcaattaactttgatggaggttattagtatggagaaaaaagttggtacagaccgtgtaaaacgtggaatggcgcaaatgcaaaaaggcggcgtcattatggatgttgtaaatgctgaacaggcaaaaatcgctgaagaagctggtgcagtagcggttatggcacttgaacgtgttccttctgatattcgtgcagctggtggcgtcgctcgtatggctgatcctcgtattgtggaagaagtaatgaatgctgtttctatccctgttatggcaaaagctcgaattggtcatattacagaagcacgtgtcctcgaagcaatgggcgtcgactatattgatgaaagcgaagtattaacaccagccgatgatgaattccatttacttaaatcagacttcacagttcctttcgtatgtggttgccgtgatataggtgaagcgctccgccgtattggtgaaggtgctgccatgctccgtacaaaaggggaacccggaacaggaaatatcgtcgaagcagtccgtcatatgcgccaagtaaatggccaaatccgccaaattgcaagcatgacagatgatgaattaatggttgccgctaaaaatttcggtgctccatatgaacttgtaaaagaaattaaaacgctaggtaaacttccggtcgttaactttgccgctggtggtgttgcgactccagctgatgcagctttaatgatggaacttggagcagacggtgttttcgttggatcaggtattttcaaatccgataaccctgccaaatttgccagtgcgattgttcaagctactacctactatacagactatgaattaatcggaaaactgtccaaagagctaggttccccgatgaaaggaatcgaaatgtctcgtcttaatccagaagacagaatgcaagatcggagtttttaatatgaaaaaaattggtgtccttgcgcttcaaggtgcagttgatgaacatattcaaatgattgaatcagccggtgctcttgcttttaaagtaaagcattcaaatgatttagctgggcttgatggacttgttttaccaggtggcgaaagtacaacgatgcgcaagattatgaaacgttatgatttaatggaacctgttaaagcatttgccaaggaaggtaaagctatctttgggacttgtgcgggacttgtgcttttgtcaaaagaaattgaaggtggcgaagaaagccttggattacttgaggctacagcaattcgtaatggttttggccgtcagaaagaaagttttgaagctgaattaactgtcgaagtatttgatgattcgccttttgaagccgtatttattcgcgcgccttacttaattgaaccgagtgatgaagtgtccgtgctcgcaaccgttgaaaaccgaatcgtagctgctaaacaagccaacattttagtcaccgcattccatcctgaactaactaacgacaatcgcttgatgaagtacttcctcgaaaaaatggtataaaaaaagcagtagacaatttagtctactgcttttgcatattatttattcactgcttgcgctgctgtaattaacgttaagttataaacgtcatctgtattacaaccacgagataaatcattaactggtgcatttaagccttgtagaattggtccaactgcttcaaaattacctaaacgttgcgcaattttgtaaccaatgtttcctgcctctagacttgggaagataaatacatttgcatcccctttaataacggatcctggcgcttttttctccgcaacagttggaacaaatgccgcgtcaaattggaattcaccatcaagcgttaattcaggtgctttttcttttgcaagagctgttgcttctacgactttttctgtttcatcggattttgcagaaccttttgtagagaagcttagcattgcaacacgtggatcaatgccgaagatttccgctgtttctgcacttacaatcgcattttctgctaagtctgctgcaactggtgcaatattgatagctacatcactgaataagtaacgttcctcaccgcgaaccataatcattgcgccggcaactttacttacgcctggttttgttttaataatttgtagtgctggacgaacagtgtcaccagtagagtgagccgcgccacttacaagaccttctgcttttccagtatatacaagcattgttccaaaatagtttggatcaacgagcattttacgagcagcttcttccgttgctttccctttacgacgctctacaaatgcagccactaattcatcaaaaagtggatcagtcgcaggatcatgaatagtaatcccttcaacagaaacgccaatttcttttgcttttgcttcaatttcagctttgtttccaagtaaaattggtgttacgatattttccttttgcagacgtgcagctgctccgactatacgttcgtcagttccttctggcaatacaatgcgcacgtttttcccagtaacttgtcctttgatagtagtaaataattcactcatgtactattttcctccatttatataaatgttatagttaccattttactataaaaactaccaacttgatagaaaaaaagcgattaaaaacagctccagcacttatttccgtgtatcaatacagaggtaaaaaggcatgctattcagttagaagagcactgtcccattaggaaacttttttgctgttataccctactattttgctactttccgaacaaattcaagaaaatacttcatattaaattgcattcgtgataaaatgaacatagttgataatgattatcatgttcactacataacataaaaggaggtctacgagcttatgcagttaaatgaaactgctgtcggcgaaaaagttcgcatctcagagttaaaaatcgagaatgcgatgcttaaacgccgcttacttgcgcttggttgcgatgaaggttgtgatatttgtatcaaacaaaaaggactatttggtggtccatgcacttttgaaacaaaaggacaatatataagcattagacaatgtgatgcttgtgccattatggtggaacgcagatgagccaaaatacatattgcatactcggaaatccgaacactggtaaaacttctttatttaatgcactaacgggctcttatgaatatgtaggaaactggagcggagtaaccgttgaaaagaaagtcggtactttacgttctaaaacaggaaaattaattgatttacccggtatttatgacttaaatcctatctctcgtgatgaaacagttgtcactagatttttacttgaagaaaaattcgattgcatgttaaacattgtcgattcctcacaaattgaacgcaatttaaatttaactgttcaactgcttgagtacggcgcacctgttgtgatgggtcttaatatgatagatgtagctgctggacgcggcattcatttaaacatccaaaacttagcaaaaaaactacgtattccgattttgccagtagttgcgcgctccggaaaaggaaccgaggatattttatctactttatctgaaaagcacgtggcaccagcgattccgcttgttttacaatacggcgaaccagctgagaaagcaatcaaagaaattcaggctttaacaaaagaactgattcctgctaaacaatcgcgctggttagcaattcaatttctttccaaaaatgaagtaacggaagcatttttaacatctaattcggcgttcgaacagttgcaacaaatccgtgctgagttagaaagtgaactcaacggcaaactagaaaaccatttccaccaagtgcgcgcgagttatattcatgatatttgtttgacctcagtcgaatacacccgtaattcggatattccactatcagacaaactcgataaaatttttacacataaattattaggaattccgattttcttaggaattatgtggttgattttccaaataacctttacttgggttggcgccccgctctcagacatgcttgatggttttatcggcgggtcgctcacggactgggtgacatctttcttaacaactattggtgcgtctgggtttatcattgatttggtcgcggatggcatcatcgctggcgttggtggggttcttgtcttcgttcctcaaatcttagttattttcttctttatttccgtcttagaggattctggatatatggccagaatagcagttgtgatggaccgagtaatggaaattttcggcttaaatgggaaagcttttataccaatgattattggttttggttgtaacgtacccggaattatggctgccaggtcaattgaagaatccaaagagcggacactcacgattcttgtttcgccatttatgtcttgttcagcccgtcttcctgtttatgctctttttgtaggcgtgtttttcgagaaacatcaggcgctcgtagtactttcactttacgttatcggtattttaatggcactcattgtcactaaaatcctttcaaaaacaatacttaaaaaagataattccgtattcgtcgtcgaactaccgccctaccgcctaccatcgctcaaaactttatggcgcagcacgtgggaaaaaggaaaaggattcttgcgtaaagcgggaacattcatttttgcaggttcggttatcatttggttgctaaattacgccggtccatccggacttgatgttccaatgggcgaaagtttcttagcaatcatcggcggcatgctcgctccgctactcgttcctttaggctttggtacatggcaagcgggagccacccttattcctggttttctagcaaaagaagtagtcgtttctacaatggcgattatttatgcagttggagaaagttcgcttggcagcatcgttagcaccttctatacgccactttcggcttattgctttatgttgttcatcttgctttatattccgtgtttagcaacggttgcggcgattcgaaaagaaactagttcgtggaaatggaccgcattctctgtcgcttatccacttgttacagcttacgtgttagtatttcttgtttatcaaatcggcagtctattcgtttaagagaggatgattttcgtgagtattatcgttaatttattacttggcggagcaatttttggatatactatttacgcgattataaaatttgtaaaacgtagcaaagaaggaaaatgcggcggctgcgaactcgaaaaagcttgtaattgcgagtcagacgaacatacgaatttggatcatatatttaaatagcaaaaaagagccttgatgaaggctctttttttatttcgtctccggttttatcgtaaccgcaacaatttcatatggattccctaaccgcggaaaagctttttgatgaagactccccgcgccaagtccagcagaaattatcatcgtcttcccatcttttgaatgctcaccgtatacatactccggcaacagtgttcgctgtggtccaggagcaatcgcgccaatatttgtataaggaatccgcacaatcccgccatgcgtatgaccacttaaggttaaatcaaagccattttccacataaagctcaaaataatccggcatatgtgacaaaagaatttgatagtactgcgaatcttgctgcgtttttatctccgctataccttctttataataaggataatcataatctaaattcgcactactccgcaaaccagacatctgaaatttctgcccgcccacatcgatagtagctgttttgtcttctaagttaactacacccattttttctaaaaaaggcttgtaatcgtcctcataggcatttttaacatcgtattcgtggtttccaggtgaataatacacgggcgcaatcttcgtaagctttttaataagttctttaggaacactatccccttgtttatcaaaaagatccccagtaatcgcaatcacatctggatttaaacgagccactttatctagcaatttttcatttttatcgccaaattcactaaaatgcaaatccgataattgcactagtttaatctctttttcaattttagtagaactcacctcatattttttcaccgttagcctagtccctagaaaccagcccaccactaaaagcacgataataatacttactaaaataacccatttcatctttatagccatctttccacctctatgctgctgttttcgattcttttacacaattactaccattataacctagatctcaaaacacacgaagaaaaaactgctagaactagcttctcctttaagcaaaaaattgtaatttgacataaacataattaggtatataattaacttataaaaacttattaataataagaataaacttaaaataaattaaataaggcggcgaaaataatgaaccaaaaagaaagaatagtgaaagccctgaagctactagagagcaagaaaactatttctcaagaagaactcatgcggattttttccatttcaaaagatacggcaaggcgtgatattttaaaattagtcgaaagcggactcgcagaacgctatccaggtggggtttcactaccaattttaaaacctcaaatagaaagttatacaagtagattagtgaagcagagtgaacagaaacaagctattgcctcagctgctggcgaagtaataaaagatcatatgactatctatttagatgtttcaaccacagttcattttttggcttccgaccttgagcaaaatgatttattggttgtgactaattctatggataatgcaatcgcagcagctcagaatgaagctaataaagtatacttgcttggcggttttttcaacttccattcacgtgtattatccggcgagcctgttttaggccaactcaaacaatttaactttgacgttgcttttattggtggtgctgggctaacggaacaaggtatcttttattccgaacttacagacgtctacatgaagcaagagattatcagaaattccgaaaaagtatacctgttaattgatcatacgaaagtgaatacaaagactgcattcaagcttgatttctctggaattgatgccgtcataacaaatgagcccctgccaaaagatttgatgcaacaccttatttctaaagaagtagaagttatatctttgaaaggattgtgaaaataatggcgattatcaaaaacgtaaaagtttacaaagaaagcgagttaatcaatgcaacagttattacagaaggcaatctgatagcagaagtttttccaagtaataaaattattcccgaaaaatattcaacagagcaaatttttgatggaaatggtcagttgctcatacccggaatgattgacgttcatatccacggtgcaaagaattacgatatgatggatggttcaacagaaagcatccaagctgtatctatggcttgtgcggaaacaggatgtactagttttttagtcacatcggttagttcttctttggaagatttgattcaaatgattaagcaaacaaaaaaagtggttggaaaagagcaaggtgctaaaattgcaggaattcacttagaaggcccctacctcaatatagaaaaaaagggcatgcaaaatccagcttatttaagacaccctgacttaaaagaaatgaaacagatttttgatgaagcagatggtctgattaaaatggtaacgattgcgccagaattgcccggtggtatcgaactcattgacttcttgaaaaaaagaggagttgttattgcaattgcgcattccaatgcaacttatgaagaggcgcaagatgcttttgaaaaaggagcaacacatataactcattgcttcaatgctatgccagcaatccatcaccgggcacccggacttgttacagcggctttggaaaatgatgcggtaagcgttcaaactatcgtagacggggtccatcttcatcctgggattgtgcgtctcatccataaaattaaaggaccagataagattgttctcacgaccgatgcccttcaagctatgggagttggcgatggcgagtatatttttggcggtcaccaagtaactgttaaggaaggaatcgcacgcttacaagacggaacgctagcttcaagcaccgtgacaatgaataaatcgttaaggttaagtaatgaatttggtattagcttacaagactcgatacaaatggccacaagtacacccgcagaaatcctcggtatgaaaaaattcggtcgcattgaaaaaggctatatcgctgacttagttttactcgatgaaaaattcgaggttctaactacatggattaatggtgaaaaatactaaacgcgctggattaataccatcaaaggagtggtttataaacgatgccattatttaaacacgaaggaacttactttaactatgaaatacaaggagaaggtatcccttttctgtttcttcatggactaggtgataatttaaaatttgcttttgacacatttaacaatgatgaaaaaatccaattaatttcattggatcaaagaggtcatgggaaaagtggacatgattccagaaaacttagctacgatagcttggcgagtgatgcactagcgttaatggattgtttaggcatacagcgtttttatgtcggcggattatctatgggggctggtgttgcggtgaatttggcagtccatgcagcaaataaagtgatggggcttatattacttaggagctctgcgacagatgagcccatgaaaaaacaagtgatagaatggtttaataccgtaagtatatatttacctaaaaaaaatggttcacagttatttgagcaagacccgctatttccatcgataaaagatacctaccctaaagcaattgatacttttaagcgatattttgaagacgacgcctctgttaattacaataaaaaatttattgatatacctagagataggccaataaaaagcaaaaatgaattaactaatgtgacgatgcccacactgatacttgcaaataactatgatgtgattcacccgatggaatacagtttattttatgcacgtaatatagaaaacgcaaagtattatgaactcacgcctaagactgttgatgtagagaaacataaactcgaaatagatacctatattaatacattcatcttaagtaactcaaaaaagtagcccgcaattccatagaaataaaaaaagcagaaatcttgtatagtttttatacaaagatttctgcttatttgttattttacaggaggtgtagaaacaatcgctgtgattttaccagttattttccaagatttcacttcatttggtaaaacgaaatgatctccttttttaatagcctgttcgttgccatcaatcgtaagtaccgcttctccgtctaaaatactcactaacgtataaggcgctttggccacaaattcagccgtgccatccacttcccacttataaacgctaaagaagtcattcgatacaaaagtagtttcggttaaaccatcgcgcgtttctgttttaatatctaacttcgcatccacatgtggcgcagttgtaacgtcaattgctttatctaaatgaagttcgcgcaagtttccttctgcgtctttacggtcgtagtcatatacacggtaagttgtgtcagagctttgttgcgtttcaagtactaaagtgccagtacctagtgcatgaatcgtaccacttggaacataataaaattcacccggtttaatcgctactttacgaagcaatttatcccattcgccattttttgcccagctagcgaattcttctttgcttgctgctttatgtccataaattaattccgcacccggagcacagtcaataatataccagcattccgttttaccaagttcaccgttttcatgtactttggcatattcgtcatttggatgaacttgtacagaaagatccgtatttgcatccaagatttttgtaagtaatggaaaaacagcttctttcggattaccaaaaagttctggtttttcttgccataattcagctaaagttttccctttatattccccgtttttgatgacagaaggaccatttggatgagcggaaatcgcccagtcttctccggtcgtgttggacggaatatcgtaaccaaagtaatcatgtaatttcgttccaccccaaattcgatcttgaaaaacagggtttaaaaataatgcttctttcattatacacttacctccattccagcgattttgctgggttttgtcacttaaaagtatatactaataaccgctaagatgctagttattttccgcctaaaaagcctctttcttttatttgttctgttaaattcggataatacggcttatcataaaattttgctaaacgttcggtataagacacaaaaccttcccgctcagaaaaaggaatgatttcttggtcataagcttcaagtaaaggcataacatcagtttggtacgtttcttcaaaataaacggcttctttcggcaagcgaggttttacaggagcttctacatccggaaccccgatacaaagcccaacgaccggcatgacatattttggtaaagcaagaaactcagaagtagctgtaatatttctccgtaaaccaccaatacaaattgtcccataatcaagcgactcagcggctgttaaagcattttgcatacacaaacctatatccgttgctgcaaccatcaacaaatcttcttcactagcaatttggaaacttttgccgtgcagctcacttgctacttttacgcggtggaaatctgctacaaaacaaagaaataccgaacattcagctatgtatggttgattcccgcaaagttctgccattttgtttttacgatcttgatctttaatcgcaataatggaataatgctgtccattaatccacgacggggctgcttgagctgctcgaataatagcatcgagtttttcttccggaatttcgataccctgtttatatttccgaaaagaacgatgatttctgagtaaagttaatacgtcattcatatttgtacctcctagatttatcatttagttaaagtatagcttgtttttcagcaattgttaatgttttctcttgtatttctatcagatattttctacacttaaagaaaaagaggtgaaaagatgtgcgccaacaacaaatagattttaaatggctagaagaaaacttcctgactacaaatgaagccgcgacttacttaggcatatctaagcaagctctcctttccttagcaaaacgcgatgtactcccgtttacaaaaaaaggaaatatggttctttttcaccgaatagatattgaacttcggttagaaagccagcaaagtttacgcaaaaaataccgcccttttgaaacctaatttcacaaacagcgaaacggacgaaccacttctgatatgttacactctagttagtgatattctaaacaaggagtgatacataatgaatgaagcagtaaaaactttagatggatggttttgtctacatgattttcgttcgattgactgggcagcgtggcgtgaattaaatccaggaaatcaagaacttatgttaaatgagctaagccactttttaagcgatatggaaattacaaaaaatatcggtgaaggtgaacataccatttacagcattcttggtcaaaaagcggatttagtattcttcactttacgcgattccttagaggcattaaatgaagtcgaaaaccgttttaataaattagccattgccgactacttattaccaacgtattcctacatatctgttgtggaattaagtaactatctagcatctcatatggctggcggcgaagatccttaccaaaataaaggcgttcgtgcgagactttacccagctcttccgcctaaaaaacacatttgcttctatcctatgagtaaaaaacgtgacggcgccgataattggtatatgcttccaatggaagaacgccaaaaacttatccgcgatcacggtcttattggcagaagctatgctggaaaagtacaacagattatcggtggctccatcggttttgatgactacgaatggggtgtgaccttattttcagacgatgcactagaattcaaacgaatcgtgacagaaatgcgttttgatgaagcaagtgcgcgttatgctgagtttggttccttcttcatcggaaaccttctaccctccgaaaatctctccaaattatttacaatttaagcaaatacaagctggaattccctttaataagtcttttttcaaagatttattgaaacgaattccagttttttatttcacaaaactaacaattttgtaaggatatcttccgtaattgtcatttgatacgatggaaccactcctttttaaacgatagaatgatacatatactaaatgaatctagttttaaggagagaaaataatggagacagttctacaagcaaaaaatgtaagaaaaatttatggaagcaaaggaaatgtgtatactgcacttgaaaatatcagtattgatattaaagaaggcgaatttacaggtattatgggtccttctggggcaggtaagtctactttacttaacgttttatctactattgataagccaacttctggtgagattatgatttccggacaagaacttgaaaacatgaatgaacaacaaatgtctactttccgccgcgataaactaggttttattttccaagattacaacttactagatacactcacaatccgtgaaaatattatccttccacttgcactagcaaaacgcccggtcaaagaaatggaagagaaattagcaaatattagtgaaaaattcggtattacagaaattcttgataaatacccaagtgaaatctctggtggtcaaaaacaacgtacagctgcctctcgcgcaattattacttcaccaagtttgatttttgcggatgagccaactggagcacttgattccaaatctgcaaccaacttacttgaaagcttacgtgacttgaatgaacaagataaagctactattatgatggttacacacgatgcatttgcagcaagtttctgcaaacgaattttatttattaaagacggagaattatatacagaaatctatcgtggaacaaaaacgcgtaaggagttcttccaaaaaattctagacgtccttgcaaaactggggggcgacacagatgacgttatttgatttagcgaagaaaaatattagacataatttcgtacattactttttatatttcgcatcgatgattttcagtattatgatttattttaccttccttgttctttcgaaggatccatcagtcgtagctagaattgaccaatcttctaagttatcaaccgcgttttctagctcctctgtcattttgcttatattcgtagcaattttcattctttattccaacaacttcttcacaagaaaacggaaaaaagaaatcggtctttattctttactcggccttcgtaaaaaagaaattggtcggatgttattttatgaaaatttcattatgggtcttggcgcattagtaattggtattttggctggtacactgctttcaaaaattttcgtaacgatcttacttaacttaattaatctcgatagcattggcggttttgccttttcatggggagctgttttacaaacaagtattgtttttattatcattactttgtttacttctttcacaggctaccgaattatctatcgtacaacattgctagacttattccactccgaatcaaaacgcgaaaaaagcccaaaaccttcttttattttggcgctactttccatcgtattaatcgcacttggttacttcatcgctgggcaaccgcttgattctaaaaattcattatgggcacaattaggtttttctatcggagcgcttgtcattttagcttcagtaattattggtacgtctttgtttattacctttttcttaccatatttacttacaaagctaagaaacaacaaacggattttttataaaggtagtaatatcatttctacctctcagttgaactttagaatttcatccaatgcaaaaacattaattattatctctattttaagtgcaacgaccttgtctgctattggaacgataagcagtatatactatcaagcaaatacatcagcaaacacttctgcaccatcaagttttgagtatcaagttccatcagacaaagcactaaatgataaaatcgtgaaaacagctgaaagtgactctgatcacccagttgagtacgaacaaaagagcacttactacactgtcaaggcagaaggaactcgaccagactttgtagaatatgatataaatgaaggtttccctgttatttctcaatctgaatataattcacttgttaaaaaacaaggcaacccagaaaatgcagctaatttaaaagctaatgaagcacaaatggtactttcagtcacttatgatgaaaaagcgcaaaaacaaatgattggcgaaaaatatacattagcttcaccaagcaaaccaaatgttgaaattaaatccgttgttcaaaattcaccaattgcttccgttatgggcttactcgttcttcctgatgaaagagttgccatgatagggactgataagaatatcccatctcaaacagttgaatctattactgtaaaagatgcaaaacaagcgcaagatttagataaaaaaatgcagtcactagttccaaaagatagcaatctcatttcttacgcagctacttatcaacaaatcatcacagtaaccggtgtacttctatttatcggtatgtttatcggttttgttttcctagcagcgacaggaagtattatctacttcaaacagcttacagaagcatataacgacatcggtacatttgacatcttgaagaaaattggtcttactaaaaaagacatccgcaaaattcttgctaaacaattactcgtagtcttcttgattccattagttatcggaattgcgcacagtagttttgcccttatcggactttcacatatgctggcactagatttaacactcccagttgtgatttctaccggtgtctacacattaatgtacattgtgtattactttgtcactctaaatagctatacgaacattgttttcggtaaaaaataataaaaaaagtcctctaattatttagaggacttttttgcgatataagcaaagatactagagagaaaagcggatgctcccattaaaaattgcattccaaatacttgtctttcattactaccaaacgtaattgacaaattttcttttgcaaaatcaatccagtttgttacagataaataattcgtaagtaaaatgaaagctgctcccataagaattccaattaataacagcgagactttacgccatgccagtactgctacaaccaagaaaatcacggctacaaaacaagcaaagtaagcatcaagtgaagttgtaaataaatagccttctttaatactgtccgaatgtagttgtttaaaaatcgttacagctgcaaaaattgccgtaacagcaccaataatcgcgaaaaagccagctgcgtaacgccatttatttttccaagaatgatcttcgcttatctcttttaaagagaatttcgggccaattaataacgcgattaacactaaaatactactgataactagtaacgttcctgaccactcaaacggctgcgcatattccaatttcgcaaaaattcttagttggtaataatacaccgaaaacgcttgaaataaagcaaaacaactgattaaaataatacttactaatcgaagcttctctcttttaatgagaccaaaaccaacaataaataatgctaaaccaaaaataagtaacatccaataattccaaacaaatgtaaagctatctttctctgcactaaaatatccaaccatggcgcttacaaagctgtaaagttgagtcacacctagcgcaattagcaaactaccacatattcctcttaatttttcaggcaatttgcccacttcccttcctatttaagttttcccatgttactctaaaaccgaggtgataaaaatgaactggaccatttgggataaaacacaacctgccccactagaactattactagaagctgatccgagtgaagaccaaattgcgaaataccttgataaatcacgcgttttccaactaaatgataccgataaaacaatcggcgtcgtttgcttgcttccattaaataataagcaacttgaaattatgaatattgctgttctacctacccagagaaatcaaggaattggtaaaatacttcttgaaaaagcgtttgattttgctttacaaaacaacttcactgaaatcattgttaaaacaggtaattcaagtattgaccaacttgctttttatcaaaaaaacggctttcggatgcaacaaattgttccaaattattttatagaacattataaagggcaaaccattgtcgaaaacggtattctttgcgtagaccaaatcattctttcgaaagaaataaaatcctgatgaagtttatatcatcaggattttttatttgtagttttaatcgttaagtgccatttctgaacgaacaaccgctgaaatacgttcacaatattcgtctgttgcttcttttgtcgcagcttccaccatgactcttactaatggttctgtaccagatggacgaacaagcacgcgaccattaccagccatttcagcttcaacttcactaattactttacttacctttggattatctgttacatgatttttatcacttacacggatattttccagtttttgtgggaatgttttcatttctgaagcaagttcagataattttttcccagttgctttcataacgttaattaattgaattccggaaagcaggccatcaccagttgtattatgatctaggaaaataatatgaccagattgttctccgccaaggttataattaccttctcgcattgcttctacaacataacggtcaccaacagctgtttgaacatcttcaatttcaagttctcttaagcctttatagaagcctaagttactcataacagtggaaacgattgtattactatttaatagaccttgttcacgtaagtatttcgcgcaaataaacataattttatcgccatcgacaatttgaccgatttcatcaattgcaatcacgcggtctccgtcaccatcaaatgctaaaccaacatctgcttttttatctaatacaaatgcagctaaggcttctggatgtgtagagccaacaccgtcattaatatttaaaccgtttggagaagcacccattgagctaatatcggcatctaagtcagcaaataaatgtgttgctaagccagaagttgctccatttgcacagtctaatgcaatatgataaccattgaagtcattctcgattgtttgttttaagtattgaatatatttttgtttaccttcaaagtaatcgctaactgttcctagaccttcaccgcttggacgaggtagtgtatcctctgctgtatcaagtaattgttcaatttcttcttcttgatcgtctgacagtttaaagccgtctgaaccgaagaacttaattccattatcatctactggattatggcttgcagaaatcataacgctggcagaagctccttgcgcttttgttaaataagcgacaccaggagttgaaatgacgcctaaacgcataacttcaattcctacagatacaagtcctgcaattaaagcggattcaagcatttctccagatatacgtgtatcacgagcaacaagaacgcgcgggtgttcaccaacgtgacgagttaaaacatacccacccattcgacctaatctgaatgcaagttctggtgttaattctgagtttgcaacccctctaactccatccgtaccaaaatatttacccattttattactctccttctaagtcattcattatctaaatgatttttgtttgtcgttttagttttactttttttcaaatgctggttctattttttgttaagtctcaaccatacatttgttattataccttttttaagaaaaaatttcatctctctataataaaacgttggcattagtaacttttcaaactattctatgtatatgaagcttttgtaaaaaagcaggagtatgagacacgctggccccacactcctcaggtttatgtgtttttggaaggcactgtattttgtgcttctttttcggtaataataaaatcagcttttttaggattgatgacataagccacgttatcgggtaaaccgtttagttctagtggaatgctgtaactgccagctttacttttactaaggttagcaataacgcttaaatcttttgcggttatgtcatctaatacttttttctccccggtgatggttacagaaactttgccatttgctggcgttaacatctgggcatcgaaagtatttttcagaccactcatatatacttgcatattagaaaaagattttgatgttttggaatcattcgtttcagaatcatccgtcgcatcgttattatttgcttctgtgttttgattattatttgatgtggtcgctccattatttgcttcagacttttttacggtttttattttaacctcaatggtcgtaggttgtactgatttagcgcctgttgggactggtacagtaatttctttgaccgtatctgcttttatttttgtaacatcaatcgggatttcaatttctttaatcttgtcaaggaccgcatcgtcacctacgacaaccacttctgatttatcaggtgtcatgcttgaaatctctatatcgctttctggtgttccttcttgcttgattttaaccggtactgatttcccgactttctcaaccggcacggtcacttcaacctcttgcggactgacctctacatccagcttattcaggttactatcaaaaacggatactgtcgccttgtcggtaaattccgatttatgttttccatcactttcgagggtcgctttgacataagcgatttgttcgatcgtgtcttttgcacctgtaatggaaacttttttaggatcgataatcggcgttcctgcttgataaccatctgcaataacagatttacttaactctacatctacagagaatttcttcgttactttttcttgaacatttacgttaacagtagctggattgactttaactttaagtcggtcagatacgtcttttacttggagtttaacttcctgcgttccaatcgatgcatttttcaaatctgcgtatacggtgaaatcttgttgtgctttagcagattgaacgatacttcttggccctgaaagcgtaacagtgactgtttctggaatgcctgaaatgtataaattcgttttatcataatatactttgacaggaacattctcaatgacctcagaatcacttgaagaagtcgttgaaaaagtggtggcgttattattatttgcattaactgacgtaaaaaggatggctgcgagtaacaaggctataatccgaatcgaccatttattatttaaaattcgatccatcattcgcttttgcctcctttccatttagaaaagatagaaggtttcttttgcgttactgtgacaagctcttttagaagaattttatgtaactcttcttctgaaacatcacggaaaagttctccgcctttagtaagggaaattccgcctgtttcttcggagacaacaattgtaatactgtctgtcacttcactaatccctagagcagcccggtgacgcgtcccaagttctttggataaaaatggactgtcagaaagtggtaaataacttgctgctgatgcaatctcatttcctttgataattaccgcaccatcatgaagcggcgtatttggaataaaaatattaattaataattgagaagaaatttttgcattgagtggaattccggtttcgatataatcatccattccggtatcgcgtgctactgaaattagcgcaccaatacgacgtttcgccatatattgggtagatttttcaatagattcaatcagatggtgttgctctcgctcgattctagaaccgtaacgagtaaaaatattgcctcgaccaagtgtctctaaagcacggcgtaattccggttggaagataattataattgcaaggaatccccaagtaagcatctgatccgtaatccattctactgtttggagaccaaaaaatccgcttaataatttaactgcaatgataataaaaataccttttaataattgtactgctttcgtacctcggattaacatgatcactttataaattacaaaccatacgacaagaatatctacaatatttgctagataatgcaatatcgacatattggaaaaatccatcacttcacctccgtgcctcttgaaaaccatttatgatcacatggttcactttctttattatagcataagagtgcaggcggaaaaagcaatcatcccgctaaaaattggaaagatttgttaaagaaaaaacttgccaaaaacagttttcattgtttttgacaagtttatttttggttatatttctactgttacagccgtttccagcaaatattttttcttatacatttctaaatgaattggttctccgtgacataatttaacagttacttgtcctacttctactttcacttctaataagcggtcgcggaagttaattttgaaacggtagttgtcccatccattaggtaaaaatggcgcaaaacttaactcacctgatgttactcgcattccggcaaaaccttgtacaatggataaccagcttcctgccattgatgtaatgtggaggccatcttctgtatcattgttaatattatctaggtcaagtcttgctgtgcgcttataaagttctacagctttatcatatttaccaagttccgcagctaaaaccgcatgaacagctggtgacaaacttgattcatgtacagttagtggttcataaaattcaaagttgcgttgtttcgtatcaaaatcaaagtcatcatagaataaatataaaccttgaagtacatctgcttgtttaatgaagcaagaccgtaaaattttatcccaagaccagttttgattaattggcatatcctctggttttaacgtatcagtggaacgtaactctttgtctaaaaatgtatcgtgttgcacaaaaatctgccatttttcatcaaaaggatagtacatgcggtgctcgatgtcttcccatttggcgatttcgtactcggtcacacctaaacgttttttcgcttctacatctaaattctctagcgtatatcgaatagtccaagctgcaatatagttggtataccagttattgctaacattattatcgtattcatttggtccagtaacaccgtgaatcatatatttatctaagcgatccgataaatgcactcgatcagcccaaaaacgagtaatttcagttaacacttcgataccatctgtttttaaataagagtcatcaccagtgtagttcgtatagttataaatcgcgtaggcaatcgcgccatttcggtgaatctcttcaaaggtaatttcccattcattgtggcactctactcctgtaaaagttaccatcggataaagtgcgccacctaagccgattttctccgcattgattttggcaccatctaattgattatggcgatatttaagtaagttatggctaacagacttatctgttagtgataaatacattggtagagcaaatgcttctgtatcccagtaagtcgccccgccgtatttttctccggtgaaacctttaggaccaatatttaatctagcatcttccccgtagtacgtcgcaaataattggaaaatgttaaagcgaatgccttgttgagcggaatcatctcctgctatttccacatctgctttatcccatcgttcgcgccatcctgcgatatgcgcttctaaaaggtcttcatatgattttgttgctatattttttaagatttcctctccggcttgaagaagttcactttcctcaaaatcacgggaagttgtgattactactcgtttttcaatttgcgctacttcattttcttttaaatcaaattgatagcgattttccgcataaagtgtttttgtttggtttgtttcatttgccgtattagtcttattttccattactgcagaaacggtgaagcgcggtgtaccaaagttatttggaattgttttagttacaagtgagccgcgactttctgaggaagattctgcaacttcttgccaaaacatttcttcgtagttggcatcttcattttgcacattaccatctaaaaaggacgttaattctacttttgccgcatttaaagcttctacatgatagcgaattactgcaagttctttcgtagctacacttagaaatcgttccgctgaaattcgaaacgtcttattatttttaactactgtgaactggcgtcttaacacgcctttttccatatctagcacaagttcaaaatcgcttacttcatctacaaataaatcgagtttttcaccgtcaaggcgtacttcaatcccgataaaattaagtccatttatgacttttccaaaataatctggatagccatttttccaccaaccaactcttgttttatctggaaaccacacgcctgcataataagttccaatatggccatcgccggagtatccttcttcaaaattcccgcgcatccccatgtatccattaccgagtgaagttaggctttcttgcaaacgtttattttctttatctagtttggttgtccgtaatgtccatggttcgatttcaaataattgcttctgtgccatactaaaacctcctaattagcgactagcagccatacttttttcactagtcttataaaatcttgtctttaaaaatgtccatgctatcattaacaccattccgagcgactgaacagccataataatcgtaatatcaaagtagataaaaccgataatacaagccgcaatcactggaattcccagtgcatttagcgttaaattaaatgattctttaaaggaagcaatacgagaaaaactgctccgttttgtcatccaaatgaaaagtgtcgtgaaaatagctaacatcagcgagctaacgaaaataattgagccaatcatcagcaccattgataagaaaacaaatgcttgattctctaagtaccactgcgccgaaacccagtctactagcgattcaccagaagtgatctcacttaatgtggcatcttttggatagctcacttcaaatgtgtagccacttgcatctgtaagcgtcatttctcggtctttgaaattaatgatatttttagctccggcaagttctgccttcgttaaatttacaccagccacgccattagccgatttttcgacgatatgcgcatttttgtcagttaattctccgttttcgagcgaaagaccactaagttccgtcgcgaattgatctgtaccaagagtcgccatttcgggcattaaacttggtaaatcaaaactcgactgattagcaaaatgtgctgatacaggtagtaataggagcgcatttaagaaaataaacacgataaccatttgccagaatttcagtactttccgaccttcaaaaatcgcatttggtccaagtgtactttttacatattgaatgataaacggaacttttttcattggtatcacagcctttttaaaaatcaattatccttttgttccaccagcagttaagccagaaacaaaattcttttgtaagaagaagaacagtaaacaaattggtagcgccgctaagattgctcctgctgcgaataatgctactttttgttgttgcgggttagcgataaatgtttgaagtccaacagctatcgttaagttttctggagttcttagtaggaatttagcaagtaagaaatctccgaatggtcccataaatgcccataaagcttgaaccgcaatcatcggtcttacaagtggtaagatgatttgagcgaaaatccggaaatgtcctgcaccatcaagcttggcggattcatctaaatcccgtggtactgtatcgaaatatcccttcatcagccaagtgttcatcgggataccaccgccgatgtaaattaatgttaagaaccaatattgatcaagtgcgccaagtagcattgctaacacgtagaaagctgttaaagccgccattgttggcaccatttggataatcaagaaaaacaccaaactatttttacgtcctttaaaacggtaacggctatatgtataaccagcaagcgtcacaatcgttacttgcataatcattgttacaaccgcgataatcagtgtatttttataccaatcaagatacaatgtttcattaaatagtctagtaaagttattcagcgtccagctatccgaccactcaagcgtaaatgccgcgatattccctggtttgaaggcagaagatgctgtgattagaatcggatacaaaataataatcgttagcacggttaaaaataaatacgtgaaaaactgtgttaaaaactttgttgtccgctgatctttcataaagtctctcatttacatcatctcctcgttcccaaaggcattcgttttcttaaaggcaatcatcgaaaccgtgataacgataattgagataagtaacgtcacagcagcggctacagcgtattgcggcgaagtaccagttgttagtttataaatccatgaaattaaaatatcggtcgatccagcgcctgctccgacacttccgggaccaccttcattgaataagtaaataatcgaaaagttattaaagttaaacgtatattgtgtaataaataccggagctgttacaaataaaatcatcggtaacgtaattttacggaaacgttgtattgcgctcgctccatcgattctagctgcttcgtaaagttcgcctggaatcgcttgaagaacacctgttaccatgacataaatatacgggaaaccaagccacccttgaatgcttattagcgccacttttgtccagaaaggatctgttttccaagcaatcgcattgatatcaacaaatggaagatgattcagtaacggaatgacttgtgagttgattgcaccaatactgtcgttaaacatattggaaaaactcataattgtaataaaagctggtaccgcccaaggaagtaagaaaactactccgaaaagacgtttccctttaataaagctttggttcgcaacaatcgctgtgaacaccccgacaacaatttgcaaggaagtcgcacaaatcgtccaaacaagtgtccaagaaaatacacttaggaacgtgtcgcgatacgaacttaggaagaaaatattaaagaagttcttaaatccaacccagtcaattaagttcgctggcggaatatggtaaaaatcgtagttggtaaatgccatgaaaagagtaacaagaactgggaaaataataacaaaagtcatgactaagtatgcaggtaatgtaagtaagtacgggaaacctttgtcgagcatattttttataatagcaagagcggaacggttaacagtttcacctaggttccactgcatagccacgcgtcttgcatcgaaaatatttataaaccaaaagcctataaatagtaatgtcacaattaattgtaaagtaccttcaatcattaaaaataaggaatggtctacacctggtacagatccaagtgttacaaggccaatcagtgcattcagcccaactgcaaaaaattctatgataaacaaagcaaatagtgcgaaaaagacaatccctttaaaattttgcttattataaaattgaccaagtcccggaatgattgataacaaagtcgcttgacgaacatttttaatttgtttttgttctagtttcattttgttaccctcaattctagatatagattcactagctaagttgaaaaaaatggcggagcgcgctatctttgccccgccaaatcattattatttagtatatttttgcgttacgttatcttcaattacttttactgcatcgtcagctgattgttgcggagttttcgaaccagaagctgcatcaaacattaagttttcagcacctgtccaaacttccgacatttctggaatatttggcattggttgcgcatttttgtattgttcgataacggcattagttaattcgtcatttttcgatttcgctgtatcacgtgcttttaagttagctggtacttcatttgtcatatcatataaagtttcttgatttttttggttagtcacataatccaaccatttttgagctacatctttgtttttagaatagttacttacaacccaacctttaccacctgcaaatggagaatactctttaccattgtttagtgttgggatttttgctacgccgtaattaatttttgcttctttgtagtttgctgctgaccaagggccgcctagaattgctgctgctttacctttaacaaattgatcttggataaagtcatctgcactcttattgtcttgcataccttttggccatacatcttggaaccattttgttgcgtaagtaattccttcaacagaacctttattgtttaaaccgatgtcttttggatttgtaccttcatcgccgaatacataaccgccgtatcctgcaagtagtccgtatgagaagtagaaatcagtccattttgctaagaaaccagtattttttcctttttcagaagtgaaggcaaaacgagaatcttttgaaagtgtttctaaatctttaaatgttgctggagctttgtcgagtaaatctttattgtagtaaagtactagagtttcaataattgctggagcgccgtaaattttatcgtcaattgttacttgtttttggtctttttcatcgtaatcgtctttattaccaagttttacttcagctaaatgtccttgttggcctaagcttccaattctatcaaatgcggacatcattacgtctggagcagttccagcagggccatcaagtggaagagcttctaatgtttcgaacatgtctttttcgactacttttactttcacgtcattgtctttttcaaaatcaccttttattttgttcacgtagtctttgtagcctgcgtcaacggaaacggttaatgttttttcatcagatgagccagatttactagtgtcttttccaccaccacatgctgctaagcttaaagccattactaaaaccgccgaaactattcccacttttttgaaacgcttcatttacttttcctcctctttatgaaaaaagccgctctttaatgtctgatttctaagtccccatcttttttcaattctttttttaaagtttgtgaattaggttaacctatgcatttattatatgctgattccgaaagcgtttacaaggagatttcacatgttaccgataacaacattttttcggtaaacatgtgaaaaattcctttacgccattgatttagctgttttctttaataacaagaaatccttttgctgggacgacaagattttctgttacagctcggttattccaaatatctgtcgctgtattctcaaatgaaattgtgaaatccttatcttcttttgcttggttgaaaaggaaatgcagtttttcaccatttaattctttagaaaatgctgtaatgcccgtttcgctacttgcacctagccaatttaattcgccggatgtaataattgcttggttatcttttcttagcgcaattaattgtttcgtaaatgctagcatatcttgattttgttttgtttcgtcccattccatacatttacgacaacctgggtcatttccgccgtccataccgatttcagttccgtaataaatacacggcgaaccagtgtgtgcgaacatgaaggcaagtgcttgtttcaccttatcctcatcattattagcacgtgttaaaatgcgcgctgtatcatggctatcaagcatattgaacattacttcattcacttgattaggatagcgcatatattgttcattaataccagaaaccatttgctctggagtgattttttcttcaataaagttctcaataatcgtttgtgtaaatggatagttcattacggcgtggaattcatctccaagcaaccaaatccacgaatcatgccaaatttcaccaagaatataaatatcttctttttccgcttggaccgcttttttgaactctttccagaaagcatgatcaacttcattagcaacgtctaagcgccaaccatcaatgtcaaattcgcgaatccagtaagttgcaatatccaatagatacttctgaacttctgggttagccgtatttaattttggcatatgcgtcgtgaaagcaaatgtatcgtaagaaagtgttggttctccttcaatattgccattttcattttgacgaacagggaaactatggatatggaaccagtcgcgatatgcggatttttcttctttctcgacaacatcttgccactctagagaagtgtccccaatatgattaaacactgcatcaagcataatacgaataccgcgtttatgcgcttcttgaactaattttctaaaggtttctttatcaccaaaatgcggatcaatctttttataatcaattgtgtcgtatttatggttggtcggtgcttcaaaaacaggcgttaaatataccccattgatgccaagctctgctaaataatctaagtgctgaatgattccttcaagatctccaccgaaaaagtctgttgtattcggatctttacttccccacggcaaggcattttcaggggaaatagccgggttaccatttgcaaaacgttctgggaaaatctggtaccaaatggtatttccaacccattcaggcgcttcaaatgtatctactgcatggataaacggaaatttaaagtaataatccatcgtagctaaattcgcttcagtcggctcaaaaaaaccacgtccgccgtaaaatgttgtttctccttctgtatctgttagtaaaaagccgtattgaaggcgtctatgttctggtgttatcgcgaaaaaccaataatcatgctcttcggtctctgcaattttgcgcatcgaatatgattcactttgccatttttcgtttttccataagtaagggtcggcagcaattaaagtaactttgctaatatctaagcgtttcgttctaattctaatatgtagtgttttagcgtcataactataagcatagctactcgctggttgatgataaatccctgctttttccattttttctcctcctatatcacctatcgttctatttcaaattagcatttccattaaagcgtttgcaaccttttctcgctcgttaacggtaacaagatttttcggcactgtaacatattatagaagaaagccaattctctctcctcctttaaagtgacaaattagtaactttactgatttaaagtaaagagctataataactcatggactaatgagagtcattattaaggtctaaaaggaggataaaatggaaaatactttaagcttaaaaaaacaagggtattggttattttccagcgcaatcattattggtgttctttttcttcttttgccacacatcatttccaatattggagtgttagaattcataggcgcgtttttcaatgcactatgcatgggaattattgcttttatcatacttaaagcagaatttctcgattggtttaaacattttagtttcaaatggataattattggtgctccagcattaattattatcagctctattttcaacattgcctgggcttactttgcaggaagtactactgaaaatggtatcaacagtgtgcttacatggtcttatgtttttacaagtattccgttcatgttacttggcgaagaattgctatcgattagtttactctacgccgcttggaaaaaatggaattggaaattttggcaagcttccttattatgtgccttgctttttgcaacctggcacttaacttcttatgattttaatttcctacaatgcatcattacattagcaccagctagactcattttgaactacttattcaaaaaaaccaactccatttgggttactttcatcgtgcatttcatttttgatttcattgcatttctaccagttttactcaaataaaaaagacgctaggaataaagattcctagcgtttttattactcttcttttccagttgtagaagctcgtatcagtaattctggagtaaataataggtttccttgaggttttccatgatcattaattttagcaagtaacatctttgcaagctcttctcccatttcaacaacgggtgatcgaacggtagtgatttttggcgaagaaattcggtctaagaaaacaccatcaaagcctgttacagcaatattttcaccaaagcgacgaccaaaagctgctgctgcacgaacaacacctatcgcgattcgatccgatgcgcacacaatcgcaattttttctgagttataacgtaataattcaaatgctttttcttcggcaacactcgagctatttgcaataaaataactttccggctcaagtccatgttttcgcaccacttcttcgtaaccttctaaacgtgatttcataaattgttcatcaagcaaatcaatccctaaaaaaacaatgcgcgaaaagccaatttctaccacgtgctccgttgcaagcgccgttccttttttattatctacatctatagaatcatagccgcgtttattctcaccataaaaaataactggtttatcaatatctaaaagtcctaattcataatctttatcacgtattcccgtgacaataagcccgtcataagctccaatattcctggatctttgtgtaacgagttgaagcgaataataatacttatctaactctcgactaattcctgttaataaattcatataataaggttcaactgtatcaatttcttctaaaatcaaaaatttaataacttgtgtcctattttgaacaagcgccctagcagcatagtttggtacatactctagagcttccattgcgctataaacaagcattttcagttcatctgagacttgatctggatgattaataactcgtgaaactgtcattttggagacatttgcccgtttcgcaacatctgctaaagtcgccatctccaacctcctccattcataatcttccttattgtaccatcttttacacaaaaaaaaataagaattaacccacaaaaaaagcattctccccaaaaacgcgaaaatgcttggtttattataattatgtaatgactcattttaaagtgtttgccactttttttgagaaactctgcgttcctttgtttgttgataagctttaataataacgcgacataattgatgtgctccgccgattaaaactccaatagcgatagccacgagcgtagttgtcagaaaactaataaatggaaaaccagatgtattcatagcagcgattcccaatataaaaacgataatagtaggtagtacataatacctaatgtcctgttcctgcatcccaagcgctcctttactaaattaatgactcctatcaactactgaaattataacgcgaaaatcggcttttttcaaggcttggaaggaatttcaaagttagctcaaaaaagtgagaatggctctatgtagggcttttactacccactaaaaatccactcaatctgaattcatcaaaaagaaaaatttgttaccactttgtaacattaattaagtccttttacttattttgcatacagctaatatttattcatttttatatataagtattactttttatttaatgatagattcatttatagcttcgtattttttataatatatacaaaaaaagtttcccacttttatagcgggcaactttttttatttttcatgaaaaaatctttttatggtttaaaatggaatttattttcgttttctgctggcaaaagaaggtttttgcttagggtaaaaaagcattttctttctttttgtgctcttaaaatcttattttccactttttacaaatccgtttcatccagctatgcttatattgttccattataaaaacggaagagcatccccctcttcccccgaaggtctcttccgtttttctcttgttattcttttaaatgatatggatatgttgaaacaacgacatctcttttcattagaagtcttgtacgaattaatagacttgtttgattatgaaggacattttgccaaccttttctagggataaattgtggaattaacaccgtaagtgagtagttatcttgatctgctttttgttttgctgtatcaataaatttcattaatggatctgaaatcgatcgatacggagaataaagattagccatacgcacttccggatgaactctattccatctctcaacaaattctttttcctgctttttatcaatagaaatatgaacagcaatgactgtatcaccaatagacttagcatactgtaatgctccttctacaactttggtggtatccgatacacagatgataacggcatttcctttgaagtcaggcaagtccattgtttcgtcaattctaagttgtggtcctactttacgatagtgatgtctagtacgatggaaaacataaatcataatcggcataaatacaaatacaggccatactgattcaattctcgttaagaataatactagaagcacggtaaatgaaatagacgcaccaagtaagttagctgataaagacttcttccagcctttcggacgctgtttccaccattttacaatcatgcctgtttgcgacagagtgaatggtatgaaaacccctacagaatataacggaattagtaactctgttttccctttaaataatataattagcaagatagatcccactgctagagtaataattccattggaatagcctaaccgatcccctctagctaaatacattctcggcataaatttatctttagctaagttaaaagctaacattgggaatgctgaaaatcctgtattagctgctaaaactaagataagtgccgttgtagcttgaatgaaataaaacataaagtttctgccgaatacattttcagcaatttgtgatagcaccgttactttcaattcgggtacagttccataaacaaaggctaaaaccgtaatccctacaaagaagaaacctagtagtccggccattaaggttaatgtcttagccgcatttttaggtcgcggttctttaaacaaaggcacagcatttgaaatagcttcaataccagtcaaagaagccgatccggaagcaaatgctcttaatagtagaaagattgttacaccttgtacgtgagttcctactgcggctgtttcatgacttgcatccataccagttaatactttaaataaacctgtaaaaataagagcgataatagaaaaaacgaataaatagactggaatggcaagtaaactagctgattcagtgattcctctaagattaatgattgttacaccaacaacaagtaatacggctattggcactgcaaaaggatataatgatggcactgctgagacaattgcatctgtacctgaagacacacttacagcaactgtaagcatataatctactagtaaagatcctccggcaattaatccagcgttatttcctaaattttctcttgaaacaatataggctccaccaccatgcggataagagtaaataatttgtttataagataaatttagtgcaaacaaaagaacaaggacacaaagtgcgattggtaatgaataccacatagctgcagcactcacagtcacaagtaccaacaaaatctgttccgtaccatatgcaatagaagaaagtgcatctgacgacagaacggctaaagcttttaatttccccaatttttggtctccagcttctgatgttttcagagggcggccgattaataatctttttagcggcgatgccattatattccctaccttttttatgtgattttttagctaactccaagttgaccagacacattatagcacagctgattttagattgtaatactaatttgtattattttatacacctaatcattccctactcgaatagtcgttcatagagcttcctttttcgtttattccagctaaatatttttttcatatgcctttcaatatacatacccattaataagataaataacccgtatttcatgcttttattttcagaaaaaaaagaatttaatttgggtatttacaaatgataacctttttttatataatagtttctagcggtaaaaaacttttatttaaatggcccgttggtcaagcggttaagacaccgccctttcacggcggtaacacgggttcgaatcccgtacgggtcacttttaatcaaaaaaagcagcttgaaaaataaatttcatttttttgaaaaaaaagctggtaaaaatactaaaaatgttatatcatgtattagtatctgttttaaagaattaattatgcaagagatttcgatttgccagtagagagcgattcttcgccgacttagctcaatctggtagagcaactgaatcgtaatcagtaggttgcgggttcaattcctgcagtcggcattttatagcggaggggtagcgaagtggctaaacgcggcggactgtaaatccgctccttcgggttcggtggttcgaatccactcccctccaccattttctattattgggctatagccaagcggtaaggcaacggattttgattccgtcatgcgctggttcgaatccagctagcccagtcatatttagagccgttagctcagttggtagagcatctgacttttaatcagagggtcgctggttcgaacccagcacggctcatccttaatgaacaagaaaagaattcttttcttgtttttttatacaaaaaaatcatttagcatttaaacaatgctaaatgattttttcgtttcactacgtagatgttgctttagttcgaattctactgcagctgccttcgtaattttttaacaaaataaaagacttcgaattttctgctaaaaaaccagtttctatcagttttccacacaaatgtgtaaccgagcgtactgaaaggttggcgtaattagcaattaacttccttgtaaaacactttggaatacgaaccacgccttctttttctgttccaaaaaaactccctaattgttctaaagactcccttaatcgactttctccattcccacgcattaagttgcatttcgcgattaaaacattttcatgattacgattattaagatataaatagagccacccctcttgcatcccaataatcgaacaaaagatatcctccttatcgaattcatacgctgtaaccgtttcgatgacttttgctgtatagacattagcttccgccataaaatagtcatttaacccagcaatttggttggagcctagaaagcttactatatttttctccttttctaatgaaacaatccctttttcaataaagtaaacctttgtatttataatatcttctgttaataaaattgtattggttgaaatttttgtttttttatacgggatcctgttatcaattaaagtttgtaaaaatcgtttataaccaaattcttcttctaatacttttttactatataaatcttcaaatagcgattgcatgtcttgtcatctcatttctattttgtgtcttaagcaaatagttttacaatgcgatgagtggcttcttacaagtgatgatactaccaaacacttttaaaagaaacccaacaacaaaaccaaacttccaccttttagcaactatttttgactttttcgtcacatttaaaacttattcactaagtaaattattttctctgtttttcttgatatttatattatattccttgttagataacgcctaaatttgttcaaaattattactttgatatttaagccaaaaatagtatttaactgaatactatttttgactaatattgtagttttcacctatttttccagctaattatgaaccttttatgaatatttgtagctagcctaattgttcttttataatggttattctgtggaaaatatgctcctacaagaatatttgtgattacgtttactgtagaataataagggaatttaaggtaaaaagggggaagtcatatgtatttgaaagaaacgttggatcaatttacttctattaataatatacttaaattactaaaaaaaagtcctggctttaataaatattgtatccaagaacgcctcccgaaagaaaccgttattacatctgacaaaagaagaaaatatatctacataatagaagatggctttatgaaacttgtttttgaagggacgaataaacataacttctcttatatcttacaaaaaggcgcctttccccatctccctgtatataccgaggatattcctaaacacatgatgctaatagcgctaacagatgtagtttggtggaaaatcgaatttcaatttttcaaggaaatgatggaattagaagaccctagaaattacataatgctacatcaacttgctgaaacgcgaagaaggctttatatcatcgctgtccaagaaaaattaagttcccgcgaaagtatttatttttctttaaatacgatgattgattacggcttacgtgtttctgaaaaagcagtcgagttgcctaaatttttaacctatcaaatccttgctgacaactcgaacacttcaaaaagttacacatccaaagtgcttagtaatctacgtgaaaaagggattttagaatcacaaaaaaagccttggcgcattaatgatgtccaaaagctacaagaattgattgatgcagaagctttactcgcaatattatagaaaaaaactaagagtagtagctactcttagtttttttctgtttagatttcgtcactccgccaagcttctgtacctgctaattggtacttttgcacttgattaacagagtggaatagttccattttatattttaccactgcttttgcagcatcaatacagtctggataaatcgcgttagcatcccataattccgttgtacttaaaatttcgcgacattttttatagaaagcatatttatagtcactggaaatgttgactttttgaattccaattttaactgctgcagcaatttcagcgtcaggatttgccgagccaccatggagcacgagcggtatattaactaggtctttgatttcttgtaaaatatcgaggcgtaatttaggctctttgtcttttggataaatcccatgagccgttccaatagctacagcgagcgtatcgacacctgttcgcgaaatatattcttccgcttcttccggtttcgtataaataatttcactaacgccaccttcaatactattaccagttttcccaatagttccaagctctccttctacggaaacgcctaatcggtggcaaacatccacgacttcttttgttacgcgaatattttcttcaaatggtaatagtgagccatcaatcatgacagaactaaaaccacagcgaacagctcgcatcacatcactcatattatcaccgtgatccaaatgaaggacaaatggtacagggctatttttaattcgtgctaaaacatactggaaaaaatcatcttttgtaaaatctagttctgttgggtgcacggcgataatcgctggagcattgtttttttcagcttcttctaccactacgcgtaaaaaattactatcggctacattaaatgctcctaccgcgaatttattttctttggctacttctaataattgcttcatatttactaacatgtgttcatttctccttttaaagtgattttccagtagaaccggataattgaatataatattgcacaacttctttgccagctgtaatcgtatcgctaattaagtcgacataattaatcgttggcgtttcttttaaattagtttttattttatcgacttgagctttcatgaagtctgagccaacgttgattttattaataccaagccgaatggattccaaaatgttttcctcaccacaaccagaacctccgtgtaaaacaagtggcatattagtcgcggctttaatttctcgaacaatgtcaaactgaaaagcgggcgtaaacccttctggataatcaccgtgcgaagacccgtaagaaattgcaagcgcatcaattccagtctggttagcaaaatcgatagctaccttaggatccgtatacatagcttgatttgtataattatcccctgttacagcgccaatatttccaacttcggcttcaacactagcgttataagtttctgcaaattcgaccatttttttcgtaattgcaacgttttcttcataaggataactggaagcatccatcatcacgcttgaaaaaccatcttctaaacattgctttacgatggcaacatcctgcccgtgatctaagttaatcgctacttctacacttgcttcttctgccatttttataataggtctcgttaaaaaacggcttcctaagtggcttgttaaatgatcttggagcaagtcaataataattggtgcacggagttcttgagcggcatcaatgaccgcacgcgctgtttctaaattaaaacaattaattgccatgacagcgtaacgcccttcgtttgcacgctttaaaatccctttcatcgaaacatacatttttatatctcctcgccttatgaaattttaattccagacaaatcgacttcttcctcttctatagcttgatctgcaattaactcttcttcttttgttggttctcgttttaagattagtagcattgctgcggtcacacaagttccaatcaatagtgccaaacagaataaaattggttcgttcattgccgggacgatgaacattccgcctgatggtactggtgagccaataccccatgtcatactaagacctccgccaactgcagccccaagcgtacaagaaataatgacgcgtatcggatcaacggcagcaatcggaataacgccttctgtaatcatacaaattcccattggaaaagcgattttgatattatcttcttctgattttgtatattttctctttttaattaatttcgagattacccaagatagagttactccaaatggcggtaccatcgaagctagaatttttacggcttctggttctttaactccctctagcagtaatccatccgcgaataaagaagctactttatttaccggtccaccgaaatcaaatgccgccatagcaccgagcactgctccgaaaacaaatcgcatgcttccttgcattccttgtaagaagcttgtcatcgcctctgttgcccaaacgattggtacacctacaacaaaatacattagcaatccaataactaaactactaataagcggaataatcatcattggcattaaaccttgtgcccactttggtacttttaaatatttcactagtattagtacaaaataacctactaagtacccgccgagcattccacccaagaaccctgcaccaattgagttggcgataagtcccattaacaatccaggagcaattcctggcctatctgctatcgaataggcgatcgcccctgcaataactggcgcaagtaaacccatacctagaaccccgagagaaacgagtgcatcaggaatagaatacggtgctttatagttttcaatcacttgcccatttgttaaatttccaatggcaataagtaaccccgaggcaacaactaacggtaacatatacgaaatcgctgtaagtgcatgttttttgatttgcagttttttcatcatgccagttcactccctagttatttatttcgttgtctattttgttaataatttgttttggtgctttaatcgctaagtctgtgggtatttcaacaatacgcttccctttaaaacgatctttgccgttaattttaatgtcagctgcgataataacgacatccgcatttttcacttgttctgctgaaagttcgtcttcaatcccaattgttccttgtgtttcaatatgaatagtatgtccaagtgcaataccagctttcgttagtttttcttttgcgatatacgtatgcgcaattcctgatgtacaagcagcaattccaataatattcatgtcaaactcctcctaatcttggttttttgctaacaatttaataaaagcttcttttgttgggacagtttgaaactgacttatcacctcatcatctgcgagtaaaatcgctactttttgaagcagcttaatgtgtgttgtcgtagcatctgaatttttcacggcgaaaaggataataatattgactggtttatcatcaagcgactcccactctaccggggtttttgttctaccgacagcaatggacgtatttatgacgcttgctgatttcccgtgtggaattgctactccttccccgagccccgttttaccttcttcttcgcggtacaacacatccgctataaaagcttttttgtccactactgcacctgtttcgacaagtaaatctgttaattcttcaattacttctaattttgtcgttgcttgtaactctaaatttacaagtgctggacttattactttgcttatatctaattcttgaatatccatcgattcgcctcctataaactttccatcaattttttcaccatcattttatctttttctgtaaacatcgcgcttacaagtaatgaagggatttcttttgtactttctgcgttgattgttgttagaataaagtcaatattctgatagtcttgcaagctatttttgaatctagtagatgataaaacgtctactatttcgacatctggaaaagctttttggacctttacttttaaaagttctgacgttccgataccgcttgaacacataataataattcgttttacaagaggtgactcttctatgtgtttggcgaaatagatcgttatataaccgacttcatcatctgatatggtattcaacctgaacgtctccgcaacatcccgagcagtttctttaataatgtcaaacagttgtccgtactctaatttaatatcgcttaataagttattttttatgttaatttgatgattcattcggttcaccattggcttcatgtgactaagtaattcaatttttaattgctttttattaataggcatatcgattttcgaggcaacttgattgatataaaaatcagtcatttcctccacgattggtaaaacattactcgatattaattcaatttcatgattaaaccgagaagaaattaagtattgtaaaaagttgaatgtttcgcgtttcggtaatttcatttttaagtattgttcgattgattcaatggcttctacagcaatagtatgcaatttttcatttgtcactaaataagtctcgtttgtttcgtcaaaatcttccacttctccttggcgaaaacgattaattagaatgtacaaatgggaaaaaatattaatatcatacggatacggaatgctaatcattaacttattttcaataatttccatttgcctaacgataaactgtacatcggcattattgagattgctgtattctgtctttaaatcgtcgtaactagataagtctaagttgttgatgacttcattgattgcgatacgaatgttttcttctgtaccaacaacacggatttctttttgctttttttcaagagctaaatggtatttctcgatagattgatttaaaagcgcaaaatcattttttatcgaattataaccaacgtaataaccttcatatagtttggcaatatttaagtacttaggtgatttaaacaatacttgaagtaaaatcttttcacgacgctcggatggtgtataaccgaaaatatcactggttgtttctaatttcgcctgaatatatgctttataatttagtttgtaaccgcggcctttttccgaaataataatctctttttcatcagtggcgctattgatatttttaattttacggtaaattgttttagaggaaacttcgagcattagagcaagttgattcgctgttaaaaaatcatttttcgttaaaaataagttaattaatgcacgctccgttttggttagaagcatttcatcacctccctctacggtctattatacacaaataaaagaaaacggttacaacaagttatgtccactacactagacaattttttggcaaagattgtgaacgtagctttagaaataaacttcccttttaagaagacaatcttctagtaaaaccgtataatgaaatttgagaagactcagaaaggggtgcttttgtgacacttgaactacataatgttacgaagaagtttggaaaaaaaatcgcagttaatgatttatcgtttcgagtagaaccagggaaaatactcggaataattggtcaaaatggtgctggtaaaacaactactttccggctaattttacattttttagaagcaacttcaggaaaaatcacttgggatggtaaggaagtaagcagaattgatccaaatatcatcggctacttaccagaagaacgtggtttatatcctaacgttacgattgaagaacaattaattttttttgctgaactaaaaggttatccgaagcaaaaaataaaagcagaaatcgataactggttggaacgcgcagaaattgtcggtaaaaaaacggacttaattaaaacattatccaaaggaaatcaacaaaaaatacaacttctaagcacgatcattcatcaacctaaactagttattttagatgaaccattcagcgggctggatcctgttaatgcagagattttgaaaaagtttgtattcgacctgcgtgcatccggagcagcgattatattctcaagtcaccggatggaaaatgtggaagaactttgtgattctcttttaatgctgaaaaaaggaagtacggtgcttcaaggtacgactgaatccgtgaaatctgtttttggtcgcaaacgtattttaattgaatctactcatacggcagaagaactagctattttgcctggtgtgctaaatgtccaacagcatcgtgacggcgttctccaacttgaaattgctaacgaaacagatgcagaaaagatttttgaatatgtgacaaaggatggcttcatccaaactttcagcctccaagctccaacgcttgaagaaattttcaaatggaaagcgggggaatctaatgagtaaattttgggtgataacaaagcaagtttacaaaagacgtgtcaaaaccaaatcatttttaatttcacttttgtttcctgttttaattgccgcactaattgctggtattccaaaaatggtagtctatttcgactctactaaaactatgacaaaaattgctgtactttctgatgatccggttttctcccagtcgctcgctaaagacaagagccattttaaagtaaatactgacattaaagacaaaaaatccgcccagtccgctctaaaaaacggtaaaattgacggattcgtctctattacacaaaaaaatgacacggttagtgcagtttataccacgcaagaaacagcaggccaagatgttttaacccgtttaacagaagacctcaccgcaacaaagattgctgaaaaagcggccgcctataaaatcaccaatgagcaattacaatcaattacttctcctgtttctgtgacaaatgatttagaatcaaataatcaattgactaaccatgaaaaagacgttatgagcgcagcagtattgattttaacacttgttatttttattttcgttatgagttatgcaaatattgttgcttctgaaatcgcgacagagaaaggtacacgaataatggaagttattttatcaagtgtatctgctagaacgcacttatttgctaaactaacagccattatctttatgcttcttacccaaattggcttttatgtcgtttgcggagctgtcgttcttattgctggacgaaatacggatatggtccaaaatgttttagaccaaattgctgttttcccagcttactatcttgttttaaacttagtatttgttattttaggtttactgttatacattttactcgcagcaatgattggttcgatggtgccaaatgtagaaacagttgctcagtttatttatccaatgacgattctcgcgattattggttactggggttccatagcagctgctaatgctccggataatttacttgttattatcggctcgtatattccaactttttcaccgatgatgatgttagcgcgcatggacttattatctgtttcaacgataggtatttttagttcattagcaattttagtcgcaagtgtcgttggggcatttttcctaactgttcgtctttatcaaggaaatgtgctgctttacagtaatgacggcctatggaaaacttggaaaacctccctttcctacgcgaaaagaaaataaagagagttggtaaattatgcaaatcagactatctaaaagaaaagactcggcctcaatgattgaattagaacatttagtgtggacgcctgggacgactcctggtgatgtccatttcgatagtgaagctgaatttttattaaagaatccacctggctccaaaatagtcgttgaaaaagatgagaaaataattggcattctcggctataaatcccctatcccactaccatccaataaacatgtagtagagatagatattgctgttcacccagattatcaacgcgaaggcatcggtcaacttttaatggacaaaatgaaagaagttgcgcgcgaaaaaggttttataaaaatctcactacgggtgctgtcaattaaccaaaaggcaattcgtttttatgaaaaaaatggttttaaacaagaaggtcgacttgaaaaagagtttattattcaaggtaagtatgtagatgatattttaatggcttatttcctctgacaaaagaccctatttaaagctaggactatgactttataatcatttttaggataaagcgtttacatttatttagaacggttatatatagagtacaacgaacaaaaaaaggtgatgcgaatgacaaaaacttggtgtacaagctgatttttttctcagctttgtcatatgccggcaaaacgtctggtgaaggattttagtgtcaagcaactatggttagtttacaggaggaaggcgaggagtatacgccgcgtcaaggactttacgctaacttagttgtaggaagacggaatttcgttacgtcgctcgtttatcaatattttttatcctcactacattggtaaataagcgaataaagtatcgtatcattcatggccactatttaagcaagttacgggcgctcatttattcgtaagttagaatatcttgagaagtaagtagcaagacaaagaattcgcctacttgtttgaaaatgcctcaccgttttccgaatgttgtatgtttattcagaaacatccagacatggtccggcccatcagatgagtggcaagacaagctcatccgaaaagaaaaaccccgtgtggcgaatttgccatacggggtttttcgattaggaaaataagattgagatatttttatcgtagaatttttgaatgactaagtggcatttttcaaaatctttcgcttctaaagagagcactaactgttctagtgagtctgctaaatctatcataaaagcttcaaaacacaatttttcattgttatccttcatatttaaaattgtctggttaagaatatcgatatttttttcaagtgctggcattccagtatagtgaatcatacaaccgtaaaagtttttcacgtgattactaaatacacttatatcttgctccctagcagctagcttaatataaactaactcgttacgaagacacgttgcgcatacttctgcgtttttttcttgaagtttttgtaccgcataattgagatgaaaaaaagctaactttaaacgagatttttcgcgatgctcagcttcactatgaattgccactgaaaaacctttttctccagagtttttgcaaataataccacttttatgtaaacattggagcgcaccaaaagctactcgtttgctgacttgaaatcgtttcatgatgtcttctatgtccactttatcgccattttccaaagtgttagtcataatctcattcttgatttctgcgtatataggatctgcaacaaatccacttttttccataatttgaacctctttaattttgattgcttacaatgttatattttacacgaaaaaattccatttagatatgatttttccgaaaaaaatgtgtacattctgttacaagaaagatagttgtaacagaagaaattagctgacatgttgaaaaaataacgacaatatgtatagttatctttgcaacataaaaagtaggactatacagccctactttttacctgaatttactgcaattcaatcgttaaatcacctgttttcaagcgttcctttttaattagaaacggtctgacaataagtgcaataacacctggcaagacaactgctaccaaaataaaagcagccagtgtgctgaatccgtaatttgctattaaataaagtggtgcaacaaaggcacataatccgagaccagcgacttcacttgcggcttggatatggaacaccatcacgccaagaggtccagcaatcagtgttgttagtagtggtactaacataaggctgggttttctaatgatgttgggtgtttgtaatttgggtgtacagataagttgggcaaaaaatgcaccccagttattatctcggtaacttaataccgcaaatgacacgaattgaaccgaacaaccaattaacgctgcagcacttgctgttggatccagttgaagcgcaattgcgagcgcagcagaggaagccgggctaagaataagtagtccaaacacaaaagcgatagccattgatgaaatcagcggtgagccaccaattaacgagctaattccaagacttacagaagccaaaatcggtgccataatctttgcaaataaaataccgcttagtccgcccgcgagaagtgaaacaccaggaattaaaatcatatcaaattttgttttcccagtcacccttttcccagtccaaactgcaacaataacagctaaaatagctccgactggttctccgctagtaatagcaactccaccaccagctaacgccgccactgccccgccgccaataacagcagaggctgccgcgcttatcgtcacaagcgtatttgcgtgcaagcacatcgcaataccaacaccaattcccggaattaacatcgttttaccaattgcgccaaccgttacaagaaatgaaagtcctgtcatctgcccaattgtctgcaaaagaagtccaattccaagcgttacaagaaccgcattcgcaatccccatagaagccttataggaacgatctataaaatattctttcattgcttctccctttctaaaatgtattctttctcattgtaatcactagttaattaaaaagctagttttatttaccgattttcctttaaaaatgttaaaaaggtttcagcaattcgattttcaagtctttgtctgttttttagtaccgaaaacttccgcattaagctcccagcctcattaaatgtctgcagttttcccgctgtaatttctgcttgaacaacacacttagaaataactgtgtagcccatcccttcaagaaccatttgtttaactgccatattactccaggcaacaactttttcagcaacattccagccattggtacttaatacatgatccaaatattcacgcgttcctgaaccttcttctcgcgcaatccaagtcgccccttgctcgatttctgtatgcgaaccatctgctcgaccaacgatacacatttcatcatccgaaaaagcacttatctctaaatctttcttactaacctggccttcaatcagccctgtgtccacttgaagaagttcaactttgtcagcaatttttgcggtattttcaatgataagttctattgtaatatccggataaagggcatgaaatttcgcaatcacttctggcagataatactctcctatcgtaaaactagcaccaatgcgaagtcgaccttttaaatgatggtgatataaacttatttcatcttccacttgtttatatagtccttctaattgcttggcacggtggtataaaatttctcctgttgctgttaaaataaactttttagcctgtctgtatataagttctgtttcgtaaagctcttctaatttctttaattgcaatgatactgcgggttgcgaaatgtgtaattcttcagctgcttttgtaaaactttgcaattctactactcggatatatgttcttaatgcctcgtccatcgtaacacctccataaaaataacttatcaataatataattaatataaattttactaataaaatcaagaatggtaaagtaaaagtataaacgaaagggggatgaatatgagtcaaattttatttaaaacgaagactttttggtatggtattgcgcttactttctgtattgctaccttatcttattttttagcgaagttaccatttttaatgattctcggacaacttgtaactgctattttaattggtattatcattcgtgcacttttcccagttccggaaaaatggtttactggtattcagttttccaacaaggtcattcttcgtgccgggattattttacttggttttcgcttgaacttagttgatatttatcatgctggctggcgagtgtttctaattgctgccttatgcctaagctttggtattactattgtttatttcttagctaaactttttggagtggataaaaaactagctattttggtcgcttgtggtacggggatttgtggtgcggctgcagtagttgcgatttctccacaagtaaaagctgataacaaccaaacggctgtcgctgctacgattattgcattacttggaactattttcaccgttatctatacgttgatttatccaattctgccacttggaccagatggttatgggatttttgcaggtgctacacttcatgaaattgcccacgttattgcagctgcagatccaggcggctcatctgctgtcgatatggcggttatcgttaaattaacacgtgtagccttacttgttccagtctgctttgttgtcgcaaaaatggttaatgctgggactaaaaatcgcttttcatgggcggaacttcctgtaccatggtttatattcggctttttagcaactagtgcaattaatagctttgggattattccaacatctgtaaccgattttcttgtcatctgtgcatatttcctcattgctatgtcaatgggcggactcggtttaaatgtccacttgccatcgttcggaaaaatgggtggaaaaccttttgctgcggcgttaatcggttctgttttcctttcagcatttggtctagctttagtacttttgtttcatttagcaggttaagatgtcctcgtcacctcgatttgtgatacaatagcaaacacgaggtgactatttcatgacgaaagcaatttggacttgccgagcgttcttactcggatactttcttgtgctgcatttcactgcagatacttacacttttctaattttaaatgtcgggcttgcttatatacctttcgaaatagctgtatttctcacaaaaaaacctcgcgtctggtggattttttggccactagggattgtttggctagtatttttcccaaatgcaccgtatcttttaactgatttacttcatttacaacgtttagaaatttacggggcagaaggaatactttcaacagcaccttggttatggcgacatttcacttatattatcgtcggtgtgttctttggattatttattggattctggtctttcgcaaaaatgcttgctgaaataagaagacgatttaattggactagtttactaagttatcaattacttttgattgggttaattttattatctagttatgcgatatacattggacggttctctcgtttacattccatccatttacttacgcagccaattgattcattgcaaattatgttaagtgtttttcactggccattttggaattttgtattttacttttcgattatccaatatgtaatttatacgctatttagcaggttttctagctcactaaaaaactaaaaacgtttgtattttaggaaaattaattttcttaaatacaaacgtttttttaatcgatatggagcttacttcgctcttttgaaaaaccttgaggataacgacgctttagtttctcgatatttaattctgctactgtttccatgcttatatctgcccatttagcaatttgcgatacgtaccaaagtacatctcctagctcttttgttagagactccttatctaaatcatgtccatgaaaagcatatttcttaatcaaatcggcaacttcaccggcctctccagtaataccaagtccgtaatttgttagtgcctgttcgtgtgttgcagcagttctatttgctaaaatttgatactctttaaaatccatatgttttcctccttgcttctctcactttcttactataacagataatttttttcctttgcagtcttgactatttccaacttatgcgaactggtgctctatcaatgcatttcatctttaaaaattttttatctttaaagtcttatttttttcagataattcctatataatagagataagatttctgaaaggagttttcaaatgaaactagctggcttagtgttacttctgattggtttgattggttttggcttttcgtttagcattaccggacttatcggttttggtgtatgtatcatttctattattttagttatagcaggaatttttacaatgattcgttccaaaaaacgccgtaaacgttcttattcctattaaaataaaaagctgctttatcattatttggtaaagcagctttttttctattttttcggccaagttctcatacgattttctgctaacttcattcgaacaagttcctcgccgtccgctcccatactctctgcaatttgaagagcatagataatcacatcagctacttcttttaaaagttcttcacgattttcttttagcgctatttcatctgttttccactgaaagcattcaagtaattctgctgcttcaagtgacaacgaaattgctaaatcttttggatgattgtattgatctagccaatcacgttcttttagaaaagcagtaatttcatcttgtagttgtctcactgttttagctcctttagaagaatttatttgtgaaaaatagttcaaactcttataaaaaaatgagcaccaagccgcctatttataaggagacttgctactcattaaattatgcgtttaatgaaactgcttcttcaattttgtttggtgggataaatccgtttaaacggtggatttcttcgccgcctttgtatagtacaagtgttggcgtttgttgtacatcacgatcaaaaaagaagttttcgcccatttcttctaattttacttttaatactttcactttgcttgcgatttcagagtttttgaattcagcaaacgaaagatcaagcattttacaattaggacaattatctttccaataatctacatatactaattcttccccattaatatgagcttggaactcttcaggtgatttaatttcaatacttgtcatttgattccactccttaacgctaaaattttcttgacccaattgtctatatcagccacatcttgttctgtgtgtggcatttgctctatttttaaagttgggtagcttgtgccgaagtattttgccattcggtcaacagctccgcaataaaactccataccccattgtgtttccccagtgccaaaaatggctacattcttgggcttaacggctagttccgcgataaaatctttcatatccggcggcgttcttccgtagtcgactgtccatgcccccaacacgtacaagtcaaaatcctcatcaagcggatactcggctagaggagatacgcgaaaggacacaacttcatgtccttcgctttgtaaaatctcttcaatttcgtcagccaccattttcgtattgccgcttagagaatcataggctaacaagattctcataaatcgtcgaatccgttatccatattcgtttttttatagcttgaattgcgcatttcgaaaaagtcggtttttgtttctgtaaagttatctgcgtaagctttaatccatgtcattgtgttatcactatgtcctggataaagttctggaataccaagcattcctagcattttgttggcacgatatttcacgtagtcaaccatttcttccacatcaataccttcaataccttgtaacacttcttcagaccattctgtttcaagttcaacagcgtggcggaaagcatcatgcgtatattctactagctcttctgtttgtaattctgggttttcaccaaggattgcccggattacttctgaaatgaacttcgagtgagctagttcatcacgattaataaagctaatgattttccctgttcctgtcattttattttgacgaacaagattgtagaagtaagcaaaaccactgtagaaattaattccttctaaaatagacgattgaattaaagcttttacaagtgtttcacctgttttattattcatgaaatcatcatatgcagccatgattggctcgttacgtttaataatggttggatgtgttctcgcaagttcaaaaacgcgattttgttcttgtaaatttgtaatagaagcaagtacatacgaataactttcattatggataacttcttgttgtgcgataatcgctgcattcgcatgaactgctggatcggtaatgtattccgcaatgttataaataaaacgtgtttgtggtgaatcaagggttgctagcaagccaatgattgcatcaaaagcatatttttcttgttctgaaagagcgggatattgttttgcatcgcttttcatatctacttcatctggaatccagtagttagtagaaagttctttataagcacggtagaaagatggatacgggatgtcgttccaatttaaaatcccactagtttctccgtttatgattgaagtagaacgattaggaaataaaggttctaaaattttaatacgtgtcagttgttctttttggttagccatctaggcaagccctccctttcttattgtgttatcgataaaatgttttagagatttatcagcttgagcaccattcacactcttcaacatcaatatcgttggagcggacatagtaagttgttttcagtccttcattccaagcagtcatgtgtagttcaagtagtttacttgctttaataccacttggtacatagaagttaaagcttagtgattggtctacgtgacgttgacgacgaccgttttgacgtacacttgcgaattggtcaactttgtaagcacctttttcgtagtatgggtatgtgcttaggtttaagtccggtgcaattactggacgacggtagtcttttttctcttcataatagaatgcactgtaaattggatcaatcgaagcagttgaaccagcaatttgcgcagtactcatatttggcgcaacagctacaaggtaagcattacgcaagcctttttctgctacttctttcgctaattcttgccattcaggtgagttatagttacgacgtgcgaaatattctccagtgttccagtcgctgcctttgaagactttataagcacctttttcttgagctaatttgttactagcgcgaatagctaaatagttaatttgttcatataattcatcggcatatttctcagcttcttctgagtcccaagcgatatttttaagagcaagtaggtgatgccaaccaaatgttccaagtccgatagaacggtatttttggtttgtaatagtagcttgcggtactggtagttcgtttaaatcgataacgttatctaacatacgtacttctacttcgattaaacgttctaaagtaccttcttcagcaacaactgcacgacctaggttaacagaagataagttacatacaacaaaatctcccgcttgttttgtaataacgatttgatctccagaaataatttcttgaatcatttttgtcgggctcatattttgcatgatttcagtacacaagttactagaatacaccatgccttcatgtttatttgggttcattctgtttacttcatcacggtaaaacatgaatggattccctgtttctaattgactcatcatgacacgtttcatgatatcaattgctttaacgatttttttactgattgtttcatcagctactaattcgtcatatttttcgcggaaagtaccttcgccttttgattcatcgtagaaatcttgtaggtaccagccttttttcgcttttacttcatgtggatcgaataaataccactcgccgcgacgttctacagcttccatgaaaatatcagggatacaaaccgcagtgaacacatcatgtgcgcgcaaacgttggtcaccattgttcaatcgcaaatcaaggaaagattcaatatctttatggaaaacatctaaataaactgcaatcgctcctttacgttgacctaattgatctacgctaactgcggtattgtttaattgtttaatccaaggaataacgccaccacttgcgccttttacgccgcggatagcagctcctgttgaacgaacataaccaagatatgctccaacaccgccgccgtgcttagaaacgcgagcaacgtctgtattactatcgtaaatcccttgtaagctatcatctactgtatcaatgaagcaactagacaattgtccgccaacttttccagcgtttgcaagtgtcggtgtcgcaactgtcatatatagattacttagcgcccagtaagcttcttcaactagcttcatacgcttttcttttggttcgttttgcattaaataaagtgcgatagttaaccagcgttcttgtggcaactcatacacattacgttcggagtcagttgccaaataacgtgtcgcaagtaaatacaaaccattataagtaaataatttatctttttcagggtcaattaatttccctgcagcaattaaatcttctttagaataattttttaggatattaccagaataaataccacgctcgcctaaactttcttgaagtccaacgtatgaaccatatttatcatcgtcattataaaaacgatttttactcgcttttttatataatttatttaaataaagacgtgccgcgaaatgttcccattcaggaatatgaatatctgtacgagcttctgcttccctaattagataatcaactaattcgtcagccgcataatcttccttcttctcaacaaaattaaaaaccttacgtttgtaatcttctaaatcaagttttggaaattcttcatggattttctctaaatatccatccaatcggcttttgtcaaaaggtagctttctgtttcccccgtcttttactatgtaagttgtcatttgcaatccccatttcatccttttttcctcgttgtaaaaatatctgattcattttgcgctttttcattcgtccgctgaactatttatggtcgttccatggagcaaaaaaattaacttttaaaggagcaaattcccctcaataaaagttaaaaggcgatgaagcaatatttcgctttcgatactatatatagtataactttttcattgtgaatgcaagatatagtgctttgattttatctgtgaaatctccaaaacgacgattacaacaaggtttttagcaaataaaaaaattttttgagtgaattcatgtgttttcttgcacatttattctcctaaaaagccactacttatagtgtctatttttttcttcatttctacatttagtaggtaaaaaaactgttttttataacttcacaaacttatgattcggttttgtcaccattctgacaaaattgtaaggttacatgaggatattgttagttaacaaacaggatattattctgtattcattgtaaacttaatgtaataaagcaaaggaaggatgagggagaaatgtttactaaaaaaagagttttgatggtgttagcggcagttcttctagctgtctgtgctatttgggagtatgcgatgccaaccgatgccgcagtcaaatcctattaccttaaagtagaagaaactggtaaagctgtaacaaaaaatcaatttaaaggttataaatatgtttccaaagtctatgatgataaaggaaaacaaaaaaacattacattctattctgaaaagaaattagctaaagatgaccagtttaaagtattaatcggcgaaaacaaaatggttgttaactataaaaaaatcaaaaacgtccctgataaaattaaatacctagctgaaaaataaaaaacactttgtttagcctattaattaggctagaacaaagtgtttttttattgaaggctgaatccgactccgcataaacctatctcgtttgaaacaaaaccttttgccattaattgacaaaaaaacaggcttgaaaatttcaagcctgttttttaacttattcggataatttctttttagcgtcgcccgttttatcttctacttcgcctttagctttttgagctttaccttctacttgtttgcctttatcatctgttgctttaccgaacttgtcttttgcgtcacctactactttgtctttaagtccttttgctttgtctttcatacctttatcttcgctcattgttattgcctcctaattagaatttattttctaatgaagaatctttatctccatagtagtgttttccacattatagaaagctaaaacatcttttttaaatagaatgaacggttcgattggtctcagccgcttcaaatatggcttcaatcaattttaaaacttgataaacttcttcgttttgaacgattggttcactcgtattatttaaaacatcgacaaagttattatagaaagatggagctaatttggcaggtgccggaagtgataatgtattggttgcttcttcgcttggtggtgccattgtttttgtcagtccttgccctgctttaattggcgttggctctgaagttttagcaagtgcggttggtttgacgatttccccacttagatcccaatcgtggataattccggttccttctgtgcctttgacataccagcgaggtagtttaatgaagttcgttgtgcctacttcgatttgagcagtaataccattttcaaaagtaatgaacgttacgaagccatcatcgacttcatccccaagcgcaaaacttaaattagcagatacggacttcacattgctatccactaggaataacaattggtcaagtaaatgtacgccccaatcaagtaccatcccgccgccatgtgctttcaaatgacgccaatctcctggaataccatttgctccgtggacacgtgattctaggtggaacatttcaccaatcgttttttgttcgaacatttctttaataataaggaaatcttcgtcccaacgtctattttgatgaaccataaaatgtttatttactcttttagccacgtccataattgctagtaaatcttcacttgtcattgttactggcttttcacaaacaacgtgtttccctgcttcaagtgcgctaattgcaagctctttatggctatcgtttggtgttgcaataagaacagcatctactttttcgtctgctaaaacagcttcataactttcatagattttcaagcctttttgagcggcggcttcgcgtttttctgctagaatgtcgaatacgccatgaacttctaaattatcagcagccgatgcaagcgttacatgatagcttcccattccgccgtaaccaacaattactaattgatattttttcattctaagacatcctttcttattgttacgcccaccacatatccagtggtttgtctttaattaagatcgattgtaagtttgtaacagcacgatcgaagccttcgtcaatcgacattaatggatcttcgtgttcgatactgactacataatcataaccatatgttcgaagcgcgctcataatatccgaccattctgtcaaactatgaccacaaccaaccgaacggaatgtccaacttcttgtttgaacgtcgccatatggttgcatatcagtcaaaccgtacatattgatattatcttgatctaaatacgtatctttggcatggaaatgatggattgctccagctttccctaagatcttgatagcgccaactggatcaattccttgccaccacaaatgacttggatctaagttaacaccgattgcatcatttgtttcttcacgcagttttaaaatggtatatggtgtatgacataagaaaccaccgtgcaattcgataccaattttaacaccagaagccgctgcaagttcgccaatttctttccagtaaggaattagcttagtttcccattgccatgttttaatatcgctataaacagtcggccaaggaattaccggccagttcggcgctttggcatcgtcactatctcccgctgttccagaaaatgtattaacaaccggaacattcattaaagaagctagtttgattgatttgcgcaaaatttcatcagatgcagccgcttcttctttattgggagaaatcgggttatcgtggcaactaaaagcactaattgttaatcctcgactagtaaatttttctaaatattccttgcgcgctgcttcactcgctaaaagttcatcggttggacagtgatgattcccagggttcccaccagtcccgatttcgacagcatcaagtcctgccgcttttactttatctaacatttcatctaatgataaatttgcaaataatggtgtaaatacgcctaatttcatgtttatttcctccctattttttcaagtggttgatgatttccatattttggatatgtttttcgaccttctgcacaccagtgaacgccgttaataattacttgctgaatatccgggtggtgatacgttggataagattcatggccaggttggaagtagaaaatccgcccattgcctcttttgtatgtgataccgcttcggaaaacttctccgccttcaaaccatcctaagaaaatgagttcatctggtgctggtatatcaaaatgctcgccgtacatttcttcttcatctaattcaataaattcaccaataccttttgcgattggatgcgtcgggtcaactacccaaagacgctccctttcatttgcttcacgccattttaaatcacaactcgtacccattaaacgcataaagatttttgacatatgtccagaatgaagtacgataagccccataccttctaaaacacgtttttgcacacgatcgacaattttatcttctacgcggtcgtgccccatatgtccccaccagattaggacatctgtattcgctaaaacgtcttctgtaagcccatgttctggttcttccaaagtagctgttttcgtatcaattcctgctttttctaggaaactagcaatttgtccatgaattccatctggataaattgcaagcacagcatcatcttctttttcgtgtaaaaattcgttccacactgtcacacgcgtcatattatttctcctccaatacattcgctaaatacgtataaccttttgcaacacttgttaacggatcttcaacaaatgcttcttgctcaataactagccattctgttcctgcattaagcgctgttttcacgtatcctggaacatcgagaattccttcgccgataatggtgctttctttattcgttttcgctttatctttaatatggattagcggtactcgattacgatatttttcgataaaaggaatgactcctacaccagcatactctatccagtaagtatctaattctgcaaccatttcaggaacattctcaagtaaattgtccaaaatgatttcgccatctaatttttctaattcgtgagcgtgattatgatagccaaacgccattccggattgttggattgcttttcctatgttacttagctctatgctgaattcaagccatccttcttttgagtcgaaatcggcatatggacaaataatgtatttattacctaattcccgttcaaaaagaatgacgttatctaaattggcttgaagctcttctttactaatatgtgatcccgctacttctagtccaagttcggctaatttcgctttgatttcactcgcggatttaccataatagccagcaaattccacaccgtcataacccatttccgccactttttctaaagttccaaagaaatcgtcttcacaagcttccttaacactccataactgcaaagctatttttgctttcataaaagcacttcctccttaattaaaataaactggttgtcctgtttttgaggattcatagatagcttctaaaatttgtgttacgacaagagcttgctcaggttttacaactggatcagtatcatttaaaattgcctctaaccattgttctgcttcgattaaggctggatcatcacctgttccatcgtaaaaatcaacgccgcctgcttctaattggattttcttttcatacatttggctgtgtgcctcaccgttaattcgtaatccatcttccatatcagcgccaccttctgttcccgaaagtgatgttctcgcttcaccaacatctaatgtgtttagcgcccagcttgcttctaaaacaatcgttgcgccattttccatagtgataaaaccaaatgcagaatcttctactgtaaatttacttggatcccatgaaccccacgcattcgctgcattttcttttttcgcaagtttatggtagctatttcctacgacatattttggtttatagttgtccatcatccaaagtgttaaatcaagtgcgtgtgttccaatatcaataagtggtccgccaccttgagcttcttcgtccaagaatacgccccaagttggtactgcccggcgacgaatcgctttagcttttgcataataaatatcgcctaattcaccattttcgcaaacttgatgcaagtaatcagagtctttacggaatctattttggtaaccaattgttagttttttccctgtacgattagcagcttcaatcatgcttttcgcttctgctgttgtttttgccattggtttctcgcacataacatgttttccagcttccatagccgcaatagaaatttctgcatgagaaatatttggtgtacaaacatggatgacatcaatggatttatcttggagtaattctacatagtttgtgtatacgcttgcattttcgctgccaaattcttttgctgccgcttccgctttttctagaacaatatcacaaaaagcaaccatttctgctttctcagcttttaataaacttggcatatgcttcccgtttgcaatgcctccacaaccaataattccaacttttaatgtcataataaaaaacctccaatagttttgatagttacatcatacaaaactactgaaggtaattcttcctattttattgcttaattattcccgtatattgtcttcctgtatttaagaggcgctacccccatcgctcttttgaaagcatggtggaatgttttaacgctactaaatccagcaagttcagctacttcggttacagggaacgcttcatttaacaacatccatttcgctttatttaaacggtaatcatttaaaaaagtcacaaacgtcataccagtatttcgcttgaaaaatttcgtgaaataatacgtactaaatccagtataatccgcaacttcttgtaagctaactggttcttgataatgtttttctacatatgaaaaaatctgatctagcttttggagtgtttcttttgatttaagtacagctttttcggaaatgacgctatcaggttgcgtttttttctgtggtatttcgcggtaaattaaaccaataatcgctagcagatcggctttaagaatataatgtttgcccggggaatcattactcgattctaaatggatatttctaataagtgattgtaccttcgccgtcgtttcttctggccattctcggcttaaatgagccatctccgtgagcatttctcgaagggtgccattttgtccgtccatttgcatttcttcttgaaataggcttaaatcaaattgaataacaatacgctcactatttggtgaagctaaaaaataatgtacatctccgccgttaatgatttgtatttcaccctcattaagttggatgggcatatcatttactccaaggtttagactgccttttagtgcataaataatctcaatttctttatgccaatgaggataaacaagaacttctccttcattaacaaaagatcgaaacggaaatgctttatttaattctggaatttccaagtattcactcattgcggaactccttttttctttcattttagcataaaaaagaagacagccggtagactatcttcttttatttataaaattaaagattcatatggaatttcattgaatagtttttctacattgataattacaggaattttagtatttaataaatatccttcttttttgagttcgctaagagttagactaagatattctcttgtgattcccataaatttagataaaaatgtagttgataattcttgtggtatttgaatattgtcaccgtttgaaatgccatattcatagccaatcgcagcaatcacgtgcttgacgcgatcttttactttgagtgtgttaagtaaacagcgacgttgcagaatcataatttcttttttagattgaaaaagcataaattcttcaatgctcacatgtttttccaccataaaaataaaaaaatctctatcaactgcagtaatcacactagaactaggcgataataattttgcgctaatattacgttttaaatctgaggacataaaagatgaaaaattgcatacatcaccatgtttcagtaattgatcgtatcctatataatcatctatttgtgttcctttcataacaatccctttttcaacaaaatagatccctgttacaaaatcaacatcaaacagctcgtttttagaaagcttaatactcatactatgtttagcaaaatccccagacttcttacaaaaatgaagcggattggtcaagatttcatgttgtcttttttctaatgtgttcattgcaaattcctcctctaaagtataatatcacagaatgaaaacaccctagagaaggcttaaaccaaataaaataacattattatcaaaaaacaagattttttttactattaggcattaaaaataaacattttttaggcgaaaaacagccaaataagtactttttgtgacagtttttctcacgtttttttagatgtttttttaaattttccaccttttacgcacagaaaatcaataaatattaagttttataaattatagttcatcgattttttttattacccacggtttatggctatcgtctaaaattccttcttttcttagtttgagtacgataatattcgtgtactctcttgtcgtatttgcgtattgagccaaaatagaattattaatttcatctggcaaaataaaatctttatcttttgttactcgtcccatgtacaaaccaatttctttcagacaagctctaatgcgaagttcctttttcataaaagtacgtttgctcgctttaaaataaacttttcttgtataaagtaaattcgataataaaaatttagctttttgattattttcgtctaacactcgtcctacaaaatcaggatcaagcacccagcaacgaacttgcgttaaacaccgtaaaaaagcgtcttccggttcctctttgattagcggaattaaattgatggcaatctcaccaccaacaaaactaataatgccaaagtcgccatattcatttttgagacaataggcaaaatatccactttcaactaagtaaatcttgaagtttttgttgtcgttcattttgatttctttgcctcttgggaaaatttcttggtagcaatattcatgaaagtctatatctttttttagtaattggagtagggctttagttgttgtatctttgaaaatttcttcatctgaatgcatgttctaacatcctctctattaaattacaaaaaaactgcagactaggtgcttctgcaagttctttttagttgaaatatgggtttgttttcttttcatgaccgattgtagttgcatctccgtgtcctgaatatgctgcgaaatcgtctggcagtacaaataactctgttttaatactattgattaacgtgtcaaagtcacctgtatataagtcagttcggccaatgcttcctttgaagagcgcgtcaccaaccactgcaaaatcatcgaaaataaaacttacgctaccgatagaatgtcccggtgttggcaccactttaaaacgaaaaccttctatattatagtcacctaatgtaaattcgtattcagcaggttgtgcaataattgcttttcccgcgatatgcgcagataggtttaaatctggatttgaaagccattcttgttctaatgggctaacatataccggaatttgataagtcgagcgaatttcttctaaagcgccaatatgatcataatgacaatgcgtcagtaaaacagcaattggtttcactcccaaactagcaatttccgcttcaattttattagcttcatcgcccggatcaacaattaaagctaaattatcttgataaatgatataacaattttcttggattattcctgtcataattcgtttgatttttgtcatttcacttccgcctttcttcacattcatcattataccgaaaaactggctttacttccatcaatattccttgtttgtattcacttccgagatatactacaatgaagaaagaagtttaaaaggaggaagaaaaaatgactgcaaaaatgttacatacgtgtatccgcgtaaaaaatctaactgaatccattgctttttatgaaaaagcattagggttaaaagaagttcgtcgtaaagatttccctgatttcgaatttactttagtttatatggcgtttgaagaaggcggttttgaactagaattaacttacaactatgatcaaaaagaagcttacgatttaggaaacggctatggtcatttagctgttggtgttcctgatgtacgtgctttacttgaggaacataaagaagctggctacactgtcacagacttaaaaggacttccaggtgaagatccattctattacttcttaacagatccagatggttataaaacagaaatcattcaagatggcgctttataattaggaagagaactggagacttctaatgataaaatatttcataattattttaattgcattagccatcaatgggattagttttctattccataatgatgtagctaatcttatcgctgttatcattacagcagtattgctcgtttatttaatggtagatttaaccaaaatgtatcgacgcaaatgaaaaaggaccagcaaaatctaatagattctgctggctcttttttattattgaatgactaggttacttgcgacttgttttgactctttcatcaggttttcgataatatcacttgtggaacgaatttcagttaacattccacaaatttgcccagccataacggaaccattttcaacgtcaccttcatggactgcttttctaagagagccaagtgttaattcttctaatttatctctagaagcattttcgttttctagttctacatatttcttaatcattgggtttttaatacttctaactggcgcaccatttcggcggcctgttacagttgtgctcgtatcagtggcatcaagtacggcttgtttgaagctagcaggaaccggacattcctcagcaacaaggaaaagtgtaccgatttggacaccgcttgcacctaatgcataaactgctgccattccgtggccatctgcaataccacctgctgcaatgacggggatatttactgctgaaacgacttgacgaactagcgccatcgttgttgtttcaccaacatgccctcctgcttctgtaccttctgcaacaactgcatcgacaccgatttcttccattttttgtgcaatttttacagacgggataacggcgataactttaattccagctgctttaaatttttccataaatggtttaggtgttcctgccccagttgtaacaactcgcacatcttcttcaataatgacatcgacaagttctggacaatttggcatcatcagcatgatatttacagcgaacggtttcgttgttttttctttacaaaggcgaatttgttctcgcaatgtgtctgctgacattccacctgatgcgataattcctagcccacctgcatttgataccgcggaagctaattcatatgtggcaatttgtgccattgccccttgtaaaattggatatttgatttgtagcatttcagttaaactcattttcttttctcctctctatttttacgctaattctttcgttggttgttttttctcacgtaatttataaacaatattaatacaaagtcctacagcagcaagtgcgatagctatatagaaagcttgtgtgaagtcgccaccgttttgaccggcgatttgagctgccatttttggtgcaaagaaggctgctgtggaataaccaatgaagacgattccgtagttgacgccttgatttttcggaccgtaattttccataacgatagatgggaaaacgcccattgtcccgccaaagcaaagtccaagtccaatgattccgataacaaacccaacaaccgattgaagcgttgcaagtgctagtaaagataaagcaataactgtatagataatcattaatgtattagatctacctagacggtcagatacagcgccccaaactactcgacctaaacagttgcttagtgaataaatactaacgtaagcagcagccgatgcagccgttaagccaaacatattttgaccaattaaggatgcattagaagcaatcatcagacctgagaatgcgccaatacctagcattaaaagaatcagataaaaagtaactgttcgaaccattccagtccaaggtacatttaccataccagctgcatttccagtaggtggtgtccaaccttttggtgcatagccagctggtgcgacgcgaataaggaaactacatccaatgacaactgcgatataaacagctcccataattttaaatgctgtcattacgttatatgtttcaattaagtggttcgcaatcggtgcagcaataattgtcgctccacccattcctgcagtaataagtccagaagcaagaccacgtttatctgggaaaagacgaatcgtgttactaagacaacctgaatacgcaaaaccttgtccaagcccagcaagaacaccataagacaagtaaagcatcgtcgttgaagtagcaaaacctgtcagtgcaaaaccaagcccaaagaggattcccccaattaaaatggcccattttgctttccctttatccgttaaaattccacctaaaatagttggaatcggcccaatcgccgcattaattgtaaatgccatcataacctgtggaattgtccaaccatgagcagcactaagcggtccagcaaaaacactaaatgcatataccgcaccggtacaaagcagaacaccaacagagccaatcaagactccccaacggtttatttcttttgtcatatagatactccctctcttgtttgtttttcaataatagcttttaagccaccccattgttcgctaaacataccgctatccattacttttaaatcactcgcaataacgggttcgaattccatttgtccaagaatatctttttctaaatcaacgcctggtgcgatttctgttagaaccattttgccattttctaaacggaatacagctcgttctgtcacatagagaattgtttggtcggtcgttgaagcgtattcgccgctaaatgtgatttgttgaacttgtttgataaactttttagcttttccttcttgtaaaatctctagtttgccgtcagctactcgcgtctttaatccacctgcagtaaaagttccggcaaaaattaattttttcgctgattgggagatattaataaatccaccacagccagcaactcttgagccaaacttgctgacattcacattaccggattcgtctgtttgcgccaaaccaagtacggataaatcaagtccgccaccatcgtaaaaatcgaactgcgaatgatgatcgacaatagcttcactgttatacgcatgaccgaaatctgctaaaccagctggaacaccgccaacagatcctgcttcggttgttagtattaattggtcactcacgccttcttccgctgcaacagtagaaacatttactggaattcctacacctaaatttaaaatggtttgtggttctagttctgctgcagaacgacgcgcaatcactttacggtcatctaacgcaagtggctcaatatcgccaagaggaacttgaatgtgtccagagaaagctggattatactgtgtattttcagtttggaaatgattttctggttctgaaataacaatatgatcaactaaaattcctggaactcttacatctttaggattaagcgatccttttttcgcaacagattctacttgagcgataacaattccgcctgaatttcgaacagcctgcgcaattggcaagacttccatatgtaagccttctttttctaaagttaagttcccaaattcatctgccacagttccgcgaatgagtgcaacttgaattggaaaacttggataaaatagccattcttcgtcttgaatcgtcaatagctctactaagttatctttagaactcgcggacattttcgccccttcaatacgcgggtctacaaatgttcccataccaatttttgtaataacgcctggtcgcttagctgcgatttcccggtaaagttgcgtaattacaccttgtggtaaattgtatgcttcacatttgtcttcttcaattagtttcgccattttaggagaagcaatcgcaattccgccaatccagcgtttaattaatccttcatgtccccaatgactcattcctttttccctgcgatcaccaagcgcactagcatgcataacggttagattacgcggagccccttcttctaaaaaacgcttttcaaccgcgatagccatttcttcattaacacaagctaaaccgaaaccactaaaagctacagtatcgccatcttttattaattttgctgcttcacttgcttttattacttttgacaaattcctcactccttattgttcaattattcacatatatttgtaatgatacgcacttacttataaagcaactttcatgccaacatttaaaatggctttatatcaacctttttaaatttaagcattattaatcgtcgcaaaaaagcgacataaaaattagcactgttacaaaaaatagtcgcgaaaatgcaacaaaaaaacctaatcgcgtattccgattaggttttctaaattaatgaagtgtttttagttttcgatataaaacagagcgatgaatcccaagcacactagccgcttttgtcacgtttccatcactttcttcgagcactcgcaatataaagtgtttttccacgtcttgtaaataatcttttaaatgaagtgattcttttttcgtttgctctttaaaatgtaagtctagcgcaaaatcatctgtttcagaaactgtcacttctttattaccagacataacaactaagcgttcaatctggtttctaagttcacgtacatttcctggccagttatgagaaagtaattctttcgttttatcgccgcttaattgaaaatctttttgatacttttgattaaatttttgaatgaactgacgtgcaaggccaataatatcttgcggtcgctctctaagtgctggaatatgaaccggcactacattaatacgataatataaatcacgcctaaacgttcctttttcaaccatttcgccaaggtttcgatttgtcgctgaaataagtctaaagcgccgtttcgtctcagttgttgagcccagtcttcttacctcgccagtttcaagcactcggagcattttcgcttgaagctctaacggcatttcagaaatttcatctaaaaatagtgtgccgccatcagctagctcaagcatcccgggtttttcaatatccgcaccggtaaatgaacctttttcatgtccgaaaagctcagattcaaataatgcttttgggattgccgcacagttaatcgagataaatggtccagcagcttgttcacttttttcatgaatatagcgcgacaagacttctttaccagtaccggactccccgtataataagactttactgtcaaacggggctatttgattgcatactcgaactatctgtttcatcgcgacgctctccgctactatcacggtgccatcattttctttataatcttcaagaagaagtgactctttattgcccgaaattgcctcaccacgccatgttttaaaactatctggttgcgtttcatctgacatcgtaacaactaaatgcacggtgccatctggatagagaattggcgtagaagtcgaacgaatactaaaacctttcttcgtattgataacttttgttttcttttgtttggttcggattgcttctagcgtgacagaatcattgtacacaccgtcttccactaagtcccttacattacaacgaagtaattcttcaagcgacattccgaccgtaagcgcagtgaatttattagaaattaaaatattaccgtctgcatcagtgacaaaaagcgtcgtcggcatgtccttatttaattcaccaaatgactgtactcccagcaagttatccattaagtcaaacattaaaagctcatccttttggactagtttcctagttatttgctcatcattacacaatctattataacataagacgtctgctagaagtactcgtttttttgcgacaagctaatttccatctgcaatacaaacacgatttcgtccggttaattttgctttatacagggcttcatcggcagatttaaacaaaccttcacttgtattagcaccatctttactactgctaacaccaactgaaatcgtaattttcactagttttccactcggtatcataaaatcgtgctcttccgtttcttttcgcacttgttcagcaaaaaaattacctttttcaatcggacaatctaataagacaatggaaaattcttccccgccatttctaaatgcctcagaaccatctgatgtgtttcgttttaaaataatagctaattgtttcaaaatggcatcaccagcgtcatggccgtatgtatcgttaatatttttaaagtaatctatatcaattaacattaatgtcacttgtctacttccggcgtccatcacatggttgattttttcatcaaattgccttacattcgataaccgcgtcagataatcgagtgtagagtcttgttcgtatttttgaaacaattgctttgatttaatcatattcttcattaaacctgcggaaacagcgccaattacaagcgcgatagatacaaatgtaaacatattaacccagaagtctggctcttttgctaaaatcaaatgtaaattaatgactacaaaaccgcacgcaataatattcaaaataaaaacgccccaaatattatatttttctaagcgtttgctaaaaagagctgttataatgccaatcaacatcatgattacaccagccatcactgctgcagaattcactgaaattaaaaagcgtgaagttgtaataatgaccgccgaaacaattgccggaatgggcccgccgtaaaagcccaccataataataggaatatgacgcaaatcaacaattacattatttgaaatcggtatcccaaaaatcattagtgcaaatcctagcagccctgcccatacacctatcaccatttttctatttatcgataattctttcgtaattggctctttatagactaaagaaataatataaaatcctgcgagtaatatcgctgcattacttaccaactgttcaaccaaaaagcatccccgcctttcactttgttatttaataccccattatgctcacaactattcattctctctatacaaagaaacaacccctaaatgcgaagttgttaaaaaatatccatctttctattttctcataaaaaatccgcaaaagaaaataattctctcatgcggatttgttattttttagtaagctgtccaaccagcgtctgcagtaattaccgttccgtttacaaaactagcatcatccgaagctaaaaatagagctactttggcgatttcagaggcatcaccagcgcgagggtttgttcccattccaatcatagctcgttcttgcccaaattgatctggagcataaatagtagtaccaatatttgtatttacagctccaggtgctatagcattacagcgaatatttttattagcatactggaaaccaacattttttgtaaaaccaacgacagcatgcttagaagctgtatacgctgcccctgctcttgagccaaacaagcctccagcagatgcgatattaacgataactccctgtcctttttcttcaaagatatgaagtgcttttctagttgctcgcattactccagttgtatttatcgcaaacactttatcccaaagctcatctgttaattcgccggctgggacaaaattatccatgatgcccgcattgtttactaaaatatctaacgttccgtatgtctcagtagctttgttaatcatgctttcaatatcgtcttgtttcgtgacattcgcaacaaccgcaagtgctgtcccttgttcgtcttcaattaatgcgactgttttttgtgccgcttctaaatttaaatccgcaacaacaaccttcgccccttctttcgcaaaaagaaccgcaatttgttgccccattccagaagctgcccctgttacaactgctacttttccagctaatttccccattattacttcctccttcacttttgatacgctaaaaaggattaaatttcactccttcttatttcaattatagccccgatataaagcgctttcaatatgtaaagaaagcctgttttgttgattaagcaacacttttgcgttatatgtatagtaataggaaatttttctcggatgggagtttcaaatgatggatagaaggattaaaaaaacaaagcaagccttaaaccaagctttatttactcttcttgatgaaagaccttttcaacagattacgattacggatattgttacagtagcagatgttaaccgaggcacgttctataaacattaccgtgacaaagaagaacttttagatagcatcattgatgaagtgctggctgatttacaaaaagcgtatcaagacccttatacacataagacgcctttttccattcaaacacttacaccttccatgataaaaatttttgatcatgtttatggtcatcaagctttttatacacaagttataaaatcgacaatccgtcccagttttcaaaatcaagtttgtgacgttattcgagaactgattttgaatgactttgactactcagttgacagttcgagtatagagcccatgttacttgcgtcttatcaagcacatgcgattttcggcatgattgttttttgggcagaagaaagttttgctcattcgccggcgtttatgtcagagcaacttcttcatattattcaggctaaaaacaaaatcgtataattcttacatatttgttatattattttccttctttgtaacttgaaacgagggcttcataatcctagccttgctataataaagacatcttagaaaggtgtgttgattatgaatgatcatcgtattttaaatgctttaagttattttagtatcctctttgcaccagttattgtgccagtattgatttggatttttgctaaatcagaggatgttactcatcatgctaaagttgcattactaactcacattattccgactatcgctggtttcctttgtttctccagtgttttcgttacagctttgacaaacggcggcttactcgcaaatgtatcatttttcgttaccggtagcttatttatatttacactaatagctattgttggactgtttatctttaatattgttcgaggtattcaaatgcttttaacaaaaaatgaagaagatgcttggatttaaatgaaaaagctatcctaaatttcttaggatagctttttttgctattttatttgtttaggttttcttaagaagaatactccagcaacactaacaaacaatccagtgaatagcattgtataagggaactcatctcctgtagaaggaagttttctcttattatttggtgatttgttggttgttttaatgttttgttttataggttttggctctgctactgtagctgattctgttagctgttctgttggttttgatggttcagtaggttccacagtaatcggcattgcctttttctcatagacaaaggttatttcttgtgaagtttctttatacataccttttttgttagcgggatctttaaccaatgtatggccaacgatttctttagctttcacactgtattcttcaccaacatttccagtatgcacttccttgtcatttaattgattgccgtctacatctataaagttaactataattgtaccaatttttttcttgttggttttagttaccttggctgcttctgattggttaaaatcaatcgtgaagttaactggtgtcgcgtctaattggtatccggttggcgctttggtttcaattagcttatagtcgcctggcgctaaatcagctacactaatttctccattatcatctgttacaagattttcgcggactaatgtgtcgctctcatttcgcaactcaaatgtagcatctgctagctcggcatttgttgcgctatcttttttcgttagcactaccgtgcctgtttttgctgtgttgattttgcttactttcgctgcttctgactgattaaaatcaatcgtgaaattaaccggtgtcgcgtctaattgataaccagctggtgctttggtttcaattagcttatagtcgcctggtgctaaatcagctacactaatttctccattatcatctgttacaagattttcgcggactaatgtgtcgctctcgtttcgcaactcaaatgtggcgtcggctagctcggcatttgttgcgctatcttttttcgttagcactaccgtgcctgtttttgctgtgttggttttgcttactttctctacttctgattggttaaaatcaattgtgaaattaacgggtgtcgcgtctaattggtaaccggttggtgctttagtttcaattagcttatagtcaccgggtgctaaatcagctacactaatttctccattatcgtctgttacgagattctcacggactagcgtttcgtcctcgtttcgcaactcaaatgttgcatctgctagctcggcatttgttgcgctatcttttttcgttagcattaccgtgcctgtttttgctgtgttggttttgcttactttcgctgcttctgattggttaaaatcaatcgtgaaattaactggtgtcgcgtctaattggtaaccggttggtgctttggtttcaattaacttatagtcaccgggtgctaaatcggttatttctatattaccgctcgcatctgttgttagtttttcttttagttttgacccagtggcgttttgtaattcaaactcggcatctgctaatacttcatgtgatgcactgtcctttttcgttaaaataacattgccttttttcattgcattcttgatggttaaaagaagttcctcaccagatgaacttacagtaatttcttttccttctttgtattcatcgctaatgttgtaaccttctggtgctttggtttcaactaatttatactttccagattgaataccatctagtaaaatttcaccttctgaattagttgttatttcttgtccagatttttcaccatctagtgtgtaaagctgaaattttgcgccttctaatttcttcgtagtatcgtcttcatccacttttgtgattttaatcgtaccaatcgttgcaatacctgatccagttcccacagtaaagactggtgatactgccacatttctctttttaaaaaacattgggacattactaaaatcttctgcttctaccgtagtttcgttagaaattggtcctgaaagtaaacttattgtgctgtagtttactttgattggcgccattgcagtatagtttttaaattgaatggtaaaggtatttccttcaaaagtaatatcataattttcttcgtttatcggttcgttcgtttttgtattaattacttgaaaactatttttaataaactgagcacccgtatttccttgttccaatcgattggtaataactggattagacagtgttctttctggagtaatattcaaaagttccatattccaattcactttatttccaaatgtactatcgatgtttccagctaccttaataacttcattttgcaaaaaagcaaactctttcgtttcgtatatttgttcatctgctccattatctgaaacgatagctttattgtttacccactgtgagaaaaaccaattatcttttggttttgttttatatttaacaaatacacgattagtatctaaattaccaaattctaaatgtattttattggctgatgtgtctattttggttggataattagcatccccaacttgtgctaaagtcccttttatctctagaggaatactcaagtcggtcagctcggatgaattaactacattacgatactgtaaagatccctctacaaaggttgtaccatccagaaattcatcatctaaaaccaatttattatattttttccccattgcattgacagatacaatccaatttatttcaccagttgccgggttccatttgccgaccttcccaccgttagctaaaatactagtttccggtgttgcttctgcctttattgtttctgaatactgggttaaactaccgtcaaaatatgaaaacgaggctttattatttagcgtgtttgctccatcagttaaatcaatttttgttttcattttcacaacaattttattatctgttgtcgcatagttaccgataagtttaattttaaaaccatctggcgtgacgtctttttggatggtgaagtctctaccttcagttaatatgttatagcctgaatcagaaggataagcgtacacactgtagctgattaaactttttacacctgtagaaaactcgtcaacgatattaatattttgcatattaataccttccgaattaactgtaatagtccaatccattgtattattataataatcaatctctccagcttctttttttagtaagtctggcttgaaatcaaagttttctgttgctttaacacctttttcatccgttacttcatttttaatttttcgtggactaaaatcggttagttttgtagaatacgttacttgatacgcttttttatctgttttcttgtagttcatattaaaactaccgttatctgatatagtcgaaacagtccaatcattagacgcatcctcgcctattactacttctcctgattcttcattaaaagtgacttgcttgattttcaaagaatctgcgacataactaacattatcgtctgttaatacatcttttaaaaccgtatcaggtgtcaaatttgctaaatcataattaacattaattgtccaatcaatacattgagttacagggttataaactgcttttttagttaaatgatcatatgcttttattgttactgaaatggtcatacttccatttgataacatgccagagcttccaactgttgttgctgaagtccctaaagtagtcaaagacgtatttgtcttatcaatggaacgctcataggtaacttgatatccttttgcttttagaccttcttttaatttaattgttaatcctgaaggtgcataaatcaattcataatctgtaccctcgttaagtaattgctttgacccaatgaatgttcctttagcactaatatctgttgagtagaccttaatactattcctattaataatagtcgaacctccgtaagcagtgtccgatagcctaagttcccctagctcattactttcttttgttaaattaaaccttgcatccacggtagctttatcaggattgagtttacccggagttgcttctagcattacctgtgtagccttgtctacttcaggaataatttctaactggtaaattgtattaccacccgccgtattaaaaactgcttcctgccttgttttatctgtctcagagaaactttttagcgcagtactaagctcaatatcataattaccttcttgcacaccatcttttaaaaaggtaatagttaattcccgagtgcttgcattcaggtcccatttcgcttcagttgaaggcaagaaatctcctgttaaattggttgttccaaagttgaatgtctctggtaaaaccgttttaaatgtatctccagctttatagtttttccccgaaaaagtaaaattcattttcagaactactgctccgccattttttatgcggttagtcgtactaagttcattcccagttccattttctacctttactgcagtaaaaatattatctgctataactgctttcagatttccttttttagagggttgttctgtaacaattggagtcttttctgcttcgtctttggttgaaatagaagttataacctcatctttatcagctaaggtgacgttataagtttgttcgtctaaagtaaaccctggggcagccttcttttccttaacaatatattctccttctgagagtgaattttctacaattgtcccgtcttctgttatagaaacttcttttgtttctccagtttttttatttttaatttcaaaagaagaaccattgattttttcttttgtatctttatcttctttaattattttaagcgttatcatttttgttttttcatctataatcgttgctaataccggcgaaaagttttgaaaaacgagtaaaccaataattgcagcgataaaaaaacttctccattttaccatatatttcattaagctgttttcctcctatgcaagctatgtctgttgtataagacctatgactcgttgaattataacaaaagacgaggggtcgaaaatgttcttagagaaccaaaaaatcgatttattatggcttttcagtgaacaaaaacagtatactttatactaaaaatatactgtttcaatactaaatctcctttttctgcattattagatggaattctttctatatataataaataaaaaagtcgctattcttcacagaatagcgactacaattattaatcatttacttttttggattttcttagtaagaaaagtccaagtgcactagcgaataatcccgtaatgatgagattagctagggaatcatctcctgttgaaggaagactttgtgcttttttcactgtagcttgttttgaagggtttactgttgattttactggttttgttggtttagaaggtttaattggtttagtaggatcaacaacgagtgatgatttatttttctcatatacaaaggttactttttgatctgcttctttgtataggccaactttattcgtaggatctttcgttagtttataacctgcgatggatttcgctttggttacatattcctccccgactatacctgtatgaatctcttgttctgctaatacatttccttttgtatcaacaaattcagctattaccttgccgcttacaatagttttaatatttgttttagttacttgaagcacttgattttgattaaaaccgattttcacatcgactggaacggtatctaattcataaccttttggtgcttttgtttcaattaattgataatcaccaggagctaaatttgttatttccagtttaccagaagcatctgttgttagattttctgtgacgttattatctgcgtctactaatttgaatgttgcgtctgcaagaggggcttttgtttgcccatcagttttagttaacacaactgatccagtagacattttattcgttttagtcacttgaactgcatctttttggttaaattcaatggtgaattcaactggtgttgcatcaagttcataacctgttggtgcttttgtttctactaattggtagtcgcctggtgctaagttatcaatttgcaactgaccatttgcttctgtcactaccttatctttcaaactgacaccaagttttgtttgtaattcaaactctgccccagctaaattactttttgatttactatctagtttagtaagaactacactaccagttttcgcaacattttctttcgttactttgactgcagtcgcttggttaaattcgatagtaaatgtaactggtgtagcatctaattcgtagcctgttggtgcttttgtttctacaaacttgtaatcgcctggtgctaaatcagctacttctatctcaccacttgcattcgtagtaagattatcttttactttagttccagtagcagtttgtagttcaaattccgcatcagataacgcagcttttgttacgctgtcttgttttgttagaactacgctaccagctttggctgtgttttcttttgttacagctactactgatgtttggttgaactccactttgaatttcgttggtgttgtatctaacacatagcctgccgcagcttttgtttctacaaattgataatcccctggtgctaaatcgtttacttcgattttaccgtcaacatctgttactaagttttcggatactttagttccgtctgctttttgtaattcaaattcagctccggctatcgtagcttttgttacgctatcttgttttgttagaactacgctaccagttttggctgtgttttcttttgttacaactgctgctttatcttggttaaattcaattgtgaattcgcttggtgttgaatctaatacatagcctgccgcagcttttgtttctacaaattgataatcccctggtgctaaatcatttacttcgattttaccgtcagcatctgttactaagttttccgatactttagttccgtctgctttttgtaattcaaattctgctccggctatcgtagcttttgttgcgctgtcttgttttgttagaactacgctgccagctttggctgtgttttcttttgttacaactattgccgctgtttggttgaattccaccgtgaatttcgttggtgttgcatcaagtacatagcctgttggtgctttcgtttctacaaattgataatcccctggtgctaaatcgtttacttcgattttaccgtctgcgtctgttactaagttttcggatactttagttccgtctgctgtttgcaattcgaattctgcgccagagatagcatcttttgttacactatcttctttttgcagaaccgcgctaccagtttgttctgtgttttcaattgtaacgctcgtcgctacatcagcagtaatcgtgatttctttaccatctttgtattcatcactaattgtatatcctgttggcgctgctgtttcaactagtttatattttcctgattgaaggccgtccatgacgattttcccttctgaatcagttgttgcttcttgcccagctttatctccttcaggcgtgtaaagttggaatttagctcctgttagttttttcgtattatcttttttatcaactttggtaatttcaagtgaaccaattgtcgccgtcccgctgccactaccaatggtgaaggctggagaaatattcgttgttctagatttgtatgacattgggagactaccataatcaggtgatgctgttgtagccgtgttactaatcaaacctgacatcaaactaactgtactataggttactttgattgggtctgttgctttgtaatctttaaactggatggtgaaatctttatctgtaaacgttatatcatagtattttgagtcaatatcgtccccagttgtttcattaattactctaaaactactttttacaacttgcgctcctgttgttccgtttttcatcgtatcagtaattgttgggttattaataggacgatcttttgaaatattattaagtgttacagtccagttaactttattattataagttgaatcaatggaagctgtttttgtcatcgcattgaaaactttactcgcataggcttgataagaatatgtgtgcttatctgtaccattatcagtaacttctgctatattcgtcacatatttatagaaataccaattttcatctggttttgtactatatttaataaatacacgagtgttgtctaaattggcaaattctaaatgtattttattgccagttgtatctactttggttggataatttttatcccctgctttggccaatgtcccagtagaattaagtggaatttgtaaactcatcatttcagttgatgactccacattacgatattgtaaagagccttctacatatgttaatccagtcgggattgtgtcatcaaaaatcaagttatcgtagcttttcgccatcgcatttgcagaaacaatccaatctatatttcctgttgttgaattgtacgcaccgtatttcccaccatttgtcatcattttcgcatctggtgtagctgaagcagttatttcttccacatatttgatagttcccccatcatagtaagagataaacgctttattatcaatcgtcttcgtcacatcagacaaatcaatattagtaacaatatctactacaatttttttatctgtagaagcataatcaccaattaattgtatataaaaccctgctggagtgacattctcattaatagtaaagtcttttccttctgttaatactacgctagtgaaattatctgtataagcacgaacagtatagcttttcaggctttttatacctgtagaaaatttatctgtaatgttaagattatccattttaattttgtctgaattagcagtgattttccaactcattgtattattgaagtaatcaatgcttcctgcttcttttttcagcaaatcaggttgaatagcaatggttgcatcagctgaaacgccattttcatccgtaatttcatttttaattttacgatctttaaaatcagttattttagtagaataagtgatttgatatgcgtttgtattagtgtttttatacgttaaattaaaattcccattatttgagattgttgatgttgtccagtcgcttgatgcatcactaccaataattggcacaccagttgtcgtattaaatgttacgcgtttgattttgagtgaatctgcaacatactctacatcattatctgctaacacatcggtaagtacagtagtaggagaaatttcatcttggtcatagttgaaattaattacccaatcaatactttgtgtcgtaccattataagtagcttttttctccaaatgtttgtaattggtcatcgctaaatagacataagaagaattagttgatagtataccagaatctccaaccgtgtaagcttgggtagacatgtacgaaagtgaatcacttggtttattgattgtgcggtcatatgttacttggtagcctttcccagcaagcccaccattaagcgaaactactaaagctgtcgaagaatatgtcaatgtataatctgttccttcaacaagtaattttttcgtaccaatgaaggttcccccagcactaacatcactcgaatatactttgatggtatctttatcaatagttgttgttccaccagaagcataatcattaagtttcagctcacccttagcatctttttcttttgttaagttgaacttggcatcaacttgtccttttgttggattaacaactcctggatttgctgtaacagatactgtagttgggtacgtaacaactggaactacttcgatttgataaacagtatctttcccagctgtcttgaaaacaacttcttgtattgtttcttctgttgatgtaaatactttgaaggctgtactgatattcacatcataatcgccttcttgaattccatcttttaagaaagtaatcgtaagttcacgcgttttaacgtcaagtgtccattctgcttctgtggaaggtaagaagttcccacttaggtttttattcccaaagttgaaagcatctggtaaaacagttgtaaacgtatcccccgctttataattttttccagagaatgcaaaattcatgttaagcacaacaccgctaccattttgaatccggtccgatgtgttaatttcatcaccattgccatcttttagcgttactttgttaaaaatattgtctgtaatagcagcttttagatttgcattttgtgttgcttttttaaccggtgttggtgttgctgcttctttcgttgtttcttcttgcacttttgctgaaaccgaagtaatcacttcttctttttctgctaaagttacactgtattctttttcatctagtgtgtaaccttttggcgcaactttttctttaacaagatagtcaccaggtaaaagtgaatccatagtcgcctcaccatttgcgctgattgttaaattgtttgttttgcccgtttctttattctttatttcaaaggtagaaccgttgattttttcttttgtatctttatcttctttggtaatttttaatgttgtttttgctgtttcatcgtctgtcattgtagctagtacaggtgaaacgttttggaatactagcaagccaataaccattgcaataactagttttttccattgtctgatatttttcactgcgttttgtcctcctataatctatttctaactgttgttaaatcccttatagacttgttgaattgtaacaaacaaatgcacccaataatcactttttgcgaaaatataaaataatatgtgtctttttggtgaacaaaactaatcacaaacacctaaaaaacgtttaaaacactggtgaaatcattttttcttcataatcacaaaagtacttgatagtaatagcattccaagaataaaccataaattagttttcttagaatctcccgtttgtggtagttttgccgatttttccacgttgtcagcccctttattagaggatattgaaaacgtgctggctttttcatacacataagttactctttgtgaggtgttcgaaaatttccccgatgcatttttgggtgtttgatacaatttatatcccgagattttttttgctgaagttcgataacttgaatttaattttcctgttaaaacaatcgaatcagctaatttttcaccatttttatcaacataatcgacaatgatgtttccggctgtcactttttgataaacaaaagtaactgtctgtgctttttcgttaaatgttccacttacattcgcgggtgtttttacaagggtgtagttagtaattttcttctgttttgcagtgaatttttctccgtaagctcctgttagtgtttctgggctggcaatttgtttgtggttttgatcaacatattgcaccgtaactggcgcaacactgtcatctaaagccactcctacttgggccggctcaattacttgagaattatttacagcaacagcaaaagaattccatgcagctcggtcttcttttttcgtttgctgatttaaaagttccttatctatttggtttttctttggtgtttttaaatcaaattgaattttcatggatttcccaggaatccactcaataccttcttttagctccattttaaaagagtgaattttagaccaatcttgtacttctgaagcggttaaccaatctgcttctgttgcttctcggttatcaactagaggttctgaaccagttggataaatcgtgtgcttatcgagaacgcccgaacgtttaggatttttggcagtactataagttacttcgaccttatctttccattcatttggaattgctactgctttcgttagctccaaattgaatttactaccacgttcgctgttatctgtaattcctaaatctttttcacttggtaaaacatccattaataccatgttggctattttttcgtccgaatcattttctagtaataattgatacgatacgatggaatttgttgtggcatttgccaggccactgtatcctttatcgagattacccttagcttttttactaattttcaaatgattactcgtatttaaaatgtaatggtttcctgatgtgattctagactcttccgaattcccattttgattaatgtcatttgagtcaatttccatttttgtatcagaaatggttggagttcctgtcacttctggcacattaaaatctgtatcctgcaagaatccaaacatttcaacagacatattacttggagtgtcttttgatacggtcacattaatttttgcagttaatttttctgctggtaaaagcgtctttttgtcccatttaacttttagtaattggcgtcctgaattttggtaattactatttaacacgctgacattaaagccttgttgatccgtgtttttcatttttacgccagaaggtaaaagaaccatcgcttcaaaaggacctgttaatcgtgaaatggaagctttattgctttctaaattaacagaaactgaattatcgccaatgtttatcaaatttccatcggtatcatcaaatgcaaccgatccttggacaaatttatttttcccaattggttgcggtatgatttgagccgtccggtctccagcatatttctgccaattttccggccaaggatttgtatcatcgaagtaatggatataaccttgactatctgcgccgtacatattaattttcgtggtatttctaacttctcccacatagccttctttgactgttgtaaagaaagataaatctgcgctgtacattccagctggtgcatacgtgaaatgaagccatactttactcacatgtttatcatctggaattccaaggtcttttctcgaatacattttgctcagttctacatcttcttttaacgtagtccagtcattatcaccatcatatttcacgagtaaattgtatttaggtgattttttcagttgcggccaaccgggataattaacatttggtttaaaataaaaatcgccacttcggaaataatccagatttaaattatcatcaatattgtagtaaacatcatagtagatgaagtcataggaaggtgagtcattcattgccgaatttagcatcaaactaaaacctaatttcgcactatcatatgcttttatatctggatttccagtcacagtagcaattccccaattttcatccactggtcctctgtgggctggagcatagacgcttccgatagtcggcggaattgtcgctggatcacttgcagaaactgaaactgatgcttttgaagtatccacaatgctatcagttaaagtaataaagttcgttgttgcaaccgctttgttttctacagtcgcaaaattcggtatgcttgtttggaagaacgttctaatttggaaagtcttattaagtaaactagttgctttttcttgttccaaatatgtaggtgctgcaatttcccaagttagtttttgtccttcgatttttgttggctccggtgtatcccctgctactcccaaataatctagcttatccgctaacgtatattcaataataattttctttccttcttcaataaaaaggctccctgtagactttttcggtatatttaagttgaaagaccaaatcccaatatctccttggcttggattattattgatactattttccactttcgtaaattcatttgacaaagctgttgtggctgttgcattcacggttgtttcagcttgctccgttactttttctgataaattatccgcgctaaattcccctgttacttctaatttcgttccatttggcgtataaccatttttcgtagacagcttgagaatgactttatcaaccacgccactatttagcgtttggtatttatacacaagctgacgggttgtcttgttataactaggtgttactccggcaatcttaagttcacttaatgattgagtgaattccccatttttcggtaaattgattaccaatttagcatttttataaattgtgtttggtccagttatttttaaatagatgttatagttcactgtctgaccagactcaatcacgtctttttgagaattaatactaaagtccccagaataattcccagttggaaatgattttgtgcttattggttcatttactgtcgtttctttcaaaggctctgttgtagtttcatttgaagtcgtttcctgcgtaaccttttcttccgtagctgcttcccctacgttcgtttcaactccttctttgtcttctgcccaaacagaaaatggaagaagtgacactataagcaaagtacaaattaatatagttactaattttttcaaacgattcacatccgctcctcctttgtttacttaacattaattatttcataggaggaaaccgtgaaatgttcccaagatgcaaaaaaagggacagtttgttacaaaaatgtgaactatcttacgttttagcttatttaaatagttattattaacaaaaacaaccaaaatcattaaaaactttaacgattttggttgttttatttatcttattcgaatcgattcgctttctactaatctagcaccttctacttcttcaccagattttagtatttctgcaattcgctttttatcaattttaggttcttgtagtaaaaagaacggttttagcaaagcttcatccactatttcgacactcgctggattcttctgtatttgaatcgtgaaaagtgtactatttatttttctaatttccattcgttccatttctgtttgtaaataggtttttaatttctgaacattattttctaatgcttgttttcgttttaaaagccgttttgcttcttttcctgccatttcggcatctgctgctaatgatttaattattttaacgatattttctgctttatcatgaaaaccatctgtgagcgcatctaacgtatcttccacagcctcggttttattttcttccaaaagttcttgcacccgtaaataattatcggttaattgatataatttcatcgttcgcaccctttcaaaaaaataaaaaagccccaaaaatcatcctattttggcgctttttcattttgctactagttttccttgaataaccatgcgtcctttttcataatctttttcagtatcgcaagtagaaagtgtaataattcggtccttgccgcttactttgacatttgattgataaatagattgttgcttcactttttgcaaataattgtcaaagtcttttggttctggaaattccgtttcaatataatagaaatcagtcgtcgtttcatatacagcaaaaatttctacttcataattcgcaaggcctgattcatacgaaaatgttggatgtgccgccaagaaatctttgtccaaatattttcgtaaatccgcaaacatcgagccatccttcatattatgcccgtaaataatcgtattcttgtccaaaaattcattcgtattccgataatctttaaaaatacttcccgctcttgctttttcatttttgtaattatgatgcaaataatagtcattgtccgtactttgcaaaatcgggtaatcaatttctgtatcagcaatcgttagccaaccagccatatctttgttcaatttttgcaaagctttaagttcatctctcacttcgccgttcacattagtcgtagtcacttctttcgtgtagactgccttcgcatcatctaaaattgtacggttatggttattttcataaagttctgcaccgattttccaaccagaaaaaagaaacacagctaatacaactaaagtcaggcttttccccaaaaacgacttcattttcacgttctaaaactcctttcgcttctgaggaacaatgtatttccctgttttcgcgtcacaaagcacctctgcaacaactccatacgtttccgctattagctctgttgttagtaaagtctcaggattccctttcgctaccacttctccgtttttcataacaactaattgatcgctatacgtaagcgcttggttcaaatcatgtaaaatcattacaatagtcaatttctcctcttgatttaaccgctttaccaactctaaaatttccagctgaaagtacatatcaagaaatgtcgttggctcatccaaaagcaaaataggcgtatcttgcgctaacgcagtcgcaatgaaaacacgttgtcgttccccaccagacaaactatcaacaaatttctctgctttttcacttagctccgtttgcttcaaagctttttctacagctacgtcatccgcttttgttcgtgtcattcgccaatttttataaggtagccgtccaaaataaagcaattctttgaccgttaattcactcggaagaatattattttgatgaacaattgctacattttgcgcaaattctttcgctttccattcaaaaatcgattttccttctaataaaacttcaccagaattaggagaaagaagtctagccaaaatttctaacaaagtagatttcccactaccatttggtccaacaatcgtattgattttatttttttggatagtaaatgagacatttttcaaaatcgcatctgttccattataactaaaactaacgtcccttacttccataaaaatcaccctttcgcattaaaaagattaagaatggaccgccgataatgagcataattactgaagctggaatttccatttgttgaaataacgttctgccaagtgtatcagcaaataatagcaataaagcaccaaataaaatcgaaaatggaactaaaatttgataattaccaccaactaattttctagcaatatgaggtacgagtaaacctacaaacgctataacaccgacgactgctgttgtaattgaagcaagtaggacagcaatcagcgcaagccatatcctcgttttattaactggaacgccaaaacctctagccattttattctcaagacctaatacattacaccatttagcaagtaccagcgcacaaataagcccaatcgttacatagattaccaatgtctcaacatcagaccattttttcattgcaaggctagctgcactgctcgcagattggctagaaacaagcgctacttgagatgataacgcatcactcagccctgtaaaaaccgcattaattgcaatacctatgataatgaaacgaagtggattaaaatcagaacgataactaaataaaaagactaaaaaacaagcaagagccccaccaataaaagaaaaaagtggcaaccaaaaatacaattccggtaaaaataaaatgataacaaaactaaaaaacttcgcccccgctgaaataccaatcacaccagcatcagcaagcggatttctcatcacagcttgaagcaacaagccagaaaccgaaagcgccgccccagcgagcaaggcaataataatccgcggaaaacgcaaatcaattacaacatccaccatctcatttccaccactaaaaagccctcttagaaaagccggaatagacatctgcaaacttcccgcctgcacagcccataaaatcgtcccaaagagcaaaacaacaactgcaccaaaatagcttttttgtttaattgtcataaagcatcttttccatttcccgtagtgcttctggagcgtttaaactagccgtcatcccaaataaattttcatccaagtcatatacacgattatttttcacagcatcaaaatgtttccaaatatcatttgttttaaattcctcatcgaacatttttactacttctgcgggcataccatgtgcagctcgtaaaataatatctggatttgcgctttgtaagtattctgtattagaagccaagtattctaccttttggttcgtaatcacattttctccaccagcaagtttgaccaagtcgccaatataagcatgttcagttacaaccaaatagcttcccggaacgcccataagtattagtacagttggctttttctttttagctacattcgccttcaccttgtcaatctcacttgttaaatcgttatttagtttactcgcttccttggtgcgatcaaattctgtaccaagtttcttaatttcagcctgcatagaatcaatacttgtaaaatctaaaaagtccgcgtttaaattagcaccctcaaaacccgcttttaagtcagcttctagcgtttttgtagaaagaaccatatccggctttaacatccgaataatctctaaatccggccccataggcgaccctgtttcctttacatcagcataccgttccggaagttttttagaactagtcggaattccaacaagcggcaagtccagtttatccataatttccgtaattgctacagtagtcgcgacaattttgggattattctccggtttttgttcggacttttgaaccgcttcttcattcccgcaaccaactaaaaaaagtaataacaccaataataggacagctatttttttcatcacttattcccccatttataaaataaaatcggtaaagcgagttaagcaaaggataaccccaacctaactcgcttttaccagttttattaactcaatcttttacgttttaatcgatatgctaaataaaggaaggaagccccaaataatgtaatataccatgccatactcgatgaatcactagttttcgcatttttttcagctttgttatttgttgtcgctgttttttgaactgaatttgtatcatcaaaatctggttttgctaattttggtccagcattattattgtttgctaaattgctagtattcaggtcatcatttttcacaggttcttgtaacgttacatccttccctgtaatatctttgattgatgcaggatctaatttaacttgaacagtatattcatggtcataagagaagcctggcatattttcaattaatacatgtgtttttacatccgtattagccgtaccatctttcacaggatattttacagttctggtatttttgttaatatcaccagaaacaacttccatatccttccaaacgccattttgtttatactggaaagtcttaatccaactactatttgttaaagttaaataaacatatggttgattattttctactttgattatagctggtttcatcacgtaactttccatcatggaagtttcatttgttccatctttaaaaacatcaaaatctatcgagtacgtatgattgtttagtaaatttttagggtcaactactactggtttgcttggtgttgtaggcggtgttgtcactggaggattagtagtgcctggatctgggtctggtttcgttactggtggatttgtttcacctggatctactggaggtgttacatcactacccgggtaagaactcgccgcttgtgctttcgttgtatcaaaaacatatcggaagtctgcttgccctttatatacagaaccattgaatggtgcttcataattcacatgagccgcaagtggttgatttaagtcctccacttcaaattcaacaattcgtgtgttagcatctttatcttctgaaaccacttttacatcttgcaaagctccagaaatttgtgtttttaaagctgttactgttttattatcattaactgtcattgcaacagttttcttaccatttttcactttcaaccatgcaggattatcaaaataattttgcatacttgaattactgtcatcatttgcttttttcgctacaaacggaatcgtataaattccatctgccagagttaccggtgtagtaacagccggttcagaaataactttgaacgtactcggatcaattgttaagtccacttgataccaatgatcataactaattgcatctactttaatgtgcatataagaataaataatatcatctaaagaactaagcttgaatttctctacacgtgtattattcgctgcatccgtactaacagtttgaacatcttggtagctatcttgataaacttctgcttgtgctggttttgcaggacgagttccatcttttgaaaccgccattgtttgccaatagttactgtttgtaatagttaagtacatatatggttgaccattttcaactttaattgtagcagtatggtcaatatatttatccgcttctgaagattctttcgttgtcttaccagtgttatctttataaaaattcacttgaacctgatactccccgccatcttttaaacgagaatcagccgcactggcaaatccaggtatcaattgaaaaataagtgtcaaagctaaaaatgctactaaaccttttttccataatttcttcataataatccccctttatttaaaaatcgcacgtcttttaagtaaaactaaccctgtccccgctgccacaaaaataattccatataaaaacattttgctagaatcactagactttggatttgctactttattatttgaatcacttgtagttgctggcgttgttgtaccattattatctgaagatttcacagctgcacccgatgatttaactgccccttcatcaaaacgtaactggatttgatattcatgatgataatttaacccgtcatcatcaatatccactttaatttttgcattaacaggactactcaaagttgatactgggaatgacacttttctagtatcactcgctgtgttttttgaagttacactaaccgcatttccctcaacccacagaccagtaatccacttactatgatttacttgcaaactaacagtagatttccctccatttactgtcactgttgcaggcttgtcaaaatagtcattcgccattgatactgaatcactatccccttgaagcactgtataatcaaccgaataagttccgtctttaagagcagcttgtgccgttacaccagctgaaagaaaagaaaaactaaacaaaactacaaaagcaactaaggctaatacttttttcactcttaactctcccttctttattaaaaaacatctatttataaaaaacccccacagacatttgtggagtaaaagtttatgtaaaattcatacgtcaactatcattttaattgataatgattatcattgtcaaccacattttatttttcaacagccttcacaacaaaaaaatccatggacggcaacgtttgtccacggattaataaatatttactgttctactcattctcacttatcttgagaaaatgttcatataacaattcaccttttaaagttattgtatatcttttttctgtaatattgttgtttctcgttaaatatccattttcttccaaccagtacagtgtaagtaatacttcattctttgtataattgcgaagatccccaaaatcaatcacttcaagcgacatatcattaatttttgtatctacacttctagcaaaaagaaggacttctcgtaacaacttttcatcttcaaattccatttttaatcctcctttaattctaagttagtaaacataaataacgtaaaaagccgtagctaaatgccacggcttcttacagcgcaatcaaaaggagaaattcacacaatcaaataaagggggtatttgtttgtgatttatttcacggttataatataccatataacctcacataattcaatagttcacataccgttttttatacttattctttaccctaccgctcgaacgtttctactacccaaaaacataaaaaaagacacgatgcatatcatctgcaaccgtgtctttttttagtaattttcacaatgtattatttgactagtttttctaattcatctaatctttgttcaaaaacttttaacgcgtcatccacagggttcggtgttgccatatcgactcctgcttttttcaacacatcaattggataatcagaacttcctgctttcaaaaagtcaatataagctgttaccgcctcttgaccttcagttaaaattttcgcacttaaagctgatgctgccgaaaacccagtcgcatattggaaaacataatagttcatgtaaaaatgtggaatacgagaccattcataaccaatttcagcatcataaacaattgcatcaccataatatttcttattaatatcaaagtaagtttctgttaaataatcagctgttaaagcaactccttcttgatctgcttgatgaatagcatgctcaaactcagcaaattgcgtttgacggaatacagttcctttaaatccatctaaataatgatttaacaaataagcgcgtactttcggatcatcatattttttcaaaagatagtccgtcagtaaattttcattagtcgtagaagcaacttctgctaagaaaatcgaataatctccataaacaaatggttggttcttccttgtatagtaactgtgaacgctatgtccaagttcatgagctagcgtataaacattattaatattatcttgccaattcaataaaatatatggatttgtactatatgaaccagaagagtatgccccgcttcgtttacctttattttccatcacatcaatccagcggctatcaaaagcttcttttaaaatcgattgatattcatccccaagtggtttcaaggcttcaaggacaatctcttttgcttcctcataagtgaattccaaattaacatcatcagaaagcggtgtataaagatcatacatatgaagttcttctaatccaagcaattctttacgtaattttacatagcgatgaagtaaactagcattattgtttactgattttaataaagagtcataaactgtctccgggatatgatttcctgaaagtgctgcctcacgagcggacttatatccacgtgtagaagcataaaaattagattttttcacttgcccatttaaagtagatgctaaggtattctttaatccttcataaacagaatacacaccaagaaacgcgtctttacgaacacgcgggtcattactttctaacaacttaccataacgaccatgcgtgatttcaatctcttcgccattttcatctttaattgtagggaacttcatgtccgcattatttaatgtgttaaacgtattagaagaactacccaaaacttcgccagcattcgctaataatgcctcttctttttcacttaaaatataaggtcggcttaagtttaattcctctaataagtgtgcatatagttgcaaatctttattttcatttaaaaattgttttaaaacactctcatccatcgctaaaatttcaggatcataataagataatgcagacattagttttgtaactaaacttcctgcccgactatgtaatccttggtatttcgcattagctgtatcctggtccattttcaaatgagcatatacatataaattactaattaaatcataagctttatcacgaaattgtaatgcttcataaagcgtttggctactttccgctagacgacctttaaattgatcgctttcttctgtgattttttgtaattctgtaaaggctttttcccaagcctcatcatttggataaatagtagtcaaatcccaagttaaattttctggaacttcttctcttaaaggtaatgcattcgttttactcaatataaaaacccccaaccatagtcattttgtttttattatgagccaaaataactaaaaatgcaaaacagatgtttacacccgactcacgcgattaccagaaaaagtcataactcgcttcactcggtatcgtttttctggcactactgataatactcctacgcttattaagtaagcaatgtatgattttcctaatttcaagcattcatttggagaaagccaaattgtcattatttgtgttactactgattgaaacttctctaaaaaacattcttcactaaaagtatcgcctttttccaacatattaaaaaacgtttcccataaatcgaattgccattctacagcaggagtaatgactaaaaattgttcttctaaatccacaccaatttctttcggtaaataatgcaaataataacctgcactatataatttttgcatgaattgtccatgttttttgaacttcgcgtagtaaaaacatattttctgcctttctaattctctatctcgctttacatatgcatggcgtgtaataattcgagctattttctgcttccattcattcatcggtgctttgctagaaaatttcatctcactagcaaaaaagcgattgcctttttcaaatgtcagatgataataaagagtagttatcttgtcgcttgcagaataatgccaaaaatgataacccaacttctgctcaaattgaataaacgcttgttgaaaaatagtgagactaatacgtcctttttctttttttattgtttggccgagtatccaatgaacttctaatccaattgataagtaatccatcgtccgctgaatcatttcactaattgggaccgatgatctttgaaattcgattacagtagcatcactcacataaatatccgcttgccggctaattgcaggaaaataatgctctaattcaacaggaattccttgaaagccaaaccaagccataatttgcctcttagctaataaatgctcctcactctctccttcagaagcaaatgcacacttagtcgccttctcatgagcgaaatgcggtattttaatctcgccggcttttatcattacaggactatcacatgatttacaaaacaatctttcttcttgcttgattcgctctacattcatctttgtaatagtaaaagtatctccattgttgttcttagctgtaaaaataaatatcactctcctattagctctttaatactaatattcgacatcttacagctttattcctgctttatttttaaaatcgcaaaaaagacccatttggttgattttccaactcaaatgggtcctctaaataaagttttagaaatattttcttacttgctttaatgcaggaacgtcaaagattacttttccgtactcagctagcatataaccagttaaattcgactctaaaccgtactcaagcaaaatactaacggcattgtcaatgttagattcatcatacttattctcaggaaattctacgttcaaataatacttcccttgatacgaatatagcttagttactaaattttccagtcctgttgcacgtgaaagtgaaatgagatcttcaaaatcacggaactctaaaataaactctagcgtatcatcttctccaagtgattctttcttcactggattgaagttttcttcgagtagtttttcgattttttcttctgcaagctcatctggggagctaagcgtgacgtcaaaaccgtcctcgccttttccaccaattgtagcttttgttacgaatacttctaagccatgttttaaggcttggacttgtatccagagcggaccttcaggagagaactcttcttcatatttcagctcatccatcatatcccagaaaagttcttcacttttctcgcggtcataccaaacatcttcttgattaaaaccacgctcttccaaatccagataagagatataaaacttgatagtatcctcattaattcgttcaatttccatcgtcacactctcccttccttcttagtcattgacaatgaagggtgaaacttaattggttaaattcattgtagctcatattacaaaatagtaccaccatttttccttggtggattattatcttagctgaaaaacgaaaaaaattcaagaacaattacttaaattacaaaaaaagtgccaagaatccaattgaatggaattctcggcaaccacttttatcaatcttagttaaccattttttgcgcttcacgtagttgatacgtacgtacacggcgcggtaagaaacggcgaatttcatcttcattgtacccaacttgcaaacgtttttcatcaataatgataggacgtcttaataagccaggatttttctggattaattcaaatagttgttgcaaaggaagactatctaaatccacgttcaatttttggaaagtttttgaacgagtggagataatttcatctgtaccatcctcagtcatacgaagaatttctttaatttcatccaaactaagtggttcagaaaaaatgtttctttccttataagggatatcatgttcttccaaccatgcacgagcttttcggcaagatgtgcaactaggtgaagtgtataacgttaccattagacattcacactccttatcgggtattgtttcattcatataacgaaattctagcaatatctctatttggaaaattcattaaagaacttacacttcattatacactaattttgtgaaattctatatactaattttaaaatttttctttccaaatatgtaaaaccattgttagcaagccgttatgtatatgatacccctactataacttgtttaaactaaaatcacatgaaaaaaacagcttttttatgagaatttcatgagaattttaattttgtaaaaaaacaccaatcagattttaccctgattgatgtttttatttttacttaacagcagcttcagcagttagtttagcatgcttttctttatacataacttcttcttcttctgaacaataaacaaagtgtccaggagcaatttcgcgcattttaatttcatcgccatctttgtaattatgaatagttggatcatatgctttacgcacacgagtacgttcataatttggatctggcagtggaatagcggataaaagtgactcagtataaggatgtagcggtgcatgatataaatcatttgcaggcgctagctcaactaatttaccaaagtacattacgccaatacgatcactaatgtatttaaccattgataaatcgtgggcaatgaataggtaagttagatttttttctttttgtaattgacgtaataagttaactacttgtgcttggatagatacatccagtgcagaaataggctcatcggcaataataaattctggttgaactgcaagcgcacgagcaataccgatacgttgacgttgaccaccggaaaattcatgtgggtaacgacctgcatgttctttgcttagtccaactgtttcaagtagctcatatacttgttggttcgtttcttcaggcgttttagcaaggccatgaatacgaataccttcagcaatgatatctttaactttcatacgcggatttaaagacgcatatggatcttggaaaatcatttgcattttacgacggaattcaagcatttctttacggcttttacgtgcatgcacatctttaccgttataaataacttctccaccagttgcatcatacaaacgaataatcgtacgtccagttgtagatttaccacaaccagattcacctactaaaccaagtgtttcacctttataaatatcaaaagaaatatcatcaacagcacgtacttcgcttgcagtacctttgttaaagtattgctttagattatgaatctctaataatttttctttttgttcagtcattctacttctacccctttcgcatggacagcttgcatgccaggatgaagttccgcaaactgttcttggcgacgtaatacagcatcaggaggcgttacttcaggtgcatcaggatgaagcaaccatgtagccgcataatgtgtatctgacaccttaaatagtggtggctcttcttcaaggtcaatttgcattgcgtatttattacgcgcagcaaatgcgtccccttttggaggatgaagtaagtctggtggcgtacctggaataacaaataattcttcatcatctgtatccaaagtaggcatagaactaattaatccccatgtataaggatgttgcggattatagaaaatttcatcgactgtaccgatttctacaatcttaccaccgtacataacagcaacacggtctgcaacattcgcaaccacgccaaggtcatgggtaatgaagataatcgatgtatcaatttttttctgtaagtctttcattaaatccaaaatttgcgcttggattgtaacgtctaatgctgttgttggttcatcagcaattagaatttgcgggttacatgcaagtgaaatcgcgataacaacccgttgacgcatcccaccagaaaattggtgaggatattgtttaattctttcttctgcatttgcaataccaactaattgaagtaaacgaagagctgttttatgagcttcatgtttactaattttttggtgtttaataagtggttcagaaatttgttttccaattgtcatcgttggattcaaggatgtcattggatcttggaaaatcatagctatatctttcccacgaattttttgcatttgtttttcgtgagctttagcgatatccattccgttaaataaaatttggccacttttaatttctgagttaccttctggaagtaaacgcataatcgattttgtcgttactgatttaccagaaccagattcgccaacaatcgctaaggtttcccctttatataagtcaaaattaactccacgaatcgccttaacttctccggcatatgtgtggaatgaaatatttaaatctttaacttctaatagcttttccatttttcctcacctctcttttaatcgcgcattttaggatcaaaggcatcacgcaagccatctgcaattaagttaaatgcaatcatgatgatacaaagtacaatacatggataaagaatcatatacggtaatacttgtaatgttttatatccatcatttaccaagacaccaagagatgctgctggcgctggaagacctaacccaataaagcttaggaaggcttcaaagaaaatcgcactaggaatactaaacataatgttaatgataataatcccagaaatatttggtattaagtgttttacaagaattttcggagtagattctcctagagtcatggaagccataacaaattcttggtttttaagttttaagacttgtcccctgactacccgagccatcgttatccaactggtcatggcaattgctatgataatggaaacaatccctggatcaagtatcagcatcattaagataacaacaactaagtttggaattgcaccaataacttctagaatacgttgcataacgttatctactcgaccaccaacataaccggaaatcaatccgtaagttacaccaatgattaaatcacatagtgctgcaacaacagcaataataagtgatacacgtgtaccagcccaaatacgagcaaattggtcacgtccgagtgtatcactacctaaccagtagtaagtaccctctttaatgttattttgtttataaatatcaacgtcttctccaccaatagactgatgaccattccaaaatggcatattttcaaatccttgaactttcggtggaagacttgcattttcagtaatttgtctattaatatcattttttggtcctagattttgtgataaataaggtccaacaatcgccatgataataacaagggctaatacaataagtgaaactaaagccgctttatttttacgaatacgaagccaagaatcttgcataaatgttaaacttggacgattaattttttccgcttctgcatcaaggatgtgtgctggctggaatctttcttttgcaattttatgttctgccattattttctacctccagacacacggattcgtggatcaatcaatccgtaaagaatatctactaccaagataacaaatacaagcatagcagcaaataataatgtagttcccataattactggatagtcattcatttgaatagaagaaacgaactgacttccgatacctgggatactataaatgttttcaataacaagggaaccagtcatcagtgcaaccgataatggtcctaaaacagtaattaaaggaataagtgcattacgaatcgcatgttttactgctacttcagttctgctattcccttttgcttttgcaagtagaacataatcagatgcaaatacatcgattaattctgttctcataaaacgagctgctgttgcaagcgggaacatagcaagtgcgaacgctggcaaaattgtatctgcaaacgaaccccatcctgccactgggaaaatttgtaatttagctcctaaccagtattgcaacacagtcgcaaatacaaatgatggaactgatttacctagtattgctataaatgtactcgtgtaatccggccacctattttgatacatggccgctacgaccccaagtaaaataccaaagataacaccaaaaaccattgcctcaagtgctaattggacagatggaccaatcagtgcacctaaaatctcagacactggtctattatcaagttggaaggaaacaccaagatctccttttaccaaacctgtcatataatttaagtattggactggaattgaatcatttagtccatatttttcattcatcatgtgaatttgttcgtcagatagtttctcctgattacggtaaggcgtaccaggcaagaatttcataagaacaaacgtaaccgaagcaatgatgaataacgttataagcatatataatactctttttaacgtatatttaaccatctatctctacacctcccagttttaataaatatataaaaaagttattcctaaccaaattcgcaagtttagtgagcctttttcttcgtttctaaacttttattgcaaaagtgcaaattagttaggaaaaaaacttcatttttcgaatgttaggttctagataaactagaaaaggatactttaattttttattataacacatcaaaatcatcagcaaaaggagagagcatatcgaaatatactctctctttccgtcaagcatttcttaaagactaatattttatttagtcaagtatgtttctttgtaagtgtagtctggaccaaatggatttttttgcaagtttttaatgtagtctttttgtaggtatgcagtagaacgttgataaagtggttgaacagctacatcatccgtaagaaggattttttctgctttaaccatttcatcccaacgtttttgttcgtcagctgcataagttacagacgcatcatttaaaatcttgtcatagtctttgttagaataactcattctgttttgtgcaccatcagttacgaatagatctaagaaagtggatggatcttgatagtcaggaccccagccgctcatagagaagtcgtaatcttggttttggtcattttgtaaacgaactttaaatggtacgtttttaagtttaactgtaagaccatctaagttcttttgtagttggtcttgaatgaattcagaagattttctcgcattttcagtatcatcactagtgaattcaactgtaatttcgttaactcctaattctttcaaaccagctttccatgctttttgtgcttcttttacatcatattctaaatgtgcaccagattcttttgtataatcttctttgttacctggatcaaaagtgaatccttctggtacaagattgtttgcaggtttagatccgtttttaagaactgtgtcagtgtacgattgtttgtcaatcgcaagtgcaatagctttacggatgtttttgttagcaaatactgtgtctttgccagcacgtttttggttaaatttaatgtagaaagttgaagaatcgttcactgttacatagtctttattgtttttgttttgagctgcataatcagcacttaatactgtgcggtcaactttgtcagtgttgtataagttaagtccagtaccggagtcttgaacaacttgtacgttgatttgtttcagcttaactttatctttatcccaatatttatcattttttacgtaagtccattttttgtttgttccagtccaatctttaagttggaaaggtccgttgaataacatgttgtcactattttgtgcatatttttcgcctttttccgtaacgaatttttcgttaagtgggaagaaagttgggaatgcgaatagtgagttaatgtaagcagttggtttagaaagagtaacttctaaagtataatcatctactgctttaattcctaattcttcaggttttttcttgccagctacgatatcgccaccgtttttgattgcatcaaataggtaagaatatgttgctgcagtgttagggtcaaccgcacgacgccatgagtaaacatagtcatttgcagttacaggatctccgttagaccattttgcatcttcacgaagtttgatagtataaactgttttgtcatcgctaatttttggctcttcagcagcaccggcaatggcaggaataccatctttgttaagcgcatatagaccttcgtttgtttggtttacaacgtttaaaccaacttggtcatccgcttttgtgctgtctgcagaaggaattaatgcactttctgtcaagttaagtacttgctctcctgaagcttttcctgagtttgagccttttttgtcgtcggatttggaatctgatccgcctccacatgctaccaagactaagcttagtaatagtgttaatccaagtgtaagaaataatttagattttttcactaagtagacctcccttttttatttttctgaaaaattgtttcgatacctattatactctaagaattctggctttgtaaattatttttacaagataaatgaaaacaaggatgaaagatacaagttattaaaatattaaggcaaaattgaaattgcgcgaaaaatctgaacagagattgttacgctatccattattttgcaataactagaattaattatgtatactttgctaaaccttttgattaagttttcagaaaacataaccatttaaattgataaatttacaatcgacttggccagttatgtataaatccaacgaagccatctttttctgtataagaaaaaatatcgaacccctttaaaatttaaaggattattatatttatatactttttttgagctgttgtctagataaaaatatcaaaaatttaattaaattttgtaataaattcgaaaaacgttggtatagtgggatttttttgttaataatatgtaaagacagtttagcgggttttttgcaaaaaaggtctaatttctaacattgcatgatagcttccttctatcatatagtgtttctgttagaattgtgataaagtgaattatgaattttaattagaggtgaagttatgtttttacgaattactatttatacacttattcaagaagctatagtatttgggattctgctttttggaaaaaatggtgtaagtttaagcggttatatagacgtcgcgttcctcgtctcactcattacattattaattggtttgctagtttatattatgaggagcggttttttagaccgagttcataacggcttccgaagtatttctcgtaaaatcaaacgtgaagaagaaaatgagttctcggatatgctcctttcagaacttgttgggctacagtatgctgggattttaattagcgcactgcttgttatgctctccagtattctctgtatgtttttatgattgacaagccgttttataaactgataaaatgaacttaatataactgatgcgttaataagaagaatagtacattttgttgctttgtaatagagagtctgtggttggtgaaaacagataaagcgcaaaatcgaatggacttctgaggactgtttgtgaaagaaaagtagcaagcagcggctaaagaccgttatcttctttaatagagtttttctattactaagagcctttatgaggtacttagggtggcaccgcggataaccgttcgtccctaaacatttatatgttgggatggacggttttttattttcgcaatcagtgaaaaaattggaggaatacaaaatgaaaaaagtaatattttccggcattcaacctagtggacaactaactttaggaaattatattggcgctttaaaacagtttggacagtttcaagatgaatatgaatgtttttattgtatcgtagacgaacacgctattacggtacctcaagatcgactaaaactacgcgaacaaacaagaagccttgccgctctttatttagccgttggacttgatcctgaaaaagcaacgttatttattcaatctgaggttgcagcccacgcacaagctgcttggattttacagtgtaacgtttatattggcgaattagaacgcatgacacagtttaaagataaatcagatggtaaagctggtgtgagtgctggactgttaacttaccctccattaatggctgcggatattctactttatcaaacaaacttagtacctgttggtgaagaccaaaaacaacatattgagttaactcgtgatttagcagaaagattcaataaaaagcatgctgatattttcacgatgccagaagtatttatccctaaacaaggcgctagagttatgtcgcttcaagacccaacgaaaaaaatgagtaaatctgatgcaaacttaaaaaatgcgattttcttattagatccacctgctacaatcagaaaaaaaatcaaaagcgctgttactgactctagtggtatcattgaatataacaaagaagaaaaacctggtgtctctaacttactaacgatctattccgttatcacaggtgaaacaatcgctaatatagaagaaaaatatgttggtaaaggctatggtgactttaaaacagatttagcagagttagttgttgctgaacttgagcaaatccaagaacgatattacgcttacttagaatctgaagaactggataatattttagatgcaggggcagaaaaagcggctcgtgttgctaataaaacattgaagaaaatggaaaatggtgtcggactaggacgcaaacgcagaaaataaataaaaggcgaatacttggataaccaagtattcgcctttttactattaattaacctactttaatttccacatcaatgttaccgcgagtagctttagagtaagggcaaacttcatgtgcttttttaagaagttcttctgttttttctttatcttgtccttcaatagttccttctaataatactccgattttgaaaccattgtcttctgggtcgctatacaagcttacagtcgctgttacagtactcttagcttcaattccagcttttccaagtactaattctaatgcactattgaaacaagctccatatcctgctgcaaataattgctcagggtttgttccaccgccgccgtctccaccaagttctgttggtgctgagatttcaaaataaaatacgttatctggagaatgtacttcaccgcttcttccaccagtgttaataaccgttgtttcataaagttttttcatttcctattcctcctaattgattagtaagtgcttgtaatttagtaagtaattgtgtgtaatcttgttcctcgaaacctagtaattgaaggcaagtgtccacgctttttaacacagcgggttgtatttctattgctttttctgttagttcaatatagacacggcgttcatcttccggatgacgactccgtgttacatatcccaaattctccattcgttttaacattggtgttaatgtcccgctgtctaaagctaatctttttccaagatcagtaaccgtttgtttttcaccttcccataaaacaagtaacgtaatatattgtggataggtaagttggaacggatctagtgcttcgcggtagagtttggtaaattgtttggatgcattgtaaacagaaaaacaaagctgttcctctaatatacgcgtgttcgtgtccaacatgttctcctccttttaagttgtgtacaatttaattttatacaactttattaattaaagctagttttttgctcaaaaaaagccttgattccattttaggaaacaaggctttagttattttagtcttctattcttttgaatactagtgtcgcattgtggccaccgaagccaaaagagttagacattacgacatttacttctgcttcacgagctttgtttggaacatagtccaagtcacaaacttcatcttgattttccaagtggattgttggcgcgataatattatcacgaatacttaataaagcaaaaatagcttcaataccacctgatgcacctaaagtatgtcctgtcattgatttggtagagctaatagccaatttcttcgcatgctcaccgaacacagttttaatcgcttgtgtttcgtattcatcattgtaaggagtacttgttccgtgcgcgttaatgtagtcaactttgtcaggagtaagtcccgcatcgtcaatcgccattttcattgcacgtgcagcgccttcaccatttggcgctggtgcagtaatatgatatgcatcacctgttgcaccgtaaccaacaacttctgcataaattttagcaccacgagcttttgcatgttcatattcttctaaaattacaaccccagcaccttcaccaataataaaaccatcacggtctttatcaaatggacgacatgctgtttctgggtctgggtttaatgataaagctttatttgctgtaaatcctgctagtgacatttttgtaattggcgcctctgctccaccagtaatcattgcatctgcatccccgcgttcgataactttaaatgcgtcaccgatagagttggttgcagtcgcacatgctgttactgtagtagagttaattccttttgctccaaaacgaatcgaaacttgtcctgaacccatatccggaatcatcattggtacaaagaacggactaacacgacgatgtccacgatttaggaaaacttcatattgtgtttcgaatgtttccattccaccgataccggatccaatccatacaccaacacgagtggcattggaatcatcaataattaaaccagaatcttgcacagccatttcagcacttgcaatggcataatgggtgaaacggtccattttacgagcttcttttttctctaaatatttttctacatcaaagtcttttaattctgctgcaattttaaccggaaagtcatccggattaagtcttgtcatttctgcaacaccattgacacctttttttgcgttttcccacgaagtttctgcatcattcccaattggtgtaactgctccaataccagtaacaactactcttcttctatccatttactcatctccttattttgcaattcataaaaaacaacttctgtctatgcgacagcagctagtataaaattaaggctttatttaaaataaaaatattgcacaaacaaaataaaccaaaagcctgctctattataacataaataaagaagagttgccctaactaaaataaacgttagggcaactttccttttgacgtatttttttatttaccccaacgaatgattagggcgccccatgttaagccgccaccaaagccgacaagtaacacgttatcattatctttaatacgaccttcttcaactgcatccactaaagcaagcgcaatagaagatgatgatgtatttccgtatttatgaactgttttcattagtttttcttctggaagatttaaacgttcacgagaagcttccataatacgaatattagcttggtgcggaattagtaaatctaagtcttctttttcaagtccagcactttctagtacgcgtaatgaagcctcacccatttgacgaactgcgaaacggaacacttcacgtccgttcatatagatttttttgttttcgtctaagttcaagtatttacctccagaaccgtccgaacccaagtcaaaggaaagtaaaccgtggtcatctgatacagggcccataacaactgcccctgctccatcaccaaataatactgctgttgcgcggtcgtcccagttagtaattttagataatttatctgcaccaactacaacaatatttttatacgcgccagttttaatgaattgagctgcagtaacaaccccaaatgtgaatccagcacacgctgcttcaacatccattcccgcagcattttttgctcctaagcgatcttggataatattggcaacggatggaaatgttgcttcttgtgtcacagttgcaacgataaacaaatcaatatcatctggagtaagaccagcattttcaattgctacttttgctgcttcatatgctaaatcatgtgtatactcatcgtcacgagcaattcttctctcttcaattccagtacgagtacgaatccactcatcagacgtttccatcattttttctaaatcaaagtttgttaatattttttcaggtacgtatttacctactcctaaaattcctgcgttcatgtgttctcctccatatcaaactacatcaggataaaagttcttctcctggatatttttatgacctggtgctaattttaacagagaaacttcaattacgcaattggattgctactttttattttacttcaagtgctttatttggattattttcagcaaatccaccagctttagaccagccaattattttaccatcatctgatttgatacggtaccaatactcatttttcacatctgctcggcggtcaatatctagttcttgacctaaataatcatttaaatctgctacgactttagaattatcttctacagggtatgcatagattttttgatctgagtcagttacatatttatctagtttcatatttgtttcatttttaggggtgtaaaaaatagtcactgtattactatttatccatccaattgatttgccttgatcttgaagttgataccaagtacctttttcggtaactgctttttgagttattcgtagcgttttactttggtaatctttggcacttcctacttgttctgcgccttttgtgttataaggttttgtccaaataatttcgttagcgggttttgttatttcagcataagccaattggctctctgatgaggttactgtatcgtaaatttgatcataatcatctaaattatatgtttctatagtagaaattagtttttctgcataagtcgggtcagttgcatatccagcatcttgaatcgcatgggctgcttttttatagtctgtttctccgataaccgcagaatataaatctggatttccagatactccattaataaaaagttgtgcatgatcgactaatgatgattttttatcagggtattttctgaaatcagcttgtgtatgataagctttaccattgctaaattcttgtgtacccattgaaactgaacttccttcatagctgcctttaattccaaacaagttgttagcagaagttgataagccactttcaccccaattggattctaagatggcttgagctaaagtaacactcgttaatattttttcttctttttgtaaatcttgtgcatcgctagcaattgattgtataaattgctgttgtgataaagtcattcctgcctgactcactgcggtttggcttgcttctgccgctcctacgttagcaaaaggtaacaaggtggaacttacgatagcacttgctagtaaaatctgcgtgaatttctttttcattatcagttggcacttcctatccaaattagttaattccccaatttaaatggctctgtctctgttaaccttcttcattctagcattttcattctgagaacttactaactttttgatgaaaggtttatcataaaagttagtaaatggctagttcaaaggatttgagagtacctatttacttttgacaatattatgtcattccatttaaccctctttacactactattctccgtttggtgaattattcctccctgtttttcgataatcgtattttcaaaagatatatgattggataatcaagttttatgtgctaaaatgtataatgaaatagatgaaatggggtgtaaggatgcgttacgtggtgactgtgttttgggtattcttactttctttaatggctgaattcgttctttcttccatgttatatgtatcatttgatatgacgcgggctattattttaacagtagggttatccttcttcattattttaatcactttcttgatgcctaaagatagcgaagtttatgactttaagtaaacatccaactttctgatagcgagaactcacttttcgagtgcagctcaaaaaaagaacctctttccacatgttggaaagaggttctttttttatttatccaagtaatatttattaactggttttaaatcatcgtttaattcatatacaagcggtacacctgttgggatttcaagttccataatttcgtcatcactaataccttctaagaattttaccaaggcgcgtaaactattaccgtgagctgcaataactacacgacgtcctgctttaatttctggtgcaattgtatccatccagtaaggaataactcgttctaaggttactttcaagttttcacccgatggaattgcatgggtatcaagaagttgataacggcgatcatttttcgcttgtctttcgtcgttttcttctaataatggtggaagagtatcgtagcttctgcgccatttttgtacttggtctgcgccgtatttttcagcagtttcttgtttattaagtccttgaagcgctccgtaatgtcgttcgtttaaacgccatgatttatggactggaacccacatttgatcagattcttctaaaacataattaagcgttttaatagctctagttaaaacggaagtaaaagctacatcaaattccaagccagcttctttaatccgttttcctgctgtcattgcttctacaacgccttcttctgataagtcaacatcatgccaaccagtaaataaattcaatttgttccattcactttgaccatgacgaattaatactaatttcatcttcctcatccttccattttcgcttattttctaaacgactaatccaacaaaagttttccctttcgagtcgtgaatcaaacattttccatgttattctgtgactttaaaagtaaattctttatcttgtaaatcaatttcaacggaagaatgcggcataattttaccagatacaatttctcttgcaagaggcgtttcgacatgacgcacaatatatcgtttcagtggacgcgcaccgtatactgggtcataagcttcttctgcaataaaggcttttgcgttatctgaaatagtaatcgtaatttcttgatcagcaaggcgaatttgaagttcttctactaatttttccacaatgcctttaatatcagcgagtgtaagtggtttaaatagaataatatcatctacccggtttaagaattctggtttaaattcactttgcaaaatttgcattacgtctgattctagttcaggcgagatttcaccttcttcggttctttcaagtaataaattagagccgatattagacgtcataatgattacggtgtttttaaagtcaattaagcgcccttgtgaatccgtaatccgaccatcgtcaagtacttgtaaaaggatattaaatacgtctggatgggctttttcgatttcatcaagtaagacaatcgaatatgggttgcgtcttacagcttcggtaagttgtccgccttcctcatatccaacataacctggaggagccccgacaagtcttgatacggaatgtttctccatgtattcagacatatcaattcgaatcatatgatcttcagaatcaaacatattataggctaatgctttggctagttccgttttaccaacaccggttgggcctaagaaaataaaggatccgattggtcgttttggatctttaatccccgcacgagcacgtaatactgcatcactaactaactgaaccgcgtcgtcttgaccaattactttttgatgaagaacatcggctaatttaagcagtttttcgcgttctccttctactaacttagtcactggtattccagtccatcgtccaacaatttcagcgatttcattttctgttacttcttcttgtaaaattcgatcttcttgggctgttttttcgcgattttccgtttctaatgctaataattctttttctactgctggaattttaccgtggcgaagttcagcagctttatttaaatcgtagttgttctctgcttcttctaattcatgacgcagatgatcgatttgttcacgaacttcacgaattttactgatttcgcttttttcggattcccatttagacttcattttatttgcttcttctttatagtcagctagttctcgctgtaacatctctaagcgccgttcacttgctgggtctttttcttcttttaatgccgcttcttcaatttctagctgcatgacttttcttgttacttcatcaagttcacttggcatagagtcaatttcgacacgaatagttgcacacgcttcatctactaaatcaattgctttatccggtaaaaaacgatccgtaatgtaacgattagaaaggctagctgcggcaactaaggcattatcatgaatatttaccccatgatggatttcaaaacgttcttttaaaccacgtaaaatggaaactgtatcttccacggttggttctggaacaagtactttttggaaacgtctttctagtgcagcatctttttcgatatattggcggtattcgtccaaagttgttgcgccgatacagtgaagttcacctcttgcaagcataggtttcaacatgtttccagcatccatagctccatctgttttacctgcgccgacaattgtatgaatttcatctataaagagcaaaatttgtccatcgctttgttttacttcttggagtactgcttttaaacgttcttcaaattcaccacgatacttagccccagcaataagggaaccaatatcaagggaaataattgttttatctttcaatccttctggaacgtcttttctgacaatacgttgtgctaaaccttccacaattgctgttttaccaacacctggttcaccaattagaactggattattttttgtttttcttgataaaattcggatgacattacgaatttctgcgtcgcgtccaatcactggatcaagtttcccgcttcttacttccgcgactaaatctcgtccatattttgttaaagcttcatagttttcctctgcattttgagaagtcacttttttccctcctctgatttttaaaattgcttcgttaatttgttttttagatttattttgcttttttaattcgactgtgatggggtttgacttttggtccattacagctaagataagatgttctgtcgatacaaaatcatcgtctaattgtttttgttctttttctgcatctctcattagttggaaaagtgcttgactcattgcttggccatagttcactccgcttcctgaaacaacaggaatttttcttaaagattcgtctactactttttgaagtgcctcaacattaacttctgctacatcatatgcgcgttttgcaaagtcactctcagttaataacactttaaaaacatgtataacgtcaatttcttgatgttctgatgcaatagctagattttgtgcgtccgcaattgtttgctggacttgttgggtaaatttttgtaaatccattttttgtcctccttataaaagataagtctgaccttttttgaccttaactttattatagttttttatcttgcttttgtctaacaaaaaccatctttttttatagaaaaagacctaccaatttttatgttggcagatcttcagaatttcttaatcacgacctgtaaatagacggagtaagaacatgaataagttaaggaaatcaaggtataaattcagcgcaagcattggtacatctgcaagttccacatcgcgcttcataatttggttaaaatcatacaaaatgtataatgagaaaataattgtcccacctgctgaaataatagttgtcagcatagaacctagtggtaaaaatactccagcaaaactaaagatgataagaataataatcgccgcgaataatgcgctacttaagaaagataagtctcttttcatttttgcgccaataaaagctaatgttgtgaatgtaatagttgctgtaacaaatgccatcagaacggcggcaccttgtcctgcaccaaaataatatgtcaaagttggtccaagcgttaagcctgtgacaaacgcaaatgctagtactactgggtaccctaccactttattaattgttttacttcgacgcactaccattgctgtgataagtaacgcgacttctaacacgacaagaggcaaataaagttctggacttaatttactcccaatcgcagcaccgatagatgcaagtagcaaagaaaatacaaaccaattaagtattttttgcataataatttgtttatttgttcttttctctgtgtttactcgctcggatgttggattgatttcgttcatgaacatttctcctcttcaattgattagttttattatatcaaaataattattacaattctatcggtcttgcgttggaaatttcataaaaaaagaagcgcacgaggcacttctctaaattaaatcaaattgtttcaagccaagcattattccatcgctgttgttgtctttcgttacaaagtcagctttttcttttaataaaggtacggcgttttccattgcaatcgcataatccactgcgccaaacatttctaaatcgttcattccatcaccaaacgcataagttggaacgtcttgatagcccattacttcaagtagcttcgaaataccaactgctttagatccgccttttcttaagacgtcattactaaatggtgtgttgcgaacaaattgtaattctggaaaacgttctggaaaataatcatcaccagtttcaagtaatagaagtgccatattgattgtttcttctttatacatattaggtcttacttttggcatcggctcgcctaaaaagtcataatgcgcttttacaactggtgtacttgcagttgcgccaattcttttatcattataatagcaaacctctacattttgtgatttagcttcttccgtcaaacgatcaagcaaatcagcatcaatcacatcttcgtacactttttctccttcaaaaatagccatttgtccgttcatcattactgcggattcaatgccggtaattttcatttgatgactgatttctataagggtccgaccagtagcaataacaggaataacattattttctcgaagtttatcaagtgcttgaagcgaggtatcaagtactttagattcactatttaatagtgttccatccatatcaaaaaaacaaattccacgtggtttcacattattcatcctttactaacataatatatccatcataccaatcttacggatgcaaagtaaaggttatttatacataacaaaatctcctgtgtgctcaaaaccaaggcggtgatatatttcaccagcaactgggttatcgtaaaataaacatggtttctttccttctgctaatacatcgcaacataatttttttagaagcgtacttgcaaaaccgcgttgtcgatatccatcacttgtcgctacacctgtaatcattgctgaaaaggaattttctgccgatgtttcagctacagcaactacttcttggtcttgttcaatataataaattcgtttcacgcctttttcaatttggcgaataattaattcttcattttcatcgcgcgaaccaaattctttaatgtgtttgcgcattttaataattggagctacgtcttctgctactgccgttcttacaataacgtcttgatttacagaaatacgatttacatgttcgcattcgcaaaaataagtgtcttgtcttttttcggcaagctctggtaaaaatggttctagttcctttgtgacacgagaaataccgctaacttcatatgtatcatgcttagcaataatttctgagaaagcttttgcatcaaaattagcgtcttttgaatagggtaagaaaaacgtatcgaatcgaagtaacaatgcatgtaatttacctgatgaatcgaattcgccccaaagatcttgcacatcactctcgtaaccaaaattttcgatatccccaataataaataaattgagggttgcttcgggttttaaaagtgccattacttcttcattatcagatacagttagttttctaatcatgtgtcacactcctattttgaaaattgtcttcattttacgtgagttagtgaggttcgtcaagccctgaatcttgctattttacggcatataaaaaagctcgggattattagtcccaagctttttatgattcgtaatgaatttcgccaatttttaacattaagctgatagcattgaatttttcgtctccaagatgcattttgtttgtatcttgaaaagtgataggtgctgctgtaatcgcttcttttggttgttcaaagaatttttcgtctaatgtcaaactttctgtaatttgtgttatgtatttttggaatttattttcgtttctcattttcccaatcattaatgctttcaaagtgttttgggaaatcccgactgcaagcgcgaatgttctatgagtatatccatttattttcatataaagtgacaaattagtggcaattctttgtttttctgccttgtttttcatttgggtgaacctcctgtctttctatagttatcattatgcccggcaaagatgagaatctgattaaaacttcatagtatttagctaaaaatattgaaaccgttttctttttttgcaaaaaaagtgccggaataacgagtatcccggcgcatttttttattttgtgtatgcatcccaaacgaccgttcttaaaacttctaaaaattcagggtcagcatttggcattggaggtcggtggtaagctgcaccaacttcatctgttactactttacattcataatcattatcataaagtacttctaaatgttctgcgacaaaaccaactggcgtataaataaaatgtttgtatttttctcggccatagagttcccttgttaaatcttgtacatcaggtccaagccaaggttctccggttttaccttcactttgccaacctagcgcataatgaggtactgctactttatcaaaaattaagtctgctgtttcttgaagttggtctgggtatggatcgttatgttgtttaattttctctggtaaactgtgtgcggaaacaattaacacagtgtctattaattcctctgctggaatttgtttagctgtttcattaattctatcagcccacatttgaatgaattttggttgtttataccaatcattaattgcttgaatatgaataccgcccaatttatcagcagcatcttttgctcttttgttatatgcttcgacactaaaactggaataatgaggcgctaaaacgatggaaatagcttcttctataccatctttatgcattgcttcaaccgcgtcttcaatgaatggttcgatatgttttaaaccgatatacgctttaaattctacttcatcttgtgcgtcgtttaatgctttttctagtccataggcttgtgcttcggtgattttcgcgagtggtgacaggcctccgatagcgtggtatcttccgcgtaaatctgcaatcatttcttcacttggcttatgtccgtgacgaatatctgtgtaataacgttcaatatcttcgtctttatacggagtcccgtatgccattacaagtaaacctacttttttagtcatttttcatcatcctttttttaatagaatttcgcttctttcatggatgtacttagttaatttttttagcatttctggtggtacttctggaaaaacaccgtgtcctaagttgaaaatgtatcctggttctagtataccttcttgcaaaattcgttccgtttctgcgatacatttttctggtgcaagaagtgtggatgggtcaagatttccttgaattgcttttgttggtactttttgtctagcagttgtaatcgtttcacgccaatctacaccgactacatctagtggcattgtttcccactctgctaaaagatgacttgccccaaccgcttgcataataatcggtgttgttggatgaacagctttcacttctttaacaatcatttcaataacaggtcggatgtactgcgcataatccgcacggctaagtgctcctacccaagaatcaaacaattgaacagcagaagccccggcgttaatttgcgctattaaataattcgcagtcatgcgtccaagtttttccattaaaattgcccaaacttctggttcacggtacataaaactttttgtttggtgataatttttcgatggaccaccttctatcatataacttgcaagtgtgaaaggtgctccagcaaatccaattaaaggtacatctaacatatcatcagctagtaattttatcgtatcaagcacataaggcacttcaatttccggtttaaaaatcgtcagtttctcgacatcttggaaagttctaattggattatgtatgactggaccaatgcctgacttaatctctacatctactcccatccccggaagtggtgtcataatatctttatataaaattgctgcatcgactccgtattgatctactggtaatttagtaacataagcacatatttctggctgatgagtaatttcaaatagcgaatatttttcttttaatttacgatattctggttgagatctccctgcttgtctcatgtaccaaaccggaattcggtccacttgttcttttcgcgctgcttttaaaaataaatcgttcgttatttttgtcattgagtcgcttcccttctttgttcatttacacacaataggcaacagaacaataaataacttctccagataaaaggatactagaaatcttgtataaaaccaaacaaattgcctatctgctgtttcaattatgaaaaacgtggaaaacaaaggtgtaatcatttatcttaattgaataaaactgaaagaaggacttatcatgaaaaaagtatttatcacaactggaacagaacattatcttcgtcaactaatggaaaactatattggcgagaatgtgacacttctgcaaaacttttcgcaatctcttttgtatcaagagtcaactggagaaaaacttttccaagaaggtaaagagtatcgagttttacaaagtagtggttctttaaaaggttttggaattgttgtgtttgaatatattcaacttcgcgatgaagagattccgattttcttacaaatgtatcaacatgctagcttacattttagtgaaacacctgggttacaaagcacaaaacttaccaaagcgatgaatacaaatcagtttttaattgtttctttttgggattccgaagttttctttcaagaatggaaaaaaactcctttacacaaagaaattacaagcatcatgaaaaaaaataatacgcaagttggtttctcacatgaagatatttatcattatccagaattctcacatgatgctaaataggaaaaagcgatttggaccaaaaatccaaatcgctttttttattcgtacatttttttaattctgattggagcataaaggaaagtaaaaatcgctacaaaagctaaatttattcctaatatcaccatcccgccgattgttccattttgggcaattccaataaggctaaagagtattgcttggccaagtagtaaaattcgtaaaaagtgaataaaactacggtggcgataagcatcatcaatcggataaagacgtaacataatttgtgcatcataatgttttagcatcgggataaattgaaagccagttaaatataagaataacaatgaaaaaataatattcaaataaaatccttgcacaaaaacgagcagaataacagcaattacagtgagtcgaacgtaaagtccgatgtattcattcgttcttacaaaagtgcggctaaataaataagcaaacgtttttcttttcgcataaggaattggctgatataagaaatcaagatagttccgtctacgaaccgtccctcgtaagtgtggtacatccgtaaataaattaaccaaacgatagaaacgattcattcgcgcttcttctttatctactaaatattcccatctaagcgtcactttagatgttttcttcttaatccagtaataactcgctaaaattacaactagaacaagtggaatcgaaataaaaggcgcagaaattaacgaaatataaattaaaatagcatttacaataacgcgaacaaacatccatgtcgtatcggcatcttccaatttcatactttcaaagccaaaataaatattccaagctttaagtaaagcaagcacgataaataatgtaaagaactggctataaggtattcctgtcacttctacatacataggcatacaaataccgagaacgattacgaatacatacaattgcataaagaaactggctatttttgcttgagaaaaataagcatccattgctttttcttgaacgattaagtaaactacgtccggtttttgtaggagcgttgcgactgggctaattgcaatagaagctgtaagtaaaataaccatcagcggaataactgggaaactcggctcaagtgttttcacccaacctgcgtaataaaaaataccggcaccaagcccaatgataagaacaaacagcagatgatcattaaacatataacggagatagcgcattacttctgtagtataagcgctaaaacgttccttccagagcgctttactgtcaaatatcatcttcatcagcttcctcttcctttgtcaactggatgtaaatttcatcaagtgaagctcctggcatttcaaagttcgtttgtaaatctttcaaagtaccttctgcacgaatttcaccttgatgaataatgataaaagtatcgcaatatttttcagctgtcgccaaaatatgcgttgacattaaaatacttgctccctcacttcgcatttcatccatccaattaagtagtgactggattccaagtggatcaagcccaacaaaaggttcgtcaataatatataatttaggctcaattaaaaaagccgacataatcattactttctgtttcatccctttagaaaaatgcgctggaaaccaattcaattttttctctaagcgaaattcttttaaaagtgggggcattctttcttgtaattcttcttgtgaaagaccataagccattccggttaattctagatgttcttttaatgttaattcttcatataataccggggtttctgggatataagaaaattgctttctatatgtttctgtatcttccactaattggtgaccgttgattttaattgtcccttgttttggatgcattaagccagttatgtgtttaatggttgtactttttcctgctccgtttaggccgattaatccaacaatttgtttttcttcaatcgcaaatgaaatatcttttaggactggtcgctttgtatacccgcccgtcaggtgttctacttctactaaagccatttccatacctccttacgtatctttagttaataatagcatattcataccttgaactgtcaaaataatccattgtccactatctcatacatgcttttgactcgtttttatgttaaattaaagtagtacataattaatatgttgtgaaaggtggtcatacttaatggacgattgcattttctgcaagatagttcgcggtgaaatcccttctgccaaagtgtatgaagatgatgaagtatacgcattccttgatttaggacaagtcacagaaggtcatacactcgtaattcctaaaaaacatgctaggaacacattcgatttacctgaagagacggctgctgaattattccgccgcgtgccaaaaatcgcgcgagctttaaaagaagctttaccgctacagggattaaatattttaaataataatgaagaagtagcttaccaatctgtttttcattgtcatatccatttaataccaaggtatagcaaatcagacgactttgggttaaaatggaaagataacgcagactggtatacacaagaacgttaccaagaaattgctgaacttattgcagcaaaagtagactaaaatgactttatggatggagtggagtataaatgaataaaaaatcacttatttttggtattttagctggtggggcaattggagccgcagcctcggtattatttgctccaaaatccggcaatgaacttcgaaaagatattgttgctaaatcaggtgaagcaagtgtcattttaaaagaattagcttacaatgcaaatgaacttattcaatctgttcaagttcttggctcagaaggctcaacactacttaaagatgtttcttctgacattatggaatctgtttctaagtggaacgaggaaatggaacctgaaaagaaacgcttaaaagacgaaattaaagatatgcaaaaaacaatttctgatttagaaaaaacactcaaaaaagataataaataagtataaaaactgggcgcttgctcagtttttttctgtgcttaaaatcaccttcataaaaacgtcaaaattaggcaattatttattaaaaaaagggttgaattttattccaattgagcatacaatactatggtgccttctgacggagcactattttagctttaactggaggaaagtttacaatgcgctgcttaaaatcaatcaacacagagcgacgagatgagtttaatcgacttttcctaaaaggtattcttgtttggctagctgccgtatgtatttgttttttaacacaacatttaatgtaccccggccaacttacaaatgattatcaattcatgagctttttgggtattgttttaatttatccgattcataagttgcttcatattattgggtgctttaaatatcgcgaaggtacagtcattcagtggcgtatccatttctttattcttccctgtataaaattaaatattaaacggataattccaaaatggcattacattttttcattaattttgccttttgtcgttatcactactattttaatcacattaatgcttataactccaattgggcactcgggaatgtttctaattttgttatctgtccactttggaatgagcttttcagattttactcacatcaaaaaactatggaaaatgccaaagaattgttttgtcgaaagtgcagaacgtggcttttcgattttaatttctgactaaaccataagaatatcattaaatttctttcatcttttctttttacctttaatttatgttatgatagttattgtgttaagcgggaattattccaacaactaaggagtgtgttttatttaatgaagaagaaattaattcttggacttgtcatgatgatggcattgttcagtctagcagcgtgtggtggcggcggtaatgtcgttaagactgattctggcgacgtaacgcaagatgagctttacgacgcaatgaaagataaatacggttctgagtttgtacaacaacttactttcgaaaaaatccttggtgataaatacaaagtaagcgatgaagatgttgataaaaaattcaaagagtacaaatcccaatacggcgatcaattctctgcagttttagctcaaagtggcttaactgagaaatcattcaaaagccaacttaagtacaacttattagttcaaaaagcaactgaagctaatgctgatactagcgataaagcacttaaagagtactacaaaacttggcaaccagatattactgtaagccatattctagtagctgatgaaaacaaagccaaagaagttgaacaaaaacttaaagacggcgcaaaatttgctgatttagcaaaagaatattctacagatactgctactaaagaaaacggtggccaattagcaccatttggttctggtaaaatggatcctgcatttgaaaaagcagcttatgcccttaaaaacaaaggcgacatcagcgctccagtaaaaactcaatatggataccacatcatccaaatggacaaaccagctacaaaaacaacttttgataaagataaaaaagctgttaaagaagcttaccttgcatcccaattaactacagaaaacatgcaaaaaacgcttaaaaaagaatacaaagatgctaacgtaaaagttgaagacaaagacttgaaagatgctttcaaagattttgacggttctgcttcaaaagattcatctaaataagtaactaaaaacacgattggaactagtttccaatcgtgtttttttatatagaaaagctgttcagttacgctccctgaacagcttttctgttattcaaaagttggattataaaaggaacgattatctaacccaaatactctttcactaaattcgcctggttttgtatgttttaatactttatccatcatatttagcgaagcatccattaaatcaatttgatgtaaaatttcagcttcacgaacgagtggtggcttcggacttccccactcgcctttaccatgatgagacaacagtacgtgttttaagacaactacttcttctccatcaatcgatagctcttcagcaattttacttacttcctcaacgacgatagaaatatgtccaattaagttaccttcaagtgtataagtggtcgaaactggtccagagagttcaattacttttcctaaatcatgtaaaataacgccagcataaagtaggtcgcgattaactgtcggatataaatcagccactgatttagctaaacgcaacatggaaaccacgtggaaacttaatcccgaaacaaattcatggtgatggcgcatggcagctggataatcataaaaatcatcttgatatttttttagtaaagctcgcgtaattcgttgcaagtttgcatttttcatttcgaaaatatactgggttatttcgtcagccatttcatctttattaataggcgctgtctccataaattcactagcgctaacgccatcaagtggtgatgcttgtctgatttggcgaattttcaattgctttcttccccgataattttgaatatctcccataaggtgaacaatttgctgcaccccgtaattaatttcatcgctttcttttacatcccaaagttttgcttctagttcacctgatttatcttgtaaaacaaggcttaaaaatggttttccattactcgccgttccttttacacttgatttaattagcaagaatagctcaaccgtttctccaacttcatagtctaataatcttttttccattgtatcgccttctttctttctgtagtaagaagtttctccaaccattatagcacgcgtatgtcttcactggaaaaatatttgcgagtttcttgatgacatgtgaaaaaaataacctgatttgtgctttttcttttttggagcaactgcatcatttgcaccattctcgccgagtcaaaatgaacaaaaccatcatcaataattataggtaatggaaaatctttatgaataacatcaattaacgcaaaacgaattgctaaatacagttgttcttttgttgcttgactcaattcctctgggaagaatgaaacgacttgtttactctcgacttgaatccggttttcttgtaagtacacttttgtgtaatttccattcgttaaatgattgaaatagtcgcttgctaaagctaatgtttttggtaactttccttcttgcaaactccgcatagtttcttgaagtatttgaagtgctagtttagtttctgtccattcccgagtcatttgttgcaatttgcttttttctgaatagaagtcttgcatgagtgcagcaaacgttccaccctcttctaaagttgctatctcatgattttttgcagccaatgaggcatgaatattttcttgttcaaattctattttgcgcagtttttcttctagttgcagttctttttctttaataacttcttgcgctgaaaactgacttaatgctagtcgcttgtctggttcgagttgtgcttctagtagaattaagcgttcgcgccattgctgttcttgttttactcgcattgctgctacgcggaattcgtcttcattatctactttggcttgttctaataagtcggatttttcctttttaacaagtagtagatcttgttttactagatttaattgcattgtaacttgttccattttttctgcgagtttggcgttttcggtcaaattatttcggtaatatagcaaaccttggcgtaagaaagatattttttcttcaatattagtaggttctataggtgcatctagtttttctaatctgagctggtatgagtgttgtttttctgctaatggttctaatttcaatgtcagttctgcagctaattgatttttttcgctatgttctttgtaggtttgaactatagcctcccagttttcatctggaagttcattaatcgctaacgtatcaaataaatggtttagttctgattgatagtcgtattgtgatttgtttattctgctttgtcgttcttctaattgtgctatttgtgaagcaataatgtccatttcgctcagtaattgttgccattcttgcctgattttttgctgttctaaaaacgctaaaatttgctgattgctagaaggcgcgggtgttttagtaagaactaataaataaacagatataagagccactagaaaaataccaacagcaacgctccaaatcgattgaaaaatcactaaaactactaaagccactagaaaaataccaacagctacaatcgatttagttacgggtgttttttcttttgaatttattttttctttttcttgttggaatcttttattgtcccacatatttgtttctattttatcgatcttttgttgcaatttttcttctgattcttgggtaagctttaattctaattgaatatcatgctgttgttgtttgtttatttgctcgagttcttttattcgaagtactttttgatctagctcttttgtccatttcattggtgtttgtttagcatctgtttgatagtacttgatctctttttctaaacttttttgttgtaattcgcgctcattataagcgccataagtttcgattaaataggttatttctgcttcgttttcagcaaaaaaagcagtatgttcaaaattatttttgttaatcaagtttttttggcgttcttctaattgaattaattgattttgccattctttttctcttagttgcaaatgttccaaacggataataccatctggtggaaaagtagcttcggttagaggtaccgctttttcgcttagtgccttccattcttggtaaatgggccataaatctagcaaggtatttagtgtatctagttcgacacgaatagcggttttttcttcttgtaattcagtttgtcttgctctttcttcttcttttccaaccaaaagcaactcatattttgcattttgttttttggcttcttgaaacgctaattggctatcttttacttttttgagttgttgattgattgcaggatttcttccgcttggtttaaaaagagcttccaattttttctgtaatatttcagccgtttttaaaagcgcatcagaccctgttgtacctgtggcaagcaaatatcgctcaaattcttttttcttccattgatgaatattttgtagtccatgaatatcaaaagaaaaaatagcttcaaacgtattacggtcgatttctccaataatttccgttaatttttcttctccagctacttggccatctccgtaataaatacgtacatctccagtagcttttccttttaaacgttcgacaatcactttacccataggtgtatcctcgagcgtcaatctcccaccataaggtccgccgtttttaggttccatacgtggaatagattgttgtctagttgggaaaccaaataaaatactatgtataaaagccataatagtcgattttccagcttcattttctccaaaaataacttgaaaatccgaaatatgattaaaatgagcatcggaccatttgccataaccaactatatcaatggacgttattctcatttctcatcaccttccacttctttaagcaccgttcctagttctgtcaaagctgcgtctaacattaactgccgatcttcttctgataaatcgtctaaatatctactcacaccactttcaaaatatagagcctccacagtttgataaaaagctgattcatcttgtaacttttcgaaagcttgagttatttctttactcgctaaatgctgctcatgccagttttttaaatcgctttggtttgtcagttctattgtgagtttatgaacccaaataaaggtgcttcccgttaagtctgtttcttcttgaagcatttgtagccagtcagttgtatttattttttgtttattggccatttgaacaataacatgcagaaaaaaggaattactctgaccttggtatgtagctaaaagttttgtgatttcccggtaaaaagtattgatttcgctattttcaggcaaggtaatgattacttcttcccaaataatagggctggttgctatgaaatcaatggtcgtatttgacgccgataatgtgacaatactcgctcctttttcgcctgactctttgcggtttcgtccttgaatatttcccgggtaataaacgcttggggattctgctaataattggcgtttatggatgtgtccgagcgcccagtaatcaaatccttttttagtgatttcctgaatacgaaatggtgcataaacatcatggtcttcactgcttgatagttcagaaccatgtaaaagcccgatatgaaaatctgcctctccttgtttattatattcgtttacacggctagcacgaatgtgacgttctccgtagctaaagccataaatatgaacaattgctccattctttgtttccatggcagccatttcaacttgttctgaaaaaacatggacatttccaggtaattgaagtttttccttatgtttctctataaaatcatgatttccgtgaataatgaatgcttttatcccagcttgctctagtcgcttcatttcttttgaaaaacgagcttgagcacggacactttgatcctcactatcataaatatctcctgcaattaatacaaattccaccgcttcttttattgctatcgttatgatgcgttccaacgattgaaatgtgctttcttgtacggcagaaaaaagtggttgtggcaatgtcgaaagcccaatgaaaggactatccagatgcaaatctgctatgtgtaaaaatttgatttctttcatgactttcgcctccttaaaaaaaccgaatatacgttcttattataccttactatctctttacgtacaagcatttcaaataaaaaaatggttctactatttgctaaataaataacaaataatagaaccacttcgattaatgaaaattagtcgtttgctacgttatataggtcttgtaatggcgtcataataatgcgatttagatcattaataattgtgctcattgcttgctctttttccattaatttaacgattagttcattttcttgaacttcttgtgctacttgttgtgcaacatttactgtttcgtcgtcaatttcttgaccagtcatttgtttttcttggattgttacttgaacatcacggaaacgttcgaattttgcttttgcgtccgcattttcgttcacttcacggtatgcatcttgtaagctgatgaattcaggtgtttcacgaattcctttgtctaaatcatgtgctacatcataaatattaactgccattgataaatcctccaaatatctgtatttgtcacttctgtttcactataacaaaaagtcgcatgttattccagtataaaagaactaaatccacatcgcgagtattccttgaatgattccgataaatcctcctaaaatcccgcctagataggttatcatttttaattctctaccggaaatctctacaacaagtttttcgatttcaggtaatgaaaaagtcgctatttgtgtttcgacaagttttgctaagtccattcgctccactatttctgcactatgagtcgctacaaaatcaagcattcgctctactgcaaaaggaatcattttttctgtaatggcggattcataattgcgtagtatgccttgaatgggttgattaaatagtttttcgtgtggaacagcttgaataatttctgaagtaagctgccctgccaaatgtgcttgtttttctgtcgggataagttcttgtagctcttttgcttcaaaattatgccattcagttgttagcaattggttgatgatatttttagtgtcttcttggttaataagttttaagccctcttgttgaattttttctgagaaactatcgatattgatgaacattctcgccatgctgcccattttcccatgttcttcaaagaatttttgaagcatttgtttaatctgaattttgcctgcttcactcgctataaaaacactcattttactcgttattctttctgttacatgagggagttttttagttagttcgttttctagcatagaaggaattaactcgctcatttgtgttgattgttttgttgttaaaaagcggctaatttcaatctctagcgttctttctaaccatgaaatagagcgaacttctgcattttcgtatcctaaatggtgcagtaattcgttcggcgttgtttctaatttcattttttcatgaaacatttttgtaatggtttctgttacttctctttgtaaattctcatccaatagtctggcgcgaatagcatcctctgttagcaaatgacttaccactacttttccaatgtgttctgcaagttcatcgcgtcttttcggaattagacctggtgtaaatggtaaacgtttattaaataggtaaacggctttgtacggacgaaagagcattcggatagcgatataattcgtcatcgctccaataaatccgccaatcactgccattaaaagtatcgtaaataatactgacatgttttgcatctcctaatatttgtctagtaaaagtggttttattatacgtgaaaaatccctagacaacaattgtttctagggaagttcattctaaagtatgagattacaaattagtcatttttagtgggtctatccataaatcgaattctttttctgttacaaaaccagttttaattgctgcttcttttaaagtcgtattttcatcgaaggctaacttggcaattttggcagctttttcgtaacctatatgtggattcaaggctgtaacaagcatcagcgaatcatttactttagcttcaatcacgctttcattggcagttagtccttctaaacaatgaattcggaaggagcgcatactatcagaaagtaatgtgatagattctaagaaattaaaaataattacaggcttataaacatttaattcaaaattaccttggcttgcagcaatattaatcgttgtatcatttcccattacttgagcggccaccatcgtaattgcctcacactgtgtagggttgacttttcctggcatgatggagctgcctggttcgttagccgggagcgttagttcaccaatgccactacgaggaccacttgctagtagacgaatatcgttagcaattttcattaaatcagaagcaaggctgcgaatggctccatggacgaaattaatcgggctatgactcgttaaagcgaaatatttattagaatcagaagtaaaaggatacccagtttgtttccttagttcttctgcaactttatcaccaaaatctttggaggcatttaatcccgttccaactgctgtcccgccaattgcaagtggtaaaattgctttcatgctagactcaaggtagtttttattatttgtcagacacgcttcccagccactaatttcttgcccaagcgtgagtggagttgcatcttgcaaatgcgttctaccaattttaacgagctgcatatattgatttttcttcgtcgttaaaacttcttccattttagttatctctgataaaagtttcgttactaaagcttgataagcagctatatgcatcgctgtcggaaatgtatcattcgagctttgcgacatgttaacatcatcatttggatgaactttttcctcacctaaagttaaattggcaacgtgggcaataacttcattaacgttcatattgctttgcgttccgcttcccgtttgccaaacgactaagggaaaatgttcatctagttcaccttgaatgatttgatcacaaacgtttccgattgctaccgatttcgcttcggataactttccttctaaggcattcactttagccgcagcttttttcaactgagcaaaagcgtagataatttctttcggcatataattatcaccaatagcaaagtttcttctacttcgctctgtttgtgctccccagtacttagttgcatcaactgaaatttctccaagtgtatcacgttcaattcgttccattttgccacccctttttattctattttattatattccggatgtttacgcaaaaccaacaaataatgttcgctattctgttttttgaagtggttttattttaatcattacaatggtgagaattattaataaagcgatccaagctattgaaatgaacagtgttggtataaagtagtccattgttttttctgacattattagcatggttgcatttttgcttaagtaagcaggattaaacatttgtatccaaccgccaaaaccgctaataacacctaagagaatggctgtaaatacgctaatcattgcaactacggcattgctatcaaatacagcactggcgaaaacgaccaaactaataacaaaaacaaaccaaagtgcgtagacaaaaaatccttcgatcaaagaattcatatctaaatcgccaaataaaaaatacgtataatatgctgctaaaacataaccaatgaataatgaacttaagccaacaatacattgcataacccacttggataggacatattctacggctgatactggtctagtcataataaaagcaagcatccctctagaacggtcattttgaatgcaagccatcgccgcgacaatcataatgataactccaatttgatcaaactgagagccaagtgtttgcgacattacttcttgcgctgattgatttcccatcaaggcgacaacttgctccgcttctgcgccagttccgaccgctttaagtatttctggtaaaaaataaagcattaatggttgtgtaagtccaagaagtgcaaagacaattggcatccaaatgattctcaaactccgccgctgttctaaccattcttttccgagcaaagcactaaaatgcgtcattatctcaccttctccataaaaatttcttctagactttggtgtctgttttctacacgaatcagctcacctttcgtttttaatagtgcttctagaatagcttctgagccagcttttttatctatagcatacacctgataaaccatgcctaccttttcgattttttcaatatccttattttgattaagaagcgctaaccaagcttcctcatctccaataaattcaacatcaaataccggggaactttcttcttgcataagctgttcaactgttttatccgcaactaattcaccgtttttgataattgcaatgcggtcacaaatctcttccgcatcttttaaaatatgagttgaaaacaaaattgtcatttcacttttcagtttttctaaaagcacgataatttcccggcgaccaattggatcaagtgcggataccggttcgtccaaaacaagcaattccggtcgatgtaaaattgcctgagcgatcccaagacgttgccgcattcctcctgaataggtgctaatttttttgttagtactatctgctaatccgactagtagtaagacttctttgattcgctcttctaaatcttgttttttcatgttagacagttttcccataaaacgaagacattctaatgcgctcatccaaccataaaattctggatattgtggtaaaaaaccaattttctcacgcactaactttgcttcttggccatctagtttaatttgaccctcgtcttgcgctaagatttggacaatcatgttaatcattgtcgacttacccgcgccatttggtccgattaaagccacacattctttattatttatagttagatcgattcctttaataacccattttccgttatattttttctttagtccttggatttctaattttttcattagctttcatcctcttttcgcccaaaaataaaatatgcaattggaccaaagatattaataaatataatgacaattaaccaaataatagggtttttacgtgtttgccaatttttagctaaatctataatcgctgttaaaagtaaggctaaataaagaattattacgggaattagtaatgctatttgcgttttatccaatgtattcacctcatttatttgttatactcattgtataacagttataatattaaagcaatataaaaaagcacattttactaagaataaagtaaaatgtgctttttattagttgccgatagaatcaattaagtttccaataccatctgaaacttttccgccaaattcttttactttctcggcgccttttttaatcgtttcgcctgcttcacctgctttgtcttttacgccactccagaagtcactgccactattgttgtcggattcttcttcttgttttttcgcagcagtttcttgtgcggcacttttagtatcaaagtcagcagatttttggtaacgtaagccactgttcattacataatgagctaggcttgataccccggcagagcttgttgtagtgaggtaatggtctttgtctgttttatcaaatcccatccaaacagcgccaactaaattaggcgtgtaacctacaaaccactgatcttttgtcccattagtatcattgaaaggaacttgagtcgaaccagttttacctgccatttcgtgaccggaaactgctgcactctgaccagtccctgtattgattacgtcaagtaacatcgatgtcatttctgttgaaacagtttttgagataatttgttttgtttttggaacattttcataaacggtatttcctgatggatcaacaattttagtaatgatatgcgattctggttttgcgccgttattggcaaatgtagcataagcagtagccatttcaactggcgaagcacctttactcataccaccgagtgctaatccaagtgtttggtctttttctggtacttcgatgccaaatttttctacagatttaacacctttgtcaataccgatttgatctaacaaccagaccgctggcgcattgattgagtttgccaccgctttgtacattgggacttctccattataaattccgcctacgttggttggagtatagtttcctttgtacgttactttttcatcttttaacatcgaatcgacattataacccgattgaagtgctggcgtatagacagcgagtggtttcatcgtagaacctggctgagccttcatttgcgtagctctgttaaatccacggaaaacgtgctctcctcgtccaccaacaagcgctctaattcctcctgttgctggatccattagaacagctcctgattggacaagcgtgccatcgttcgcatttctagggaataaagaatcgttattatacactttttctaaagaggtttgatagttttgatctaattccgtatagattttatagcctttttgcataatttcatcttgagtgatgtcagcttcatttactgcttcattgataactgcatcaacataccaaggatatttgtttgcaagtggatcttttgattggtcatttaaaacgattttggtcgctttatatttgtcaccttctgctttggttatatcgccggtttcaaccatagcattaagtaccatgttccgtcgattagttgccttttcaatatgttgatacgggtcataggcgctcggtgcttggagcagtcccgcaatagtcgcagcttccgggatgtttaaatcagctgctggctttccaaagtatttcaaagaagcgttctcaacaccccactccccgtttccaaagtaagagcggtttaagtacatttccataatttcatctttggagtaggttttttcaatctctcgagccataaaaatttccttcgcttttcgcgtaaaggtctgttcttgggttagcaaggcatttttggcaagctgttgtgtgatagtactaccaccacctgaaattcccccgtttgtaatcaggttaactccagcacgagcgattccttttaagtcaaagcccttgtgttcataaaaacgtcggtcttcaatggatacgactgcattttggaggtttttagagattttatcaattgatacaaaggttgcgtcagttgatgacaattctcccgctttatctccgtctttatcgtaaacaatcgtggctgattctaagccttttttcaaagcatctatatctgcggacttagctactacaacaagataaataataaaacttaataaaaatacgagtcctgcaagtaaaaaaatcttgccaatatgtttgtttttccagaagcgtctaaatttccgccataaggtgctaatccattttccaataaatccaaagaatgatttaatgtatttaatgagttgttgtttaaatttgtccatgtaactctcctatctttctacacggtattaaagaaaactgtaaacacagttatacacgtattttacgttaaaacacaattttatgccaccaactttagaccgatttttgtaatatttttgtaataatccatatttcctacacatttatttacttcttttttacaatttcttcattttaatgtttccagtagtttaaaaagggtagatattaatgttaccattactagtgttttggtaataataatcgcctatatactgtgtacaactagtaatggcagcaagttttacatgggttcattaataagccggaaaggatttggaatatgacgcaaaagctgatctactttttatcacaaacgcatattcgaagtgccattgctgaagcttgggcgaagaaactttcacttagcaatgtcaaattcattagcggttcttggcataaatccaaagcaactccatttattgcagaagcgttgaatgagtttgcgattgagccacctgaaagcttgtcttattcccctagctctgaactactggcagatgctgatctcattgtaacaatttatgattctgcacatgaaactgcaccacaatttcctgctaacatacaagaaaaaattatttattgggacattgatgatccagaacaagaaatagcgttacccaaaaaatgggcgagttatcaagaagtctgtgataacattgccttatctgtaaaaaatttagagcacgtattgatagaggcttagatttcgttgtcccgccactcgtaggcgggacttttatgttaaaagaaaggggtatacatactatggacggatataatgatttaaaaaaagcagaaaaagccgcctttttaagtatatttgcttacttatttctttccgttttaaaaattgcagctggtcatttcggaaattctgatgcattacttgcagatggattaaataacacaacagatatagtcgcatccgttgctcttcttattggccttagaatttcacgcattccacctgacgccgatcattcttatggtcaccggcgaacagaaacaattagctccttaattgcatccattattatgtttttagttggtgttcaagtcatttggagttctattgttcatattattgaaaaggaattcactgcaccttccatgttgactgctattgtagcacttttttcaggtgtattcatgtatgctatttatttatataatcatagactcgcgaaaaaacttgatagtcaggcggttcgagctgctgcttatgataatcgctctgatgcatttgttagttttggcgcattcattggaattatcggggcagtacttggggttccgtggctcgattcagtgacagcctttttagttggtgttttaattgtttatacggctgtcaaaatcttttatgatgcagctcatacattaacagatggctttgatgtatccaaattagaaacaattcacgatttaatcgcttctgtccccgatgtcaaaaaagttattgatataaaggcgcggatgaatggaaatcgtatttggattgatgcaactatcgcagttgatccagatttaaatgtagtaaaaagccatgaaattactgaaattgttgaacaaaaaatccgtaatgaatacgaaggcgcattcacgttagtccatattgaacctttttttgaataatattcattgtcaataatcgtaaagtcaactataatttagattaaagtatcatttgctgggagggaatattcgatggggcagagaaactaattcacttaaattatctaactagaatgaaaagtatgcagcaatacattggaggagttctcttccagagccgtttttttcttctatatagatagttttatcataagcttatttatattaaattaggaggtgtttgccttagcagaaacagtttctgccaaggcgatttattgatattaaccattaaatttttaattatagctttacttattgctatatcggcgtttttcgtggcaacggaatttgcgattgtaaaaatgcgaccgagccgtttggaccaattaattgcagagaaagataaacgtgcggttcttgctagacatatttacaatcatttgaacgcttacttatcggcctgccaactcgggataacgattagttctcttggacttggttggttaggggaatctacggttgaagctgcattgcatccattattcagcttgctagaactaccacaatctgctattacgattctttcgttcactatagcctttctttttatcacgttcttacacgtggttgtcggggaacttgtaccgaaaacacttgcgattgataaaactgaaacggttgctcttgcggtagcacgtccactgcatattttttataaagtgatgttcccgttcatttggattttaaatggttctgcggttttcatcgcgcgtttattcggcttagagccagcttctgaacatgaaatcgctcatacagaagatgagttaaaaataatcgttggcgaaagttataagagcggtgaaatcaatcaatcagaattccgttatgtgaataagatttttgattttgacgaacgtatggcgaaagaagtcatgattccgcgaacggagattgtaacggttgatacgggatctactatcggcgaattatccgacatcatgcaaaatgagcgttatacgcgctatccagttattgatggagataaggaccacgttattggtgtacttaatttaaaagaaattttgtcagcatatgtggaacacggatcgaatccaagttttagtattgatccttacgtaaaaccaattattcgtgtgattgaaacaattccaattaaagaattgcttttccgaatgcagcgcgaacgctcccatattgcgattttacttgacgaatatggcggtacttccgggctcgttacggtagaagatattgtcgaggaaatcgttggtgatattcgcgatgaatttgatgctgatgaaattccagaaatccgtaaaatcaaagacggtcactacattgttgacgcaaaacttctgattgatgaagtaaataatattttaggtactgaaatcgaggaagaagaagttgacacaatcggcggctggttcttaacacaaaattatgaagtagaagttggggacgaaatcgattacgatggctttattttccgcgtgaaacaaggcgaaccccatcatattgaatatattgagattatcaaaaaaacaaatgactaataataaaggtagctatccattcacttggatagctacctttttaaatgcgatgttctagcataaattgtttgaatcgctctgctgctggagttaacgtttggttttttacaaccgctaaataaaagaaacgttcccagtttggacttctaattggtaaaactttaacgtccacataatttaaaatcggcatatttggaacaacggcaatcccaaaattttgcgcaaccatccctgcaatcacttgatctacttcgatttcataggcaattttgtaatcctcgccaatttttctaaataaatcatcaataattggtcgtaagccgcttttctttgagaaagcaatatgcgggtatggcacggtttcaattaaatcaatccaatctttttcagctaatggatgactttttggtacaatcagcactaattcttgttttgcaatcggtgtaaaatgaatatttcgttcattctcgagcttagagcatatcccaatatcgtatttcttttcttttagtccttgaataatatcaatcgaaacacccgtatgaaaaacgaaatcaattttcttttctggttctgtttgtatgaattcttgaacaagcttaggcacaagtgaggttccaagcgtttgtaaaaatgctaaatcaatctgcccttctccgtttgcggcttttttggtagttgctactccggcatcaatcatgtctaacgattcttctacataatccagaaatacttttccagccttgcttaatccaatgtttcgtccctctttttcaaataaaggtatacctaattcttgttctaacgaagaaattgcgtgacttaaactcggttgagtgatgagtaatttttcagctgcttttgtgtaatgttccatgtgcgccaatgtgacgaaataacgtaaatggtgtaaattcatggcttctctccttactaaaaattatctatgtaatttatctatcaattaatagaataataccaatttgtttttatggaatagtcataatacaattagactgtagttacaccagcagaacaaactattccttaaaaaccaatatacggtagaatacgttaactgtccagttgaaatttcaaacattgaaggcgttatcacatcagcgatatttaatgaacgggaatttatttttttactggtgtttgtgaaaatattatcaaagtttcttgtgatttttattctagagaggagataatttttatgacaaatgcaaatggcgacctaaaaaaatgcccaatcacgattagctcatacacgcttggaacggaggtatcttttcctgaacgagtgagaatcgcagcagaaaatggttttgatggaattggcttgcgtgcagaaaactatgtagatgcattagccgctggattaactgatgaagatatgttgcggattttagatgagcataacatcaaagtaacagaagtagaatacataactcagtggggaaccgccgaggaccgcacagtcgaacagcaaaagaaagaacaaactactttccacatggcgcgtttattcggcgtcaaacatattaactgcggtttgcttgaaaaaatccccgaagaacaaatcattacggcactcggtgaattgtgtgaccgtgcggaagaattaattatcggtttagagtttatgccatacagtggtgtagcagacttagcagcagcttggcgtgtagctgaagcatgtggcagggataatgcacaactaatttgcgacacttggcactgggctagagcaaaccaaacagcagaatcaattaaaaatgttcccgctgaccggattgtttccatccaattatgcgacgtacacgaaacaccttacaaagaacttcgggaagaatctctccatgaccgacttgctcctggcgaaggatacggcgatacagtcggctttgctcgaatcttgaaagagcatggcgttaacccccgtgttatgggcgttgaagttatatccgactccatggtagaaactggtttagaatatgctgccatcaaagtatataatgccacgaaaaaagtattagacgaagcatggccagaaatttctcccaaataataaaataattaaacatgtgaaaaaagtaacgtaacaagaagattctaccttgaaagggaagtgttttttttgaaatttaattcgatgttctcaccgattgatatcgggcctatgagagtaccaaatcgttttgttgtatctccaatgtgtaataactatgcgaatacagatggcactttaacagatacttcattagcctattataaagaacgtgcgcttggtggctttggtctaattacttttgaagcgaccgttgtagatgttcgggcaaaaggcggcgcaaataaagcatgtctttatagcgatcatcaaattgccagttttaaacgagtgatagatgcttgtcatgacgcgggtgccaaaatctctgtgcaattgcaacacgctggacctgaaggaaattctaaagtttctggttatcctttaaaagcagcttccgccatcgcttcagcagaaggacgcaatacaccggaagccatttcacgggaagaactttatgaattaattgaactttacggggaagcggctttacgagcaaaaaaagctggggctgatgcagtagaagttcactgcgctcatggttatttagtaagtagtttcctatctggacgcacgaataaacgtgtggatgaattcggcggctgttttgaaaatagaatgcgactaccaagactcattatcgaaagcattcgaaaacgtgttggtcattccatcgcaatcctatgccgaattaacagtacggatggcgtggatggcggactaagtgtccaagatagtgcgacggtagctgcttatttggaagattgtggtttagatggtttgcatgtttctcgtagcgttcatattcgcgatgaatacatgtgggctcctaccgtgttacacgctggttttagttctgaccttgtaacacaaattaaacgcgcggtttctatcccagtaattacagttgggcgtttcaccgagccgcattatgctgaactaatggttcgcgaaggtcgggctgacttagttgctttcggacgacaatcgttagctgatccagaaacaccgaataaggcggcggctggaaaactagacgaattacttccttgtatcgcttgtcttcaaggttgtgtagctaacatgtatgctggaaaacctattacttgtttagtgaatcctctactcggccgcgaatccgaagcctatttgccaaaaacacctagtaaaaaagttgttgttatcggcggtggtgttggagggctttatgctggttggatggctggctcaagaggtcatgatgtaacagtgtacgaagcatcagacattatcggcggccaaatgcgtttagctgcctatcccccaggaaaaggcgacctaactaatatggttcgcagttacattaaaaaatgtgagcaattcgatgtggaaattaaaaccaatacacctgtcacgcccgaacttattcaagatattgccccagatgcagttattattgcgacgggcgctaccccactcgtcttaccaattccaggtattgaagattccggcttaatccacgcagtcgacttacttgatggcaaagaatcttgtggcaaaaaagtactagttgttggcggaggtatggttggtagtgagactgctgcatttttaggtgaagctggtcatgatgtaacagtcgtcgaacttcgtgatgaagtcggagcagatgttatttctgaacaccgaaaattccttatgcgcgattttgacgagtataaaattaaaagtattactaatgcaaaagtgacgagtttcttaccagacggggtcacgtactccttagctgatgaaaaagagtaccgcattgatgggtttgattctgtcgtacttgcaatgggatcaagagcttacaatccactggaggaagccatcaagaaaatcgtcccagaaacttatgttatcggtgatgcagttcgtgcgcgccgagcattagatgcaaccaaagaagcactagatgcggtattgcaattataatttatggttgtactcgctgttaagccggcgagtacaaacctacttggaggtatatgaacgtggaaaaaagaatttcaggatcaactcggcttctaagtttaattggtacacccgtagaccattcaaaatccccaatcatgtataattatagttttcaaaaagctggtttagattatgcgtatcttgcatttgatattcctgtaagtaaagtcgctgatgcaattgctgctatcaagacttttaacctgcgtggctctaacgtaaccatgccttgtaaaagtgaagttttaaaatacatggatgaactttcccctgctgcgcgaatgattggtgctgtaaataccattataaatgaagatgggaaactaaccggacatatcacagacggtcttggttttgctagtaatttacgggattctggtgtagatgtggcgggcaaaaaaatgaccatcatcggcgctggtggtgcagcaacagcaatccaagttcagtgcgcacttgatggggccaaggaaatcgccatttttaatattaaagatgatttttatgaaaaagctaaacaaacgattgcttctattaaacaagaagttcctgactgcatcgtacatatttatgacttaaatgacgcagcaaaattacatgaggaaatagcgactagtgatattttagtaaatgctacactcgttggtatgcatccacatgaaaatgaaacgcctgtcaaagatacgactgtcttcagaaaagatttaatcgtcaccgatgttgtctacaatccaaagaaaaccagacttttgctagatgcagaagctgctggttcaaaaactataggcggactaggcatgcttttatggcaaggcgcagaagcatacaaactgttcacaggtaaagatatgcctgtttcagaagtaaaagatttatattttaattaataaattcatcaggatttcgagaggagaaaaaaatgaacgcaaaaagattttatccaacagcaattgcactttattttacttattttattcacggtattggggtatccattcttggccaatacaaacaagatttcgctggagtatggggagcagacaagctttccgacggtacctttgatgtcagtatggttattgctgttatcgcagcactcggcctaggacgtttacttacactgccaatttctggacctttttcagataaatttggccgtaaaccttccgcattaatcggtgttggtttatatgccatttatttcatcggattagcatttgcaccgaatatgtatattgcttatgctttcgcttttgtaggcggtgccgcgaattcattcttagacactgctgtaacaccatccgttctagaaattttcactaaaaatggcgctattgccaatatgtttactaaattctctatttctatcggacaattcgtattacctttcgctattggtatggtagcagcggcgaatatgtctttccgtacactatttattattacgatggcattaattgttatcgacggtttaattatcgcatttatgccattcccaccaatgaataacaatgtgggcggcgaaaaagtaaaaccagcgaaaatgaaattcaatgcaactagttgggcaatcataggtataggtttcacttgtacttccactttccaactatggttaaactgtaaccaagagctcggaaaattatatggcatggctgatccaagtaagattcaatcattctactcactaggtactatgtgtgctattttaattacagctgttctcgtgaaaaaattcattttaccagtgcgaattctcattatatatccagcaattgctactttaatgttactaattatttacatcgttcaaacaccgactatatgcttaattggtggatttgtaattggatacgctgctgctggtggggttcttcaactagctgtatcaactgccaacgaatttttccctacaaacaaagggaaaatcacttcgattgttatgatttcctcaagccttgcaaactatatcgttttaaacattgcgagctatattactaaagctggtggtatcgaaggtccgaaatatgtgttattattcaatgtagtgatcacagttatcggaatcttactagcaatcttcgtcaatatgcgttacaaaaatgaatctaaaattgcaactaaataagaaacacttcaactgagcattcacttgctcagttgaacttacatatcatttgtgaattaaagcacaaacttatgagttttatctatataaaagcttttaaaataagggtatttctcatgaaaaggtcttccaaagtaactacataaaggagagcagattatgaaaaataagtatttatctacttcactaggactttatatgaactatttcgttcatggtatggcgttaatcatcattgcacaaaatattgattttttatctcaaaaatggcatacagatttagctggtgctgccggcgttgtgtcttcatttgggattggtaaattacttgctgtttttatatcgggaaaactatcagataaattcggtcgtaaattatccgtcattctcggcgtatttttctatattgtttttttaggcggtattttgttaagtccaaatactatcatagcctatgcgttcggtatttcagcaggaattgcaaactctttccttgatacaggtacttacccagcattaatggaagcctaccctaaaaaagcggcatcagctaacattgttgtaaaagcttttgtgcaagctggtcagtttctcttaccatttatgattgcttttattttagcaaataacttatggtacggctggagttttatcgtgttaattgcgattttacttattaacttactgtatacgttgacccgtacgttccctccaatgaccgttggaaaaccgcttgatttcgagaaagaaatcgttgaagagaaaaaagcatttcattttagcattgatgaaatctgtttgattctctttggatttgtagcacagacgcttctatacattatgagtcaatggatagcaaaatacggttctgaagttattcatatgactgataacgcttctaggctacttgtgagctatgcaagtgttggtgctattttatgcgtatgtgtaacgtttattttaggaaatcgtggggttaaaacacttcacattttaataacgtatgtaacgatgacgatgttagtttctttcacgctttttgcattcccaactgaaattgtctgtctagttggcgctttcttgcttggttatttctcagctggcggtattatccaattaggtttaacacttctcgccgaagtctctgctcgtggtaaaggttttgttactagcctttatacgatcgctgaaggtattgctgtttttgttattccacttatcgctgccgctatttctaggattgatattgctgctattttcctactaaatgctggtattgcattattcgggttagctcttttattaatcgtatttgccagaaagaaaaaatttgctcgtgatcatatttaaaaaaagtatcgaggttggggaatccaacctcgatactttttttgttatagtttttttatagttttccatttgtacattaggaaccaaaatgctgtagcagtaacaatgaaaattaaaatcatttttacgagcaaagttacagcttgagtggttgttatcagactttcataattaaatttagagtaatgtccgcctaaacatatcgtgatataaatggaaccaataataagtatcggcatacggaatttattattcattaagaatctaccgttattttcaagggaagccgtttttaaggcataccagccaattattatcattaaaatggatagagcaataagtactataaattcgctgatgaccatacttccacttaaaagcggggttggtagtgctgaaaacaacataaccgcgccgccatcaacatcggccaatgatttaccttccaaaaaggctttaaatccaactatcaaattagttgttgcacctggaaacatgtagaaaaagcttgctactgctcctatagcaacgaggcctgcagcgattatgtctccaacaagataaccaacagctattgctaaagtgaaagagaataaaaataacagtgaaaaagatgcaatatacatactagaatcagacacattcggtaaatataactcaggaatttgctgatatatatacataaatctcaaggaaataattaaaggaactataataaagataattaatgaaggaatgagtaatttatgccaaaatatctggtttttagaataaggtaagccatacgtaaaataatccatttgcttatttttttcaaatacggttaactttaaccctaaaaacaaaaatacataaaagaacaaggctaaatttccttcaaaatcataaggagttaagcttaaatccattttaatttcatttggcgtcaattgttgatcatccacattcactttttgaaattcttccgactggtaatacttataattttgattaaacatatctactgtattagtagctgtcattgcttctgaaccaataaaggcaataacaataaataaaaatatccatgcgttttgacgccattctttaaagagaagccctgtactcattattcttctcccccttgttcctctagatgataaacaaacaggtcttctaatgtaaccgcaagttcatccatgaaaatcggtttttctcgttttatagcagcatataattctgtattcatatcccggaataaaatcgtatacacccgcccatatttgttaatcactttaccattttcaagtaaaatagttggtaattttttgttttcaaaagcaatttgaattttgactgcttgttcacgtaaagtttcaagatgataggattcttcaatgcgatttccttgtaaaatatggatataatcggcaattggttctaagtcgtttaaacgatgtgaagaaattacaatacctaatttccgtcgttctacttcttctaataaaatcccagtaattttcttttgagcgataacatctataccttccataggttcatcaagtaaaataaaatctgctccaatacaaagtgacaaaactaaaccgaaaagtgctttcattcctttagaatacgtttgaaacttaacatccgtggcaaggttgacttgattcattaataaatcaaatttagctccatcaaataatggataagtcttttgatagaatttttttattgttggaattttgtagccatcccagcagcctaagttatcttgtagcataaatattttttgctttagttcgggatttttacttatcggctcatctaagtagacatccccttcatctggaatgtaaaaacccatcattgttcgaaaaagtgttgtttttcctatgccgtttcgtccaactatgccaacaatctctcctggattcacttcaaatgttatcttatcaagcaaaagcttcccatcaatttttttacttaacgaatcaaccctcaaattttgtcacctccaatgatgtcctgactgtattcaacagataatttatgtatttcttccacattaattccaagataaactaaatctaaaattatttcttttaattttattttagtttctgctaacttttttggcgaactgttcttttctgtttggtccgcaataaaggttccttttcctttaaccgtgacgattacttcttgacgttctaattcttggtaagctttactcacagtgtttggattcactcctattctgctggcgaactctcgtatagaaagaattttttcgccttcttgaagtatgcctttgacaacttgttctttaattttttggacgatctgttcataaattggcagttgacttttcgtattaatagtaaacatctctccccccactttcatgacttttaattatagagaactaattgtactagttataatagtacagtagatataaaaataaatcaattcccttttaaaaagaaaattgatttacattctttttttctaatgttaatagcgcttgtttcattggtattccgccactataccctgttagtttcccgctttttccgatgactcggtggcacgggataattacaagtaaggggttttttccaatagctgttccgactgcacggactgcttttgggcgattaatttgttcagctatttctgtataggttctagtttcgccatatggaatcgtttttaaggcttcaaaaacttctaattgtaatgctgttccggataaatcaatagggaaagtgaaatgaatgctttctccatttaaataagcaagtagttctgctttatatttcctcattttctctgggtcatgtatcgctgattgcaagttttccttatttttcccaacataaaacaaacctttatcagtggcggcgaaataaattttttctcccgcaaaacggatggaatcatcatagaacttctccattttcttcacctctttcaactattaattatacgcttaacaaattagtttttctataatacctggttgtaatagcaagattagaaaagtttttctcgcaatttaacgctataacgtttatgattaagaagaagttgaggtgattacattgtcagattattacttaactaaaaaaagatggcaagcaatttcaacgaatgatcgcactgctgatggtacttttttctatggtgtgaagactacgaaaatattttgttttccttcttgtaaatcgcgtttacctaaaaaagaaaatattgttatcttccatagtaaggaagaagctacttcgcatggctttcgtccttgtaaacgatgcaaatctggagggaaaagtttacccgatacagaatgggtaggcaacattaaggcttacattgaagaaaattttgcaaagccattaactttacagattattgccgatgattgtcacgggagtccatatcatctccatcgaacgtttaaacggattacagacatcacaccaattacttatttagacaatattcgaatcgactatgcaaaaaatcagctccaaaacacaaccttatctattgaacttattggaaaaatgtctggttttcctaattcctcccatttttctactacttttaaaagacatacagctttatcgccaaaccaatttcgaaaagaacaaaaataaattagaacggatgaaacttatatgacgcatttaactttacctattttagaagactgggaaggtcttactctaactgctattttgcaagaaaaatttcaccttggaaaaaaagcacgacatgagatcagaatgtctcaagatgttttactgaataataaaccgctagacgactggaatactccgctttttgttggcgcaagtctttctttacctattattttgcacgataaaatcccggtttatgaatatgacttagaaattatttatgaagatgattttttactagtagttaataaacctgttgggatgaaaactcacgcaaatgacagctacgaaacggatacatgcgcaaatgcagtgcaatattatttagaaaaaacgggacaagaagcaaatgcactcgctgttcaccggctcgatcaaaccacttcaggattagttctttttgctaaaaacaagttagctatcgctggattatcgtggcaaatggaaaatagagcgattcaccggacttatcttgctgcggttgatggcacttggggacttgtgatgcagacgattaataaacctattggcgaagaccgtcatcacggctcaagacgccaaatcagtccttatggtcaacctgccgttactcacgttaaagttttagaaaatgacaatgaaaataatacgtctcttgtagaatgccaaatcgaaactggccggacgcaccaaatccgtgttcacttaagcggaatcggtcatccaatcattggcgatacactttacggcggatcaagtcgtgcaaaccgaatcatgttacacgcagagaaattacatcttaatcatcctttcaaaggcaaagaaatgaatttttccgcaccagctggagatgattgggtattttaaaaagccacaatattaaattgtgacttctgtacaaatctctactttcataccatccggatcttcaaaaaacacagcataatgatttttaccaccagcaaaaggaaacctgtcttcgtatagaagcttgattccttttgcttttaatttagctcgaaagtcatccacacgtttctttgtaccaccgtgaaaagctaaatgattaagtccaattcgcttacgatgataaccctctgagagaaatggctcctcggtttgaacaaagactaaatacgtctctccaaatttatagctaaatccttcattccacgtttgatataattcataagaaagctcttctaacagctccgaccaaaatagccggcttttttcgatattagctacatagatttccacatgatgtaacatttcacgcctccccgatatgtttaagcgcttctctacgactaagtggcgcaagcgtatggctgtttacaaaaacgcgaactgcctcactatctactttcgcatattgtctaagcgcccaaccgattgccttctgaatgaaaaactctttagaacctagccatttttcacaatttgcaaataagagttcagcatttgtttcttctttatattttaattgaaataaaatggccgtccgagctagccaaatattatctccgtttatccatgcttcattatagatagggattaaatcgggatatagtttgaaatgattacttacgaccgttccagctaagccatctaccgtatcccaccatgatttcgtcgtaactaattgctcatagatttcaattgcttcactggcttgttttttaccatagcgacttaataaatcaattgccgcgtattgaagttcacgctcttcttctgcaaataattccacaacaagtctcagtaaatcatccggcataccattttctcttaaaaaatctgctactaatttttttcgttcagtggctctaattcctaaaaatgggaattggtttttcatgtatgcttccattggcttcgaatctgctacagaacgattagcacggaataacgtttgaatagtcgtcattctttttccccacctgttaaataagctcgttctcgttcaatactgcttaaaaaatattctaaatcatctgggtctggcccaactcgtttacctgtttctagtcggtcgattttttccatgtcacttgcatccaactggaagtatgaaagtcgtgaattttcttcaatacggctagacgtaatcgacttaggaaaaataatcgtattccggttcaaatgccactgtaaaatcacttggtcaacagaagcttgatgttttttcgcaatttctgtaataactggattttgcattaatatccctttagcaagcggtgaccaggcagcatgcgcgatattctgttccgccaaatattttcgaaggtcattttgcggtaaaagcggatgcgtttctacttggtttaaaactggtttttcatttgcggcaaccaataaatcacttaaatgatgttgtttaaaattcgcaaccccaattgatttaataagtttttcatcatgtagccgctccattgcccgccatgaatcccggtatttccctgcaactggccagtgaattaaatataaatccaaataatccaacttcaaatttcgaagcgtccgttcaaaagcaaataaggtttcatcataaccaagatcgccattccacactttcgagcttataaataattcttctcgtggcactgcactatccaaaatcgcttgcccaacaattgcttcattattataaactgctgctgtatcaaataaacgataaccaacttcaatggctttctccacagcaccagcgataaattcttgctcagtcacttgaaatacaccaagtccaatataaggaattgtctcattccccggtagtatcattctgtcttgtaaagtttttgtcaaaacgaaaccctcctcacgaaaactaattgtgaactttttctcttaaatgaattatacactattttcgcaaatttatattttaaaaccagtataccgaaatgcgccttactctcctaataaaaagacgcaaaaaatctactttttttattcattttcttaaatacctaaaaacagccattggaaacgctgtcaggtcgtttatttgcgctttctgcaaaaaaaagtttcctatttattcccatcctatgttagtattaatttgtggtaaagatctatcaaattttttatttgtttttgttaacttatcgttaagaaaaaagctccctttttaaagtaaaagcgagctgattattaatgaccaaaaatgatcgggggaattaagaaaatggcttttaaaaataaaaaagaccgttttgcttcgttgttgcatgacattgcagtaaatttacatgaaggtgcaaatttctttgcaacttacaacattaattcggtggaggatttacatactttctcgaataaaatcaaagaatatgaaacagctggggactccatggttcacaaaatgattatggaattaaatgacgctttcatcacaccaatcgaacgcgaggatatgttagaacttactaaccgccttgatgacgtgatggatgcacttgatgagacagctttctcacttgaaatctgccaaatcactcattacgatgaatacatgactaaatttatccaagctatccaagcaagcactgttgaaattgaaaaagcagttgaccttgtttttgataaaaaattaaaagatgttcgtaaacttgcgattcaaattaaagattacgaatcccaatgtgatgatgtttaccgcgaatcactaatccaacttttccaaaacgaaaaagatccaattaaacttattcgtctaagagaagtttatgaaaaattagaagacattgctgatagttgtcaaagcgttgccaatacgcttgaatcaattgtcatgaaaaatgcgtaaggggtctagatagatggaaggaatgtttctaatcacccttgtcatcgtacttgctgcgcttgcatttgatctaatcaatggatttcatgatacagccaacgcaattgcgactagtgtctctacaaaagccttaaaaccacgacatgcgattattcttgcagcagtaatgaactttgtgggtgctatttcattcacaggggttgctaaaactattacaaaagacattgttaacccatttgacttagatcacggggaacttgttattttagcagcattactttcggcaatcgcatggaacttaattacttggtatttcgggattcctagtagttcctctcatgccttgattggttccattgcaggtgcagctattgcatcagccggatttgcagctatcgaatacagtggatttactaaaatcattgttggtttattagtatctcctgtacttgctttcgtagtcggttacacgatatattcactcttcaagattttcttgaagaacctaaacttagccacgaccaatcggcgcttccggatgattcaagtcggtacagccgcgctacaatcttacacacacggaacaaatgatgcacaaaaatcaatggggattatcacaatggctttaattgccagtggtttccaatcaacagatgatgtgcaattatgggttcaagtatcctgtgcggtagctatggcgattggtacaagtattggtggttggaaaatcatcaaaacagtcggcggtaaaatcatgaaaatcaaacccgttaacggtgtagcagctgacttaagttctgttattatcattttcggtgccactttcattcatttaccagttagtacaacacacgtaatcagctcttctattcttggtgttggaacagctcaccgtgttaaaggagtaaaatgggatactgcacaacgcatgattattacatgggttatcacacttcctatttctgcaacgattgcagctcttatcttctacgtactaagattcatcttataatttatttagagccttgttatagcaaggctctttttatacatttttttgaataaaactaataaatacaagaacaaatcaagtttattttaaaaacttattgcatatttactcattttgatgtattataataaacatcgataataacgatttatttatcataaattactcaaatactagagggagttgtacttatgcagaagcatgtattacaaaagttcgcagcaattttacttatttttatatttgtattttctggcttcacaacagtgttcgccgctgatacacaagatgaaactttaactaaaatccaagaaaaaggtgttttaacagttggactttccgctgattatccgccgtatgaatttcatcaaaccatcgacggtaaagataaggttgtcggttttgatgtaagtatcgctgaaaaaattgccaaagatttagacgttaaattagatattaaagaaatgaacttcgatagtttgctcggttcactaaaaaccggcaagattgatatgattatttctggtatgtcaccaactccagaacgtcaaaaagaagtcgatttttctgacccgtatatgtttgtacaacagcgcgttgtgattagaaaaacggataaagagaaatttacaagtgtaaatgattttaatggcattaaagttggtgcccaaaaacaaacaacccaagaagaattagccaaaaatgaactagttggttcagacgttgtttcacttcaaaaagtacctgatttaattttgaaccttaaaagcaacaagctcgatgcagtagttttagaaggacctgttgcagaagcttatattagccaagataaaacactcgcattagcagatattaaatttgttaatggtagcaaagaaacagccattgcaatgccaaaaggttccactgctttacaagaaaaagtcaacgcttctattaaagatatacaagatactggcttactgaagaaatatcaaaacgaagccaacaaattaatgttccaggatggtagtttttacgagaagtatggtaattactttatcactggtacattgattacgattgctcttgctgcaattggcgtattatgtggtgccattctcggctcattactagctctcatgaaacttgcaaaaacaagatggttacgctggccagcagcttgttatatagaatttgtccgtggtacgccacttctaattcaaattttcatcgtctttttcggaactcaaattatcggtatggacgtatccgcctttgtttctggttgtatcgccctatcgctaaacagtgccgcttatgttgctgaaattatccgcgcaggtatttctgctgtcaacaaagggcaaatggaagcagctcgttctcttggtatgacacaaggagcaagcatgcgttacatcatcttgccacaagccgtaaaaaatattcttcctgcgcttgggaatgaattcgttactgttattaaggaatcttccatcgtatccgtcattggtgtaacagaactaatgtttatgactggtgtagtccaaggcgcaagcttcaaaccatttatcccactaatcatcacatcattaatttactttgtactaacatttagcttgtcaagactactaggtgttgctgaaaggagaatgagaacaagtgattaatattaaaaacttacacaaacatttcggtaaattagaagtcttaaaaggcattgaccttgaaatcgcatccggagaagtggtcgtagttatcggcccttccggaagcgggaaaagtaccttcttacgttgcctgaacttattagaacaaccaacaaccggcacgattctttttgaaaacaaagacctaatggcaaaacaaacaaacgtcaacgaacttcgtcaaaaaatgggcatggttttccaaaacttcaacttatttccacataaaaatgttcttgaaaacctaatgctagccccaatgaaagtaaaaaacgaagatagcacagcagctaaagaacatgcgctttctctacttgaaaaagttggcttagctgataaagcaactagctacccttctcagctttctggtggacaacaacaacgggtagccattgccagagcccttgcaatgaatccagacgtaatgctattcgatgaaccaacttccgcactcgatccagaaatggtcggtgaagtattaagcgttatgaagtcgcttgctaaagaaggcatgacgatggttgtcgtcacacacgaaatgggattcgcaagagaagttgccgatcgcgttgtcttcatggatgccggcgtgattcaagaacaaggcacgcccgaagaagtattcggaaacccgcaaaacgatcgtactaaagactttttaggaaaagttttagcataaacatagattacgtctcacttatttctcggtgaggcgtttatctgcacttatagagaagaggagctaattaaacatgatgaataactcaaaaattgctaaaaaacatcaacaaatgcccgttaatatcctagctgatattggaacgcttgcaaaaacaatgccggatattctagatttatctattggcgaccctgatttaatcacagatgcatcaattattaacgcggcttttgaagacgtacgcgctggtcatacaaaatatacagaatctggtggggatgttgaattaattgacgccattcgtggttatttcagtcgcaattatgatctgtcttttgaacgaagccaaatccgtgccacagttggcgcacttcatggtatgtatttaaccttgcaaacgattttagatgacggtgatgaagtcattattcacgaaccatacttctccccttataaagatcaagtgttaaactcaggtggtacgccaatcattattccaacctacgaaaaagatggttttgccattaatgttgatattttagaagcagctattacgaataaaaccaaagctttaattttaaattcgcctaataatccaaccggtgccgtcttttctccagaaacttttgaaaaaatcgccaatctagcgaaaaaatatgacttctttattttatctgatgaagtgtatgatggttttagtttttatgaagacttcgtaccaatggccaaattcgcgcccgatcatacaatcacgttcggaagcatgtcaaaaaatttcgcaatgacaggttggcgccttgggtatatgattgctcctacctatttaaatgaagcagcaaaaattattaacgaaggaattacttattcagctccgtcaccgtcccaacgagctgctatttacgctttgaaccattctgagacactaattcctttagtaacagaaaccttccaaaaacgcctagaatatatcgcaaaacgagtagcagaaattccatatctttccttacacccgctaaaaggatccatttatgcatttattaatatttctaaaacaaaaatggattccgtttcctttacagaatacgttttaaaagaaacacaagtactcgttattccagggttagcttttggtgaatcaggtgataattacgttcgcctagccgcaacgcaagatattagcgtactagaagaagcattcaaccgtttagccaaattaaccttctaataaaaagagcaaactcgcttcatcagcaagtttgctcttttttttattttaatttgatttctgcaaaagaagaaacaactgtcgcttcttttggaaaagtaatatttttcgtcgcttcattaggtacgatgtaaacttttaagcccgcctgtagtgctgataacgcaccatttttcgagtcttctatcgcgattgcttcttccggctttacaccaagggcttccactgcttgtaaataaagtgctggatgtggtttaatttcctcgacatgatctgccgtttgtatcgtctcgaaatcagctaaaatgcccagacgatccagcgtaggttcaatccaatcaaatcccgaactcgttgcaagcccaattttataaccattcgcttttacttgttcaaaaaattctttaaagccattacgaaaaccaagtgattgttgcccgagatgacaagcttccgccacggtagttaaaaaagcttctttatcaaaagccccgttcgttgcttccatcatatagctaataattggttcttcacttgtaccgataatttgctgataaatttcatctggcaaatcaatattgtacgtatctttcaaatatttcattgtctccgtgtaccataaattctccgtatcaagcatagttccatcaaaatcaaaaacaactgctttcacatgcatccccctagtataagtgatactttcattgtaacatagataaactatttaagaaatcttccaaaaggggttgcttttttggtaaaaaacgaataatattgaagttgtggtttttaatgttcgttatttaccattaagcatgattttaaaaaaggagtgaaacacacgcatgtttcaattaaaagcaaacggtacagatgtaaaaactgaagttatctctggttttactacattcctaacgatggtatatatcgtagtagttaacccagcaattctttccgcagcaggtgttccattcaataccgtatttatggcaactatcatctctgcagtcattggtacattatggatggcgattttcgctaattatccaatcgcaattgcgccaggacttggtatgaatgcttatttcgtaacagtagttacaactcaaaaactagattattcggtcgcattcgctgcggtctttgtagcaggtattattttcttactattatctttaacgccgcttcgtgaaaaaatcattgaagccattccacataatttaaaagctgggattactgctggtattggtttatttatcgctttccttggcttccgtatgacaggtattattgtttctaacgattctaacttagtaggtttaggtgacttacattccaaagaagctattttagctattgttggtcttttaatcactttaatcttgcttgctttaaatgtaaaaggtgctttattcattgggatgattgcaactggtatcatcgcttttatcacaggtgaacttaaatttacagaaggtatcgtcaaacttccgccaatgccagaattcgtcttcactaaccctattcacgcttttggtgatgtgatgagttacgggctctatgctgtcgtcctgtccttcttacttataacgatttttgatacaaccggaacaatgattggtgttgcaaaaaaagctggcctaatgaaaggtgaatcattaccaaatgcgaaacaagcattaatggctgatgcggttgcaacaagtgttggttctatgtttggtacaactccaacaagtgcctacattgaatcttctgctggcgttgcaactggtggacgtactggtcttactacacttacagtagctatcttattcatggtgtcggcattcttcgctccacttgttggcgctgtatctggaatttctgctatcactgcaccagctctaatcattgttggtagcatgatgattggtgctgtaaaagaaatcgactgggatacactagatgaagctttccctgctttcttagttattctagcgatgccacttacttcaagtattgctatcggcttagcatttggtttcatttcttacccagtattaaaagtatttactggcaaatggcgcgaacttaactggttcttaatcgttatcgccgtattattcttcatcctcgttgcatttttaccacattaataaacgactagcgtctaccaaacttaggtaggcgcttttttattggacaaaaactcactcttttgctataaagaagagagaaactaattagaaatgagttgaacttgtcgtgtttttaaaatcactgctcgctggtgtcgcacttgctgttgtagttttcctagcaagttttctgatgcctgactacactgtatccaccttatattccatcgtaacaactatcattgtttttgcctccattatcttatctgcattcgtatcctttggtgggcgtagtggaaatccaagtcgaaaaagccaattacgctggagtatcctgtttttagttgcagcaattcctagctttatcggctttattattactttttacttttaaaataaaaagaagcattcccaaaacggaaatgcttctttttttaatcttctaaagcggaaatgaacgctggtaaatattctggtagatctggcgggcggcgactcgaaataatgtgcccgtctgttacaactggctcattatgccaaatagctcccgcattagtcatatcatctttaattcctggcgtacttgttacatttacaccttctaaaattccggcagaaacaagtacccaaccagcgtggcaaatttgtccgattggttttttcgctttatcaaacgcgcgaaccaaattaagtacgctgtcaaaacgacgcagcttatctggggaccaaccacctgggactaagattccatcataatcttctgcgcgaacagaatcaaaatcataatcagaagtaacaggaactccgtacttaccgtgataaacttttttagcttcctctgcaactaaatgtaccgaagcacctgcctcgcgtaatctaagcaccggataccatagctctaaatcctcaaagtcttcactaacaagtgcaataacttttttaccttttaaagtcatataaatctcctcctatcctcttctatagtataacaataactagattgttattaaattattccgcctataaaagaagacaaaaaaagacgctcgaaataaacatttccagcgttgccatcatgttcggtcgtctatgcataacgggatgaggcatagacataaactacacggccaatgagatgaatgaaaacaaataatgattttggtgtctaaacagatgtctgactagttgccattctattggaagatggatacaccaaaagtcattataaccatgatagggtcttatccccatgaaaatcacatttataaaatgaaactttcatcgaggtaaaactctatcctataacttattttactattcttctcaaaaaaagcaagtaaataaatatagattttttgtgacgaacttaaaaaaaacaagaaaagctttactattatcgcatacttttgtataaattaattttttataaataaaaaggagactattacaggctccttttaaccaaagatttcaacaatcatccatgaaaaaatagcgactaatggaattaaaacccatacattgtgtccaatcaggctaggacgagcagctggtctatcttcgagtagttgaattctttcacgtaaatcgtgtacttctagctctaaatcctgcactttatcttctagttcatacaaacgttcttccattttaatccctccacacctttttctacatctcattatacgcgcaacgaaatgaaatacatccttccataggctgatttattgctaatttattgtcataccgttcagccatttgctacaataaaagaaaacaatcaactgttggggtggaaaaatggaaattcaagtagaagaagctgttgtaaaactcattttacatgggggaaacacacgtaaagaagcatataaagcaattgattatgctgaaaaataccaatttgatcaggcagacaagcatttgcaaatggcccaagaacagtttcaagaaggtcacgtttggcaaacaaaactagtctcaattcgcgacactgaaaccgtagcacacccgtcatttttattaattcatggacaagaccatttaatgactgcccaagccgaactacaactagccaaaagaatcattgaacaatataaacatcaacaaaacttagaaaaacgcctaacaaaattagaaaatcagctagcttaagcatgagacgtagctggaaataagaaataagattcacttgtaaggattttcggacgcacaaacaatatatcttctgtctcaataatataagccgcgtcaatacgcgtatctttttcaggcgtaaataagagatgtatcgtcatgattccgtcactaagcaaataacttaaaacttccaccacatctagttttttgacactaagaatatctaatacatataagtccgtctcttctcgctcaaataaaacaattgcatctatttcttctatataataaatatcattttttaaagctatcaataaataaaacataagcaagtcttcactatttttcacatcaagcgtactagaaagtggtactcgttcggatacaatacgctgaattagctggaaatcggttttattatcgggattcagcttttttattttggaaaatttcttttttagactactagcatccacggtaaaactactctcttccactcgctcaaatccaaacttcggataaaaatcaagcacagaatcatttgcaaaaagataaagaaaatcatagtcatgttcatacttagtaattacgtgattcaataactgattcataagcccttggccgcgatactctggatgagtcattactgtgcctatttgaagcgccttgcaatccttcccctgataaatcaaatccattttattgatagaaacattcgcaatgatttcatttttatccaaataagaataacaaatatatttatcattccaaaaccctttttgaaaccattcttcaaaattaatatcaaacgtactttctgcaagtttattaaaactatcacggtacattttattgtctttataatcacttattagttcatagttcatttaaaattcctcgattcattcgtataaaaataacaggcacgacgcaacatacgccctacctgttaattttatttaatttaacgtataccaagtgctatttttgcatagcgtgacatacgatctttcgtccaaggtggattccaaacaagattcacattcgtatcttttacttctgggatatcacttaatgccatttgcacttgctctgttaaaatccctgcaagtggacagcccatcgtcgtaagcgtcattgatacggtacaaagcccatcttcatctaactcaacatcatatacaagtccaatgtttacaatatcaattccaagctccggatcaattacttgttccagcgcgcccattagattttcttttagttgctcatccatgaagcatatgcctcctttttgcaattttgtacatttattgtatcatatatgagaatgattttcattataagaatttctcaaaaaagctaactccttgtagcattccttcaactgaaactttgtgttttgcattatcatcaataataaattcgacattgtctgctaagctctcttcaaccaatgtctgatatagtttttcactgtacgcaaagggaactacatcatcttttttcccgtgccaaagtaacaatgggcggttattaattttcgtaatgttttgggttaaatcgtatttttgtaaagctaaaatccgttcatcaacatcataaggaaaagttaatccctgcgccaaagcatatttagataattctttagcaaagtcaacataataagcgcttcccattaaactaactgccactttaatataatcatattgtccgagtaaaccaagggatgtaattgctcccatcgacactcctccaacaccaatacggttggcatctgtttttcctgttttaattaattcctctgtaatgagcggaaattcagtaatattcgtttcaataacatcccaaaaataagtagcttgatcttccggattcgcgccttgaagacgttccccgtgtaacttagcatcaggtaaaactaccctaaaacctcgttgtgcaagcaaatacccgtaatgtaaataaagttctttttgtgaagtgaatccgtgataaaaaataatagtcggtaactctttttctgcattttcacgattactaatatgtaaaactggaattcccgcaattagttcattttctacttgaatcattgtgaagcctcatttctataggttttattgagttattgtaaagaacggaatcatttacaaataggtaataaacgtctatcattaacctgtgcccttattttagcatgaagggcagttatgaactaaccatatgaattaaaggagcaaactatgtctaaaaaattaatcgtactagaccttgatggcacaacacttagagatgatttaactatctcctcgcatactaaaaacacattagaaaaagcacgaatggccggtcacgaagtaatgatcgcaacaggacgcccttaccgcattagtggctcgtattatcatgagcttgaattaactacacctattgtaaattttaacggtgctgtttatcatcatccaagactcactacttttgctgaaggctatcatcacgcaattgatttacaagtagttcgagaattgcttgatttctccaatgatttcgcgctagataatattgcggctgaagtagaggataatgtctttttgaaagaacgcaataatagtgtaccagagacattccatttaggaacagaaaatattgtatttggaaatattcgcgacgccattacatcagatgctacatcgctattatttttcggtcaacttgatcaactagatttaattagtaaacatttagatgaatcactttctggcgttatttctcaccatacttggggagcgtctgcttggccagctgtagaaattatcaagtttggcattcataaagcaatcggtgtccaagccgctgcaaaaacacttggcttcgaccgtaaagatattatcgctttcggtgacgaaacgaatgatttacagatgcttgattatgctggcgttggcgttgcaatgggtaatgccgctgaatccgtgaaaaacgtcgcaaatgttgtaaccgcatctaaccaggatgacggaatcgctttatatctagaagaaaacttaaacctataataaaaagctgcaagtatggccttacaaaagttagaatctctaattttttgtttcaaccatgactttgcagctttttttacatcattttatttttatacatagctagtgctaatttttggtctgcttctgaacggaaatctccaaatacactcgaagtttccatgacattaataaatgctttagggtcaaattctccaacaatatgtgtaatgtcatatagctcataacgcgtaataaccatgattagcatagcaacatcctgttttgaatatccacccatcgcatctaccactgttattcctcgtaccatattttcatggatagctttaataactgtttcagaatgctgagtcataatcatcacagttagtttttgatgtctagtatggataatgtcaattactctactttgtacatataaagaaattaacgtataaagagcaaaagtccaatcataagcaaatcctgccacaataatgataataccgtttaatagtaagaaatacttcccaaatgaacgccctgttttaattgtaatatacatagctaaaatatctagcccgcctgtcgaaatcccaaatttcaatgctaacccaacacctacagaagcaattaatgctccaaaaatcgcattaagtaaaatgtcatttgaaacttgtacttccggaataacaattaagaaaaaagacataaaagcaacagttaaaaagctaaaaacagtaaaggatttccctacttttaaccaacctaaaatagcaacgggaatatttaacaacagaacaagtaaccctgtcgaaatcgaaatattcattgtatcacgtaacatgtctgatcctaattgcgcaaccccatttaatccagcagcataaacttgagctggtattaaaaagaagttcataccaattgcatttaaaagtgctgctatgattgcaatagcggtttttttagcatattctttatacactaattttgaactcattttcttctctccttttttggccctaacataacataccaactttctagagaaaagagaagtcttttttattatttttttgatttttaattaaataatggataaccgcctgataaataaaagcccagtgatacggttattactacaactataatgaaaatcattaagaacattcccgttggcttttgttgttttctataactaagcaacatttccaccacaccaattacaataatgcccattaagattttaaatatagctaaaatccagctttctttcacactgtactgcaccatcataatcccacttaatatgactaaaatataaaaaactcggttaatcatttgtaacatggtaaatcctttaacagattttgaatagattagtaacgctgtgacggttaaaacaacaattgctacccaagaaattaaatgtacatatccccacataatacttccttcttccctattaagattttctaactgtattcattaaagtaccaattttatcaattgtaatttccactgtatctccgtcttgtaaaaaggtcggaggattcatcccgctccctacaccactcggagtccccgttgcaattatatcccctggaagtaaagtatgaccttttgataaatcagagataattttcgctaaattgaaaatgaatttttctgtagaatcagattgtcttacttcaccgtttacttttgtttcaatatggaaaatcatttcttctttaggttgatattcaagtacatacggcccaattggacaactagcatcaaggctcttcccaatgtaaaattgtttatgttttttctgcaaatctctagctgtaatatcgttcaaaatagtaaacccaaaaacagatgataaagcttcactttcagatacatctctaatttgctctccaattataaccgctagttcgccttcgtaatctagtttttttgttatatcttgatgcaactcaatctcgccatgatgtggcaataagctattcgcacttttggtgaaaacgagaatatgttcaggcacatcctctttacttcccatttctaatacatgattataataattttttcccactgcgataatattgttaggaggcataaaaggtatttggatttctacatctgctaggtcaatactttcctttgtcatctttatgtcctgaacagcaggcttttctttaataacatctaataaagtagctggcggatcttgaaagatagcttgtgcaggaataattttattttcatttactaaagcaccgtaattatgttgccctttataagaatagcttaaccatttcatttaaataccttcctctatgtttatttggcaaatatgttgtccgtcgaaaaaatataaatatgcatgagaaacttttttcctactaattgcttgaatagcttccgcataaagtttaatttgaatttgataccgttccttcattactttctcagcggcttcccagttatcatatcgtccttcaattttatctgtcttgtaatcgattaaaataatggagtcttcttcctcaatcatgctatcaacaacaccttgaatgagcacgtgttcatcaagatttgtttgattgtataattttgctgcaggaagtaagtaactgaatggaacttcacgcttcactttatcttttttctgcaaaacggtttttcctagagctgattcaaagaacgcaataatttgattaacattgatagctttaatttgagcttctgtaagaatatctttttctctcattaattgtaataatgagactaaatctttttcggtcggtttatcatctaatggtacagcttgcattaacgtatgcattgccgtcccaatttccgtagctgacaacttattttgttgcaaaaatttaggtcggtctaaagatactttttggaattcttttaggatagatgtatcactccaactatcttgcaaagagaattgtcttttaagctctgtcacagactgcttagcacgaattccagtggcttcctcatctttatattggtaatgcataaaacgctcaatttcatccttatatggacttttaactggcacttgcttatgtgcttttacattctccatccagttatctgatttttccttttccaagtcatcagttaggaacatttctttcgttttaatttcaacttgaagcttcatatcagttggcagtgttttaatcttttcttcgcacaataattctttaaaatggctgtggcggattgtagcatttccaatccaatctaaataacacttcgcttttgctcgaattgctgcgggtaaaatagtttcttgttggttacttacttgtaaccaatttttacttgttttttcaaaatctggaacagttgcagttaaaattagtttttcttccgcacgagtaagtgcaacgtataaaacacgcatttcttccgcaatcatttctcggtattttttttgcttaatcgcttgttgcatgatagttggatagacaatcatcttttctatatctcgataattagaagcaaaaccatagtctttgtctaaaagtgttttactataaatgtcacgcatattaaattttctacttaatcctgaaactataactaccggaaactccaaacctttacttgcatgaatcgtcatcatacgcacaacatcttctttttcacctagcgtttttgctgtacctagatcatctccacgaacttctaatcgctcaacaaaacgcacaaaacggaataaccctcggaaagaagttttttcatattgattcgcacgatcatacaaagcgcgtaaattagcctgacgttgtttcccgcctggtaacccgcctacaaattcatagaagtttgtttcttgatagatttgccaaattaaggcagtcaaattttcccgaatagacagttcacgccaattgtttaattgtgttataaaacgactaattttatttgctgcatccgaaactgtaatatctttataagctagcatcgcatcaaaaaaatagccttttttcttcgccatccgaatttgtcctaattcttcttcatttaaaccgattattggagaacgtagaactgctgctagtgaaatatcttgatatggattatcgattactttcattagtgcaatcattgttgctacttcagtcgtttcgaaataaccagaattattattggcatagaaaggtatatcttttattttcattgcttcttccatatctggcgcactcgtcatagctcttgctagaataacaatatctctgtattgaatgggtctattttgttgtaactttttatcataaattggaaacttattatctatcatttctctaatttttgtcgcaatcgctcttgattcaacttgatttttttgcaactcttgtggcgataattcatcctcagattctttttcttctgatttcatatcaattaacaaaagttctgttgccatattgttagcttcaggaaaactagctcctaaagttaactcagctgcctcatcataatcgatttctgcaatatgcttatccatcaactgatgaaaaataaaattggtagcatcaagaacttctttcctacttctaaagttttgagataaatctattcgtattccgctgccttctccgtcttgctgatattcttgatactttgccatgaacaaagttggttccgctaatcgaaagcgataaattgattgctttacatccccaaccataaacaagtttccttttgtatcattcgaattagtgacaagcaaaagaatagtttcttgtaccatattagtatcttgatattcatcaattaatacttctttgaactgttttttataactatttgccacatcagagggcgcgccattttttaagaggatttttaaagctaaatgttctaagtcattaaagtctaataccccacgttgttgcttttcctcaaaaaagttttcagcaaattttttcactaattcgcttaacgttttaatatctggtttcattttttctaaatcacttaaataattttcttcttctcttgaaaaccaatctattaaaacatttttcacttctttttttgcagcatcacggaatttttttgcttcttctacatattcttcatcaaaatcagctttatttttaagggcaggtattcgtttgaaatcaatgctctcaaagccaaatttcacatcttgccaattatcccagctaatacttgataaagtgttaatttgtgctaaatcattttctaatgtgcttaaataaggagctggtccattattttcatttgcatagtctatggcggttaacaagtaacttttagcttgattaattctaagttgaatatcttctttaataattggaaaataaggtaattccgtgatagaagtaatcgcctgtgtatcgtaaaagcttaccatttgttctaaccataaatccgggtttggatttgctctagagaaatcataaagtttcgagattagcgtatgcaactccgcatcagatctatccccagtaaacgattcaactagatgaaaaaagccctcattattttctatactatattctttttctaacaggtcctctaaaacttcatcacgaatcatactgctttcgatgggttcaatcaaacggaaattaggatcaatatcagcttcaaaataatgttttcgaatgatttccaaacaaaatgaatgcaaagtcgagatagaggcatagtttagtaatgcaacttgtttttttaaatgtacagattccggattttgcactaatgcttcttctaaacttttacctattctatacttcatttctgcagctgaaacattggtaaaagttacaattaacaattcatcaacgtttagattttctgtttcatttattagtttttcaatgattcttgtaactaaaacagctgtcttaccagagcccgcagcagctgctacaagaatattgtttccatttgcttggatggctttccactggtcatcagtccataaagcatcttctggtttggttggtatatttaatctcatactactgcgtccctccttctatatccatttttgttaaaattgtttctgttttttcatttgttaaatgtctatattgattactcgctaaggatggatcaaatccacaaaacgagcgaaatccacaaaactgacaaggtgttttttcttttaatttataaggattaatggaaacagctccatctagtattttatttcctgcttcctgatatttttgtcttacaaatcggcgcattttatcaaactctgcttttgtcgcagttctggaacgcgcacttagctcaccgttttgcttaatttcagctggaataatattggaagactttcctttttccagatttgtatccataagcgaaacagccacaggatccgataaaattaagcctttcattttggaacttttttgcagttctcgagcaattgcttcatcactcaattctttctctgcttggacatattgattatgcatatgaaagtacagaaccccagcaggctcagcagttttgcctatcattttttgcgcatttgttacaacgatgtctaagtaagtcagcatttgaagagccaacccgtaataaacttcagtaagagccaaatcatgtgaactagatttataatcaatgattcgaaggaaagtacgatcatcttgttcagctgcatcaattctatcaatacgtccttgtaaaagaagttcgctatctgattgtaatggaatttttaaaggcggaatatctcctttcaaaccaaaatccacttctaaaccaattggacgaaacgcactgcttttcgcttgttcatttaaaaccgtagtagctcttgtaataatttggagtaatttatattgaatatattccatccgttttgaacttaataaaatttcatgttgaatcttcggagctaaaaatgtcatcgcaagtttagccatttgcctacattcttcttccgttaaattaccccaatctcggttagttcgttttaattcagcggaaatccattccatcgccccgtggaaaatttctcccatgtctacagcttgtagcttataatgagctctttcttctaatttcaagccatattgcgcaaagtgttgaaactcacaactaaaaaacttctccatccgcgaaacactcgcatgaatattttcaccaaataggtttttagcagttgtttcttggagtggtttggttttattttcataataaaggcttgaaagtacttgttttgctgcctcagattctttgctatcttcaaaataactattataagcatcccaccatacatttgataaaggatagccacgtttatacatttgtaattggcttgttaataagcccagtgtagcttgtttagaacgaatataactactttgttctttatcattcagtaaacttgggtcagttaaataaaccgattcatttaaatttttgaattggccttttatttttcttagataattcgactcactaagaactttcccttcttcatctgcagctggataactaagaaataatttgtcgcttggcaaactcattattttataggctaataaatcttcttcaccaatgttatttttagcagatggctttaaattgctattttctactcgcaaagagtcgcgatcttgatctgacaaaatccctttatctttttgacgtagtggcattacgccatcattcattccaatcgcaaaaataactttcatgttaagcaactttgcattttccatatcagctaaaactacttgatctaaagaaggtggtagtaaagaaaattctagcgcatccaagcccgtcgtaattatttcagaaaaactattaacatctaattcttcttcacctaaaacttctacaaattcatctagcagttctgatattgaactccaagcttgttcatgttctctagcaagttccaaataaccattttcttctgctacttgtctccatgattctaaatgttctacagctttaacttgctccaaataatgatatagagccatggcgaactctatgcctgtttttgcttttgttatattattttctaatgttgaaagaggctcaactataagattcctcatttcattaataacactttgggttgctaattcttcatctgtttgtggcaagacattggtagaaagccctcgaattttacggtaaatccaatcgccttctttttcccatttccacttattttgaataccattttcgagcacataattttcaagtatatctgcttttcttctcataatagtcgcattttcagccacatcaaagaaaaattctgttttaactgcttggaaaatcggctcatatttccaattaaataaaattgcatcaatgctagaacgaataaattcaataaatgggtgtttagccattgctcgttttttgtctataaaaataggaatatcaaaggactccattactgtttcacataaaatatcataatcaccgatgtttctagtcaaaatcgctatatctcggtatctatagccgtttaatgctaattgccgaatttcgcgggcaacaccttccatctcagcacgcctattattagcttgatggatggttaaatcatttgctcccccttcatatgacgagtatttattatctccccaagcgttggctaaaaaggctaatgagtcagagttagctcgtttattttctaaaagaattttctccggttccacttgaattttatttaatttagccatctctaataaagcaaagtatgcttcagtgctcgctttaaacatactgaaatcttccaaacctttatggatttcaggtacgtttaaagttaacgatactgttactttatcgcatttttgcattagcttttctattactgttaactcttgttttgaaaaagaagtaaatccgtcaataattatttccgtttgatttaaataatcactctcaataatcttatctgctaacagtctcaaataatcttcattttcaaggaattttcctgctaataattcttcatatttttgataaataagtgaaatgtcatgtactttgctagatacacttgtagataaatttgccgcactcttctctaattcgtctacagaaatttcttcttgtttcatttctttgaataacttagccagctctgaataaaagcctttttttgaagtagctctagagaaaattttcaacttatctttttgatctaaagcagcttttcgaataaccatctcaatacctgtttgactcaaaaaagttttagataagccaccagtttcttgaagtattttccaagcaagcctactaaaactgaaaatctgtgtccctagcatccctgccaagttttgtttatttaaaaagcttgtttccatttgaaacgtcatttgatcggggacgataaaaatatacgtcttagaagtttttttgattttttcgcctacttcatccatcaaatgagtggttttacctgttcctgctttaccagcaattatttgaagtgtcataccctcaccaccgaacatatgtttttatttagtttaccatatttgagcaatctgtccagaacttttttcgagtcttttttttcgtgaaaatttataaaacagctcaaaaaaactaagatagctcttactatcttagtttttcatatattctactcaaaagccagcatttcctgttggattttattcattttttctgttagctgcataaatttcgctttgttcctattatcgagagctttatcaatttcagctctaagttgttctaattttctctcttctaggagcatcgtcaggaagcattcgataaaaacatttgttaattctttttctcctttaaggacacccacttgattcatcaatgaattagaaaaatcacgcatttccacgactaccactcctccactcatatttattacaatttcgaaaaactgtaacatggcaagaaaaaacagaaaacggcttgaaaatacaactttacgaaaatctaatgacttgtaaattaccatgtgctataatgacaaaaaataactcataacttactttgatgcttcgtcgttatttgaaattttgtgcattacgcaataatttcagattacttcttagacataaatacaaacatagaggagttgaatgaaatgaaaaaagaacaaattagtactcagttttatgaagtaaatccccacacaatgattatttttccaaaaaaatctggaagtatagtctattcagaaatttatgaagttgattctcattatacttctaaatttaccccatttgagttaattaaaaccagctgtaactttttcggatcgagttatgatggagggagaagaaacgggataccaaaaataaagacatcctctcaaaaggatgtctttattttacttttatatagaagaaacagtatttctgtgactaattattaacaatagattgatgttgtaaatactcgtcatagatagtctttaaatccatttcattcttttttatacgtctttgcaaggcttttaactttcttgtttcatataattcggcaaacagcttttctatagccttatcttttccttctacgtagcagatgtatctaaaatcattaaagctatatagtctcatgtcataacctcgcaaaaaataatatcttctatattaatgtcaattattcgttcgtcaaagcgctgtaattgaactatatttctttcatgatctaaataaacaggaactacatacttgtatcgcacatgatgattgttctttaaaaacagtacttctattgaccaattgcgtttgagagcatccgctaacactattgaatgttctaaaatatcatcaattaaattatacatgttcttcacctcttgcatacattatacgaacaagcgttcttaaaatcaagcattaaaaagtgttgtgttgcataaaaatctatgtaataatattcacatgaacgattttcgttcattatttcattcaactattagctgtttgacatcccgttttttacatctgaatataacagcaacctcgaataaattttcggggtttttttgcataaaaaaagccctaacggtggggttaagggccatatatttctagttattcgaattaactaccactctgtcaattaacatttctttccacgtttcaggaaaaccaatcatttctagttcaataacctcttggtatttttgtattaattcttctattttatttacaaatatttcccactctgtttgatcaacgcacaaaaatttgaatataaatataacaataaatattctctttatatttagtttagccgtcccattaggtaattttggcgatactgttatcgttctattatagagcctcccattatgggcgcatatatttcgtattaacacaactgtgtgtaaccaactttgaatatattctgcatcatatccataaattttaaccattttctttttaattttaatatgtaaattactataaaacttagaaatatcattgaaattgcaaacttctactacaatccaaaaaggaaatttcccgttatattcttttttataccattcaatataaagttctctattagtatcagaataacttatgctactataaaatttattaagccattttgcgtagtattctggtttattaaaattattagcatatttgtaagctaacgggccgcaattatgcgaaaaatcataagcaagaacagatttaaattccgtttcaatcgtatctagcatagacaataaaatatttcttaattctttatcaaataaataaactgaagaaattttttcaaatgttattccaggtttcaaaatatctttttctctatcttcaaaatatgataaccagtatccacttagtctataatattgaaccttttttaaaaaactaattgcaaatgcctcatcttcaattattatatttttttgtttcatcttttcaatttgaatttggtatgttgtcgccggtttatcctgcctctgcatctacgaacacctctcaaattatataaaacgaccccgcctgttccacattattaagaggtgtgcggggttttattaattaaattataacctatgcatttcattttgtcaacaaaaacaaaacatattagtataacacaaaatacattataaagcaatttacgttttttctcattttagtgtaacatacaacactaaaatgcgcaaatgtaatcaaaaataacccttatagagcattataatcaataaaacgttgcatttctgcggtttttatacaattcgcttggattattacagtttcattacatttttttgttagtcgctttcaaaataaaagccccccgctcaaagcgagggttttcgttttatttcaagaaatagttagctgtgtaataccagccatcagatggataccaaagctctaagtatccttttccgttgttgtaccatgctaatttcgtattaggtgcataccatttaattttgcccgaactcaacttcgtattattccaaaccggaatgcgtaaatcttttgcgcttttaattctaactttgatgcgacctttcgcatcttttttagctacaacatcgcaaaagctcttatacatgtagtataatttgtcgttgatgtacgtcttgtaccaatattgattatgttcgtatactaagaactcagttcccgatttatacatgcggaatggcgacgatttaaagtccatttttggaagcaatggcgcactgtcaacaacttttccatcatgtctgtttttattttgtgatgcacctttcaattttgcattgactgcgtttctgaaacgtgttaattcggaaggtttcgcaacccaaggcgcaggacaattttttccggttacatcgtaatgacggataatgtcactagccgttaaatcgtatgttttgcatagctctgcagctacatcaactgatcgattaaatgttgctgcagtgatattcccgtttttatctaagcacatttcaataccaattgaggttaaattcgcatttccgccgcgatagtaacttgtacttgcttgaagagctgttaatttgcaacttctttcgtttgcatggtatgcaacttcatttagagggataatacaaatagcttcattatcatcaataaaaatatgtgcagaagcgtaacgctcttttaaatctctaaaatatcgtctgtgattatctgcgcttgccccagggtttgcagtatagtgcataacaatcttacttactctaagcaacttatatcctgggcgtgaaaattgatttttattgatataattatattgtagtactgacattatttatcatcctttcttggttctgaataattcattactttcaaactatcggagaatttactagttgttgggtccatcaaaataccgacaacggctacaattgtggtaataattgccattgggctatttaggaaccttacaaacgaaagccacaagacggaccagttatctaaatcagatatagtaaagcctcccgctgtccacgcgacgcctagaactgtaataagagttgccacaacagttcgccagtttttcaatcgtaccttccagttaattttcatcatttcacctccttttcatttttttcagtaacatatttccaaatcgctttatcttcccgtttcaataaagcaatctctttatcgtggtcgttttgcttttctcgtaaactcatacgatctttcttgctttcagacatttcttctctaagactttttaaagttatatcaagagaatctatcatattccgcaaaggtgcgactaatgcccatctaattacaaatcccacaattgccgctattaagctaattaaagctattaactcccccacgctcattcctgctatcgatatgctcccaagtaccaattttcatcatcccctcgttgtcggtccataaaaaataagcctattcggcttttgcttctttcatagcgattatttcatctgcttgtgatctcgttattttttttaaagtaacgaatttattaacatctgctttagtatagtagccaccgacaaaataatcttttactttttcataccaattaatcatctacaaaacacctgcttccgccaaagataatagtaagtttgcattatcttgttgcgtttgttccgtcttctgctcgacttctgctacatacagcattaagtcagcataatcttgcgttaatttttctatttctgatagtggaggagggtccataacacttgcgtcttcaccagcgctccatttttgggtctttacattaaaaactggatttacagaaggaactggcggcgcaattaatgtataaccatctggaaccttttcccctttttccaaaacaattaagtcgtcacgttcaaaaataccgtctgcatcatatttaaaaacttttattaactcgctcatgttgtcacctctttagttaaataaattatgccgtcaagtccagtgttcacgtctaccgagccaacaccaacaatatttatatcagcactcacacttagatatatattcgcttgattacttgctgctgtactctgctgtgcagcggaataaagtttattccagctcgcatcaggagctaaaaaagttggcaatgttgcacatatacctgtcccgttcccggtcccttttcctacaattccgctaacaataactagaaaccggttgccaaacttaatgtatcgagcgactaaaggctgacttgcaacaaatccgttttttggcgtcaaagtaacgctttgcaccgcactagctagttcgaaaaaagtttttgcatcagcaagtgctttatctgctttagcctgtgcgctagatgctgtttcttttgaattccagttagttttatctgctgcggtgacatgaatatccgcattatttacatgtgtatttaagtctgttttttgtgcgaattgtgcgggctgcatagcatcaaattgtattgttaaatcatccgcttttttatcgacattatctaatttagtatttaatctctcgaacgattcgtcgaatattttttcataatcatcccaacgttcaacatagtattcttttaccgggaaaaagtcgctatctattaatgctttttttatctcaaaactgaatttatacacacgcatcccttggctatttttgtattttatatacaattcagcaatagcatttccatcgtgcgctatttgagagtctgtaagtgcgtattctgcaattcctcgcactccatcgatgattgttggtttcacaagatacttgctctctgactctgttcctttcgctaaaatcatagcaagctctaattcagcagcagacgataatcctaaatcttgattatctttatctatattaaaaataagtctagctgtcccgcctgtatcttgcgtataaaaaacagctttttgaagtggtttatcttcttgcgttgtgacgttaaaatcatatatgccgtttttgtgaataacgttttcagtttcagtcatgttctaaccactcccccgccgctcagtttcgtaggcgtgtcagcttcccaggtaccgctattgagattgaaaatatcggcactttgaggatacaaaccgattgcgctttttgctccatgtgtggtgttttgcacttcaactcttgcagtgttataaccgcgaacatcgacgttttgcgaagcgaagtaacaaccgttaacgtcagcagaacaagcatctatgaatacggctgtaaacgggtctatcgctttagtattgaaagccattctgcattttgtaatccttacaaatccgcagcgtatagccttgataaaatagtttttcgttgttcctgcagtatttgtttgttctattccagcaatataaatatatccagatgtatcagatactgaaatacttctgatttgacaagtagtaggaccagccgcaggatcaactgtttcataattagaagatagaatatataatgtcacacctgataatggcggtataatcacatcttcatcatagcgtccaggattaatccacaagcgtaatgtattactattaaatacacgtgggaaattcatggtagctttgttaattgttttaaatggcttatttttttctccagtccctgcagtatcatcccctgaaacggaatccacatagacctcaattgaaccagcatccagaccatacagacgatttagcatatataatacttgctcatttgttagttcaatactcgttattctcgtcatcatgttctttaaactatctgcaagagaatctaagtcactatctaatctatctttcgctaattcaaatattttattctgtaacttagaaacccttaaatcaacaacttcattgctagaattaccaccggatgcaataaccaaatttgtaattctttttcgcagatgttctatttcataatcagataaatttaatccattctcgattatttcccagttatcatttatctttttcataaattcatatccttgcaataaatcgtctaatctatttaaatctctcattttttaacccccttctttacttcttttaaatgtgccaatgttttcgataatgtccctttcacactatttattgatacaactggtgttttagttgattgaggataaagcgttatcttttgaattctactatagacatcaatattttttccgcgaacatatcctgcatttcctagcccgacacgctccacttttttcttatgaatattccctttagtaaattgcacatagtcaagagtaatagaaatatccggaacatcttgcaatgtttcttttaatcttgcttttaaatttgctgtagtagtagaatcatcactatacttagcagcgtcaataatgccataaatatcagcgttcggactcgtatacgtagttgtaacaataggattaccattatctcccgatttaccatctccagatattctagttgctaggtttgtactgtcatttgtaaatgaaagtttatttatattaaacccatctacaaatataaatgcattctcaatgcctatttttttccgaataacaatatgataatttgtcacttcgaattctgctttaaaattcactaaaatattatttaaaagaacattcaaagcaaaatcatttccaaggctttcaaaatcaaaagaagaaaaagagtccaaaatttcataggtgaattttgtcccactaacaataaagtccatacacgactttattgtttggcttcccttaagttcagaagtgagtaacttattatttagatcctttacaatgtgaagacattgtacattatagccaatcgtgtctcctgaaccaatgcatgaaaacatctcaattctatacatttctttgctttccacttcagtaatcacacatttttctgtgatcatatcgaatgctctttcgttatactttctatacactgtaaaatttaaatcaggtactgtatttatttcgaaattattttctaaaatactatgattagtaagaggttcactattaccatataaatctgtaacttctaacatttctccacctctttacatgtaataataaaaacgaaaatcgaacgatatttctaaaggacccgtactccccatgatttcaatctcattccatccgggggctaaaccaattgttgatttttcagtgtcgccatatataccggctccattaagcaaagagtaaacttgattaatttccaattcatccgtacgctttgttattcctttgtaagaccatacttgaccagtagttttattatttatccttagtccctctgatgcccctttatagcgaattataaaagggtatctttctggattaattgctatatctgaagcgttatataccttaaatttgtttgtatcaaaaacatattctgctgtttcagacgatggtaaattttgtcctaggctccattttctattgctaaatttaaacccatctaaagtagaacctacactttcagaaagaccttgcgcgcaaacaaaagttcccgcgatatcacagattggtgctcctcccttttgctgaatatttaaagactctacttttactggccaacgaaccgtttcatgcctttcatcgatgacataaatttcttctttcccacttataaatttaatgaattcgtttctttttaagatgtattcagcgtaattactacatactaagattagttgaaaagttatatcccgctttgctaaaacactacccatgtctatctcgccgtcaaatgtttccatggatactctttcagttgtgaagttgggaccaggaacattaaattctttcacatcgactttattttctctagtgatgtactttgttccatcttgtcgctcaaatattagtccatacatctattaacctcctgccttcgctctcgatataattgttttagcgtttaatagcatatcaatatcatttattaaccacgatgcgactggcgtactgctatcatccggtaatactaaattcacttgaataggttgtgtatttgcaacaatgtttttttgattgctcactaacttattactatctgactgatatgcatttattgcttgagtgtttggtgtcactggaacatcgatgcgcggaatcgaattagtaagatttttactcattctagctgcttctatgctaatgatattagcattcttccgcatgccgacgccgactcccgcaataacttgaaaacctacttcgttttccatttttcttgaaggtgaatgaatatctagttctttttttattgtgttctcgattgttttagctatatttgatgattctttttgtaaaggaccattcatgtttttaaaaccagttataatccctgcaacagtttgagtaccaagaattgaaccagcagttttaaattgttttgcgtctcctaactcttttaaccatgtattttttgcacttgcaatgtttgtagtcgcttttttattagctgctaaaatagctttatccatagtaaccttttcagatttagatccatctaatccaatagcatttgcgtttttatgttttttagaccattcagcttgatatgcttggagttctttatcagacatatttgcgattgcgctaatttgtccagtagcacttaaaccttgttctctaagttcattaaccaagccatcattaactttacgtttttttagtttatttattaaagcgataaattcatcttgttgctgtgtctgggtcctcaaatttgctaataaatcactaccagcgtatttatctgttttggccctatcaaataaacttatttggctataagcgctttcttgattagcttttaaagcatcgttatatgtcttcttagcttcgcttatgcttgcttttgcttcatcgttagcttttttcacgttatcatagtacttttgtgtagatgacttaactgcttgattaagcttagttttttgcgtactaatttctttatttgcagcagctatattagtccttattttacgtgtctgtgcctcattcaaggtatattgcttattaatttgcttaagcttattaatatatccttgtgcgttaattgcccccgttttataatccgtctgtacattagcaatcttattatttacatttttggcatacgcagtttgtttagatgtgccttttgcataatgtggtacgtttctcaaagctttagctgttttatcccctcgcaatacctcagtgcctcgtggtagatcaagaagaacattacgcccttttggaacaaagctttttccgtcaggtgtagtaatcatttcttcgtagttacttccccttgcatcatttaccagagctggtccgccactatggttatttgtaccttttgcataacctacctcttgaatcccactaggacttttaccgttcgttttatacgcaatttctaaaactttttgttgtctttgaggtattttcccccaatccgcaatcatgttattaagtaaatctctaacagtatcagcattagtaagcgcagtaaatgtttttttgcttacttttgtaccattgtaagaataaatattatttttgccttcttgaaccttactcaataaatccctattgttcgcataaagatttttaaggtttattttttgaccgttatactcaacaattacatttttaccttgctcgatttttgttttaacatctgtattcgttgctagcaatgattttaaatctacttttgtgccgttgtattccacaatcattcctttagatgaattaagcttttttaacacatcagaattatcaactactaaagttttcatggacggaggtaatttgtcccagacacccatgtcttgtagtgctttttgtagcgcaaggctagtatctgcattcgcaatcatacttttttgttcaggcttcaatttatcccaaatacctaaatctgacagcgcgttagctacatgtatagagtcctcgtaactgacaattaatttcttttcgttgaaagtcatcttatcccaacgaccactttcaatagttgcagttgcaattgttttcttagcatctgtggttaattttgcttctttcatgatgaatttcagattattccaaccatcatcacttttagctaaattggatacgaattcaccaacattgtctcttatttcagaagttttagggtctaatactaagttgttccatgcggtatctgccatttttgctccatcgccaattagcttgctggcttcgtcagctttgcccgctttttcttgtacatcacgtgtaaattcgtcataatctagtcccatatcttttaatccgcgtcggatgtttttttgagctacatcactacttacatttaacttatcatatagttgttcttgcgttcgtatcaaagccgttacactagaccgcactgttccattctgatctctatccagttggttcattgcgttattgtatgccgttttgtctattaatcctttatcataagattctttgaatgctttcttttgcttcttcgtctcatctgttgttgcttttgtgactttaccaagatagttagcttgttcagtgagtgcttttgtacttaaattctgtacctcaccgttcatcgcttttatcagctgtgttttctttttgttgcttaagcctaaactttcaatttgttcaatctgcatatctttgtaaatattgttaacaattttcgattgttcagatgtcatcttgccagttttaactgcatgagattgataaatcttttctatttctttatattgcgaatctacgtttgcctttctttcttctgctctcttttcagaatctttcatggcgttgtctagtaacgcttgtacagcaggtgaagcttcatcatatgctttcttgaagtcacccaatgcatcgtctgtattcttcttaatttcgtccgccatgtttttgaatgcactgacaattttctcgctgtctgccgttgctcctgatgcaaatgtgtctaatgccagtgtaccttccgatgcaaactcattaaatttcaccatagacttatctgcctcggcgccaatgtcatagccccacgttttcacacgttctttactctcttcaattttacttatatgtttatctaacgcatagatccctgcaccaagtaaagctgcgcctgctagaccaatgacagctggcaacgctccaaacgatcccgctaatcctgccgctgccaaactagttccttctaccgctgttgtagtagccccaaacccagctgccaaagaagttaatttacttcccaatcccaatatcttacctagccccgcgaacccttttattagtccgctagtcattgatactagttttccgccaaccgttaatacaggaccagttgctgcaataattccagcccattttataatgttttgttgttgttctccagaaaggtcattaaatttatcaatcattttattagcccactcgatgattggagtgagggcaggcattaatttttgtcctacgttctgttctaatacttcgagcgaagctttgaattgatccacaccaaatttaccagcttttcgcatattatcagcaacttgtttagtatatccatttgcttcatcagcgcccttagaatatttacgtagagaatcgcctcccgcttccaaaagcgtattaacagctgataaaggttcacgtccgaaaatcatcgtcaagaaagagtttttctgtgttttcgtcattttctttgttttatcattaatatcatccaacaaagttggcaaagttttcatattgccgttgttatcttcaattgttaatccaactgcagacattgcttctgcagctgattttgaaggtttaagcaaacttgtaagcatcccccgtaagccggtacccgccttttgcccttcaataccgcggttagaaagcaaaccaacagctgctgctgtatctgtaagtgaatatcctagcgaatgcgaaataggaccgacatagttcattgctgttcccatatcagagaatccagccgctgttttatcagctacatatgttagcacgtcagcaactttgtttgtgtattccatctgcttatttgtgtctttagaaatcattccaaattgttctaatgtagatgttgtaacagacattactgtttcgaaatcatcgccagatgcacgagcagcgttaaaaatcgcaggcatagacgccattgtttgattaatatcgtagccttttttaaccatttctttcataccgagcatagtttgttcagaagctaccccatacttaacactagctttctgtgcataatcaaagacttgtgtataacgatcgccaaactctttcgctgattcaccagattcacgcaataaagagttaacttctgtcacttcattatcaaaatcaagatacgctttagttgatttcaccattccggctacaattggcgccgtaaatccaacggtcatcgcggttccagcttttgttaacttttgaccagacttttcaagcatatttccgaattgttcaactttgacgatagatgaatcaagacctttaacattaatgtttttcttattgattttgtcgatattgtcagatgctttttgccctttcttcgcaaaattatccatatccttatcgattttgttcatctggcttttatagccattttcgcgtatttttatatcgtaataaatttctcctgctttactcatgttttcacccctctttcagcttgctgttagctctcaaagccttttctaatccttcttcattagaagcagcatcctcaaaatatccacgctttaacatgattcgattttgctttattttttctttcagcaaatgttttggcactttgcttcgttcagtcattcgaatttcaagagttgtcataaatggtgtttccccacctaaattcattagatatgtccggaattctgaaaaagtcatatttgacaattctttgcgcaatctgataccgtaatacgacaaaaaagaagactcgattaaatcaaagtcttcaactattccgtaatacttttttcctgtggcttcccctcgtcactttcctcgctcatatcgctttcaaataatttagctataatgtattcaataagcccctcatagactttagttggcaatgttttggaattgatttcttctctgtcttctttgctgaaaaaaatagcaaaaatatcatcatttgtcgctacgatcccatctgtgatagtcattaacaattcatgcatgttttcattatttggtattgtatgttcgtcatcactttcatcagcttttagtttaggcgcaagaacttgtcctaaaattttgggagcttcatccaaaagcgcactgtacttaatgtgtgcttgtgccgaaatgtccgcataatactttttcccgttaatttccaaaggaagttttacttcattctcgttaaaattaaatgatttcatttttgtcctccaaattagtaaaagccctcactcagagggcttcgtatttttaagcatccgttacagttactgaaacatctttgaaaatagaaggcttgctaactgtcttaactttaactgtgatagcactcgttgtttttgcaactcctgttaaagttccatcactagctactgttgcttttgcttcatcagatgaagtgaatgttacatcttgtggagctcctgatggcagtactcctgctgtaattttaatagtttctccaacttttacagttttagaggcgctatctaccgttacgcttgttggctcaatggtaggcgccggcgtaaaaaccggcgtaccatttgaattctgtgtggcagaaaatgaaccaatatcgttcgcaccaccaccaccgaaatcattaatcccgattggtccagtgatttcatacttagagcctgctgggaatttaaccacaattgttttttcagcttcagacccaactttatcccaagtttcacgtaattcattttgccctggatctgattcattgtatttcccatccaaacctaactccatagcagcacctgtttttaccgcacgttcaaatacctcaccaattgttgtatattgttccacatttgagttcagtgaaatgtctaaagtttctaagtctttgatcgaaacaccatctccgctttcccctgaatctttaaccgaaatttctaattgtttaactgcataagttgccattaacttacatctccttttcaaataatattgttagttggtaaatcaagcgaccatcatcgtcataatcgacttgtccgccgcttgctacatctgttgctactaccttctgattttggatattcagctcagaagggtttgttaaaagaaagtagttacgtaataaatcgtatgttcgtttgcattgaattgtgtttttgtcataaattaaaaagccgatgctctcacgaacacgactttgcgtttgtacttgcttgttttgaaatgtcggtgcttcattaattactaccattgaatcaagccctgtttgtttaatgaatccaagtgtttttatatctgggaatgtttttttgaaatgcactactaaatcctcaatcataagcgcatcccaccttctacaatttggttaatactctgaattccataacttacagccatttcgtaccaacgtggattccgacgattttcataatattgtctgcgggcataaggagttaaactaaacactctagctacaattgaatttttttggatgataattttaaaagccgaacttcgtcgcaagtctccatacaaaatcggagtaacaggctgtgctaattcaaccaattcttccccagcctttgcagccgttgacaaagctttattatgaatatcatctatgactgtatctttaaaactactaaagctcatgctcggtcacctctcctacgacaatttcaaaatggtgtatactgccatcgggatttggcgggaaggatacgctctgaacctcacctttaattaaacaatagccaggaataacaaaagatacattgtctccttcattcacaacaaaacttaatttgttacaaaataagttaacaatatatcttatgtttaatccttcctctgttttatttacgagcttttcaaactcatagcgaaacatcgatttattaattgtatctggtaaaaggttcccaaagtcatcacgtccactattactaattattgtaacttccgtatttagtatagcctcgggaataggcggtaactgaaagctcattaacagccacctactcccgcataaagccagccactagataaaagcaaatccataactttgtccggaacgtcaggtataaagttgttcgagttttgtgattgaccacccatagttaatttacctagtgtaaagttaccaataccaataaatccaccatatttcttgatatgctcacactgccatgcgacagcttgcttaatatcatcatccacattatctcggtctacgatattaggcataatttgcttatcaattgctacagaagcggcttttattaaattatccgcttctgttggttcgatacttaagtttgttagactagctaactcacttggtgtaatatacgttttcatttactcaccctctttgtttttgggctcctttttgctcttggatggttctttttctggttctttatacacgaactcttcaaagccatcgttttctaactgcttaattaatacttcattgtcggtattgtatactgcattatcttttcttaattgcacaaaaaactcctccttaagccactgtagaggcgataaccccgtctttttgttgttcttttacaaaaatatcatggtatacacgatattgatataaccatccgtcaccttgtccgaccgaacctggtgcgtgaaggtaaatagaagcatgtttagtcccgccgataacagaacctttattaattagtaaataattaagtttcttagctccagctgctggtttataaccatccgtgaaatcaaaagtatcatagaaacgatcttctgcttcaacttcaacaagtttaactccatcaattcctgtgatgcgtgtttctaagctagaaggcccaatattttgattagagattgttctagtaaagtctttacttagttctaatgcagccattacgtctggtgacacatacataacaagattttgtgtaccatattttttaacttttcgaatagctgctttaagtgtacgaaagacattttcttcagtgattgtttctgcagcagagtgcccattggttttagccgctgttgctaacttagaaaaacgatatgcatcaacttctggtgcagcgtgttccgcattaaactcttttgttacgttggcagctgttaacgcttggcctgtttcatctacatccataacatctacaaaaaactctacatctctatcaaacgtaatagtgtatggagtattcgtatttgatgctgaaccttcgttatatcctttgtttctagtgtgcggttttaatccagttgttgaaattgtttgtaatttaaatgtttttgcgtctaaccataaaaggttaggtgtttctaattcatttgtgtaagtgccgaagactaatttctggtcgagctccttaccgtacttgtctacatagttaatagccattttgctatctctccttttctaattatgaatttaatgcttgaatgaatgggtctgtagcacttggctcacttgcattgcctagtcctgccccgattggtggaggcgtgtcaccatcatcagattttgcaatccattcaggatattgctctgcgaatttcgctaagttgtcgtcatttcgctcttcatccccaaaaagcttcgtaaacgcttcatagcgttcttcttttacgccgctttcttttagcttgttgtgccactctgcggtttgttctttctgaacatattcatccagctttgatagtgcctcgtctttctctttttgaagttttttcaatgccttttcagatgaatcatgttcgcccacttgatcgttaagctgattgatttggtggtttagcttcctgatttcatcctcatgcgcgcttttgatggtttcaatctctccactaaatttccgtttttcagctgctacacgattttttacaatctcatccagctctgcttgggaaaatttcttatcgtctccaccttcagcaaaatgttggatgtcaaacttgcgttgtaaataattcttcatatttcctcctttttaagctctgagtgagccatccctgtctattagttgccggcaggtaggcaagattttttataaagcccaacaaaaaaagcgttcatttagacgcttttataatttctctatccgattctctctctaagaagcgattgttatttagatgctcttgcaaagcttcttcccattgttttacttttccagctgtatattgtttagagggaccttctgcaagtatatcttttgttttccaatcacgaatgccgcgctcgtagtaccgttgcttactttgcgcttcgtattcttcttcatcatatgggataggctcgtctgtttcgtcaccttcgaaatacgaatataaaaaatggtggcaatttggatgaaacaagccatcattttctgcttcttgtaacgttttatattcattgctttcatagttaactgatagcacctctccttgccaaggagcacaacgcggacaacttctcacgtgagctgatacttgaactaattcgtgctcatatcttccaagaacacgtttcatggcattcaaaccaacattaaaaaaagcacctcttgaagccatttccatgtaagctcctggccggtactttcttccagactgatctataacatttcttatgccatcacctaaaacattaataagtgatgttgcgatagcatattttaaaactccattgctatcttttgtttccttaaccacttgtttgtacttggagggcgcgattttttgccaataattagccatatcttccgaaatttggataagtgcatcactttcagataaatagtcgtcattttgtatatcaacctctttcttagtttgatatctggcttccatttcgtcctcgtattcattcacgcaatcaagataaacacgatacgttagtttatctattttatttctcgtttcgtctttgaaaagacttatatgtgctttcaattctcttttaaaccttatcaaacgcgactgctgaatgaatttccattttgttggattcttagcgccatacataacatgcttctttatcagcaaaagtaagtctatttcggcattattaaagtggtttcgtaagatagatgcttctttttcgaaatccactggtgcatggtgatgactcatctaatcacccgcctttcgtttccattcccccaattgcttctgggtccggaaactctccaatcgagttttctaaatagatacgttttacttccgcttgaacctcttcatcttcccattttgggtggattaatttcaccttttcttctacactcatcgctaatgcgctgttcatattgtttaaagtactagaaagttcattcaaattaaccgtcattgggtccggaaactcaattattaccctggtttcatcacgcattattgctttttctttatttttagcaccgctagttaataaatatagatagtcccacaacatttgctcataaacattttgaataaggcgttttttcttctcaattttacgcactgtcgcgtcctgcaaactccaaatttcggtcgctttcacttctcggtttcctaaattgaaagtagcgggattgtaaccagatttcgaaacagctttctgagcaaaatattccattgtttcgcgataactaccatctcggaagtctccttgcatgaattgaatcatgtcatttaacttcgcaccagcatccaacgtccctttaaactgcataaagtagtcttcatctacattcatggaccattcttctttatctgtgctcttattaacttttttcctaaacattcgttcgctagctgctatttttgtttttgttttctctccttcacgcatataaacagtgaaaaagtaatctacggcaaataaataattggtacattgtgataagtccgattccccaagattaagatgtgggtatctagtattgcttgggctattatttattaaataagcgcccaagctctttaaaccaattgatacagaatgattcaattgaatatcatttgtgtacagatagcttgtaatctgttctggtagtctttccgcactgataggagtagttttatcgccatcgattttaataacagaatatgttacaaaacctccagataattttttcccttccttgtcccattgttttatttctctgctttcaactaaataataaatatctgctttattacttgtgggtatttcctcaaagaaattaaaacgaaatggctcattgtttttaaaatctatccaaaattggctagagctatgaacgctaatagatggtcgcccatttaaaatgttaatctttacagcggatactccgctcccccctgctaattcaacaattttcacactcttactatcaaaattatcaatccgtaatgcttctttcagttgctttgttaagttttcatccttactgccattaccccctgttacatcaatacttaaaggctttccagatatatactcagccgcaacaacaactatctcattgcctgttccggaattcattaacttatcgtgtactgttggcacatatccttgagcccacaacgaagttaaataggagtctttgctccattctttttgattatctggaatgagcggcagatattttggtattaactccggttcgctgccgttaggttttccatttagccaacctttaataaagcgtgtcattacactccaaacacccatttaatcactcctttctatatatcttcataattcctataaaagtagtttgtagcgtatctacttgtatccatcgcgtgattattcttgtcaactggttttccgctgttctcgtcgcgtacatacataccaatttcttgtagccaactgtaatggtcatattgatcgttaggttgttcaacaagcaaataacgcctttcgcttaatagcgactgcatccgctcaattccaacctctataccttgcgctttacctgtcacatcatgagcattgttgtctgctcctgctgtatcaacaccaaccttttccagttcttcacgtagccagcgacaggcagggtcaataaaaacaggctcatttactggtacttcatactctttcatacaccattgaataaattgttttatctcaatggcataagtagagccggctttcacttgccctgtgtcacgcccgctgtgatagtaggtggcaacttgattgaggttgtaagtgtatccgccttccgcttcgtgttctgtgattacatagcactcgcaaacagtcgcatcttgttgacctccatcaccaaaaaagaccatttcgattggatggccttgcatttttttaatttgattcgcttcaacgtcaaacgtttcataaatgatgcctgctggtaaaactcttttcccataccaatcacgttgcaacaaatacgccgaatgtttgacctcgttatatatttcttgcttgcgttcgtctgaaagagccggattgtctttagcggtccaatgcctccatttgtaacgcccagacttctcatactgcgaaaagatttctaacactggatgattgggtgccggtggatttaattctgctaaatgaaatctattctttgctgcaaaagttcgtcgaaagcattcttcgataaaatctttatggagtaaattaatttctaaaaatgtaacggttcccagtgacataccagtaatagcgccaacactattgatcttcccgccgcctttatagtaaattttctttggcccattcggagaatgtataagaagatgatcgccatgttcatcatgtttcatttctgcaagattaccaaatatgtgcatcaatccaaagccgtcaccgtccataaacagtcgaaaagcttgttcttgattgtaagcagtgactaaatgattctggtcttctgaaatagagtatatataagccattttaaagatgtctgctgtggtttttcctgatcgaggagttccctcgttgacttcaagagttacattttgaaaagggaatgtaatagtatcctgttgctttggcgtaaatactagctcatcaattttactcaaggtctccgtttcctcctttggcaacatctaatagtttattaagcaatgtagtatctttttcagcgcctttaataagagctgtgcgggcctgtatattatctgttgatgcaataatttgattaagcttagccttgcgttcatcatgctcatcagcaatcgcaataaattgcttaatcaacccacttagtgtagacatcgcacgactttgtgcatttaaaaaattcgcctgtttgtcccaagcgaattgatactcatatttatcagaaccactttccccgaatccaacttgtgtttgaactctcgtttcatcctcggtgttttctacccacataattttctgtgctcggataatagcggcgtattgaatttgtatctgtccccaaattaaatcagttggttcttgttgatccatcatactaataatttctattgtgtcatccggaagatatttagagtacaatccatgtgtacgtgcgttttgattacctttaggagcggcgccgcctttattgttcttagcattcccgttccctttcattgaatagtaacgctccttttgattcgtaacgttactattggcgttatcactccagttatcttccgatttccatttcctaatctgtgatggtttacaatttaacttactggcaatttccacaagtggcattgtcttatctgaatcaagccacattttctttgctatgtctctatttggatttcttgctctagccactcacttccaccacctcacattctgtgtttgttttgctaattaattattatctttaattgctcctacaatgatgcttagagcttctaaataatcactcttagcttgttcaaaagtcttaccatttagcatagctaaccgctctattttcatgtaatgaatctgggctaatgcaaaactttgttcttgttctgaaccagcaatatttattttgaattccggctcttttccttttacctcagttatccccgcttttataatgtctctcatgtaattaactccttcttcgttttttataatatactcggcaaggatttgcaccttgcaggaagtcaacagtttactagcgtagtttctatttacacacacgccagatgctagagtctataacgagtgtgcatgacttcttgtagaacattactgatgcggttacctatttcgccacgagtattttttataaatgagaagtggagcgcagactcaatatatgatttatttttgtaatcatcttcacttctcatatataggtggcaggtgtgcggcaaaaattactaaattgccatgcaaaataagctaccgtcaatttgattctgtattttttcttccccacgatgtagataagatcgtacagaacgaacgcttatctccatctcatcgctaatttgtgaatacgataaatttttttcatgttttaacaaaaatactttcttttcttgtgttgacatcgtggacattgcgtcttccatccgaattttgtcccattccgaaatctttggctcattatcttcaaagtcatatgcgataccatgctcatatacgaaccattgacgcatagtttcaatatctgtaacacatacttccctttgaagtccagaacgtctgtgaatagctctccgtggcgctggttcatgtcctaattccatccactcaatcgaatactctaagctgcggataatactgtttaatttcgacataatcgccttttccggaacttcttgaatagttcttttttgccccgctgcttgcggaggacgtttttttgcgtcaattttggtttgcaaattagcttttacttcgttcacttcctgtaaagctcctctgtactcattaattaattcttgcattctcgtcactctccccaatgattaataaaaaaaggacgtcacgacagatttaactgttcatgacgtccttcgattttttcgatcagactatttgttatttagttttattgtttccttgttctcggcagtggtaggtttgccgtggctccatgcgatggtagtttgtccgaagccattttttggcggtttaatatatgtttcttctcctttagagattatataaacgccatcttcttttttcataaagtcgcccccgtccaacaatttaaaacaaattccccttttagtcattccagaattctttacttttgtgataaatccctgtgttaaatctgcgatgatattcttctttgtttctttgtgtgaaattaaatattgtcgatctagctattttaaaataatccgcaatcgcgtctcccggtacgcctgcgtgtcttatttcaacgaattcagctactgtaatgtcgttccattgtttgttcccaataaacctttttatcgttttattccaaaagtttttcttcttttcctctgtgttcctgttcatcaattgatttagctcacgttgtagctcttttagctcgttatgaggtaaatcattatttgtaatataactaataatctcccgctgcctagccttgttctctgttacttccattaccgccatctctcacacctccatgaattgtttgccttttagtttcaaacatttaattgattgcatataccgcatttcgaaaagtttttgcttgattcgaaactcttttgttaacatgcctttgatgtcgattaattcctcatgtccatcgctgtatcgaacgagaaaatcagctttatatttaatcgctcgatacagttttccgttttttctaaacgagtcttgtaatgtgaattctggttgtaaatcgaaactggttacttcaccagtcaattttaatagtttcaattgctgataatacgctgcttctgctttgctatcgaactttatattgtcaataactactttcttcgcattgtatttacttcgcgtattcgttcgcctcgttaatgacgaacgcggtatactttgcctcaatttcttcgtcccccatttgttcgatttcattaattttgtagctagttacctctgcaatcgcgttagccatctgcctaatgctcattgatctatttcgcaactttttaattgcttttatcgctggcattttcgctccccctctcattttttaaaatggcaagtcgtccggattgatatcaaccggcgcaccttcattcgcaaatgaatcaccattctggctcctatcagctcgatatgagcttgttttattgtcatttgaataattagtctcgctctgattattattcgatgtagagcctcctgcgccgttttgcttagactctaaaaattgaactgattcagccactatttccgtcacataaacacgcttaccatcgttaccttcgtaattacgagtttgtacgcgtccatcaacgcctgccaagcttcctttttttaagaaattagcgacgttttctgctggtttacgccaaacaacacattgaataaaatcagcttcttgttctccttgcccgtttttaaaaggtcgattgacagcaagtgtaaaagtcgcaactgctacacccgctggcgtatatcttagctctggatctttagttaaacgtcctacgagcacgacacgattcatcattcacttttcctccttcaaactattaaagtctgccgttctgagaatatcccagagtatttccatctcatttactccataactaattcaaaccgactttctaactcccagttatactttttagagctatcaggaattttttcccgtaagtcaacacgccgtaaattatacatagaattttatatggattggtgcttgtttcattcctgtcatttttgttctactccctgacatttcggacattttacatattgttcttttttcagtgaattggcatcgtatcttgcgtaaccaacgaacatttttacaattccaattccgtgacataactcgcacgtgtttatatttgcgagttctatttttggattgattttgaatgttattctaccaactctaaatctcttacaaagtaacaaaccgccgaatgcgtaaaagctactaatgctgtaactggaatgttcgcaacatcatatatttctttaactgttccgtactcaccttttttaacaaactttgttttgtatgttgtttttactttgcttcctacttgtatgttcattgtttcgccacctctttttccacatctcttttacgcaacaatcgttcatatttacgtcttgctttcttatctttgccatggcatttttcatatttcccgtcgtatgtgaacagcaaatcaccatatactcgactgctctttcttcggaaataagaattgagtgtcattttgtctcctccaaatcttcaacaggcactctaaatgcccaataatttatgttcatatttttaatttctttctctgtgaattttactctgaaattttgtgattgctccttgttagaaacatgttttttttcggttctttcgtcaaaattcagatagtccgtacaatccacactcgccattatctttttctaaaacagcatatacgcccgattcaccagctattgtttcttggatagttacaaattcgtgaaagtatgctatttcgtttgtttctttataacgatatgatgttctgatgtctatttcttcttcgtagtactcttctctttttaaaaggattacttctctcatgctatcgtccctccaattcaaattcagcaaagatataaactctatcacgatttgcctcaggataatgtactacttgaaactgcacggaaactggtcttttattatttctgatgatgtattcattcaacaattccaacgcttccttatcatcatccacaaaagatttgaaataagtagaaacatcaaatgatctcattcttcttcaccctccacttcaccagccgcttatataaacgttacgttcattttcgatacagcctacttcttctatttccgagtgattccatccgatggttagcaaaatatctgcatttgctggaagttcttttagtttctctattaactcggctactgtcatcacgcctcaccctccacttcaaattcagcaatgagttctactctttctcctacttttaaattcatgcttgttcctccttgatttttttagagttaatataatgcgaatatgtcgcatctgcttcttttcgccaaccgttcatctcgttttttgattcccttctataattgattctgtgatttcttatatagtttttaattaaacaataaggcaaattcatttctgctgaaatctctttgattgtgtacccttgatttccaagatgacgaatcattttgtcatcttttttagacatgtgtttgtttgtcagtcctaacagtacctttcttgccgctacagaggcttttgttcttcttaatcgttcagctaattggtcattcgacataataatataattattttttagtatctcatcttcttttttggtccacggacgcctaataaaagaaactgaagaatctctttttcttaacttcgctagtctgtttataactgcatcttttgtacgtcctaaaaattcggcagctttgctaatattgtcgtcgtttcataaacaaaatactctaaataaatatcctcatcttctgtccacaccgagtttttactgattccaagtcgcaccgctttgttttttattgaatgataagagcgatttaaaaaattagctattatttcagtgtctacgtattcgtaattattctgtaaaactctgatttcctcatccgtccaattttttcgcatctaatcacctcactaagcaatctgcatcaaaacagataacattttttgatcatctttcttttgtaattcgtctaacacatgcgcataagtttcttgtgtgacacctacgtcagcatgtcctaatcgtgctgaaatcgtatgaatcgaaacaccttctgccaacaatacacttgcatgcgtatgccgtaatgcgtgaaagctaatctgtgtaatgcctgtttcattgcatttaacagctaaaaaattgttgatggttgaattgaattgacgtttgtaagtgccgtctccaaatttttcaacgaaaatgggttcgtcttctggaaaatcttttataagcggtttgaactgtccgacaatctgccaatcaattttaatggtccttactgacgacaatgttttcgttttagcaaatcccttgttatatttgtaatcccatgttttgttgatagatatagtctgtgctgtccaatcaaaatctgctggagtgatagctaaagcttctgcatagcgcattccggtcttagctacgagcattacgaaccatccaaatccaatttggctcatatcgagtgattgtaataacttcgataactcctctttctgtaagaatttccgttttttcgctcgtgtcggttctgcgcctttgataaccactcgatatgttgggtctttatctattaatccatcgtgaaacaaatctttaatgcacgctttcacatgatgatgaaagtcttttacggtctgtttctcatgtgtttcagcataaacattaataattcgttgatattctcgtctgtcaaaatctgagataaaaagttttgggcataaatctcgaagttgttttgctgcattatagtatttagctagtgttatttttgcaattgctcccactttatacacttcgacccactcttcaaagtagtcacaaaatagtatttctttttgcttcttagtcatgttctccctcctaaaaaagtttcaattgtgatgcttcttcgtcctctatttctaactcatttaaatatctatcagctactgaaagagggctttctatatgttcgataactggttctagccatttatgaatattaaattccttctctactgtttcactgtggatcatgatgttgaaagaactaaaatttaataaatcgtctttatcgttttgaatgaaatacacttgtttcgcttctcttgttagcgcatcaccgtgaataactgttgcgttcattcctctaattaataaattgaaaagaaggaaaggtaacgcacgatctgataattcttcacattgatacaaatacatagatggtagataatcaaacggcgaatattttaggcaatcttcataccatttgcaaatcgttaaactacccgtaccagcggcaacatctagtcttgttcctccctgactgtctgttaatcctcttactaattgcgatgcaacactacttaattcagttggtgtaaaatcttgtgcatatttctttttattcgcatgctcttcttcaaaatagacgtgaaaccaatctttttctaaatgcgtatcatgttgtaaaaactgtttaaatatctcttctcgtttttctctatcaaacaaaattttcattagcgcatcagatgcttgatatgattcttttattccgattaaattattaattgtttccgttgttaatgtcacgcttgcacctccttcataactcataaattcttaatctcttctagcttttcaatcagttgttcatgtgttaaatttctaagaacatcgtttgttacagatgtgctgtattccagctcccaatttttgtcatttataaattgaataaccgcaagttctacgccaggacccatatattccttgattacactagcgccatagccatttttaaatcgataaatagtttgttcactttcaaactgattctttttcttatgttctaaaatgtattctttatactcatttgcgattgttttcacgcctgcacctcgctcctagccgctaatttcgctttaatttcagcgactttcttttctaagtcttcgcttgattctgttgttgaagtttcttgtttcgtttgtttctgagccttgtcgaaccaatctggcaatatttcttgtttaactggtttgttgtatttgttgtaagtgggcttgttatatttttgctctaactctatctgtcgttgtttttccgctgcatcaacatcagctattgttttaaatcctctgctttcccagtttttaagaatcttattaacgtaagcgtaatttcgtttgttagctccttgctctgatgtaacttccaaagccttcatgacaatttctcgattacctgcaaaatcatctacccaagcaagcagtttttctagttcaactggaagcatcattccgaatccgttttgttcccaaaaatccttgaaatttaaatcgctgttgttgttaatatctttctttaattctttaattcttaagttctttaattcttgtttatgtccctttcgttgtaccatttgatgttctttcgttgtatcttccgttgtgtcaatcgttgtccctttcgttgttcttatttcctcagaaatgccttgaaagtcgttgtaattactgatttcgtacgttgtccctttttgtctacttttagttatcgttatcatgtcattttttttcaatagttctaagaactttcgaacctgttttctgtccgcattccatcgatttgaaagccataattcagatgtatgtttttgtcctctttttatcgttattaactctccgtttatcaaaatatccctatcttggtgattggctaaaaggagcaaatccaaccaccattttaaatatttttcattctcccaaatccaatgttcttgtagagaacgataaatttttatccaaccactagacatgctccttttctcctttcatttagatcattgacccttgaacctccgaaccagcttctaacgtgtcagacggagttatgggcgcatctatgatatctggtattgattcatcttctgtaacgtcttttcgttctctaggctctgcttcgtcctctgtaaccgctgtttgcatatcaatggataaaatcccccacttgcttaacatgtttctaagaacagtttttttagccattgcatcgtagtcttttttccatccaaaatccgatttactaaatttctgtttatgcgcttctatttctttacgagtccaatagaccgttttttcaaagccattaattaactggaaatagccacagtagccaacaactttttcacttgtattgttgtctaaatctagttcgatttcttcagtaagtcggttccatttcagtagctcaccttcgcgcacttcgataacattaatgcttttatattgtcctgtgcgtagtgctaactggatgtatcctttataaccaagctgaaactgtgctctgcctttgtaaggaacaatccacgcataacctaaatttttgtcgataggtaaatctagtgttgcagcaaccatggcggaagtaacaactgtcatcgggtcagttttttgtaaatagtcgtcgccattataaagatttaaaagggaagttaaaaattgaggcgcttttttatctagtaccttttcgaatttcttgcgcattgtcggtgcttctagcaaaccttttaagtctaatgattgtgcgcttgctacttgccctccattttgtttatttgctaattgattttttaattcatcgttagttgccattatttattctccttcactgcaaattttctataactagtttctttacgtaattttttgtaaatgtctggatgttcttcttttaaacgtttagtgtctactcttgaagtaataacaggcttccaagtaatcgtaaattcgtctgcgatggctgtttcagcttcttttaaatcattcttgatattattatcaatttctttctttcgtgtctctaaaagctttatatcgcgttctaaatttgctctttcagccaaaaattcgttgtatttttttgataaaataacttgtttagcttctgacttagcaaaacgatcttttaaatatttttctgcggcacttgaaccgtctagcgccggcgctacatgtccttttacgttcgtttcccaaaaatctaactcaaaagcaattatttgattgattaactcgtcatcgcgttcaatttctttccaaataaatttatttcctccaattagaacagctacataggctttgcttttacctgtgaccgctaaatagtgttgtatttgcactagataagtcgctggtacttcgtcagcttcccattcctttgctaagtatgctgatgctgttttacattccaaaatagcgtcttcaccaaccacaaacctatcaacgtttgccaacataaaatcatgctctggatgttgatacatcatgttgctacgtcttactttcttgccagttcgcttttcgaattcttttgcgacaacttcttccatttgattgccccagtatgcggcttctcccgctgattcatctggtaaaacttggtctgtcttatctagccacagctcaaatgctgttttgtactgatttaaccccatgatgattcccgcatcgcttccgccaatgcctaggcgccgagtcagcaaccattgcgttctatccatgtctttcacgcttgctaaaatgttcattgtcttttcttttgcaatagccatatatgttacctccattgattttttaatggacctgaggtataattttgttaaggtaatatctcaaatctcggacctgcgctgctacgcgggtcttttttaatgcctaaaaccatcgtcccaaagatcatcaaccacaagtggattctcaaccatgtttatcacttcctctcagccaaaaacctgcgattacagacataaacgacacgaaaatcattaccataaatacatccattatcttgtgacctcctcataaccctttagttttaactcttcgatatagtccgtcattttctcgcatcctgtttcaattaaagctatcttctgtctgaaagccggattagctatcattttcgttctgtcgtctatgaaaatctcgctattcccgaaaatcgtttgcttacgaaaaattcgctctgccattgttgtagcctcctaaattaaaattagaattaaaatcaaattacataagtttattaacgctaatgccgccgctactattactaagatgctgaacaaaagttggttcttcatattgcgcgcctcgggataataatttcgcgtaaatgtccatttacaaactctttagtgacttcatattttttattaaatgcttcagctctttttttgcgctcagattcatcaatctttttaaatcgctcttttacaatattgtttatttctgtgaaattaatatccttcgactcgtagccttcataactagccgatactaaaacttcgctcatttcccgcaactccttaccagtccagatttttgataatattgatcacgtttgtttaaaacttgttgtaaatctatgttgaaagttcttgcaatacttgcgttcagagttaaagcagatgcaactacatctgttatttctgaaatagcttgtttagctgcttctcgttgtatcatgtcgccttttcttaaattgaacgtcatcgtctctaagccatttttcagcgtgtttatcgcttcttcaacttctagttcaaagcggttggttaaagaagcgtggtggttgtctaagccgtcaaataaaggtggtatcattccatttgaaaattcatgtgcgaataaatatgtgctttcaggttcgttgtagctatcaattaaatgttctgcttgttcaagtgaaactgtacgctttccttttaactgattacttattaatgctggcgttacataactatcaatcgctagctctttttgcgtgcgagtttctgctaaaacttgcatcgcggttggtgctgatattgatttttgaaacataatatctcaatccttttttgttatttttttagcgacaaattaacaacttatcgttatatactattgttagtcgctccccgtgactaagttgtctgtttgagcgtcgttgtggtaggcggcgctcaatttgctactaatgattgttctaaaaacttatttacaaagtacagttgacctttaccagtcacttttgctgtgatcgctgtatgtgccccacttgatctcataattgcagtttctttaatcttgaaaagtccaagctccatgcttttctgcgtcggacgattgtagtccgttcctcttcttgaaatgagatagccgttctggcgtaaccattcaaacaagcgcttttccccaatgtctacaccgttttgttggatcaacttagcaagatcacggattaaaatggttccctctgtatcgcttacagcgtctgcaaataatactttcgggcgttgcgcttctattttttgctcagcctctaatcgcttggacttttcttctttaaggttcgttgccagtctgattaaaaagtctggatcagtaattgccttctcgattgtgtcatctgtcatgtatgcgccgtgtttacgaatggacggtaagacttcatccattaaccaattttcaaatttttctgcacttggtaaatctgatcttagaactaatctataaacatcagattcgcttaataccagtgttcttcgtggtctacctaacgaatcgttcaccaatgattcagcaggttttttacaatgatccctcatagctttttgaggattggagtaacctaatattgatgcaacatcaatgcctacaaagaacggttcttcatcaagaattacagttcttactttgcttccttcaaaattgaagagttttaaatttgtcattttgttctcctttctgttcgccctttcacagtgatatagtttttgtgaagggaggtggaatatatgaaaaatcgtatgaatataatgtttaaaggcgtctctgacgaccagcctatggctctaatgggtgttgaaagtattacttctttcccggataacaaaagttttgatttaaatgatttttacttagaagctgataagacctacaaaatcacttatacgggttcaagtgagttgagaaatgactcatcaaaagtttttctgatgaagtcaaatgatgtcctgtatatcaagtttgctatttaataactgcttttaatgattccgctaatgccaataccatggcggaatcccctttatgaagagcgtctttaaaatttgattcaaaattttctaaaaccactaatttacattcaaggcgtttttgtttgattttttccatcgtgtcaaagtattccattattgagttcctcctcgtgtatgttgagatttctgatactctttcgaataatcttttaaaaatgcttctacttctaatccttcaacctcaattaaatctggatcgcattcaatcactagttttggctttcggtccgctgtcatatctaaattgattgatcgcaccccacgccctagcttccaatctcctagctgaatggcattatatgcagacccatcttctctttgactagttttgattgacaaagttaactcttcgttactcatgttctagcctcctattttcttttgcccaaatcgccgttagttttttccgataatctattaactaatgaattaatttctgaataaagttccggcaaaatacttaaatcactataattttctccagttatactcaattcaatggtaagtacagactcttttctatttctcttggttaggaaagagtttgtaaatgcaattttcttcattttctagcctcctattttcgcaaaatctttcgtttccgttttagcaacgtttttggtaaaaaaattcgatatattgcattttagtatctttgccaaaagaggcaacatttctgctttaattttatactctcctgtttcatattttaaatatgtggatgcattcttaaatcctaactttatagccatatctttttgagaaaatccaagagattctcttttttctctgatatattttaaatcaatttcaacttgcataaaatcacctccgtttctgtttcagcaatctttataaacttagtatacgttgctaaaatagaaatgtcaagttctattttagcaatttttgtatttctgttttagcaatgtgttatcttaatattattaaaagtaaaaggtggtaaatatgaaagtcaatgaaatgattatcaatcttagggaaaagagaaatatctctcaacgcgaattggctaatcgtatcgggattaataaaagcgtaatgaacagaatagaatctggcgaaagagatattagagctcacgagctagaagcaattgctaactatttcgatgtttctgcagattacttattaggacgttcaaaacaaaacgatattgctgatacaatcgcggctcatatagatcccaacgcaacagaagaggaaatggaggaaattctcgcttatatagaagaaaaaagaaaagaatatgctaatgaagaggaaatagatatcacggacatcgctgcaaagaaagatgctgacgtggcaaagtttgtagaagagaatccggacttcaaagcagttgctgcacgtgtcatggatgacgaagaggctgttaaagcggtcaaaacatttattgaatattatgagcaacaaaaaaagaagtaatgtgtaatttatttactactaaacctcttgacttgtaacttaattacttgttattgaagttaattattaacattgtgtgaaaacgtgatatattccacgaaaattatgtataatataggtgcaacgttgcaataaaaaacaacggggtataaatacatgaaaaaactagatgaactgaacatgcaacatgatgtagtgatactagaacacgaatttacttcttgttcattcacttttagaaaagaaattttcatagttattgatagtagattaagtcaaagcgataaattggaagacgtcgcaagacttttgaataaaatataactatgtaaccagtttgcggccgcagattggtacatataaaaagggagatggaataatgtattgtccgaattgcggtcatgcattagataacagggaaactgaatgtcctggctgtttagctccaataacttatcaaacaagcaacaacgaaaaagcgcaaaaagtcggcgcttttatggaagaatctggtaaattaatgtcaggatgtggttgtttaatgacattgttgataactattcctgtcatagtaattttaataattatgtttttataaaaaggagataacgggatgagtaagtatagttacttgttaaaaaaatggtggttttgggctcttgctatattatttttagttattttattttacagcttttgggtaataatatacttggtggcactagcttccttaatattcgggatagtaaaagttgttaaaaatgaaaacagacgaaaatacacaataatattgactatatccgctatatttctaatcaccttttcactaataagagttgtacagatgtataactatgttattaataatccagaagaaactacagcaaatgagcaaaaaaagaatactgtccaagatgagcaaacggaaaaacccgctcaagaagacgctgccgaggacgagcaagcagaagaacctgctcaagatgatgtatctacaccctctaaaattacatcagatagtatagagttatttaatgagtcaattgatcgcttgatttctgattcgagcggggtactaataaaagtggttccatttgaaaatgaatatgatatgttaattgcgtacgtatctcaagatttaaaatatcaagatgaagcaactaaacaaaaaaatgttgattatttaggaagcgaaatacagcaacgtgctctaggtacgctctttggtggagataacaatctaagaccaatggttgagttcagatataaagatgagacaaagatggctggaagtagtgcttttgataaaactaatatgaagctcaaaggaaaataaaatataaagggagaatgaaaatgaaaaaagggattgttttaggattaattttattacttagttttgttttgtatggatgcggagaacctgaactagatattagcaaggatcccggaaaaggatattatctacaatacaaaggaaccacttctgatgaggcaaagataactttaaaagatgaaagcggagaaacaaaaaaacttgatgtagagaaaaatagttttactgctctagtgcctagactaacttctaaggcaatctacactgtaatagctaaagataaagataaagagacagaaactaagttagtagttcctaaacaaaaaaaacttgtttcttatgaagatttaaaaggacagtttaattatatttatgaaactgaagacaagttatctatttctcttcctgattctataaacagtaatgaagaaataacaccgggatttaaaattatgtctgatggtaataacgtaatgtcaattttattaacatacagttctgaggataatattggtatcactgattataacgattttacctattcaattgctgctattatgatgtcgttagattcggaaaatagtttagataaagttcttgatgctttaaataacagtatggataatcaaaaggaaaataaagtcacagttaatgatattacttatcaattttctacaattaacgctggaacaacaaatataacaactttagagattttcccaaactaaagagagcctccgggcttttcttttttaccgaaaaaaagaacgtatgtgcgaaaggagaatgagaatgaaagcggctatctatataagagtatctacacaagaacaagtagaaaattattcaatacaagcacagactgaaaagctaacggctttatgtcgttctaaagattgggatgtgtacgatacgtttattgacggtggatatagcggttcaaacatgaatcgtccggcgctaaatgaaatgctaagtaaattacatgaaatagatgcagtagtcgtttatcgactagacagactctcccgctcgcaaaaagatactattacactaattgaagagtatttcttaaaaaataatgtagagtttgttagcttatcggaaacgttagatacttcaagcccgttcggtcgtgcaatgattggtatattatcagtattcgcacagctagagcgcgaaacaatccgagatcgaatggtaatgggtaaaattaagcgtattgaagcaggtcttccgttaacgactgcgaaaggtagaacattcggctatgatgttatagatacaaaattatacattaatgaagaagaagcaaaacagctacgattgatttatgatattttcgaagaagaacaaagtattacttttttacagaaaagactaaaaaaattaggctttaaagttagaacatataatcgctataacaactggctaactaatgatttgtattgtggttatgtttcatataaagataaagttcatgtaaaaggtattcacgagcctattatcagtgaagagcaattctatagagttcaagaaatattttctcgcatgggtaaaaatccaaatatgaataaagaatcagcttcattgttaaataatttggtagtatgcagtaaatgcgggttgggctttgtccatcggagaaaggacactgtatctcgcggaaagaaatatcattataggtattatagttgcaagacctataaacatactcatgaactcgaaaaatgcggaaacaaaatttggagagccgacaaactcgaagaattaatcattgatcgcgtaaataattatagtttcgcttctaggaatatagataaagaagacgaattagatagtttaaacgaaaaacttaaaatagaacatgcaaaaaagaagcggctgtttgatttatatataaatgggtcgtatgaagtttcagaacttgattctatgatgaacgatattgatgcgcaaattaattactatgaagctcaaatagaagcaaacgaggaattgaagaagaataaaaagatacaagaaaatttagcagatttagcaacagttgattttaactctttagagttcagagaaaagcaactttatttaaaatcactaattaataaaatttatatcgacggtgaacaagttactattgaatggctctagtagcttgtttatttagattgtttagtatctcgttatctctcgttggacgtaaagagggaacaaagcatctaataggtgtcactcataagccgcctattattattgaccctgttacttctacctatgtattccctactgtcgcgccaagttcaacagattgtatttggatttttccacagcatattaaggattatcatgcaattggatataaccatacgttgataaagttttctaatttacagacttttgaaattgatatgtcgttagcctcttttaataaccaaattgctagaacctccatgctacatatgaagttctcacaaaaaatgcgaacaatggagagcaatttcccttctatgaatatgttttttcctccagctacactcgccgctgaatccaggcgttattataacactatgctctctgaaaaagacgattcaaaagacccagaacaataaaattaaaaaccagatatacacattgtatatctggtttccttcttaaattatttcttattctcaatcgcatctgcaattcgttttaacattaataattcttcttctgaatatgtataaggcaattccagataccatttctcaagctctgggtttccaattaaaggaaaagcatttactgaatttttttcccgtaaacccgctacatcatctaataaaaaatctgttgtagtcccaagaatttctgctaatttagccaaaataaagattggcggtcggtggttatcattttcatatttactgatagttgaagctgtagttccaatttttgccgctaattgtttttgagttaatctatttttctttcgtaaatgaattaatttttctccaaattccaatacgcccacctctcttccttttcattatagcaatttttcaggaagaattcgagaaatcacataaaaagaaatcgcctttttaatttcaaaagacgattcctctctattatactgttggttttttgcgtaatactccgattaatgctgcacttattatagttccaatcacgattgcgataaggtagaaccatggttgagatactaagaagataacaaatacgcctccgtgtggtgctaatactttaatatttaaaaacataacaattgccccagttattgcacttcctgcgataaaacttggaatcattcgaagtggatctgctgctgcaaatgggatggcaccttctgtaatgaatgacgcgcctaaaatagagttcgttagccctgcatcacgttcttgtgcagtaaatttgtttctaaaaacaagagttgctacgaatgttgctagcggtggcaccataccagcagccattgtagccgccataatcgcgctaccacctgttgcaacgcttgctgcaagcgttccagttgcaaaaatgtaagccgctttgttaattggtccacctaagtcagcagccatcattgctcctaaaagtaaacctagaataaccgcatttgttccacttagactatttaagaagtcatttaaccatgtatttaatgcactcattggcacgtttaatagtaacatcaatagtccgacaattagtacagatagcaccggataaaatagtactactttaatgccatctaaagtttttggtaattttttcagcataactttaattaactcgactgcataaccagcaagaaaaccacctactaaagcgccaaggaaacccgctccaccgacagatgcaacaccacctgctacaaaaccggctacaagccctggtctatccgatatactgtatgcgatataacccgcgaacactggaagcataaatccgaatgcaacatcaccaatttgttttaataatgctggaatttcgttatatgatcctaattttgcaagttgatcttgtggtacacctagaatttgatcaagcataaatgcgattgcaattgcgatcccgccaccaattacaaatggtaacatatgagaaacgccgctcattaaatgtttataaatttgttgaccaatggaaaggccatctgtactttctgttgcttcgctacccgattctgctttataaacaggtgcattcccagagatagcttctttaataagctcttctggtttatgaattcctgctgcaactggttttgcaattaaatgttttccatcaaaacgaggcatatcaacttgtacatcagctgcgatgataactccatcagcctcagcaatttctttatcagttaaacgattttccacacctctagaaccatttgtttctactttaattcgaacgcctaatttgtttgctgtttcttgtaacttttctgcagccatataggtatgtgcaataccagttggacaagcagtaaccgcgacaacagttttgccagtatcattagaagatgtaggagcaacaactgtttcttctgcatcaccttgctcgttgttgaagagagtgattacatcgtctggtgtttttgcatcttttaacgattgaacaaatgctggatgaactaataatcttgaaagtgctgctaaagtttctaagtgagttgcatttgcaccatctggagccgcaatcataaagaacaaatgagcaggttgaccatctaaggagttataatctaatcctttttcacttttcgcaaagactacagttggttcattaactgcttttgtttttgcatgtggcattgcaattccttcgccaactccagtagagctttgggcttcacggttcattatcgcttctttaaaaagtacctcgtcattaattttcccgttgcttttaagtgaagcaatcatttcatcaatggcagcttcttttgttgtagcttgtaatgacataatcataacgtctttgctgagtaagtctgtaattctcattttagtgcctccctgttattttagttatcttcacttgcggtaataattcattaattaaatctttttctgctagatctgttgaaaatgctgttgcgcccccagttgcaacgcctgcagcaaatgatttaactggatccttagttttatcgaaagttccaacgaatccagcaatcattgaatcaccagctccaactgaatttttaagttctccttttaaggcatcagcgaaataaacatcttctcctgtaaaaagtagagctccgtcgccagccatggatacgattacatgttgtgcgcctaattctaggcatttctttccataaggaatgagatcttctacactatctaacttaacaccaaatagttctgccagttcgtggtgatttggtttaataaggattggacgatttggtaatgcatctagtagttcttgtccagtcgtatcaatcatgaagttagcttgtttttctttacagatttggattattttatcgtagaaatcatttcctagtgaaggtggtacacttccagatagaataacgatgtcaccagcagttaccttatccatcacttctaaaaattctttgatttctttttcagagattgctgggcctaaaccattaatttctgtttcttctccgtgttttagtttgatattaatacgagtatcgtcttttactattacaaagccagtttgtatgccttcatttttaagccagtctttgataaatccacctgtaaatccgcctaaaaaccctgtagcaaggctcggtacgttcaattgatttaaaactctgctgacattgatacctttgccaccaggtaatttataatcttgtttcatgcgattaagttcgccaagttttagttggtcgatttgcacaatataatcaattgaagggtttaaagtaattgtataaatcatttttctacctcgattattttagttttttggataaaggattttcttacttctgaaggaatatagtctgttacaatagtagcttcatctattgaaaacatttttgaaaaattaacttcattgaatttcgtatggtctgctacaacaaaaacgcgatcagcacgctctttggcagcacgttttacaaatgcttcttccatatctggtgtcgtatagccatgctccggatgcatagcgttagttccaataaaagctttgtcaaaatgataatttttaatattatccaaggcaactgcgccaataattgcttttgtatgcactttcattttgccacctaaaagataagcatcaatattttgacgaactagttcttcaatatgggttagtccatttgtaactacagtaatatttcgatttgctaagtgagtaattaattccagtgtcgtggagcctgcatctaaatagatacaatcattttcttccactaaactagcgcaatatgctgcgatttcttttttactttgaatgtttttgaatgatttctcattcatgcttggttcttggttatgagaaataacaagttttgcaccaccgtgtacacgttcgattaatccttgttcctctaattcgattaaatcacgacgaatagttgactccgaggtatctagcccttcaactaattcttgtaatttaataacaccaagcttttcaatactctccataataagttgttttcgctctgcatttaacattcttactcctccatccaaagttagtttatcatctttatctttcaaaatcaaccgttttcatccaaaaacattcatttataatcaaattcattcatattatatcatgagaaccgccgaaaaccttcaaaatagttcagatagttgttttcttatacactttttatttttagcagtatacttaattagaagcaatgttctatagaggaggaataaaaatgagtactgaaataacgtttgatcaattagaaagtttttccaaaaaatggcgtgaaaatcctgataagttggttttccaagctagcattatgaaaaatgggattaaagcagcaacagaaaatcctgtatcaaaagcaacagtacaaccggttttttctcatgaggttcatacagataaagtttccaaccaacagcaaagtggaagatgttggatgtttgcagcattaaatacgtttcgacataaattaaatgggacacttggtctaaaagattttgagttgtcgcagaactatactaacttttgggataaattagagaaagctaattattttttagagaacattattgaaacagcgaatgaagatgaggatagccgattagtttcatggttacttgatactcctcaacaagatggtggtcagtgggatatgcttgtttcgattattgaaaaatatggggttgtttcgaaatctgctatgcctgaaacttttcaaagtagtaagtctgcggatttaaatcacctattaaatgaaagacttcgcacggatgcagttattttgagaaaagctgttaaagagcagaaagatactgctggattgaaggaagaaatgcttgctgaagtttaccagcttttagttatgactctgggtgaaccgccgaaagtgtttgattttgaatatcgaaataaagacaatgagtttaaacaagatttacaaattacgcctaaagaattttataaacgctatgtagatatggatttgaaggattatatcccgcttatcaatgcgccaactaaagataaaccttttaatcaagcatttacagtcgattatttaggaaatattgtaaatgggacgcctattaagtatttgaatgtggaaatggatgtattaaaaaaagccaccgcagatcaaatcaaagacggtgagactgtttggttcggttgtgatgtaggtcagctttcagaacgaactactggtattatggatacagatattttcttgctaaatcaggcttttggatttaaaacagctatgacgaaagcagaacgcctcgattataaacacagtatgctcactcacgcgatggttctaactggggttaacattgttaataatgaagttaatcgttggaaagtggaaaatagttggggagaaaagattggtaacaatggatattttgttgctagtgatgcttggatggatgagtttacattccaagtggttgtccataaaaaatatttatctaaagaattgattgaagcatttagcaatgagccaattgcgctaaaaccttgggatccaatgggctcgcttgcactttaaattgtaaattctgagatgattttgattccattcatttgaaaaagagctgctgctacgccggtaccatcttttatttttccagagaaggtgccgtcgtaaatagcacagcttccacaagaaggacttttttccttcataattatttgagtaataccgagttctttcattttagtcaaagttaaactcgctccgtttttatattcttctgttacatctattccttgattatccattactttagcgcgacctagccagacgtctttaccatctccacctactatttcagctggatttcttggtatttccaaaccacctgcaacttcaggacaaaaaggaatcgcctctccgttttcaaccatttgttttattttggtaatttctttatctttcccgtcatatctacaggcaattcctgccaaacaagcgcttacggcaatcatttatattcctcctttatttttaaatttattttaacataaaaaagctgccaccacttaaaggcgacagctctattgattattagatattttgataagctacggcgatttgagtaccgattagtgcgttgtgttttactagttcgatatttgcttctaagctcttaccgtctgttagttcttttactttgccaagaaggaatggtgtaacgtcttttccgtggatgtggttttcttctgcttctttaagtgcagtttggataacatcgttaattactttttcatccattgcaaattcttctgggattgggtttgtgattacagcgccaccttcaatttttagatcccattttgctttaagggactcagcgataacttctggagcatctgcacgtaatgttaattctacatcgcttgaacgagtatagaatgctggaagtacgtctgtttggtaaccaattactggaacgccttttgtttctaagtattccattgttaagtttaagtctaagatagattttgctccagcacatactactgctacatttgttttcgctaactcttctaaatcagcagaaacgtccattgttgtttcggcaccgcggtgaactccgccgattccaccagttacaaagataccgatttctgctaattcagcacagatcatcgttgcagctactgttgttgctcctagttgttttgtagcaataaggtagccaatatcacgacgagaaacttttgctacattgctgctttttgcaaatagttctagttcttcatcagaaagaccgattttaattttaccgtcgattaaagcgattgttgcaggtaccgcgccgttatcacggataatttgttctacgtcacgagccatttcaacattttgtgggtaaggcatgccgtgagagatgattgtggattctaaggctacgatagcttttccttctgcttttgcttgttttacttcttcggataatgatagataatttttcatttgaattcctccagatctttttgtagttgggatgttgataaattttggcgaacagtgtattcagattcgagtgttcgcgcagcatttacgctccctgcttttaaaatttcttgtaaagattttccttctaaccatgcataaattaccgcagaacaaaatgcatctcctgctcctgtcacatctacaatgttttcaatgacaatagcgggttcaaagataatgccttctgcgttgtttgctgcaactgcacctttactgccatttgtaacgatgacatttttcacgcctaaatctagccatttttgtgcagctaagcgccagtcttcatcgttttcaatggtcatttctaggtgagtttctgattcgtctcggttgcatattagccaagtcacgtgatccaagcgttctggtaaatgagacattttaggtgaggaaacgggtaccaagactaatgggatggaattaatttcggcaaaactcccaaggtattctaatgtttcttttggacaatttaaatcggcaataatggcgctcgcttgacttagcaagccttcgtttttcgctagtacatctggggttaagtgatcgtatgcatccatgtccgctagtgcaacgagcaaatctccattgttttcgagtacggctgtataagaacctgttgcgatgcttggaaatgcagtgacataatctaagttcatatatgtattactggcatttttgacagcttcccagtcggagtctgttccacaagcagtgagtaatataacttcttttccaaggcgaccaaggttttcaccaacgttcctagcaactccgccagcactttgtgttgagcgcaccggattagatgtagctagctgggccttgtctttaatgtaaaacttccgatcgacgttcgctccacctatacaaacgatttgttttgcttcatttaaaatataggcttttcctaaaatgcgaccttttttaataaggccagaaataaggttcgctactgtcggtcttgataaatcaagtatatcagcaagttcttgttgagaaatgtaaggatttttacggatggaattgaaaattatctcttccttttcgttcattttcgctttattattctccacgatataatgcacctccattccaaacttttgttttaatttcaaacacatgtttattatatatgtaaatgctttcttttgcaatctaaaaaacgaaaatccacttcttttaggaagaaaattttcgtttatcgttatttattttgaaggataagcagctcgttttcagtcagtgggcggtattcaccgagttcaagagaatcatctagttgtaagttccccattgaaattcgttttaaatagctgactgttttcccgcgagcagcgaacattcttttcacttggtggaattttccttcttggatagttacttttatttcgttcggagtgataatttctaaatgagctggtttacaggtgtagccgtcatcgagagtgacgccagcactgaaggcttctacatcctctgctgtaacatcgccatcaattttagcataatatgttttatcaatatgctttttaggtgaaagtaaattgtgagcgagcgtgccatcattagttataataagtaatccttctgtgtctttgtccaaacgaccgaccggaaatggattagtgagagtgtcttcttgctcgagtaaatcaatgacggtttctgacagattatcctcggttgcactcacgacattttggggtttatgaagcataaaatatacgaattcttggtaaatgacaggagttccgtgaacagtaacttgatctttgtctggattcacttgggttttactgtctttttgaatcgttccatttacgacaactgccccggatttaagcagtggtttcacttctttacgactcccgaaacctgtgtgggacaataatttatctaagcgcatggtttagctccttttttcttttattgtaacaaaaaaacgaagatccttaaaggcgctccgttttctttctattatttgatgttgacggcttgtttattttttggtatttcaagacctaggttgcctcttaaggttgtggctggatattcgtttcggtacaatcctcgactttgcaaaagcggaataacttgctcgacaaatgtttcaaaagtacctgggatgtcagacgcgatgataaatccatctgccgcctcattttgaaaccaaatttcgattaaatcagctacttgttcttttgttcctataaaaggtgttttcggggtggctgcttcggtcgctacttggcgcagggttagattgcgctcttttgcttcttttttgattcgatccgtcgtactttgaaaagcatttttaccgatatcgccaaggtcggggaaaggttcatctagttcaaattggcttaaatcataatcatcgaaataacgcgcgagataggtgacggcattttcaatcggaataagattggcaaattcagtgtatttctgctcggcttcttctagagtatccgctacaattgggctaatgcctgggaaaatcctgatctctgctgcatttctgccagctttttcagcacgagttttcacatcttgatagaattgaatagcttcttcaagcgaatctgaatgcgtaaaaatagcttccgcgttttgggctgcaaaatcccgacctgtgctagatgcccccgcttggaaaacgactggttctccttgtttggagcggccgatatttaacggtccttccacttgaaaatactcaccttgatggttcaaacgatgtaatttttctggattaaaaaattcgccggtttctttattataggtaaaagcatcttcttcccatgaattccatagtccgcgaaccacctttaaatgttctgccgcaatgctatatcggtcactgtgggttgggagatttttcttgctatgatttcgtgctgctccttcttgcggagaagtgaccaaattccagccagctcgaccaccactaatatgatctaatgaggaaagttgccttgcgagcgtgaatggttccgtaaatgatgtcgaaaatgttccaactagaccgatattttctgtagactctgctaaagcggataaaatagtaatcggctcaaaacgattaagaaaatgcggaatagatttttcagaaataaaaagaccatcagcaataaatacaaaactaaataggccttgttctgcaatttttgcacgagttttataaaaatctaaatctgtacttgctgctgggttaatatctgggtggcgccaaccatctgttgtgccgccaacgccgtgaatgattgcgccaaactggattgtatcttttctagtcattttacttcctccttttgtagtaaagctttttctaagtattcgataccgatttcagttactgcttggtaagtccctttttctatgtcaccaatttctactactggaacgtggcgaataccgtatttggcttgcagtacttctcgtaagtaatcatgatctgtgacgtcaatatcttggaagacaatattttgctcggttaaataatctttcacatctttacagtagtgacaccctactttactccaaacaacgacattagccatggacaacttcctcctttattgattcacttaataattggtacgaatagcgtttgatttccgcggatttgacaggtgttaaaacgacaaaatcttgaatattatatttttttgaaagtctggtaatttcttctccaacgtcttgtttcgtcccagttattgctccaattttttgcgtaataaatcgatatggttggctgatgtttttcacgtaggcttctgcttgttcacgtgaaccgacattgactctccgcccgtccgaaagctctactttaattgattctcgctctggaatatgacggtctgcagcagcttttgtttcagctacaacaacaattggcgctaattgaaaacttgcttgttggttaatttgatactgctcaaatatatcccgcgcttcttttaaaacttcctcttcgccgttaataaaataagcaaacacaaaagaaattcccagttcggcagcttgtcttgcacttgctacacttccgccaagtaaaaagatttccggattattttctggtagtggttttgcttcgactttggaagcagatttccgtgtgacaaaatcgactaattctatcagtttagcatcaaacgtttgaataggctttgcaaagtctttctgaagggcatcggtcgctggttgaaatccgccgggcgctttgccgacaccaagggaaatccgtcctggcgctaagttttcaagcacgtgaaattgttcagcaactttatatggactataatgttgcagcattacgccaccggatgcgagcttaatagtagttgtttttgccgcaatatatcctaaaagaacttccggcgcagctccggctatttcgtctgaattatgatgttcagcaacccaaaaacgataaaagccaagttgttctgcaagctctgcaagttctacagtgttttgtaaagcctcactaggacgttcgccgggattaataatactttgatccaaaatgctaagtcgaatagtcatatgacacgctcctttttcacttctttgatttcatataagtaatcggccgaaactcggtgtaaaaagcgttttgttcgttcttcttttgtgtgattaaatacttcatctggcgtgccttgttcgacaatgagccctccgtccataaagacgacttgatctgcgacgcgttttgcaaactccatttcatgtgtgacgacaatcattgttgcaccggcacgagcaatttctaacattacttctaaaacttcaccgacaagttccggatcaagcgctgcggttggttcatcaaataaaattacatctggattaatcgcgagcgcacgtgcaatgccaacgcgctgtttttgtccgcctgagagttgggaaggatatgcgctaaacttatcggctagccctacctttgttagctcccgctcagcaatctcccgcgcaatttttttcgggatttttctagcaacagtgagtccttccattacattttgaatgacagttttatgggaaaatagattgtattgttgaaagaccattgcggtattttttcgtaattgtaatacttcttttttggaaggtttcttgcagttaattatttggtcatgcattgaaatttcaccgttttcaggacgttccagtaagtttaagcaacgtaaaaaagtggttttccctgagccacttggaccaagaatcgtcactacttctcctttttttacggttaaatctattccttttaaaacttgattttgtccaaagcttttttgaatatttttaatggtaatcatactgtccctccttgatatttagcgatattcttttccaaaatataattaattgcttctattagaatagttaagaaccaataaatcagtgctgcaccaatgaatgcttcgagaaaagcgtaattatcagaagctacaatcgtggccattccagtgatttctgggaccgcgacgatagctgcaatcgaagttgtatgcaaaaacccgatgcataaattagtaaaattcggtagcgaagtcataaacgcttgaggtaacagcactttacgaatcgcttggccatgcgtatatcccatagaataagctgcttccatttgtccaatatcaacagcaataataccagaccgtaaaatctccgttaggtaagctcccgccgtgaaggataacgcgattatcacaaacaccacaaccgggattttatttgctgatatgcttaaatcaagcgacttacttaaaaaatcgacaatgagcggaattcctaaataaatcagcattatatgtaaaatcgctggtgtgcttcgaaaaaaagatacgtaaaacttggcaattggttccaaaaaacggacatggtacatccggatgagcgttagtaaaatagcgattataaaaccgaacaatatcggaaagaatgtcatcgcaagtgttaatggtatcgtttttagcatcgccaatacggctgttccaataaaaggcacatcaagcggcatcatcatctctcctttaaagttctatatcaaaaatactggtaaatctggtattctcttttttaactcgtttttcaatccatttgaaagaatattcaagtagcactgcggtaatatagtaaataatagacaacgaaatataaacttcaagggcgtgattgctcagcgtaattaaggtttggcctctacctgacatatccatcacacctatcgaaaaagctagcgaagtatctttcaaatacccaattactaaattcccaaaattcggcaatgcttgataaagtgcttgaggcaaaatgattcgtaaaaatgtttggcgtccgttcagcccgacactataagctgcctccgcttggccagcatctacactatttacaccagcccgaatcacctctgcaatggtcgccgcactacttaatgcatacgttgcaatggcggcataaagtggatccatttgcgataaatcaatcccaaatacgccagaaagtgctggaattccgtaaaaaacaataaataattgcaccataatcggtgttccgcgaaaaaaagaaatatatacgcgagcaaattgatttaaaacagggatctgataaattcttggtaatgataaaataacccctaatataaaaccgaaaataagcgagagtgccaagatatataacgtaataggtagataacccgctaacgtcggaataaaatcagcaatcattttcacatcaaacgctttatccatttaaatggcaccccctattttttaatactgttcttttgaataatctgcaccaagccatttttcactcaacttttttaatgtcccgtcatcaataatggattgaagtgctttatctacgtctttactcagttccgttttatttttaccaagcatgaaatatacctttgcatttgataaaacatcgcctactactttttctttgatggggcttgttttattttggaaatctactgcaaaaggtgtggaaatcgttgcatcagcgcgacctgtttttagttggttggctgcatcattagaaccttgtccttcataagcgatttcaaaattattgccttgttcttcattgattttctttaaaacgagtgcgccatttgacgtcgcacttgtaataacacgttttccagctaaatcttttgtgccatttatgctgttattactatctaatacggttaactgtaatgggaaattattataggctacatcgttaaataaaaatttcttctcgcgttctttacttttttccatttgatgcgctacaatatccacttttccggcaccaagactaacgagtaaattggaaaaatccatcgttttaaacttgaatttatagcctggtaaacgtttgtcaatttctttcactagttcaacgtcataacctgttaatttgccattttcatctaaaaagcaaacattaggaaactgcgtgcctgtcccgaccgtaatcgtttgaacttttttattagctgcttctggttcatctttcgctccgcatgcgcttaatgttaacgcggctacaagagccagtgccaaaactccatatttctttttcattctttctcccccttttttatgtccagctaggtattccgagtaatgtggcatcgaatttttccggaattaaaattttccgcatcatcacgccgacatcgccgtcctcttcatgttcaaaataaacttcatagccgcggcgcaagtacatatcaagtagccacggatgttttcttgcagaagtaccaagcgtaagtgccggagctttaagtgtatcgcgaagtacccgttcttctacatacgttaataatttatcaccaatcccttgtcccgctaattctggtgctgttgcaaaccaccaaacaaatggatatttagaaggaggcgaactactctcccacggaaaacgaacagtaattgtagaaattaatttaccattccgctctaaaacaaaagccgaagaattaacgatattttcggtaaccatcgctaaatctgcattagtagaaggccaatcgattcccagttctttcacggacttaaaagcactcgataacaattccaaaaactccggcgcatcttccacagtcgccactctaaaaatatcttctgccattttctattcgcctccttaaacttccactgaattttgatttaataacgaaatgaactgatttaatgcactatccagtcgttctttcgccgtaatttcaatttcataaagcccgttaccaagccgttcaatttgcttatcgaccgtaaactgacctttcaaaattatttcagcccctagctcttttaaaactggatctagcgcgtattgcagtgcaagtaaatgtccatttgatccgccaagccctagcggtaaaactactttcccttttaaagccttaagcggcaaaagatctaaataagcttttaacacgcctgaatatgcggctttaaaaatgggtgttgcgataataacgccagagctggactcaatttcactatttgctaaatgaatatcaggatgcgtgaaatcggcagttactaaagcctctgcttggattttgtgcacttcgatgattttaacttccgtaccattattcgctaattgatttgctgctagttgaattaaaccgttcagccgagattccgttttgattcccccagcaataattgtcacttttcccatcaaatcgccccttttaattcccatcaacttacttggtttttagatattagctatactataaagtaaaagattctgtttggctaatcaaaaaaactaatagctaaccacagtaatactaatacttctgctctaatccgcattattcctatgaattttatcagattaataaattgcttctggctattttacggtgtatactgttagaaatatcaaaaaactccaatatgaagggggaattatattggaatttagaaccattaaaactttttatacggtagtaaatacgggaagttttcagcgggccgcagaagtattaaattattcgcagccgactatttcaatgcgaattaaacagctggaacaagatttggacgtgcaattatttgaacgggggaaaacattaaaactaacccacgctggtagattgttttatgaaagagcgggtcagctaatcgctcaatatgaagttttggatcacacaatatttgatttaaaaaatggcaatgccggccttattaaaataggaatctcagaacctagcgcgagcctcgtcttaccacaaattttaaaacaatttttaaccgattttccaaagctaatggtgaatgtttctgtggatgatgctaatacatgtagccaaaaactgattgatggggaaattgattttgccatttgcggggaacccgagctgattttggagaatttttattttccgtttttccatgatacgcttgatttgattgtgtcagaaaaccatcctttagcttctcggacgtctgtagaattgcttgatttacgcgatgaatgctttattttcactccagcaaattgcccgattcgcatccaaattgagcaacatttaaaacgtgccattggtagtgattataaaaaaatggaactcactagtagcatgtctcataagtattttgtccgtgaaaacgttggtgtttctatctttacgagcaccgcacattccgaactcttagaaggaactgttcgtattccaattaaaaatttacctatttcacctccaattgggcttttaactaatcaaaaagaaaaagactttgatagtaccacgaaagaatttattgatcgaattatttattattttgatgataaaaaaagacagttagactaaataaatagtctaactgtcttttttcgttaaaattctaattgaaaacttgcttcaatcgcaaggagattatctcggtaaactttcatttccttcctcgtaatcgtccctttttcaaaataatgttgaattgtttcccgttcaatttgagaagctaaatcaattgttgtttgtagttcttcattatctgtttcttttttatgtttgccgctacctaatgctcgttcaaaattcattaaatataaggaaataacttcagggttaaattcgtttttatcgagctcatttagcttttgaacgacgaattgattattttcagtttgaagtttagctcgctcttttctacgttcttcaaaagaaagaggtactatgcgaaaatcacgaatactatgacttagaagctgacgatatctcattctcgcccgatatttttgagctcttgtttggacataaagtcgtttcccgagccgcatcataagcgacaacccaaccccagtgtcaattttccgctcaaatacgagtcttcttgtattttcaagttgccattcttgcgttaaacgtcgaagttctttctcagtagcactcacttctttatgttccattaacgaaaaaattctgccgttatacatttttagtacattattcatttctacttcattctcgtctgttttataacgttgtaattgaccgacaacatctcgtaatagcgcaattgcagtagtatgatcggctactacaacatcttttttagctgcaaaaagaggcagtgtgaagttagctaaaagtagtgtcgtaataattactccagcagcaataaaaattaataaatcacgttcaggaaaagcattgccctgacctaagacaaatggtaaggatagcgcactgactaacgtaatggttcctcgtacacctgctacagtatacaaaaacgtattttttagcctgctcactaaatctgcatggggattttcctcgtaattgcggaaaaacaaaatccataagaaccgaagcgcaagtagtaaaaacgttattccgaaaatatataggaacaacatgcttttatgtatccccgtatcttcccaaatagctgtcataatttgcggcagctgagtcccaagtaaaacaaacaccagaccattaagactaaaaataattactgaccaagtatttttagaaagcaaattgagttgcgccatttcaggattgatcctcttataactaaacgaatgcaccattcccccactgaccacagccaaaataccattgacgccaatattttctgccaccataaaaattaaaaaaggcagcaaaatttccattaacataaaagaagtcatgttttcaataccgagttggcgcagaccacgcattagcatgattttcagtaaactaagcaccactccaagcgcaatcccgcctagcgaaagcagcaaaaaactagttccagcagacataaaggagaatgttcccgtcacaagcgctaagactgcgaattgaaaggaaacaagtccagaagcatcattgataagcgattctccttctaaaatatgcataattttatgtggaacccttactttttccgctagtgctccaactgcgaccgcatcagttggcgctagtgctgcagcaagtgcaaatgcagccgcaaaaggtatcgctggaattaaataatgaataaaagctcctaaaaccccaaccgttacaaacactaggccaattgataatgataaaattgctttccgatttttccataacgattttttatccgtcctagccccgtcattaaaaagtatcggagccataaatagtaataaaaacaactcgggatttatatccatcgtatgatccccgagcggaatcgccaaaataatccctagtagtacttgaattaaaggtaccgcaatacttggcaaaaatcgacttaacacatttgataaaaaaactgcacttaacattaataaaatcagttcaaaaatctccattaatacatccctcgttcccgtttccgcgccttgctaattcgttctttagcaaggcatttgatccgttctcatactaacaaaaatatttttcgagaacatccgtctctgtatggagtttttcgcgtttacttacttttttttataaactacttgttcatttacaactgtcatcataacttctagatgacgaagattcgcaggttttattaggaaaggatcttctgctaaaatcgtaaaatccgctacaaatccaggtgcaatttgaccacgggaagtcgttttataacttgcaaatgctgccccttttgtataaagttcgattgcttcatatacggtaagtgactcttccggccaatatttcacaccattcaaatccgcattagccgttcttgtaacagctgcatggatcccccaaaacggattaggcacttcgatcggagcatcactacctccagctaatggaaagcctgctcgtaaaagcgaattccaagcaaaggcaagtggcggatgattttcaccaagcacatcgatagcccacgggagatcactagccataaactgtggctgtacatcaaataatatcggtaagccctccgcttctgctattagttcctttgtaagccaaggtgtgtgaattaatctatcatattgtccttctttaggtgggtttgctcgtaaagttcgaataacattagcaaaagcttggtcgcctaaaatatgaattgctacaggtaaacccgcttttcttgctgactgaactaaatcctcaaaagcctcatcggaatgaatttgtagtcctttttcattcgggttatcagcgtatcccgcactcattagcgccgtccgtgaaccaactgtaccgtcatagaaaattttcattgcacctaattctaaaaatttgtcgccactcataaaactttctttagacgttgaaaaattagctagttctgcatggtgaattaacaaatgtgcgcgaaatggcaatcgatttgctcccaccgtattccgaaaagcagcaaaagtagattcaaatcccgtaaaataatgtaagtcttccgaatgcgcgccggttatacctttagaccataaatcggttatcgcaatttttagccacgcgtttaattcagcaggtgtcgccgccgggaatgcatctatagcaagcgttgtcgcattatctcttaaaataccagtaaaattcccagctttatcacgaacaatttcaccaccgccatcaaaaccgttttccgaaaagttttcaatgtgcgcttttaaagccgaattaatcgacacactatggtaatcaatccgtctaactaaaattggattggttgtacttaccccatccaaatcaactaaagaaatcaatgtttgttcatctgaccatttattttcatcataaccttctacaaacaaccattcttcacttgcaagctgctttgttcgttcaagaataagcgctaatgcctcttttttagtagttgtttggtttaagttcaaccgttctaaagcttgtccgtaccatagcaaatggatatgcgcatcaacaaatcccggaaaaactactttaccttccaaatcgattgtttcatcaatttcagtagcatattgttttttgaggtccgctacttcacccaccgcatgaatttgaccattttttgttaatacagcagaaacttgctccccttctgctgtcatttgataaaatgtgccgttttcccataatttcattttctattccccctgattgatggaaattttcaaggcagctttttcttgttgatcctttttctgtaaaatttgttgtaaggtaatgctaactagcgcacatccgagtaaaataaatgcgccaatgaataaagctttgatgccgcctaaatgttgaactacaattgctcctaaaaatggcgcgagcatgcgagcggctgtagccattccgttcactaagccttgatataaaccggccgctccttttggtgcaagttgataagcaattgttgggattgctggccaagcaaacatttcgccgagtgttaagaaaatcatccctaacacaaaaccgctatatacgcttgcattcattgcgacaacaaaggataaaataaataagacaataccgatataaatttgtgccagtaagtattttttaaatctattaacaactggaattaaaactaattgccccagtacaataagagcgccgtttaaactccataaattaccgtattcgctagaagtcacaccttttatttccgtcatataagtagaaagattggactgccactgcacatgtggtaattggcagagtaagtatgtcagtaataatagcacaaaagaacataatgcgagcttcgttggaaattctcgtttagctccttttttacgatgttttgtttctacattaactttttcggatttccagtctattttgtagaagaaaaagaaaaaatagccagcaaatataattgcaaatacaaaagaaccaatatatacgtggctcattccttgttttgctagtagacctgcaagaagcggccctactgcaaccccgatattttgagcaacataaatcgcattaaaccctgttctcccaccagttggatgcgttaaccctgccgctgcgtaaagccctgagaataccattcccatcgcaataccaaccgcccataaattccaaataaagaacggaaatccgtggaagaaacataatgaagctgttgagagtactaatattatcgtaccaattgtaagtgaaataaagcctgaaaaacggtcaaaaataagtccaccgataatacttgaaataattcctacacctgaattaatcaacaataccaatgaagcatccgtggttgacatacccaactcttgcgtcatataaatcatattaaaaggccaaataaatgatagccctgtatatagtaacaccattccaataataacaatccataaatcctttggtaaccatttcgtcatttcctacactttcccttcttaaaaactaaccttttttaggttatcacaaccacgctctttcgaaaagaaaaagttcatcaaaaaaccacctagcaaattttgctggtggctaataagggactggcaataattccctatcatggttattctaagtgtactatgaattgcgtcatttgtctgtgaaaatgttagaaatattttaattatttttttctagtattaaatcatattctaagtttcttaaataagagtgaaattgagatacatttatttcaaaataatagcctaattcaaaaagaatatgtcgctctttcaattcatttaattgggcaatataggactctttgggaagtatttgcataatctcttgacgaaaatacccttgtgcgattttccaagaagtagtatgaagtctatccggcatttttttaatgaaccattggatacaatcctttgtttcccgtttcaaaaagttcatttctattgctgttagatcttccagcttcactttatccatatttttcactatatcagcaacatatgttaaaggaattttccaagcaacggtcttacataaggggtggatttttgtcttttctcgaataaaaccaagaacgcttcctttcccccaagaactatttttttctgcgtattgcgttacgctgccttcatcaatcgcgtaaacaaattcattattttcaggacaatcaataatatcatccttgttccaatacaccaattcagctacttcttgaaacttcggattactagtcaaagtaaaaatcaactccgtagtaaacattcccatcatttatcccgcctcctcaaaatcattgcgaaattgcaacttctttaatcataataaaaaaagagcgagagataagttcttaaagaaccatcttctcgcttcttatgtctattttgtgacagaattaccactccacttttaaaaatgttatatttttaacatttttatataaaacaggataaaaattagcattatttccggtgttctccttttctaataacccaccaaagggatagacaagtaattccttggaagacgaaaaacagtcctaaaataattccgattgcaatcgctactaatgtattcgtgaacaacgaaataacagcaataacaattcctaaaatccccattatgagcagtaaagtccagcccgggaaaccttttacggcaaaagcagttaaaattcgtaaaatcgctgaggctaatatccaaatggcaaagatgataataaaaatacgttcggccatattcgattcaaaaatagcaaaaccacctaccaagatcgataatatcccgtctagcataatccatttagaaatgctccaatatttacgttcgccaaagtaagaaataacttcattaattccatttagcactaaaataattccgataaaaattgttagcgcttgaagagaagtactcgggttaaacattaaataaatgccaagcccaatcattgctatgccgagaattaatacaaagtaagtatataatttcctcatatttccactcccttttaatggttagtaagtaaagatccggctgcctcatctataataaagacaacattcgggtgatttcgtaatatagaagccggacaatctacgctaatagggccttctaacaaccctttaaccgcctctgctttacgttcaccagaagctgttactaagatttgttttgcatccatcatatccgcaagtcccagtgtaagcatttgcgatggcgcttcatcttcggttagattgttatacatgatagtacttttaatagtagattcatcgctatctgctaaaaataagcgggcatcaaatggtgtaccaggctcatttgcaccaaggtgaccatttactccgagtcctaaaatttgtaaatcccgctcgttttcttccaaaattttcttgtaacgagcaatctcatccgtaaaatcatctaagcttccatctaataattctactctttttggcattttggttattaaatcataaaatttttgatgcatatatgtatagacggtaaaagatgcatctcttttagccacatattcatcaagattcattaaaaatactttttcaatcgggatttcaccagcgttaatttcttttacaagccctgcaaacattccatcgaaactcgctcctgtagttgtgttaatgactgggttgtcattttcagtaattacttgttttaccacttcgagagcttctcgtgacatttcttcatatgtttttgttttaattaatttcatcaaaaatcctcctccatactactcattacccaaacaatatattctaaatcaaaccatgtttttcgaagcttaaatataagccatcttcatcaaccgatttagtaacttcattagcaaggatttttaactcttctttagcatttcccatcgcaataccagtttcacaatacgtaagcatttctgcgtcattcatgccatcgccaatagccatggtatcttttttatccgcaccaatatgttctaacagaaactcaatcgctgttgctttatgaatatctggaaccatcaattcgccactgtcatctccaaaaattggaaccgtacaatgtaaaacttcaaatttaccactaaattctttttttaattcttcaaatggtacatctttattttctaaaaaacatgctttattaacatctgagcggtaaaggttcgtttcaccgtaagttaaactttccataaacggatgtgggttattaacttttttctcacgtgctattggatcattttccacatcgccgtaaactaaattatctaagtgggcttctaagttttcactagcaaacaatccaccatttgattccaaataaaaatctaaattcttttcgtggaaaaaatcaaccatatgaacgacatcagcatctgatacttttttatgataaatagtttcattgtctacttcgatataacccccaccagcaccaataattccatcaaatccaatggataaaattgattcataaagctctggtttggaccgaccagtacataaataaacttgatgcccattacttcttgcttttattattgcttctcttgccgattctggtacaagcccatcatcactcactagtgtgccatctacgtctacaaatactatttttttcgtcatgtaatacctcttttcgtctgttaatagtttaattatagcatttctttcataggaaggcgttcaattatataacaaaaaaacatcgaatagtaaaaactgtcaccattcgatgttttttattttattttaaaactggccaaaatgctttattttcaataatcatttcatccaacacttttttagctactgttgcatttggaactgattgattaagtgtaaatgcttgtaatgctttttgataagaattttcaaagtaagcatctacgagtaatttttctgctgcaacttgtgcttccattaagcccttatggaaatctccaatcgcaggtaaggcaatagcttctacaccggtcgccccaacataagctggtacttcaacaaccgcatcactgcgtaagtttggaatagaacctttattttcaactatcaacataaagcgacttttctcgtcatttaatagagacgtagcaatatcaacaatatataagccatgcacgccaaagtagaaatcaagcacatcttctttttctttattacggattttatcggccatttcttgagttttttgctcgcgaccgtccattactgtgttagcacgcgtatagtttggatctgcataatctacgtacatatccggatacaaataatattctaaataattatttggtaagttatctgggaagttttgcaccatgaagcgaatcatattaaatgcgcggttccaacttggatcttcttctttaatttcttgaacttttaatttctctaaaagctctggcataatatcacgtttcaatgatttatcataaatttttgtataccaaccaaagtgattcaaaccgtagtaagttgcaacccaattatcgcggtcatatccgtaatttttcgctagcgtgtcttcaataccaattgtcatatcacaaacattaatcattcgaatgcccgggaattgtctacgtaccgcttcagaaataattgtttccggattcgtataatttaaaatccaagcttctggagcgtatttttgaataaagccaactaattctaaaagtgggccaatgctgcgaagtccatatgaaaatccgccaagtccacatgtttcttggccgactaagccatgtttaagtgggattttctcatctttttcacgcattttaagtccaccaacacgaatttgtgagaagataaaattagcgccagtaaaggcttcttctgggtttgttgtctgaactagcttaatacttgaaaagccttgttgttctagcatatattgcagaattaaaaacatgttttcatttctagatgcttcaatatcgtataaacggatttcacttactggaagtctttcttgtccattaagcactgcttgaataattcctggcgtataagtacttccaccaccggcgatagtaataatttgtttttgcatgcctttcactccttaaaaacttactcattattgttataaatagtttgtaataactccacgcattcacgataagtgctacatttgcttatttgttctacatacgatttattagaagctattaacgataaaaaatcattaattaatggcgcttccgttccatctaattcttcaatcattggaatcataattagactaaccttgtgattatcccaggtaattggctttttcataatacaaataaaaataccacttttaatcgcaacatttttaattggatgaggtaaagcaatccctgttggtatagccgttgaaaataactgttcccggctaaataatttttctgtaaaactagttggtacatatcctttacttatacaatattcacttaaaaaatcaattgcattatatttctgatcatattcataattggtcaaaaataaatcttcatgtaaatatttctctttaatatatgcaaattttttcattttattagcttctattgttgccgaaagctgtttttttattgttacttcctcaattaaaccgatattgttggataagacaatacacgggacttccgcaggcaaatcaatttttttagtagaaatacacaaatcaacatctacattttctgatagtagtaattgacactgtgtattatcggtaatctctataacttctacgtttacgggtcgtagtacttctgctaattgctctcgtaagtaatacatcgcagctttaccttctagaacaatgaatgcaatccgtaccacttggttaagttgatgtttagcttctattttgcggtagtattggtataaatacattacgagtagaataatttcctcttgattgagaattactcctagacgttctaataacttttctccgatgaaaatggcaatatctagtaagtaactgtactgctgcgtgatgatatgcgtcacttgatttttaatgacaatacctcttttagccctctcaagtgcgataaaaatgtgttttgtcatatcgctagttacttctaaatcagttgtaaaatctatgagataaacgtgcttaatttcttcaagaattagtaaaatttcttggtaaagttcgccttctaaaaccattttcgtagtgacttgattttcaaaattgttcatcgcaacaattttttcatattcagtcaaaataaattgtttcatttcagcagaaatcccataacccgcttcctgctctatcgcatcaaagagctctcttaaaaacgggttatcgatttctgtaaccgttgattgttctggatgtttttttaagaagccactgctataaattatttgcgttagtaagattgtttcatcaaaatactttaaaacaatcttatgtttattgattatttttgataatatttggtggattttttcattattaatttctggaaaacaattggtgattaaaatcgtttttagcgactcatctagctttgcgatgcggtttaataattccattttcgtagttggtgtggcacttatagcataaataccgtcactagaatgaatgactacatctaaacctaataattgttcaaagtagcctcgcaaccactgaatatcacgttggatggtagattctgatgtatatgtttcggttgcatattcatatatgtctactccatcatctacaagtaatttcttaattaattgcgccatccggttttgttcaaatccagcttcttcctcaacgtcaaccggaaaaggtttttccatattataggcatatcctaactttttagaagtaaagataaagtcctctcctatattttctttaataacacgtatatcatttctaattgtccggtcacttatttggaatagatccgctaattttttcccaagcaaccaattattctcattatacagcgtgcttaaaatatttttttgacgttgattaagcatttttaatcacctatttcatttttttggaatatcatgataggaaattaattctacattattttcgtttaaaaactggcgcattctcggtgaaattaaactttctaattcattcgcgcgtggcgtagagaatgttgaattttccagaataaaagtatctagataaccaggatgtgtcatgatttcaacataatcataacacaaaatagaagctgcattgtcataaatatagtctaagttatcatattcaccgtacgggatttcaagcggcttttcccacataaattcgacatgttcaaaaccttttgtatcatgatttctaagtggtatcccaatttcttctgctagccttttcgcggcactcgtaacgactggataaatatctgttgaaaataaatggctatccaagtggcttggctttttcttcataaactccgtaaaacgatgatattgtgctttaaactcttggtaaacctcttcttcgttgtaaggatattcaggagtagtaaatttaggctttattaattcgccgtcttcattcactaaagttgctccatttgttagaggtttaccaagcgtcaaattaagatgcaagccaattccgagcgtaggtgttttttttgataaatctaccgcatgttcaaaagctggcatagtaaccattaacgttgtagaagttaatacacctaaattatgcgcatcaataattccataattgatagctcttgtgaacccaaagtcatctgcgttgataattagcttcatagcttttctctccttacttttcatctaaacgcttatacaaattaagcacggatttaactaagtcagagtatacaaaagcattcattagatgatcttgtgcgtgaatcagcagtaaagaaagttcttttgagctaccgtttgcttcttcttgaatcaaagacgtttgaacatgatgtgcttctcttaaagattgatttgcttgctcgatacatgcttctgcttctgcaaattcacttttttcagcgtgttgaacggcttttagaaacaaggaagacgcatctcctgcacttgatattattttaaaagattgtaattcagtgccttccattagtttccctccgtcgtaaatgtattcgttccagcttctttaatttttttaaatgcagcaataagaattggtactgcattcatattgccataatcttctttatcaattacttctacaggaacttttaacccgcgttctgttgtagcttctattacttgttcatatgccattgataattgcggtccgagtaaaacaatagacacgttatctaggtggtcagaatattcatctttcccccaagcttcaattgtaattcctttattcttaaacttttctgatgccgcaatagcctcttccatctttttcactaaaatggaggtggataatccgccaaaacatactaacataattttcatgtctatcgtcctttcatactaaaaatcaaaatcatctagactagcttcttggtccccgctattttcttgtacaagcgcttctttttcagcaattttaaagaatggatagtaaatgagcgctgaacaaatcaagataagtccaagtacaataatgtatctccagtcaaaagatgcaacaatggcaccgattggaactggtacatatggagaaaccatcgtaaatggattcataagacctagcttgattgagaaccaaccaattaatgctgcaatttgtggcgcaaccatcattggaataaagaatctcgggtttaaaacaatcggaacaccaaacattacaggttcattaatactgaaaaatgttggaattaatgccaatctaccaagcgtcttataacgtttagatttagaaaacatcataataacaacgagcgcgcctgttactcctgctcctgttaccccaacgatactccacataaagtctggagtgaaaataagcatggaagaaagtggctctccttttgcaagtgctgctgcattcgcgtctacgttttggaaagctacacttaaccaaaccggcgccattacagaatatccgtgaataccaaaccaccataataattgctggataaagataatcaacataattccaggtagcgtgtttacaagcgaagtcagtggtgagaataacgtttgaataagctcaactacgcgaataccgctaattgattcaaccccaaagcttaaaatcgctacgattaaaaccgagaataaaatcggccataaattttcaaaagatcgtaaaatcggcgttggaacaccctgacctaaattaatcgtgaatttcaatttatttttaaaaatgtgtagaatttctacagataataaactaattactaaagctacaaaaataccttcgccggcaagataagttacatcacttccgccagcttcaagtggtcttactgctactacaacaaaactcattaaggctgttacaatcgccccaatatcccacaaattgcgttcttttgcataataatatgctacgaaaatcgctacatagacagacatcaatccaaaggtagcaaaatgaatcggggaggtaatgttattaatatattcagcaacagcagcaatccaactaggtagttttgggattcctcctaattgctggaacaataccgggactgcaccaactaaagttattggaacaagtgccatcattccttgacgtattgccttcatctgggtgttactttctaatacttttgcaaatggtaatagccattttgacagaaatcgttctaatgctttcattaattttcatttcctttcactaagctgttatacgttcatgatagcgcatacaaaaatacctcacaattaatcttatttcctaagcataggaaatcctttttaatacaaaaaaatccctataaagtaattgctactttatagggatttcgctattttagttttctaatgccattaatttttgattatcatcaagtgctgattcatgtgcatcatggcgttttttcaagtgactcatggatagatatagtaaaccgatacatgcgatcatgatgattgtaagaacgagcattgacatactatatacatttggtcccatacccgctgccagtgactctctaaaggcataaattgagtaagtcattggtaggaacggatggattaagttgaagaaccatccagtaagtggcattgggaatgttccgcctgaacccgctaattgaacaatgagtaataccatcgcgataaatcgacctggattatcaaatgtcattgcaagaagcatgataaggaacatgtaagcaagagctgtaataatcgctgttccaaagaactcaacgatattatctggtcttaatcctaacgctatcatgatgccaccttctagaagcgccatcgcaactgctgctacaaaaccaagtgatagtttacttaaccaccatttgtaagctggttgaccttccattgaaacacgtctaattggcataatgaagttaaatacaagtgcgccaacgtataaagcaagtgacaacacatatggtgctaatgcgtgaccgtaattacttacgtgcgtatattcattatgtgcgagttttgttggagcagcaatcatgttaaatgttttgtctgttgcttttgtatctttcacttgttgcgcaccatctgctagtttgtctgttaattctgtgctaccgtctgttaatttagttagtccatcacctaattggaaggaaccgttcgctagtttagaagaaccatcagcaattttggaagagccgtctgctagttgtcctacacctgaaactagttttggtgagttagctgataattggtttaaacctcctgctaattggcttgaacctgcttgtagttgatttacgcctccagcaagtgttggaactttagcagctaattggtttgttccgccttgtaactcttttgcacctgaacgtaatgcgtctgaattgcttgcaagtttattacttccatcatttaactgacttaagccgttttccatatttgaactaccggcagcaagttgtcctacgcctgaagttaaagttgggatttggttgttaagttcatttgttcctgcaactaattttgcattgccggcttgagctgattttagtccagctgttaactggttcgcgccaccgagtaaagtttgactgcctgaaccattgattgcttgatggataccattaaatgcttctgtagttccaccatgaactgctttataaccagctgaaattttcgctacaccagtttgcaattcagttacttgtgtttgaattgccgctaaatcaagacctgataagccgctttgtagtttttctacagtcgctacttgagtggcagatttttgtgattctttgtctaaatcagcttgaattgcatcaataattttttgtttatcttccgcgctcacaccgtttgttgcattaatttttgctttaattgcttcggcatcgaagttcgcattggatttaataaaagttaaaccattttgtaaatcagttaagcttttttgaagagcttgtaattgttttgcgagtgctgcatcttcaccgtttacgttttgatttaattggtcgataccttgttgtaaatcattcataccttgttttaattgagctattttaccttggctattagttaaattaccatctagttcttttaatcctgctgaaagtttattactaccatcaactagtgaatttaagccagttgccaggcttttttgaccgtcgtttaattgcgttacaccagatgcaagagctggtacgctgccattcattttgtttaaaccatcagaaagggcagtagaaccattgtatgcttgattaattccaccagaaagtgtatctacgcctgatgtataagtcgaaactccgcttgataattttgttgctccaccatcaagtgcagccacaccgtctttaagtggtcctacaccagcagcaagcgttgaaacaccagcatttagtttatcgccaccagcggccgcagtattcacgccatctgtgtaagtttttaaaccaacttctaacgtattagcgccatctttgaacgttaaagagctatctgcgagcgtttttaaattagtagaaattgttttattaccttcttgtgatttcacgaggccatctttaatttttccagagccatcagcggcttgggcgaacccgtcaccagactctttaattttatcaaaaattgcttccgcgtatgattttgttacctcagcggaaacctcgcttttcagttgtttggctccttgttcactcacgacttgacctaaatagttaagcgagccgtttgttttataggataattccatttttttcggatctttatctaaaacggatgctgcatttttagagaaatcttttggaattgtgacaaccatataatatttgccatcttttaagccttgttcagcgtcttctttggaaaggaaattccaatcgagttctttgttgcttttcagtttggttactaactgatcgccaacatccattgtttgaccgttataatcaaccggtttgtcattgttaactaccgctactggtaaatcccctgttttgccgtacggatcccagacggattttaagaaaaagcttgcatataaaagtggaataaacagaataactacaaatgataaaagtagtattttgtttttaaataattttttccactcattttttaccatatccattttattaccgcacttctttcttttaaagatttattacgcttcgttccaatctatgatagtggttcgttctttcccaataacttgctctactaaaacagataatttttgtgagtataaataattagcgtattctttatcagcgtttctaaaagcacttgtaatggtgtgaataccggactcggcaaattcatgatagtcagagaaaacagtgtggattaagtcggaatctgggtatgtatcgattttcccttccactgcttctacaatgtccagcaaattaatttcttcagggtctttagcaagcgtgaaaccaccgttattacccgaaactgaattaatcagcccgctaacgactagcttcctcaaaattttactaatataagacggcgacgaatcacgcaatcggtgatgaatagttacggaagaaatgggaacatctaccttctgggtgtacaacatcgtcataatacaaaaaacctgatccatacttttgctcaacttcataataaaaatcctccctcttcccattattacctttcaatatccttaatggacattcaacatctatatacaatacacccattttttttaaagtgcaagagttttttactgaaaatggaaaaaaatttaatgaatgcgtttgccgtgaataaaacaaccgcaagtactgtctcaaaaattttccttagctaagaaaaaaactggaataattttcgaaaacaaacgtgctaatcttatacatgttccaacaaacaatgacttaggaggtgcttttctcgtgttaactgatgatgttccaaaaaaatcacatttaccattaattaagcatcattctaattatctgtagcttggtttagcagtgttcgcaaataaaatttatggaggtaatacacaatgtctaaacaagcaaagtctttaaccttattcggattttttgccattacggcttcgatggttatgacagtttatgaatatccaacatttgccacttccggctttcatctcgtatttttcttacttcttggcggatttttatggttcttacctgtcgctttatgtgcagcagaaatggcgacagttgatggatggcaagaaggcggtattttttcttgggtcggtaacacgctcggggaacgttttggttttgccgcaatcttctttcagtggtttcaaataacggtcggattcgtgacaatgatttactttattctcggtgcgctatcgtatgtatttgattttcccgcgctcgaatcgaacccttttattaaatttatcggtgttttaatcattttttggggccttactttttctcaactgggtggtacgaaaaacactgctaaaatcgcgaaatttggttttattatcggtattctcatcccagcaatcattttatttatcttaggtattgcttatgttgctggcggaaatccacttcatgtcactttttccaaagaggcgtttattccggatttctcaaaagcttcaacattagtcatcttcgtgtcatttattctcgcttacatgggtgttgaagcttccgcgagccacgtaaatgaaatgaccaatccaaaacgcgattatccactagcaatgattatgctcgttattttagccatcgcgctaaatacaatcggcggcttaacaatttccgctgtgttacctttaaaagatttatcacttagctccggcgtcgtgcaaacattccaagcattaattttacattttggttccagcttaggttgggcagtaaaactgattgccatcatgatcgcgctaggtgtcatgggtgaagtcagtgcatgggtagttggcccgtcacgcggaatgtatactgcagcagaacaaggcttacttcctgaaaaaatgaaaaaagtaaataaacacggagtccctgttccactaattatggttcaaggtgtcgtcgttactatttgggcagctattctcacatttggtggtggcggtaataatttatcattcctaactgcgatttccttaacagtggtcatttatttagtcggctatttactctttttcatcggctacttagtacttattttcaaaaaatcgagcttaaaacgtacctaccaaatccctggtggcaaaattgttaaagtgattgtggcactaatcggcttagtaacatctattttcgctttatgtatctcatttgttccaccagcatcaatcgccgcaaaaagcgatacgacatacatggtgatcttatcaatcagctttatcatcaccgtactaattccattcatcatctacgctgtgcacgataaaaaagacatctcaccgaaagatattactcatttagactcaagcgacatcaataaattcacccacccaagagctcgcggcgaacacattattaatcctgatgataaacatattatgaatcaagacaaattataggaggaaaaaatcatgttatatagtaaagaaaataaagaaagttatttagaaccagttttcggatcaagtgcagaggatcgtgatattcctaaatatacccttgcgaaagaacctctcgaacctcgaattgcttatcgtttagtaaaagacgaacttttagatgaaggttccgcccgtcaaaacctagcgaccttctgccaaacatatatggaagacgaagcaaccaaattaatgtccgaaaccttagaaaaaaatgcgattgataaatccgaatatccgcgaacagctgaacttgaaaatcgttgcgtcaatattatcgccgacttatggcatgcacctaaggaccaaaaattcatgggaacttccacaatcggctctagtgaagcgtgcatgctcggcggaatggcgatgaaatttgcttggagaaaacgcgccgaaaaacttggcttagatatttatgcgcaaaaaccaaacctcgttatctcatctggctaccaagtgtgttgggaaaaattctgtgtctactgggatatcgatatgcgtgttgttccaatggataaagaccacatgcaactcaataccgaccaagtgcttgattacgtagacgaatatacaatcggcgttgtcggcatcctcggcattacttatacaggccgctacgacgacatctacgcacttaacgaaaaattagaagaatataatagcaaaacagattataaagtctacattcacgtcgatgcagcaagtggcggattcttcacaccatttgtcgaacccgatatcatctgggacttccgcttgaaaaacgttatctccattaatacttctggtcacaaatacggcctcgtttatccaggtatcggttgggtcctttggaaagatgaaagctacctaccagaagaactcatttttaaagtcagctaccttggcggagaaatgccaaccatgcaaatcaatttctctcgtagcgccagccacatcatcggtcaatactacaatttcttacgctacggcttcgaaggctaccgcaccattcaccaaaaaacaagcgatgtcgcacaataccttgcccacgcagtcgaacaaaccggctacttcgacatttataacgacggctcccatttaccaatcgtctgctataaattaaaagacgatgctaacgtaaaatggacattatatgatttagcggaccgcctccaaatgcgcggctggcaagttcccgcatacccactaccaaaaaacttagaaaacatcatcatccaacgttacgtctgccgcgctgacctcggtttcaacatggcagaagaattcatccaagatttccaagcctctattcaagaactaaacaacgcccacattctcttccacgatacccaacaatccggcgtccacggcttcacacattaataaaaaggctagcctctcaaataggctagccttttttcatgttcttttcttctaagcaactgaatcgcattttccacatctattaaatcccggtcaaaaaaagccagcgaaaccggaataacagtctcttgcaccgcctctttcaattccatttcgcagttcgggtgacaaagcacaatcgtcggctcatctatttccgccaaaacctcatttaactccctcgtcgaattaaacatcgtctcatgcaccttcaccttccgcccaagttcctgctccacctgaaacttacatgactcaaaattaatcaaattaaacgagaaaatacagatttgcactggattattccatttataaataagcggatataagtgaatcgtcaaataattaatatgcgagtcaattaacattgcacgatgcccactgatttcattccaacgctcaagcacacttttcacaaccaaataaagcggctgatattttttatccaacaaccgttcattactcggaataagaccttgcaaattaaataacgtcttcttcaaaaaataacaaagcgctgcccgaaataacgagtgattaaccacttctgacccaaaatattcctcaaacaaatctattaaagactgtaaatcagcatttttcaatatcaattcattaaattgctccaattccacctttttcatagaagcatcaataatactgaaattagtcgaataataaatcaacattaaatacaaataatcattatacgaaaataccaagtcaagctctttttccagcgtttctttacaacttttgcgaaccataacaagaaatcttgaagactcaatatatttctggcactgttcatccaaaataatcgcactcgtcggaatatcccttttaaaaaccatcgaaataagcgacctaaaatactcgtgaccttccgcattatgcgctactgcatcaatattaatccgtaaattcaaagtagccataaaatcatcaatcattttcttttcatgatccagtaacggataaatacgaacaccatattctgcttgaagaagcgcaatcaaatatcgaacccggtactcctttccagtaatccgattattttcaagtgataaatcaatatccctcaaaaactcctccaccttatgtttcaaccgatatgcatgcgaatgagaaataaaatattcatccataaaatcggtaaacttatgctcctccacattcgtaacaaaaaacgccaagcacttcaaaaacatcgagttatcataaagcttatataaaacttgccgctcacttgctccgtattgtagctggcactgataaatccaatcatctgcattttctttcacctgaatactaatcaagccatccaattcttcatttaacctatgaatatccgatcgcaccgtcacacgcgaagtccccatatattccgccatttcatctaaattcgtatgtttattcttcagcaagaaatcacatatcaaacattttctcttgatatccttttcaatataattcgtaagcataactaccctctccatggacgattaataaacaataacttttccaacatttttcatgttaaaacaatcacaaaataatgtcaaagaaataatcattctcttttgatgaataaatattatcatttttatttgcattctacttctacagatagaaaaacatcaacgtaaatttacgttgatgttttatcaataccggcggccggggtcgaaccggcacgcccttgcgggcacaggattttgagtccagcgcgtctgccaattccgccacgccggcgtaacaatatattaaattataactttaaaacattaattatgcaaatggaggcgccaaccggatttgaaccggtgataaaggttttgcagacctctgccttaccacttggctatggcgccgcacaatattcaactaaaaagcggaagacggggttcgaacccgcgacccccaccttggcaaggtgatgttctaccgctgaactacttccgcattaactgggccagctggattcgaaccaacgcatgacggagtcaaagtccgttgccttaccgcttggctatggcccaacaattataatagttttataaaaacaaaaagggcggatgatgggaatcgaacccacgaatgcctgaaccacaatcaggtgcgttaaccacttcgccacatccgccattattttatatatggcaggggcagtaggaatcgaacccacactggaggttttggagacctcagttctacctttaaactatgcccctataataatggtggaggggagtggattcgaaccaccgaacccgaaggagcggatttacagtccgccgcgtttagccacttcgctacccctccatattaaataaaagaaaaaaagtggcttgggacagaatcgaactgccgacaccttgagcttcaatcaagtgctctaccaactgagctaccaagccataatggcggtcccgacgggatttgaacccgcgatctcctgcgtgacaggcaggcatgttaacccctacaccacggaaccactctattgcgggggcaggatttgaacctacgaccttcgggttatgagcccgacgagctaccagactgctccaccccgcgacaatattattataaaactaatggtggaggttaacgggatcgaaccgctgaccctctgcttgtaaggcagatgctctcccagctgagctaaacctccataattactattctactctaaaaacatgaaattgtctctaatagattagtaaaaaatgacccgtacgggaatcgaacccgtgttaccgccgtgaaagggcggtgtcttaaccgcttgaccaacggaccttagtaagaaaaatgttgctttattattacgtgtaaacggagagcaagggattcgaacccttgagacagcttacaccgcctacacggtttccaaccgtgctccttcggccactcggacagctctccagaaaatggctccacaggcaggactcgaacctgcgaccgatcggttaacagccgattgctctaccaactgagctactgtggaataataaattgcccggcagcgacctactctcgcagggggaagcccccaactaccattggcgcagagaagcttaactaccgtgttcgggatgggaacgggtgtgaccttctcgccataactaccagacaatatgaagttgttgaaagattgctctctcaaaactagagaagaaagggttcagttaggtaactttgtttcattttttggttaagtcctcgatcgattagtatttgtccgctccatgtatcgctacacttccactccaaacctatctacctgatcatctttcagggatcttactttccgaagaaatgggaaatctcatcttgaggggggcttcacgcttagatgctttcagcgtttatccctgccacacatagctacccagcgatgctcctggcggaacaactggtacaccagcggtgtgtccatcccggtcctctcgtactaaggacagctcctctcaaatttcctgcgcccgcgacggatagggaccgaactgtctcacgacgttctgaacccagctcgcgtgccgctttaatgggcgaacagcccaacccttgggaccgactacagccccaggatgcgacgagccgacatcgaggtgccaaacctccccgtcgatgtggactcttgggggagataagcctgttatccccggggtagcttttatccgttgagcgatggcccttccatgcggaaccaccggatcactaagcccgactttcgtccctgctcgacttgtcagtctcgcagtcaagctcccttgtgcctttacactctgcgaatgatttccatccattctgagggaacctttgggcgcctccgttactctttaggaggcgaccgccccagtcaaactgcccacctgacactgtctccccacgcgcttagcgtggcgggttagaatggtcatacagccagggtagtatcccaccattgcctcctcgtatgctagcgcacacgtctcttcggctcctacctatcctgtacaagcggtacaaacattccatatcaggttgcagtaaagctccacggggtctttccgtcctgtcgcgggtaacctgcatcttcacaggtactataatttcaccgagtctctcgttgagacagtgcccagatcgttgcgcctttcgtgcgggtcggaacttacccgacaaggaatttcgctaccttaggaccgttatagttacggccgccgtttactggggcttcaattcgtaccttcgccgaagctaagcactcctcttaaccttccagcaccgggcaggcgtcagcccctatacgtcaccttacggttttgcagagacctgtgtttttgctaaacagtcgcctgggcctattcactgcggctctctcgggcttgcaccctaatagagcaccccttctcccgaagttacggggtcattttgccgagttccttaacgagagttctctcgctcaccttaggattctctcctcatctacctgtgtcggtttgcggtacgggcagtactactcttcctagaggcttttcttgacagcgtgaaatcaggaacttccgtacttaatttccttccccatcacagctcatgcttcgcaagaagcggatttgcctacttctcacactcactgcttggacgcacatttccattcgtgcgattccctatccttctgtgtcaccccatcggttaaacaattagcactggtacaggaatctctacctgttgtccatcgcctacgcctatcggcctcggcttaggtcccgactaaccctgagcggacgagccttcctcaggaaaccttagatattcggtggaagggattctcacccttctttcgctactcataccggcattctcacttctaagcgctccaccagtccttccggtctgacttcaccgcccttagaacgctctcctaccacgaacctccgaagaggttcatccacagtttcggtaatatgtttagccccggtacattttcggcgcggggtcactcgaccagtgagctattacgcactctttcaatggtggctgcttctaagccaacatcctggttgtctaagcaaccccacatccttttccacttaacatatatttggggaccttaactggtggtctgggctgtttccctttcgactacggatcttatcactcgcagtctgactcccgagtataagtacatggcattcggagtttatctgaattcggtaacccgagaagggcccctagtccaaacagtgctctacctccatgactctttacctcgaggctagccctaaagctatttcggagagaaccagctatctccaagttcgattggaatttctccgctacccacacctcatccccgcacttttcaacgtgcgtgggttcggacctccagtaagtattaccttaccttcatcctggacatgggtagatcacctggtttcgggtctacgacctgttacttatgcgccctattcagactcgctttcgctacggctccgctttttccgcttaaccttgcaacaaatcgtaactcgccggttcattctacaaaaggcacgctatcacccattaacgggctctaactacttgtaggcacacggtttcaggaactgtttcactccccttccggggtgcttttcacctttccctcacggtactggttcactatcggtcactagggagtatttagccttgggagatggtcctcccggattccgacggaatttcacgtgttccgccgtactcaggatccactctggagggaaagccatttcaactaccgggctgttaccgtctttggcgggcctttccagaccgcttcatttataactttcttttgtaactccgtatagagtgtcctacaaccccaagaagcaagcttcttggtttgggctctttccgtttcgctcgccgctactcaggaaatcgatttttctttctcttcctccaggtacttagatgtttcagttccctgggtctgccttcctcacgctatgtattcacgtaaggatactatccgactaaagatagtgggttcccccattcggaaatctctggatcaacgcttacgtacagctccccaaagcatatcggtgttagtcccgtccttcttcggctcctagtgccaaggcatccaccgtgcgccctttctaacttaaccaatttacttctacgaagtaaaggttgtttttctgatgttccgtatcagcgatgatacttcctatcagatgaaagattcactttcagatgattctcggttacttgtgtcataaataataaattatctatgctaactttactaactttcttatctagttttcaaagaacaattttggtggagcctagcgggatcgaaccgctgacctcctgcgtgcaaagcaggcgctctcccagctgagctaaggcccctaaaaggaattaaattggatgttttcttcgtgtcagaaagaaaaagtgggcctaaatggactcgaaccatcgacctcacgcttatcaggcgtgcgctctaaccagctgagctataggcccgtcaaaaatgtagtggcgctatgctccatgcatgttgccttgcgtactttatctgacatacaagagagtgacctctcaaaactgaacaaatagagaagaacgaaaactcacaggtttccttttccttagaaaggaggtgatccagccgcaccttccgatacggctaccttgttacgacttcaccccaattatctgtcccaccttcggcggctggctccataaaggttaccctaccgacttcgggtgttacaaactctcgtggtgtgacgggcggtgtgtacaaggcccgggaacgtattcaccgtggcatgctgatccacgattactagcgattccggcttcatgtaggcgagttgcagcctacaatccgaactgagaatggttttatgggattggctccacctcgcggcttcgcgaccctttgtaccatccattgtagcacgtgtgtagcccaggtcataaggggcatgatgatttgacgtcatccccaccttcctccggcttgcaccggcagtcactttagagtgcccaactaaatgctggcaactaaaatcaagggttgcgctcgttgcgggacttaacccaacatctcacgacacgagctgacgacaaccatgcaccacctgtcactttgtccccgaagggaaagctctgtctccagagtggtcaaaggatgtcaagacctggtaaggttcttcgcgttgcttcgaattaaaccacatgctccaccgcttgtgcgggcccccgtcaattcctttgagtttcaaccttgcggtcgtactccccaggcggagtgcttaatgcgttagctgcagcactaaggggcggaaaccccctaacacttagcactcatcgtttacggcgtggactaccagggtatctaatcctgtttgctccccacgctttcgcgcctcagcgtcagttacagaccagagagtcgccttcgccactggtgttcctccacatatctacgcatttcaccgctacacgtggaattccactctcctcttctgcactccagtcttccagtttccaatgaccctccccggttaagccgggggctttcacatcagacttaaaagaccgcctgcgcgcgctttacgcccaataaatccggacaacgcttgccacctacgtattaccgcggctgctggcacgtagttagccgtggctttctggttagataccgtcaagggacaagcagttactcttatccttgttcttctctaacaacagtactttacgatccgaaaaccttcttcatacacgcggcgttgctccgtcagactttcgtccattgcggaagattccctactgctgcctcccgtaggagtctgggccgtgtctcagtcccagtgtggccgatcaccctctcaggtcggctatgcatcgttgccttggtaggccattaccctaccaactagctaatgcaccgcgggcccatctgtaagcgatagccgaaaccatctttcaagagcgtggcatgcgccacactctatcattcggtattagccccggtttcccggagttatccccaacttacaggcaggttgcccacgtgttactcacccgtccgccactaactttggaagagcaagctcttcctccgttcgttcgacttgcatgtattaggcacgccgccagcgttcgtcctgagccaggatcaaactctctttaaaatataaattgaatttgaatacttattcaacaccgtgaataagattccttgcgtcaaattgacttcgctagcaattaaattactagtttgtttttgttgaaaacagctttctgttttctgccctgcgattaccagtgagactttacgtctcattgcttttcgtcttcttttttgttcagttttcaaaggtcagtttcttttgctgctaaagcgtttgtccgtatcagcaacgtttataaatataccaagatttttgcctttcgtcaatactttttacaaagttttttaaataaagatgaaaaaagattaatttagtgtataaattgatgttaggacaatgttttttagtcaaaactaaaaggctttatgttgtataaatttgcattcctttttcttcaaattgttctttcaagactggatctatttcttttccagtgatgatagaagatatttcatctagagctgcgtatttgtataaggagatccgaccgaacttggtgtgatctgttactaagattacttcatcggctgagtggagcatttgttgttttgctgggattagatattcatcgtagtgcattaaccctttatcaatatcaagagctggtgtggttacgaaggctttatgtacgtgaatactctgtaaggttccgctcgttatcataccgttaagaatgaatgtttccggataaatgactccacctgtcacgattactttggacggggaaaagcgcattatggaagctacgttaatatcatttgttattacggttaatttggagcggtcttttaacgctgttgcgatatgaccggttgttgttccggcgtctaggatgattgtgtccccgtctttaaccattgttgctgctaatgtagcgatgcgttgtttttcttcatagcgcacttcactacgttttttccagttaggttcagaaactactttttcttctatcataactccgccatgggttctttttagttttttgtctttttcaagtgatgttaaatcgcggcgaatggttgcttcgtgaacttcaaaatgtttagctagttcgctaacggttgctatttttcggcttttgacatattggacaatggcgcgtttacgttcgatagatagcacttcttcccctccttttgtttaactatatggtaactccaatagaaaaaaatcgcaaacaatcaaaaaaccttggagcgattggccccaaggtttggaaatgaaaattaatcgtttaagcgtttttctagttctgcttttttgtcttcgaagcctggtttgccaagtaatgcgaacatgttggctttatatgcttctactcctggttggtcaaatggatttacgccatttaggtaaccactgattgctacagctttttcaaagaagtatactaggtagccgaaagtataggcatctagttctggtacttctacaacaaagtttggaacttcgccgtctgtatgtgctaaaagagttccttcgaatgcttttgtattaacgaaatcaactgtttcaccagcaaggtagtttaagccatctaaatctacttcttctttattgatagttaaattgtggcgtggtttgtccactttgataactgtttcaaaaaggttacgacggccgtcttggatatattgaccgatagaatgtaaatctgtagagaagttagcgctcgatgggtaaattccttttttgtctttaccttcactttcgccgaataattgtttccaccattcgttgaaatattgtaaccctggttcgtagctgattagaagttcagttacttttcctttacgataaagaacattacgagctgctgcatattggtaagcaatgttattttttagctctggtttgtcgaaatctttgcttgctgctgctgctccgttcataagcgcatcaatatctacgccactcactgcgattggaagtaaacctactgcagttaaaacagagaaacgtccaccaacgtcatctggaactacaaatgtttcgtagccttcgttgtcagctaatgtttttagcgcgccttttgctttatcagttgtagcgtaaatgcgttttttcgcgccttcttcgccgtattttttgattagaagttctttgaaaacacggaaagcgattgctggctctgttgttgttccggatttagaaataacgttaacagaaaagtcgcggtcgccaactacttcgattaagtcatgtaagtaagaggaactaatgctatttcctgcaaagaatacttgaggtgttttacgcgcacctttttcaagtacattatagaaggaatgatttaaagtttcgattgctgcacgtgctccaaggtaagaaccaccgataccgataacgattaatacgtcagaatcactgtggattttttctgttgcttttttgatacgagcaaattcttctttgtcgtaatctgttggtaaattaatccaaccaagcgcgtcattaccagcacctgtaccattatgtaatgaatcatgagctgcttttactgctggttcaagataatcaagttcgcgttcttcaaaaaaacggagcgctttggaataatcaaatttaatatgtgtcattgttttccctccaaattttaaaaaagtttctttattaactttatatcaatcaatgctttttagcaaggatagaccttgtgaaatttaagcctttttgaaaaattaggtatagttttcatataagactccctcgcttctgactagttcatttaaagataattggtctataggtaatagatcgtcagcaagtggaattggtatccattttactcgaaagacattgtcgtcgtttgaaaaagtcgccatctcaccaactggttttgctcgaaaaacaaatgtacaaacgtgttcccatgtagcacggcgctctttgcaatgtaaaattgactctatttctatatcaatatttgtttgttcttttactttacttgcgagtgcttcttccatcgtttggtctgtttcgacatgtcctcctggaaaagtccaagctaaattgcggtttctaactattaatatctcatctttcttctcgttgtacacaaatgcttgcacatgaatagatcttttcacgtaaatcccccttttttgactattttatacaaatgaataaattgaaaattactactaactattccctttttctaaaattttagtcaattaaatttatcagcctagcaatttatcccgaaaagggcattataccaagctgatggagatttttatttatctgcttttttaatccattcttctaatttatctcgtaatgtgttgaaaccttcatcatattcaccagatgatacgttttttttcttagctggttgttcttttggtgcttcttcagtcgctctaatagaaagactgattttgtttttttcttcatcaatgtcgagtatttttacttttacctcttggccaacttctagaaaatcatggatatcttttacaaaaccatgtgttatttctgaaatatgaactaagccttgtgtagaattatctagtgctacaaatgcaccgtaactttgaattccggcaattttcccagaaactacttctcccaccttgaatgtactcatcctcattccacctactttcaaccttacaatattttataaattataacacttaggcgaaactttaacaattattctaaatccttgtatggtaagcttttaaggtgaaatttatgctataattgagtcgaattaaagagaaggagcgtgacataattgagtcaatttgatgaagtcattccgcggattggaactaattcagaaaagtgggatggggcagaagaattatttggcagaaaagatattattccaatgtgggtagctgacatggatttccgtgcgccaaagcctgtacttgatgcattccagcgtcaaatcgatcacgggatttttggttattcaacaaaatcagcggcacttgtcgaagctgttattgattggaacaaagagcaacaccaatttgaaattgatccgagcactttgtttttcaacggggctgttgttccaactatttcgctagcaattcgttcgttaaccagtgaaggtgacgctgttctaatggtttcgccgatttatccgccatttttcaacgtaaccaaagctacagaacgaaaagtagttatgtccccgctcatatatgaaaaccaccaatatcgaatggattttaatgatttggaaaaacggatgaaagaagaaaatgtaaaattattccttctatgtaatccgcaaaaccctggtggtcgttgtttcacaaaagaagaactagtggaacttgctaatctgtgtgaaaaataccaaattccgattgtttcagatgaaattcacgctgatttagtgatgaaaaatcataaacatgtaccaatgatggttgctgcgccattttataaagatcaaattatcactttgatggctgctacaaaaacatttaatttagctgctattaaagcttcctactatattattacgaataaagactaccaagcaaaattcgccgcggagcaaaaatatgctacaactaatgggcttaatgtttttgggattgttggtactgaagctgcctacagggatggcgctgcttggttaaacgaactaaaagaatatatttatcgtaattatgaatatgtaaaggatgcaatcgaaaaagaagtaccagaagttggcgtaacggacttagaggcaacttacttgatgtggcttgattgccgcgcgcttcctaaagatgagaaaacgatttacactgatttaatcgaagccggcgttggtgtccaaatgggttctggatttggtcattcaggtaaaggttttgtccgcctcaacattgcttgtccaaaagaaactttagaaaaaggtgtaaaacttctgattcaaggcttaaaaaaatagcttattctgggaaactaagtagcaaatacttagtttctttttttaggaaattgaatatagctttggtatactattctttggaaagtgaaatagtgttcattttccgtttacataaatttaaaggagttggtataaccgatgtttttagggcttcgtgaattagtttattctaagttgcgctatattttagtaacaggcatcatggtcttaattatgttactatcacttattttatctgggctggcaaacgggcttgcttatgataatgcttcatctgtagcagataacggggttccatattatgttctcagcaaagacgcccaagacaaattatctagatctcagttcccagaatctaaactcgctgacgtgaaaaaagatgcgaacgtgaaggatgctgcggttctcggacaatctatgcaaacgttaaaacgggaaagtgacgataaaaagtttagtgtagcacttttcggtattcaaccagatagctttctcgctccaaaaatttctgatggagctaacatacaagtaacaaaacctgacgaaatcgtcgtcgattcttccttgaaatcagacggaatcaaaattggtgatgttttaatggatgatattttaaatagagaattaacggttgtcggctttacagagaatcaaaagtatagccatgctcccgttgtttatattaatatcgcaacttggcaagagattaaccctgttttatatcaccaaaaaatcccgcaaacaagtactattgcgattaaaacagacaaccctgataaaggtgtaacactctcggataaagatttaacgacaatcgatcacaaagagtttttaaatcaaattccaggttattccgcggaacaaatgacgcttaacatgatgattttcttcctaatcattattggtggatttattttaacagcattcttctatgtaatgacgctccaaaaaacaacgcaatttggtattttgaaagcacttggaacgaaaactagttacttagtgaagagcattattactcaagtggtgattatttcgattattagtattttaattagtgtcggtgtgacgctgctgcttccaagtattatgccagcagctatgccgtttagattgagtccaatgacgattgcgctttatagtggcttattcttcttagttgctctatttggtgctcttttatcacttagacgaattgctaaagtagatgcattagatgctattcgaggaggtgatgaataatggaaactctattatcttttgaaaatgtatacaaagattacccgtctggtccttcaattattcatgcactgaaggaaaccaatttcgaagcgaaaaaaggagaattaatcgccatcgttggtccaagtggttctggtaaaagtacgctactttctcttgccggagcgctattaacaccaactggcggaacgatttccataaacggcaagtcagtcggaaacttatcttctaaagaacaaacggctcttcgtttagaagaaattggctttattttccaagctgctcacttagttccttatttacacgtaaaagatcaaatcagctttattggaaaaatggcaggaaaaagcgcggcggaacttgaaaaagatactgcttcccttctaagccaacttggaattagcgatcgcgcaaatttctatccaaaagatttatctggtgggcaaaagcaacgtgtcgctattgcgcgagcacttatcaaccaaccttccgttattttagccgatgaaccaactgcaagtcttgacacagaaagaagtcgtgaagttgtggagctcatccgaaacgaggttgttcaaacgagtcgaactgcgattatggttacacacgatgaacgtatgttagatttagtgaaccatgtgtatcgtatggaagacggaatacttacccaagaaagctaaaaaacctgcgtggcttaactgccacacaggtttttttactgtttatttttggaacccatcaattaaatctaatgcttgaccgagtactttttcaccgttcattgtaccataagctgccatgtcgataacatctactggaattttcccagcagctagctcatcaactgtttttttctgataacgtacttgtggtcctaaaagtactacatctgcatcatcaattaagttacttacttcagcaatggagtatgcttcgatttcgcatgtttctccacgatcttcagctgctttacgcatttttgttactaaaaggcttgttgacatccctgccgcacatactaaaacaatatttttcatcgtaatctttcctttcagattaaggctgctttttttgtacactcttattataactacctttagctttttaaacaagtaaactactggtgccaagataaaattattaaaaatgcgaaaaaacattgcgatttcacgtaaaaagagcgataatagacaataactttatccgaaagctcagaaaatttcgcatcatccaaatacaacagtttcgggagataaaaattcagatcaggagtgtgttgcatgaaagtaattaaatttggcggaagctctttagcatcagggattcaattaaataaggttttccaacttgtagcggaggattctgaacgaaagatcgtcgttgtttctgcacctggaaagcgtttcaaggacgatacaaaagtgaccgatttacttattgattgtgcggcaaaagcacttctaggcgaagatacgagtgaactatttgaagccgtcattgcgagatatgctggcattgcccttgatacaggaatggatgacgcgattatcacacaaattcgcgccgacttacaaaagactatttcgtctgataaaagcgatcctgataaatttttagatcgaatgaaggctagtggagaagacaataatgcgaaattaatcgctgcttattttaaattcaaaggcttaaacgccaactatgttaatccaaaagatgctggattatttgtgacggatgaacatgctagtgcccaagttcttcctgagtcttatgaccgtttatttgcgcttcgagagcgagaaggtatcattgtttttccaggatttttcggttatacgaaagacggtgaaatcagtacattttctcgaagtggctctgatattactggagcgattgtcgcaaacggggctcaagctgagttatacgagaactttactgatgttgatgcagtgtatgcggtcaatcccgctattgtgaaaaatccgaagaaagttcttgaactgacttaccgggaaatgcgcgaactttcttatgcaggcttttctgtttttcatgatgaagcactgattccggcgttccatgcgggtattcctgtgcatattaaaaatacgaacaatcctgattcttgtggtacacgtgtcgttcatgaacgcgaaaacaataatggtcctgtcgttggtattgctagtgatgatggcttttgtagcatttatattagtaaatatttgatgaaccgcgaaattggcttcggacggaaagtgctgcaaattctggaagatgctggattgaattatgaacatatgccgtctgggattgatgatttaacgattattattcgtgaaaatcagtttggtgaggacacagagcggacgattatgacgcggttaaaagaagaattaaatgccgatcaagtgattatgcaacatggtatctccctgattatggtcgttggtgaagctatgcgccataatgttggaataacctcgcgtgcttcgaaagctttatctgacgcgaaagtgaatattgaaatgattaatcaaggttcttctgaagtaagtattatgtttggtgtgaaggaagaacaggaaaatacggccgttcgcgcactatacaatgaattcttttcagaagtcttagtctaaaaaaacaagtttttcatcctgattgatgagaaacttgttttttgttatttatttgcttcttctaattggtggtctttggcgattatatcaataatataatcataagtactaacgcggtaatgcttaaaatcttgaacgttataatcatttcttattttcactcgttcatggattaaattagactgctcgattatttcaaaattgctctgacttgttaaccaactcgtactccatttgcttttttcgtaggtgtcgagttcggtggatgagtggaaaataaacccgttaaaaatcatatttaggagtatgctttcttcttcaaggtcaacttctatggatagtgtgagttgattaggagtttggtgtaagctgataagccaagttttgtctcgaccgtagattagttgattgttgatttttattggagatgaaatttctatatttttcacgactcctatctgtaattattctaccgcattctaaaaagagcactttctatgaaagtgctcttcattcattatttaatattaatcttctcaatcacaacgtcattcactggtttgtcttgcatgccagttggtaggttggcgatttcgtctactacgtccatgccttcgattacgtgaccgaaaactgtgtggcggccgtctaaccatggtgttccgccttgtttgtaagcttcgataatttctactgggaagccagcttgttccatttggccaagcatgtcagcaggcatatctggtttttgaacgatgaagaattggctgccgtttgtgtttggaccagcgtttgccattgatagagctccgcgtaagttgaaagcttctgtagagaattcatcttcaaaagattcgccccaaatactttcgccaccagtaccgcggccgtctgggtcgccaccttggatcatgaattcaggaataacacggtggaaaataagaccatcatagtagccgtttttggaatgtgtaacaaagttttctactgtttttggtgcaatttcagggaacagtttgatgcggatagttcctcggtttgtaatcatttctgcttcgatttcattaggtgccacttcttttgataattgtgggtaagtcatattgtaaaaactccttcttttgtttaaatttattgtttactaacgtagccaaataataagcaaattaacaacgacagcaatcagatacagtactagtataacagctgaaacccaaataacaatttttttaaccaaaaatgcacatccttcactttatttttcattcactatcttttattctataatgaaaaggacagttttaacaataatacgaatagagatgattcttttatgacaactcgaacacggaatttatacatcttaatgctggccaacctgctgatgtcagccagtatgacaatgattatgccctttttatctctttacattgaaacatttggcgattatagcaatgcctacgtccaaaggtgggccggttatatttttggcgtgacatttttagttgcgtttatcttttcgccgatttggggtcgtattggtgataagcacggttataaagggattttgattctgacttcgtttggtttatcagtttgtatttttttgatgggatttgcgcattctgtcacctatttactgatattgcggattttcatgggggttgtaactggctttattggcgttagtaatgcctttattgcaaggcaaactcctcgtaatgaagctgggaaaattctcggtactttgcaacttggaggcgtgactgggatgctgtttggtcccttgattggtggggcgatggcggatttatttggctttaaagatacctttacgattaccgggattgcgatgatggttgcggctttaattgtcgcttttggtgtgaaagaaatccgtactgaagaacaaaaagaagctgccaaagtcgtttattctcgtcgtgcagttttaaaacaaatttttacgctacgagttctattcacggtgatggttattactgcactcatccaaattgcgaactttagtgttcaaccgttgcttgcgctttatgtcggagatatgacgcaatcagacaatattgctttcttgtcagggttggcgttttctgcgacgggattcgggaacttggtgatgacgcgaaaatggggacagcttggagacaaatatgggtatgagaaaatactaaatatcttgttgattatggcggctgtttttgttattccacaggcattcgcgacgaatctttgggtgtttatcttcttccgctttttattcgggattgcgattggtggtatggtgccatgtacgacagcttatattcggcttgcggcgcctggtgttatgcaaggcgaaatgcttggctataatcaaagtgctcgctttttaggaaatgttatcggaccaatcctcggtgggacgctcgctggtttcacaggaattccgagtgtgttcttatttatgagttttatgttcctcgtggcatttttcattttgctttatgcgttacgttccgaccgaatacggcatgtgaacgtagattgagtttgacaaacctaagttttttcttaggtttgtttttttgttcttcctatttaattgttttttaacattgcgtaaattgatttataaagttaagtttcctgcctttttttcagataaaaaagtatgttataataaaaaatataaaaagtacggcgtttatttgggtacttcgtgaatagtaaggttgttgaaatttgatgagttagcgcaattttttaaaatgttagttagagctatgtttcattaaatgtaagtacttgcttaaaaaataatgatttcctgttcttattttcacatttccaggatgagtttccgtataaaaattcttcgaggaggagccgatattgtcatttcttcatctagcaattgttctgccatttattgtggcactgctaattccacttttttaccggtggactaaacaagttcatactggctggttagtacttccgattccagtgattttgtttatttacttcttaacatttattcccaaaacgatggacgggacaacgattgtttcaatgccttggattccgcaacttgggattaattttacagtagtagtagatgggctaagtttactgtttgcgctacttattactggaattggttcactcgttacattttactctatttattatttagggaaaaagaaagaacgacttagcaatttctatacatttttatttatttttatgacggcaatgcttggggttgtcctaagtgataacttgattgtcctctatcttttctgggaattaacttcgattagttcgttcttattgattgggtactggtatcatcgtgagcgttcaaggtacggtgctcgtaaatcgatgatgattacagtcttcggtggactaatgatgctcggcgggtttattttgcttcatattatgagcgattcttactccattcgcgagattattagtaacgcggacgtgatcagtaataatagtttattcattcccgcaatgattcttgtattgctcggggcatttacgaaatctgcgcaagtaccatttcatatttggctacctgacgcaatggaagcacctactccggtcagtgcctacctccactctgcaacgatggtcaaagctgggatttatattgtcgctcggttaacgccgctattcgcaagttcgggtgtatggttttggacggtatcactcgttgggattacgacgcttttctggggttcactaaatgccacaaagaaaaacgatttaaaagcgattttggcttactcgacaattagtcaacttggacttattatgtcacttctgggtgttggagcggcctcgcttcattttgacacgctaagtgatgatatttatgtgatggcgattgtagcggctgtcttccacttgtttaatcatgcgacatttaaaggaagcttgtttatgatggttgggattgtcgatcacgaaaccggcacgcgggatattagacggcttggcggattaatgcgaattatgcctattacagcaacgattgcatttatcggaacatttgcgatggctggtattccaccatttaacggatttctaagtaaagaaatgttttttgaaagcatggtaaatattacgcaattgcaattgtttgacgcaagtacttggggcgttctgcttcctgttgttgcttgggttgctagcgtatttacatttgtgtatagcatgattatcttctttaaaacatttactggaaaactgaagccatacttacttccgaaaaagccacatgaagctccgtttggactactgttgccaccaattattttatcaatttttgtggtagggattgggcttttccctaatttaattgcagagccgattttggaacctgctgtaagagcgattgttccaggacttgctactgatttttccattcatattggtttatggcacggatttacaccagctttattgatgactttcggggttgtcgctgttggtattggcttgttccttacacataaatactggaagccttggattactactcgagttccaaaagcacttcgaattggcaaaacatatgataatgggatgtattatttagaacaaggttcgtatcggatgacgatgtttattatgactggttggctacgaacttacttaaactatatgttatcggcctttattttaatgatggcttcggtaatgattttcacgaatgcacttgatttcaacttttcgagtatgacgaaagtaacggttgttgattttgtattagctgctgttattttagtgactttggttgggattgtcttttccaagtcgcgtattacttcgattattttacttggagcgatgggttatacaattagtattttctttgttatttcaagagctcctgaccttgctttgacacagcttattattgaaactatttccgttgtgctttatctacttgtgttctatcaccttcctcagtttagtaatattgaggaaaagccgaaatggttttcaatgaagacgatattgagtatcggggttggtgtgattattacactggtttccctttcagcgtataatacgactttttatgactcaatttcaaaatactatgtcgataatgcttacgtggaagcggcgggacgaaatattgttaatgttatcttggttgatttccgtggttttgatacgatgttcgaaaccgctgttctgtcaattgccgcgattggtatttacgcgatgattaaattacgactgacgaaacgaggtgagaatgatgaaaacgaatgacgttctactgagaaatgtaacaaaagttgttgctttcattattttcttattctcgcttcacctcttcttcgcagggcattataatccaggtggcggatttgtggccgggcttacaacagctggcgcaattacgttaacattacttgcttatgatacaaaaacagtcgctagtatgcttaatatcaatacgattatgctcactggtgtcggtcttgtttttgctctaggtacaggaatgattgggattttcacgggtgaccctttcttaacacataagtttggtcatgttgatttgcccattttaggagatactgcgttacacacggcgactttgtttgaccttggcgtttacttagttgttgtcggtgtaacacttacgataattcaaacgattggggagagtgactgatggaactattaatgtctatattaatcggcttgatttttgcagctgctgtctacttaattctctctaaaagtttgttacgaattatcattggaacagctgtcctaagtcatggcgtcaatttacttgtactaacgatgggtggactgaaaaaaggtcgcgtaccgattcttggtacaccgggatctggaacatacaatgatccccttccacaagcacttattttaactgcgattgttataagctttggtgtaactgcctttttccttgttcttgcttatagagcgtatcaggagcttgatagcgagagtgtatccaagacgagaggacatgaagccgatgatgaataatataattttaatgccgattttgatacctttccttggagcaattacgttaatgctactgccaaaacgggtcatcgttcaacgagttttcgccctaatatttagtggtattctggttgtggcaacacttggacttgtgttttacattcgagaaaatggtatcacaactgtgaatattggtaactggtctgctccttttgggattacgatggttggcgatatgcttgcgattttacttacggcaacgactagtattatccttttctgcgtgatattttattccttttatacgattgggaaaccgcgtgagaaatttctttattacccagcgattctctttatgattgttggggtgaatggttcgtttttaactggtgatattttcaatatgtttgtattctttgaagttatgttgatggcatcttatgtacttcttgtcattggtgggacccaagttcaactgaaagcaacgattaaatatttactgataaatgtggttggttctggatttttcgttgtagcgattgcactgctttattcgatgattggaacactcaacatggcagatatttcacaaaaaattacggacttaaatggtgccaatacgggaatgataagcgttgtcgcagttttattcttgtttgtattcggactaaaagcaggactcttcccgctttatttctggcttccgggctcttactttgctccaccaatcccagttctcgctttatttggcgggcttctgacaaaggttggggtttacgcaattattcgaacgtatacactatttttcagttcactaactgactttgttgttccgctacttggaatactcgcgattgtgacgattatccttggcgttataggggcaattagttattatgatatgaaaacaattgtgatttacaatattatgattgcgattggcgtaatactatttagtgtttcgattatgacacgcgaatcgatgactggtgccgtattttacttgattcacgatatgataatcaaagccgcactcttcctcattgttgggattgtgatggcgattactggttactctagcgtgaaaaaattcagtggcttaatgagcgtgaagccgtcacttggttggattttctttattgccacattaggcctttcagggattccacctcttagcggatttatcggaaaacttttgatagtcgaaggagctttctcagctggtcaaattgttggcgggatactcattttattatcaagtttattcgtccttatgtctttaatcaaagtctttacaagaggtttttggggtgagaaaaaaggcgtattcaatctacaaattccgtataaaaaaatgctcgtacctgtagttattctacttgcgatttctattggttatggcgtgtttagtaacgcaatctatccgtttattgaacaggcggttgacccacttgttgacccttctgtttatatcgatgcggtgataaaggagtgataaaagatggcttttcaacttattcttaatataatacttgcttgtttgtggatgtttcttgagtcatcatttagttttgcgacatttatcattggctttattatcgggatatttttgcttttatttatgcgacgctttcttgggtcaagattttaccttttccggttatttgccctcgttaaactagttttccgtttcttgcatgatttaatagtttcgacggttcatgtaagtcgaattgttttgaagaaagatatgaacattcgtccagggattttcagatacgatacaacacttgaaactgactgggaagtaactatgctcgcgttattaattacattgacccctggtacactttcgattgatatttcggatgattataaagcaatctatgttcattcgcttcacgttccgaatatcgaagaagaaattgcaacgattcgtaaatcttatgaaggtgcgattatggaggtgttccacggatgattattcaaatagctttatccattggtttacttctttattcgatttctaccttcttatatctttaccgtattttaaaaggaccaactacttctgataaagtcgtggcgcttgattctattggcatgaatttagtggcaattgttgccctcctttcaatgttttatgacacccatgcctttttagatgttatattacttattgcgctccttgcctttattgggacggtttcctttgccaaatttattgagaaagggaaggtgattgaccgtgaacgtgataattgagattattatttctattatgattttaattggtggcttgcttagtattctggcggcaattggtgttatcagactaccggatgtttatacaagaacacatgctgctgggattagtaatacatttggcgttagcttgcttctttttgcaacggttggttattttttccactcaggtgaaggttttaatgcgcgagtgcttctggcagtgctgtttattttcttaacgactccagtagcctcccaccttattaaccgggccgcttatgatactggtgtgccgctagcaattcgaattcgtgaccaattgcgttcggtgaaaaaagacgacatcaagaagaagaaaagccttattattcgccaagaacaaattgaaaaagcacgacaagaacgagaagaattggaagaacgaatggaatgggaacgacgcgaagaaaaaatcgatgagcgtgaagatcaagaagagcaagaacgcgaacgcgaggaacaaacgattgaggaacagtcggatgattccgagcatgaaatcatcgaacaagatgaaagtgaaactgattcagacgaagatgaatcagagaaataaaataagcatggcgagagttcatcaattgacctctgccatgctttttattttcgtttctttttaactgctatagtacatctgctaatacaaattagtttttccgtttcgtcagtgattttaatttcccagacttgggtacttctgccaaggtggattgcttccgcggttgctgtcactaatccttcttgttttgaagcgaggtggttggcgttaatttctaaaccaaagacgatttcatcaggttcaattgatttcgcagcaccaatactcgcagcatgttctgccaaaacaacagaaactccgccatgcaaatagccaaatggttgatgaactttttctgttacttctaactgaacgactgcttttcctttttctactgaaacaatttcaatgccaatagtttcttggagtcccatatgttcccttctttccgaatttgatttatactttattatataagagttagaagaaaaattctagaaaaggtttttaataagctcattgtggtaaaataagaatagactttttgacaggagagatttgatgtcgatatttacgaatacaccattaattgcatctattattgcgatagtgtttgcccaggtggtaaaagtgccgattcatatattagtttaccggaagtttaacctcggactaatgttttccactggtggtatgcctagctctcactcggctgcggttactgcactaatgacaacactcgcaattgaatacgggctagattcaccttatttcgcgattgctgttgtatttggtattatcgtgatgttcgatgcgactggcgttagaagacaagccggtgaacaagcagttattttaaacaaattagtaacagatttccaagacttcgtggagcatgcaaaagggcttgcggcacctgaacaagaagaaaaaacgaagcatttaaaagaattactcggccataaaccaatggaagttttctttggggctttgaccgggattgcgattggatttattttagaaatatttatgtaaataaaaagctgactcattgtagtcagctttttttcatgagcaatcccagttatacataatgttagaaaagtctcgattgattaaatcttgtttattaatgaagaagttcgcaacaccgcagtcgccccacataatcgccattctgttatcgtcaaaatcttcggaagctaattggaataaaagcgtgtcgtgatggggattttctgcatacatacgcggatcttcttgtgtgaagaacggatacccgccgagctggctgccttcgtttgctagattgtataactgatcagctttatcttcctcatcagcaaaaatttgatcagctaactcataaaaattattcccaaattcattttcaaaatcaaagctatcttgtagcaaaatttgatccgatacttgaccagtcattttaaattctccattcacaactggataaaaatctgttttcgctacatcttcaaaaaacgcatcttgttcttctttggacaggctctcgctccctaagtcatcaaagaaaaacacccgaaaaccttcctggctcgtaggattttcaaaattaagtccgtataaatcatcttgataatccacataaaaagcaagcaagccaaattctggataattttccatttgcggcatttctgaaaaattaatttgcgctaataacgaaagcggcttaccttcttccgtcaccggatagccttgttctttcggcaaataaccgcgaccaccagctttactttgtaacaaggaaagtgtacccgcatctttaaaatgcaactctatccgctctttttctgtttccaaaaagcgttcggcccattcacttggaagtatatcaaaaagttgttccattatttaccttctttcttttttgtaacgtgcttctttaacaatcccagttaaaaataacattggaaaaatcccgattaattaaatcctgtttattaataaagaagttgccgactccactcatgccccacatgatatttatttgggcacctggctcttcactgtactcactatctaattgaaacagcaatgtgtcgtgatacgaattttctgtacgcattcgcggatcttcttgggtgaagaacggaaaaccaccaatttgactactatatgttgcaaggtcaaatagctcattcgctttgtcttcatcatcaccaaaaatttgctccatgatgtcataaaaaccactgccaaattctttctcaaactctagaatatcattcatcaaaagctctttcgttactcgaccagcaagtttatactcccctttgaccacagtataaagggctgatttatcaataccttcaaaataaacagcttgttcttctgcagtcatgctctctctgtctatattctcaaagaaaaacacccgaaaaccattttgttctgtctgatcatcaaaattaagaccgtataagtcatcatgataatcaacataaaaagcaagtattcctgattttggataattctcgatttgcggcatttccgcaaaatttatttgcgctaaaaagaaaagtggttctcctccttcattcactggataaccttgttctttcggcaaatatcctctcccaccaaccttactttctattaaagaaatcacgtcttcatttgtaaagcttaactcaatacgttctttcattgtttttgaaaatttttctgcccactcactaggaagtatctcaaaaagttgtttcatggacttacctactttcatttttccttcattataacataacaaaaaagcaatatctgcactaacagatattgcttttagaagtcttatttataaaatttaaacttacctttactagcaagaacgcctgaaccaccaataagtagtagcgcgcggtcatcaatgacttttttcataacggaagctgggtagcctttcaggtttttgccgaaaacaacaccgattgcgtcgttatcacctagtgagcaaactgttcctttttcatgataaacaaagtcttgtagatctgtttcgcctttaactaatttagctaagttcactgcagccacatctgcttgttgcattgcaatttgagcagttggcgggaatggacggtcgtttgcagggttgatgattagtgagcagtcaccaacaattaaaatttcttcattaccaggaacggttaaattgttgtttactttcacacgaccacgacctgcttcaaaaccagacgcttcaataacactgttaccacgaactccggctgcccaaataattgtcgctgctttaatttcgcgtacttctgtttcactttccgcatatttaacaccgtcagctgtagcttctttgacaggtttaccaacatggaattctacgccgcgatcttccagtacaccaacaccataatcaacgagtttcgcatcaaattgtggtaatacttttggagctgcttccatacaataaatgcgcactttttcgcgaggcacatcgtactctttcactagttctggaatgcgattagttaattccccaagaaactcaattccagtaaagccagcgccaccaacgataattgttaataattcatcgcgtggatctgttttccatttagcaaattgcgcttcaatgtgcgcacggatttttttaacggattctacacttgtaatagtgaaggcatattctttcaaaccactgattccaaatgtttctgcttctgacccaagtccaattaataaatagtcatagctgatatcgccatttgcatctagtgtgactgttttttcgtctttattaatttttactacagtatcttggataaatgtagttttcgtattgtttacgactttatcaagtggatacattagtttttctggctcaattgttccagctgctgcttcatgtaaccaagtcgtttcgtggtggtagtcattcttattcactagaacgatttcggcatccaagtttctttgttgtaacttacgtaaagtttttagtcccccgtatcctgctccgagaatgacaatttttggtttactcatctgttatcacatctactttcccttatatttttcttcacaaaaaaaattgcattaagaatttcttactgcacctatgtagattgcgctaaaaatctactgcaaccagtgaaaaaagcggaactggtaagtaccaattatattccctctttcacagcttacaaactatatcatagactttttaacttgcattttcaaggaagggaactcaagggtttatgcttcttagcggtaaggttagagtggtatatgatttttttcacaataaacctctgagatgacttggttttcgtaaaaatcttttatttgagtggtaattggtctagttcatttttccagattttttaataccccaatcccgtaaacattctttttcaaaaatatatgctaaaatatgcttattgcaactttagctatttcatagggaaattaggaactagggggtgatgtattttggatgaaaaaacaaaaatttatgatatcacgatcattggtggcggaccggttgggctatttgctgctttttatgccggaatgcgcaatgcgagtgtgaaaataatagaaagtttaccgcaattaggtggacaactttcaacgctttatcctgagaagtatatttatgacattccaggctatccttctgttcgcgcacaggaactcgttaataatttaatacaacaaatgaaaccatttgatccgacagttgcgcttgaagaagcagttcaaagcgttgaaaagcaagtcgatggcacatttgaaatcatcacgaagaaagatacacactatagtaaagcaatcattattactgctggtaacggagcatttgaaccaagacgtttagatcttccggaagctgaacaatatgaaggaaaaaatattcattatttcattaatgatcttagtcgtttttccggtcgtcgcgttgctgtttgtggcggcggagattctgcggttgactgggcgctaatgcttgaaaaagtggcaagctctgtttcaatcgttcatagacgtaacgcttttcgcgcgcacgaacatagcgttaacaatttagaaaagtcatccattgcgattaaaactccattcattccaacagaagttcttggtaacggcgataaattaacacatattacgcttcaagaagtcaaaggtgatactacagaaacgttggaaattgacgatttcattattaactacggtttcgtttcctcgctcggacctattaaaaattggggcttagagctagaacgtaattcaatcatcgtcaattccaaaatggaaacaaatatcccagggatttactgtgctggtgacatttgtacttatgatggtaaagtaaaactaattgcgacaggatttggtgaagcgccgactgccgtaaataacgcaatgaatttcattgatccaaaaacccgagtgcaaccaatgcattccacatctttattcgaataataactgaaaccacgaggcgacttgtggttttattttttactcaccgggaaaagttctttgtagatattttttaggaggagattagcaatgaatgtactcgtaattggcgcaaatggcaaaatcggccgtcttttagtagaaaaactcgccatggaaaaaggctttttcgtccgagcaatggttagaaaagcagaacaagtaagtgaacttgaaaaacttggcgcaaaaccaataattgccgatttaaaaaaagatttccactatgcctatgatgaaattgaagcggttatttttacagctggctcaggtggtcatacgcctgcatcagaaacaattaatattgaccaaaacggcgccattaaagcaatcgaaactgccaaagaaaaaggtgtacgtcgttttatcattgttagctcttacggcgcagatgacccagaaagcggtcctgaatctctcgtccactatttaaaagcaaaaaaagccgccgatgacgaactcaaacgaagcggtctagattacaccattgtgcgaccagtcggcctttcagacgatccggctacaggtaaaatctcagaagtctcaggaaaacctaaaacaaacattcctcgcgcagatgttgcaaactttattagtgaggctttaactgagaaatccagctactataaaacctatactatcgaaagcggcgaaacaccaatcagccaattttttgattaataaaaagcgatgagccagattacgcgctcatcgcttttttctatattaaaacggattttcttccaaaaatgtatatatattcgcaaccaattcctccgctgtttctccgcgaaccacttctccgtccactagagcaaacaaacttgtcgcgcataaatcacaatatgtcagacaatcatattcaatcacgtctaaactatcatccgcatctaatttcgcaaacgccgcatcagccccgctcgccaaattattaacgcaaaattccacaatcggattcatttccacttgcctcctagactgttacatcgttgccaagtaaccacggtcggtcattacttgataaatatctttcaaccgaggattgccttccgcgataatttcaccgtcaaccacaatgactggatacatataatcttcatcaacaatcttattcgccatatctgctaaagccgcttcatttggcggattaaaaatatctacatattccactacaaaaggctgtccagaaaacttccgaccaatcgcagctcgaagccattcctctgtttctttcgaggacggtgctccgacacaactcgcacaaatagtcgttgaaccatatacatataatttcgcttcatttaccatcatgcttcacctcactatcattgtacaaaaacctaccccaaaaagcgactaagctgtctcatttagcataactattaaactttatgaatttttataaagatatgaattgacacaaatttctagatatattataatatttccaatacattgcaaatctttaaagcagtagtgtattagcatgataaaccatctataggttgtacccgtgatttcacggtcaacatataagtaacactccctttaacaattgggcgcgcaacccaattgtctttcaaccttaccagttgaaagagcacgttcctttctgagccttaggaacgtgtttttgtttggatcgttcgaagcaaagcgagttacgagccaaatatgcatgcgagcaaagcgagcatgtaatccttccagtaaagtgcgccctccacacaaaaacttccctcccatcaaaatccatccaccatcaatctaaaaccctccatcccattcggcccgttcgaagcaaagcgaattacggccaaatatgcatacgagcaaagcaagcatgtaatccttccagtaaagcgctccctccaaacaaaaagccccacccatcaaaatccatccaccatcaacctgaaatcctccatcccattcgacccattcaaagcaaaccaaatccccccaaaacaaacacacactcaccctcccccaaaccccagccaaaaaactaaccattcaatatttttagaaaaatttaaaacctaacaactaatttatatgttatatatatccaaaaaccctcctcccacaccaaccaacaagcgaaaccctttctcccacctacatccccgccctaaaaaacaaatatgtccaattaatgaagctcactctactttcaataaatttcttttagaaaacccatgatttatgaagagccctcatggtattataactttgctttgaagtgtattcgattgaaaccactagattctcgactaattttgttgctgaaatagtcagttttaacgaataactaattacgaatacattccaaaaaacaaggaggaaattagacatatgcaaaaagcaatcaaaataatgttagctttatttttaatcacaaccgcatttttaccttttagtaatgtacggggagcatcaactgatgtagtaaatatcccagatccgtatttaaaagaaggtcttaaaaccatcgtaggtaatccgttattagacgaattgactgaagcacaccttgagacgattagtacagcggatatttcctatatgttcggttcatctggatatgctgtcactggattagttagagatttaactggactcgaaaaagcggtcaatatgaccaaactatatttttcaaaccaaacagaaatcactaatttaaatcagattaagaatttacctaagctgaaaaaaatcgttggtattactactggattaaatgatattaaagctcttggcgaaatgccagcgctcgaagaagtagaactaggcggggattatattactgatttcactcccttacttgaaaaagaaaacttaaaatcattttcttataattcgtatgcttggttagatccagcatatcaccaaatcgataatgaagaatttacaaaatttgcaaaccttaaatcactcgaaactttagatgtaacttggaataatatttctgatttagcagcattaactgcagatgatcatattacacacttaaatctaagttacaacaagttcactaatgtagctccaattgctacgatgaaaaaacttaaagtcctttatttaaacaataacaacctaacttccattgattctttaaatacacttagaggattatctattgcttacgctgataataatagcattactgacttaagtaagttaaaagacttttttgaaggcatggcagtcgttggtgattataaaggtttacaagttaacaaccaaactatcacacttccaactattaatattaaagaaggggcaacagctatttcaaacaaccctactttggatattgatggagaaaaaatgcctgtttctagtatttctgacgctggaacggtatcagctgataataaaacagtctctttctcaaacttaccaattggaactaagactgtgacttacaacgcgacattcacagctacttccgctaaaggagtaccgcttagttactccattaaagtatcacaaccaattaaggtatctgaaaaaacaaattcagctgtaaacgtattttataaagatgaaaatggcgatgaattagctccaagtgaaacaatttctggtaaatccggagaaaattaccaaacaacagaaaaaacaattactaactacaaactaaaagaaatcgaaggccaagcttccggacaatttggcgacagcgatacaacagtcacttatgtttacgaaaaagcagatggcgctcctgttaccgttaaatacgttgatggtgatggcaacgaacttgctacttccgacacgctgaatggcaaaatcgacgctccttaccaatcgacagccaaaagcatcacaggctgggcagttaaaactacacctgccaacgctaatggcgtatttacaaatgctaaccaaactgtcacttatgtttacgaaaaagcagacggcgctcctgttaacgttaaatatgtcgatgaagacggcaacgagcttgctacttccgacacactgaatggcaaaatcgacgctccttatcaatctacagccaaaagcatcacaggttgggcagttaaaactacacctgccaacgctaatggcgtattcacaaacgctaaccaaactgtcacttatgtttatgaaaaagcagacggcgctcctgttaccgttaaatatgtcgatgaagacggcaacgagcttgctacttccgacacactgaatggcaaaattgacgcaccttatcaatcgacagccaaaagcatcacaggttggacagttaaaactacacctgcaaacgctaatggtgtattcacgaacgataaccaaactgtcacttatgtttacgaaaaagcaagcggcgctcccgttaccgttaaatacgtcgatgaagacggcaacgaattagctactcctgacacgctgaacggcaaaatcgatgctccttaccaatcgacagccaaaagtctttctggttgggcagttaaaactacgcctgccaacgctacaggagtattcacagacactaaccaaactgtcacttatgtttacgaaagagtagatggcgctcctgttaccgttaagtacgtcgatggcgatggcaatgaacttgctactccagacacactgaacggcaaaattgacgctccttaccaatcgacagccaaaagcatcacaggttggacagttaaaactactccagccaacgctacaggagtattcacagacactaaccaaactgtcacttacgtttacgaaaaagcagatggcgctcctgtcactgttaaatacgtcgatggtgatggcaacgaactcgctactcctgacacactgaacggtaagctagatacttcttacgcggcaacagctaaaaatttgagcggttggaagttaaccgctacaccagccaatgccacaggtgtatttacaacagatgctcaaacagtcacctttgtatatgctaaacaagaagatgatcctaaaaaagaagataaaacaccaagtaatacacaaccagataaagacaaaacaactattaaaatcaatgaaaacaaaccaaacacaagcaaaccaaccacaatcaaaaaacaaacaaaattaccgaaaaccggcgataatcaacaagaaagtatattgttcggattaattggtacatgtttcgttctcttaggaatttactcggtttctaagaaaaacagctaaaacaaacaactaaaactctcttatccagctgataagagagtttttatttggaaattactccaaagtacactactttccccctcggaaaaacccaatttaatttctttaattttttccgtatcctgttataatagagaatatgatagtgcctcgcgaaaggagaactatatcctatggaagaaattagttatgccgaagttgataaagctttaaaaaagttccgaccgtttttagttcgtgatggcggggactatgagcttgtggaagtgaccccagacggcattgtaaaaatcaaattacttggtgcatgcgaaacttgtccaagttctgatatgactttaaaaatgggaatcgaattgactttagcagagaaaattatcggatttaaagaagtcgttcaagtattttaagaactactattttagcgaccaaaataagcggtcgctatttttgtataaatatgtttagaaatcctgtaaacgtctatcatacaatatacatacagttagaaggaggtaaggacaatggtagaaaaacaaagcgccctagaagctaaagctcggagttggctgattgaacgtggcgtagaaatagatgacatcgcagaattggtattatttttacaacaaaagtatcatcccggattagaattagaaatatgccgtcaaaatgtagagcacgtgcttcgtaaacgcgaagttcaaaatgctgttttaacgggcatccagcttgatgtcatggccgaaaaaggtgaactcgtccaaccgctacaaaacattattagcgctgatgaggggctttatggcgtagatgagatattagcactttctattgttaacgtatatggttcgattggttttacaaattatggttatatcgataaagtaaaacctggtattttggcaaaactaaacgaacatgatggcattgctgttcacacgtttctggatgatattgtgggagctatcgcagctgctgcagcaagtcgtcttgcccatagttaccatgatgatattgttaattaaacaaaaaccagtaaaactagaggtcattcctccgtttttactggtttttctttgccacgttttacttccacttgcctgattgagtttttattcatcgaacgaacgataaaccgataaccttcatgttcaatctcgtcccctgtttctaagtcaaagcgttcgagcagcatccaacctgatagcgtatggacacccggactttcaatcggaacgccaattgcttcctctacttccaaaagcggctccgatccctctataatgaaatgatttaatgccaccttacgtattcctttaggtccttttgcttcttccatatcgccgacaatcacttccatgacatcttcaagagtcacaatacctgaagtcccgccatattcgtctgttaaaacgacaaatggttcgctttcttgttgcatttttacgagtaattcttctaaaaccatcccttcaaacacttctaaaactggcgatataaagggtttgattgattgttctacaatggcttcatcttttccaagaccggccatgactgcactgacacgtaacatgccaataatatgatctttgtcttcatcttcggttactggaaaaatatgatatgtatgctcggaagttagtttaagcaaatctcgtactgtcgctgtttggtcaatggcaatcatcgacatccgcggaatcatgacttcttttgccggcacatccccaagcttgaaaatatttttcatataacgaaattcttgtggatttaaaagaccttgccggtagctatcttcaaaaataattttgagctcagtcggtgtcatttgatccgcatcatcagtacgtttcacaccaaacatccgcgtaattaaatttgccgagttatttaaaagccaattgagcggaaaagttaggcgataccaataaactagcgggcgcgcgatgaataatgctactttttcggtactttgaatggtgaatgttttcggggctagttccccaagtaccacatttaaaaaggtaattaaaatgaacgatacaaaaatcgaaatcggtttttccagtgattcgggtagtggcagcattaaaaaaagtggttctagccaaccgcgcattgttgcttcaccgacccaccccatcgcaagtgctgcgagtgtgtttcctagctgacaagcagccaaataatcattcatattggaagttacttttttaacgtatttcgctcgtgggttatctgaggcaagtagttgtaggacagtaggttttcgaattgcaacaatggcaaattcactcgctacaaaaaaagcagtcgctgcaattaaaaatacgacaaaaaaatcattaaatacgtccattcccagtcctccttatccccattctataccctttttcatcgtttaaaccacaagtcagcaactgcctcaccatcaataatttcgcccgttttctcaaacccatatttcgcataaaatttctctgccacatggttatctggttcgtaagataagcggagtcttgcaggtttttctggcaaatttttcaccatttcgatgatttgctccaaagcatccccgccgtagcctttaccttggtgctcttttccagtcataaaacgtactagccaaaattcgccgtcatccgtatccattccgtacattgcatatccaactggcatattgtcggcataaatgacaatagaatgatacgtttcttcaaaacttgcttcgataatcgagtaccaattttctgctacaaatgttttctggtgaggatggacttgtaatttagccgtttcatgaaaattatctttcgttagcttttgtattgagaccatttttctaacctcctaattattaaaaaaagagcagaaaaaatccgctcttctagttaaatttccaatcagttagcttcgttacagcatatgttggctgaatctctttggttgttagtgcctcttttgaagtgaaaccagtatgaacgattaaagtatccataccgtagttgattcccgccataatatctgtttcgtagttatcgccaaccataattgcttcgtctttttgaacaccgagttttgcgagtgcttgctccataataattgattccggttttccgataaaaacaggcgtcgtttctgtcgcgacagaaacaaccgatgtaatcgaaccatttcccggaagcaaaccgcgttcagttgggattgccgcatcgccatttgtggagataaacattgcgccacctcgaaccgcaagagctgccttagcaaatttttcgtaatctacttctcggtcaagtccaacaacaacaaaagctgggttactagaagttatttcaaatccattatcagttagttcttgttttattccacgttcaccgataacataaaccgatttctcacgtttttgttcaagcataaattgcacagttgcttgtgaagttgtaaagacgtcacccgattccgcttgaatgcccatgccagttaaatgttcggctacttgatctggtgtctttgtagaattattagttacaaataaatacggaattcccgcacgttttaaattttcgataaaaatgattgcttcgggaataacttctgctccgcgatacattgtgccgtctaaatcaattaaatacgctttataattcttcaattccaaattacctcatttactattttacttttttaataacaaaataagcacagccaaagttgcagtattcgtaaatatattcttttaacgtgctaatcttgttgtcgtatgcggctttacggttgtcgtcttcaaagaaacctttcagtctaagttgatcgtaaccccagtcgcctactatataatcatatcgcccaagaatatcgctaaatcgttcattcaatttttcctcgtcaaaagcatcgcgataattggtgataatttcgtagtttaaatcttgaatcgtaatcgtcacgtgtcttcctcctgtccgtacatttttttgagtttccattttaaaatatctcggagtaattctggtgtatatacttcttttcgtttaatttgcttcactatcgggaaaaatggcgcgaatacaaacgtatcgtgcgtcgcaatccggtattcccgcgttttatcaatcggtttattatcaaaaagtgccacttgattttccgagtcaaaactagctctgtccatcaaaacggtaccaaaatactcgcctcggaaaccaaaacctcgaagcggaatgtcttgcagttctgctttctttcggtagattccgtcaataagtatttcaagttcctcaccagacatcgttaaagcaatcgcatttagcggatgcggtaacatttggtgaatatcaaaatccgtcacaatccctgcttcaaaatccgtcataaaaatgcccgcgttcatcacaaacgtttccgaaccagtccattcacaaacagcctcattcaaaatgtgcgcaatttccgagtcatcaaaccaattatgcgctaacttcccgggaatcgcaactactttttcagataattcctctcgtcctttatcaaagaaagcttgaatttctgccgtttcatttggagggattggaagtttttcggttgcaaaagttactgcttttttagagataatctgattattttcatctagctcaatagtaactttccctacatgctcgccccatcttccggcagcagccagtaatgcatttccttctatttttccattttcaagtaaatgatgggtatgcccacctaatataatatcaatttctggtaattctaaagcaattctttcgtctgtcggcaaaccgagatgactcagtaaaataactacagctgtgtccgcgtccaagccagcaatttgctttttaatcgcgctaattggttcttctactccccagcccatctcttcgtagtactctcgaaatggcgccgtcgcaccgataatagcaattttcacttgttctatttctttataaacaatcgatttcacccagtccggctgctcggtgcactctttatccgcgtaaaaattacagcaaactaccgggaaagctgcgtgctcgtataaattatccaagtcttcatgtgccaaagttgttccttcattattgccaaaagttactgcgtcatatggaagctgattaagtaagtccgtattcgcaagcccatttgtcccttcagtaagcggatgaacccggtctaaaaaatcgccaatatcaaaaaagagcgccgccttatattctttatctgcagctgttcttttctcttttaagaaattaaaaatacgaggccaatgctccaagtgactatgaacatcatttgtatgccataaagttaaatgtttcatcaatccacctcactcctcacatataactattgtagctcaaaatagctttttttacacgcagtaggaccgtttgaatcgttcaaccttcattttatgttatgataggatatattgttttaaagggaagtgatttttttggatattacgcaaacagtcgaaattcttctaatctctgtttttgcaggggttgttggctctttgcttgggcttggtggtggaattattgtaacgcctgccttgactcttattttcgggattgatattcagtatgcgattggagcgagtattatttccgttatcgcaacaagtagtggttccgccatcgcttatatcaaagacggcatcaccaatcttcgtgtcggtatgtttctcgagattgccacaacaatcggcgcaataaccggggctttcgtcagtggactgctctcggctacagccctctacatcatcttcggacttttacttctatattctgctttcaacatgattaaaaaggtcggttcagaatttcctaccaatgtgaaaccagacccacttgcaacaaaattaaacttacatgattcttattacgataaatctctacggcaaacagttgactaccaagtggcaaatgttcctgctggttttggtgtaatgtacggcgcaggtatcgctagtggcttacttggaatcggtagtggcgcatttaaagtaatggcacttgatgtctttatgaaaatgccgctaaaagtaagtagcgcaacgagtaatttaatgatgggtgtaaccgcggcggccagtgcaactgtgtatcttttccaaggcgacatccagcccgcgattgcagctcctgttgctattggggtacttgtcggcgcaacacttggaacgcgcatcatgcaacgtttaaaaagcaaagttattcggattatttttattcccgtcattttatatgttgccttccaaatgattttagaaggattggggtggatttagatggcagagaaaaaagaagaaatgtaccgcgtggagctaattgttagcgcactgctacgaatcggtgttgtccttagtgcgatcattatcgtttttggcctcgttatgctatttattaccggcgaaagtggctatcctggggaaacttatccgacttcgcttacggcgattttcagcgggctagggacgcttaaaccatacgcaattatgatgtttggtctgttttgcttgattttaacgcccgtccttcgtgtcgttgtatcattgtttacttttttgaaggaaaaagattacttatatgttggcgtaactgggattgtacttattattttggttattagctttttaattggaattaaggcataaaaaagatggcgctactcacgcgccatcttttttattctgaaaacaaatccatttgcatcggagccaaaccttgaaactcgacttggagcgccttttgtaaatgtttcgcattatcagcagcatccccgccgctgttattattaaatatcacgacaacttctttggacaatttttgtaaatgttccacatatttggtccactcgtttatttcttcctcattataacggtaaagcgtgcgaacctcgcgccattccggactactcgctttcatccaaccatactgattccgaccatgcagtcttactagcgtcatctcactatttgtctcacgaagcacaattggtacacttccagatccaacttgtggttcatcaacaaccgtatgaataaaacctaattctcgtagtaaatctaacgtcttttctgtattttgttcgctataccatgagttattacgaaattcaattgctacaggcaaatcacccattttcgaagcgatatatcttaaataagtcacattttctttcgtacaattaaaatacggtggaaattgatataaaattgcctgtagttttcccgtttcacttatcggcgcaatcatatccatataagccgtatacatcgcattttcgctatcaaaatactgcgaccattctttatgttttgtcatcgccgaaaaagcctttatcacaaaacgaaaatcatccggagtttgcgccgcccagtttgccgttgttcgcggagaaggaatcgcataaaaactcgtatcgacttctaccacaggaaaatgtgccgcataatcagctaatgttaatttttttgtttgtaataaagaatcatgatcactccatccagttaacccgattgtaatcatcaaccgccaccctctctatcgtttttgatttatgtttattataacgcaaaaaggagggagaatcttttaatttggttgttgctttaccttggatattttatgtcttatactttaattaaaaaaaaggagaaaacagatgaaaagacttattataatgacttcagtttttttcggaacgatattaatcggttcagcctttactggcaggaaaccttttgatggattaagtatatctttaataggtggattatctatttttatactatcttattttattgctggctttttaagtcgaaaaaaaacagctaaatttaaatgtaaataaaaaccccttcaaccacaaagctgcagttgaaggggattttttgttatatcaaccaatcgagccttccatttcaaacttaatcaaacggttcatctcaacggcatattccattggtaattctttcgtaaatggttcaatgaagcccataacgatcatttctgtcgcttcttcttcgcttaaaccacggctcattaggtagaaaagttgttcctcggatactttggaaactttggcttcgtgttctaatgagatgttgctgtttaggatttcgttgtacgggattgtgtccgatgtggacaggttatccataatgagcgtatcacattcgatattggaacgtgcgccgtctgcattacgaccaaaatgaacaattccgcggtacgttacgtttccgccttgtttcgaaatcgacttcgatacaatcgtagaggacgtattaggcgcataatgcatcattttcgctcccgcgtcttgacgttgccctttaccggcaatcgcgatagaaagggtcgttccgcgcgctccttcgccacgtaaatgtacagctgggtatttcattgttaatttcgaaccaatgttaccatcaatccattccattgtcgcattttcttcacagaaagtacgttttgttactaggttataaacgttatttgcccagttttggatggttgtgtaacggcagtaagcgcctggttttacaatgatttccacgacagctgagtgaagggaattcgttgtataaacgggagcagtacagccttctacgtagtttacgctggcattttcgtccacgataatcagtgtccgctcaaattgccccatgttttccgagttaatgcggaaataggcttgaagcggcgtatctactttgatacctggtggtacgtagatgaatgagccacctgaccaaacagccgagtttaatgctgcgaatttgttgtcgcttggtggaattacttttgcgaagtattctttgaaaatatcttcgttttcttttaacgcggaatctgtatctttgaagacaatccctaaatcttctaggtcttgcttcatattgtgataaactacttcggattcatactgcgcagatgcaccagccaaatatttttgttcggcttcaggaatacctagtttatcaaaagtacgtttaatttcttcaggaacttcatcccaagagcgcactgtttgttcagacggtttcacgtagtaagtgatgtcttcaaacttcagttctgacaggtcgccaccccaagtcggcattggcattttataaaattgctccaaagacttcaaacggaattctagcatccattctggttcttctttaatattcgaaatttctcttactactttttctgttaatccgcgttctgtacggaacacagaggtatctttgtcatggaatccatattggtattcgccaatttctggaatttcagtcatgtcgtatcctccttttcgctacttattttgttccttctttttcaaaaatcgctctctccattgctttccaagaaagggtcgcacatttgattcttgctgggaatttcgcaactccggcaagtgcctcaacgtcgccgtattcatcaattgtttcatggtcgtgaccttgcaccatttctgaaaattcacgggacatttttagtgcttctttctcggttttcccaataatgctttgcgtcatcatcgaagcagaggccatcgaaattgaacagccgctaccagtgaattttgccgcaacgattgtatcaccgtccatttttaaatgaagatgaatttgatcaccgcatgttgggttgttgaggtcgattgttacatcgctatctgggagctctccattattgcgcggatttttatagtgatccataatgacttgtctataaagctgatctaatttccggcttgtcataatccaaaatactcctttgttaacttgaggccatctataagcgcatcaatttcttcttttgtattataaatataaaagcttgcgcgagctgtagaagagacatctagccatttcatcaacggttgtgcacagtgatgaccagctcgaatcgcaatcccgtcttcgtccaaaatagtcgcaatatcatgtgggtgagcgccttctaaattgaaagtcactaagccacaacgtttactcgcatcttttggtccgtaaatggtaatgccttcgattttgctcatttcttctatcgcgtagctggctaatgcttgttcatgtgcgtgaatatttgcgagtccgacttctgccaagtaatcaatcgccgcacctagcgcaatcgctccgccaataatcggtgttccggcttcaaatttccacggcagttctttccacgtcgaatcgtataattcaacaaaatcaatcatttctccgccaaattcggtaggttccatcgcatcaagcaattcacgtttgccatacaaggcgccaatgccagtaggagccatcattttgtgccctgaaaaagcataaaagtcagcatctaaatctactacatcgacttccatatgaggcacagcttgcgcaccgtcaacgagaatgactgctccaaattgatgagcaattgctgcgatttctttaattggcgtgatagttccgagtacattagaaacatgagctaaagcaacgattttcgttttttcgtcaatcgtttttttggcttgttccactgaaatcgtgccatcttcttctagttcgatatatttcaaaaccgctcctttgcgtttagctagttgttgccatggaatcaaattagaatgatgctctagataagaaataactatctcatcgccagcttcaatatttgcttccgcgtaactatcaacaactaaattaatcgctgaagtagtacctcttgtgaaaataatttctgctacttcacgcgcatgaataaacttggctactttacctcgagctgattcataagcatccgtcgctcttgctgcaagtgtatgcacaccgcggtgaacgttcgcattatcaaattcatagtaatgagttaaagccgcaataacttgttttggcttttgtgaagtggcagcattatctaaataagctagcggtttttcatttatttcttgagctaaaattggaaaatccgcccgaattttttggatatcaatcatttagcgcactttcccttcgattacttcacgaagcatcgtttttacactttcgattggtaactgacgaacaacaggatccaagaagccatgaataactaatctttctgcttctttttgagaaatcccgcgactcatcaaatagaataattgtagtggatcaacgcgtccaacagaagccgcatgtcctgctactacgtcattttcatcaattaataaaattgggttcgcatcaccgcgcgcttcaggactaagcataagtacacgtgattcttgttgtgcatctgacttagaagcgccatgtttaatgtgaccaattccgttgaaaatagttgtcgctctttctttcataacaccatgggataaaattgtaccattagaagcttttccgtaatgtgtcacgcgagttgtcacgttttgcgtttgcttcccgcgtccaactgtcacagttttcacatcagcagaagatccgtcacccattaggttcgttacgttctcgttgatagtatcgccatcattcatcagaccaagtgcccattcaatttggctgtctgttccaatgtgtccacgacggttcacatatgtcgtaacgccacttgcaagattgtctacaccaccaaaagtaatgcgcgcatttttctcagcgattacttcttccacaatgctaacaatccctttaggtgcgttatctaccgttacgtagttttccacataagtgactgcgctattgtcatccgcaacaagcaacacatggttaacaagtggagattctgctttttcttgtacaaaaacagcttgaattggcgctttcacttcaacatttttaggaacgtaaaggaaaatcccaccgttcactagtgccgcatgaaaagcagtcagtttattttcgttcacttgaactgcatctgtcatgaagtattttttcacaagttcaggatgatttttcacagccgaaataatatctgtgaaaataacgccttggtcaactagttcttgttgcaactgaagtctcgcaggtctttcatccatttgaacgtaaaaattggcttctttattatctaaatcaactaaattcgctactttttccggtaaagtttcattcgttacgccttctttaaaaggtataaacgtctcaaactttgtgaaattccagcgagtaatttttgttttatccacaaaaggcaagtccagttccccgtaggctttaaaagcattgcgacggatatctaaaaaccaatccggttcattcgcattacttgaaaaagcgtggataaaatcatctttaattgtcatattttctgccatgattttaacctcacttccttattgttggtctactgcttcttcttcctcaagttcgataccaagctcttgtttaatccagtcataaccttcagcttctaaacgtttcgcaagttcagggccgccttctttaactactttaccttgcatcattacgtgcacaaaatctggtgtaatgtagttaagtaaacgttggtaatgggtaatgattaagcagccgaaaccttcgccgcgcatttcatttacacctttagagacaactttaagtgcatcaatatcaagaccagagtcaatttcatctaaaatcgctaattttggctcgatcattaataattgtaagatttcattacgttttttctctccgcctgaaaatccttcatttaaataacgttctgccatttcttcgtccatatctaaaatgtccattttggcatctaatttacggatgaattgcattactggaatttcgtcgccttcttcgcgtcggctattgattgctgcacgaatgaattcagcgtttgtaacaccactaatttcacttggatattgcatcgctaagaaaaggccagcacgagcgcgttcatctacttccatctcaagtacatcttctccgtcaagcgtgattgatccttgtgttacttcatatttcgggtgccccataattgctgaggacaacgtagatttacctgttccgtttggtcccatgatagcatggatttcgccagttgaaatttcaaggttaacgcccttcaaaatttcttttccttctatttcaacatgtaaatcttgaatctttaaagttgccataaaaaagtcctccctagtgtaaaatttgcataatcctagtttagtataattctaatctgattacaactataaaaaccagcactcttcgcattctccccttcattctactattaatagccgttttttaccagttttcgtgcattatcactatttccattttatttgagaatccatgacataaaaggaagagcgctctatatcaatagaagaaaggtccttttttactataaaaaaggattgtatatcttatttagatatggtattgttgtaacgtaacaaatttgcaacataataacttatttgtaataaacgattatttattgaaggagaatttaaaatatgaagaaagcaataatggctctgaccatctttgtattgcttttagccacattatccgggtgcagctcccctaagtccgacttcacatctactttaaagaaaacagctgaaaataaacaatttacaacgaacgtcacattccaagtaaataacctatctgataactacattaaaaaacttggctctgatattgacttaaatcaacttaaaaaatctaacattcaatataaaatttctgtagatagtgattcttcctcttcctatagcgcctattcgcttcactggaaaggcaaagaaccacttgatttaaccttacacgcgctccaaaacagtgaggacgggaaagcttatatccctgtagctgatatttatgacgcagcagacagtttttcaagcctactatccgattcagcagctcagattttcaacaaagtactcgcgcaaaataaagacttagaatctaaatatctcaacgtattcgagacattccaaaacttctccaatcaaacaattgattcagaaaccgttgatcgtcaagcggaagaattgaaaaaaattgaagaagccagtggtatcgcaatttatagctatttaaataacttagatgacaaacatttcacttccaaagataatggagatattgtattaaacctatccaaaaacgaaataaaagatttagtcaatgacgtctttacagcacttgataatgacggaaacatcatcacacttctttcagaaattgatggtagctcgcaaaaagaagctcaaaaaaaatggaattccggtgaaaaaagtgttcgttcttcactaaaaaaccttacttccaataaaaatcaaacactcgatttcaaattaacgttaacaccagatagtaagaaaggttttagtaaagccgttattactacaaactttgaagatagcaaaacaaaagatttaatcaacttaacaacaaccgtcgatatgcttgattacgaaaaagttcctccaatgccagaaggtaaagacattgtttctaaaaaagaacttgataaagccatttctgatggactgaaactatatttaagtagtgctaattaaaaaaaatccttttaccaaatcggtaaaaggatttttttgtttacttatcaactggaacaactgctccgtcccattctttcgtaatgtaatcttgaatttcttttgaatgtaacaccttaactagttctttaatgtttttgtcgtcttttttcttgtcagtagttacaacaatattagcatacggagaatctttgctttcgattgcaatagcatctttcgaagggtttaagccttggtctacaacaaagtttgagttaatagcgacaacatcgccttcttcattattatatgcagtcatcaagtaagctgggtcaaaatcatatttgaatttcaagtttttcggattatctttaatgtcgtcaaatgttgcatcttgtggtttcacgccatctttaagtgttaaaagtccattgtctacaaaaatcccaataacacgcggccagtcagattttgagttagaaagtaaaacttgcgcgccgtcttttaaatctttaatatcttttacttttttagaataaatgcccattggttcgatgtgaatagcaccgacatcagcaaatttgtaacctttttctttttcttctaattcaagatatggtttatgttggaagtagttagcatctaaatcgccttcttctagggctttattaggcataacgtagtctgtatatttaacaattttcaagtcaatccctttatcttttaagataggttttgcttgttctaagatttgggcatgaggagtatttgacgcacccactaccaatttattatcgtctttactagatgaagctttatctgaggagccaccgcaagctgtaagtactaaaactaaacttaatgtgaaaattaaaccaagaacctttttcatgaaattctctccttttttgcggggattccgcgttttttttatataaatttcttcatatacattggttagcgtttatcggttcgttttgttaggaagtcgccgataaattggaaaataaagacgataattaaaataataattgtcgcaagtaccgttacatcaggttgtccacgttggaatccttcaagataagctgtatttccaagcccacctgcaccaatgacgccggccatcgctgtgaatccaacaagtgaaattgctgtcactgtaataccagaaataatcgctggtaaggcttctgggatgagcactttaccaataatagtaaacatgttcgcacccatggatttagcggcttcaataacgcctttgtctacttcacgaaaggcaatttctaccattcgaccatagaacggagctgctgagataattaaagctggaagtgctgctttcggtccaattacggttccgactaacgattttgtcatcggtaaaagtaatacgattaaaataataaaaggaatggaacggaacacattaacaaggattgctgtgatccagtataaaatgcgcgctccggcatgttttttattattggttaaaaatagtaataatcctagcacgattcctagtaaaaaaactgcaaataatgaagtaagtgtcatatatagcgtttcttgtgtggcaacccacatcatttgaaaatcaacatttggaaataactcttgtaatttcgtcatcgttctaacacttccgtttctactttaagttgacgtagctgtgttagactggcttctatcgcttcttctgtgcctagaacttggacatacaatgttccgtatgcaccgttttgcgtttgagttaagttcccatgaaggacatttagcataacatcattttcttttgctacttgagagataactggttgagttgcattttcactcatgaagagtagtttaacgattttaccttctgcgtaattatcgagtaatagatggattagttcttccgtttcgtctgaatcagttacttggcggacgaaacgctgcgttactttttctttaggatggcggaacacatctagtacgtcaccgagttcagcaactttcccgttttccatgactgccacgcgattacagattttccgaataacgtgcatttcgtgggtgataacgatgatagttaggttgaggcgtttatttatgtctagcagtaattctagaacttcatcggtcgtttgtggatctagtgcggatgtagcctcatcacaaagcaatactttaggattattggcgagcgctcttgcaatacctacgcgctgtttttgcccaccacttagttcagctggataggcgttttcttttccttctaagccaacgagtcgaattagttcattaacccggaaacgtcttttttcaccgcgaacaccagcaatttctaatgggaacgcgatattttctgcaacggttctagaccataataaattaaaatgttgaaatatcattccgatttgttggcgcgcttttcttaatttactaccacgaatttggctaattagtaggttatctacttcaacagacccttctgttggtagttctaatccattgaacattcggattagtgtacttttaccagcccctgaataaccaactactccgaaaatctcaccttgttcaatttctaaatcgacatggtcgactgcgagaactttgttatttctggacgtatattcttttacgacgttctgtaacgtaatcatctctatcaccttttctacattctgatatacaaaaaagccttcctgctaatgagcagaaaggcagcattttttcaaatgggctaacttccttctcatctttcagaacaaatcgttgttctgcatgacttagcaccttaaacacataatgaattattgtttaggttgctgggtttcacagggcatttccctccaccactctggataagatttctacatattattatatcacttcatttgtgactatagtgacgtttcttgttttttcatattaccttttccgtcacactttgtcaataacttttttatttatacgcatctatttgtaatttacttcactaataatactattttctcccgaatcttcctggctagctaactgagaggctattttaatctgagctctattttgatatttaagttcgctactattgacttgaattatgtacataaataccgcaatgaccgtgatacaagcaacaacaattaaaacaatatgttttttcatttttctctcctccgtgatttatattctactgaaagaacataaatcacaaggaaagaaacatttaagaatttttaaagattaaatgagcggcaatttgacgataaaacttgttttgcgatgtttgctttctgcggtaacaattccgccgtgtttttcaacgatagacttagcgattgcaaggcctaagccagtacccgttgttgtccgatttttatctactttgtaaaaacgttcaaatagataaggtaaatcaacggttggaatctcttcaccatagttagtgacccgcacaacagccatattatcttcttttttcgcgcttacatcaatttgtttatttccttctccgtatctaagcgcattggaaaataaattctcaaacaaacgcataatttggttaccatcgccaccaatgatgagtttattggcatcaaaatgttcgattatctgcatatttcgttctgcagctcgtccgtcatattctgctactaattgtctgagtaattcaatgatgtctagttcatctttttttaattggtaatcaacactatcaagcctagtataagagaataaatcatcaatcagtttatgcagatgacgcgcttttccgtaaacaagttccgtataataacgcagctcaatctcatcacgataacgatcctcatgaatataacttaaatatcctaaaatcgacgttaaaggggttcgcaaatcatgtgagacattcgtaatcaagtcattcctagcttgctgcgcctgttcttcctttttcattaatttattttgtcgttcacgcatattttcaatgtttcgctcaagttcttgaatttccgggacaaaactttctgtatcaaccggctttccatcatttaaagcaaaattaatcgttcgtagttgtttttttaatatccgctgacgcatcaatcgataaaagaatgcaaagaataaacaagcaatcaaaaagataattaaaaacttcagcgataacatccaaaacgactgcattatccgagtatatttattcggcccaaaaagttgaaccatagattgcgtcacttcacgtaaaaacaaagaatcatcacgaatagaaatactccacaaataaatagtttggacagtaatcaaagcaaaaacccaagacactattgcaaaaaaagtcgcctgccaaacattcatcacatggctaattttcgtaaacaacacttccagcctagatttcaattttgtaccctactccccatattgtcttaatcacattttctccgcccatagcatctctcaatttatcgcgcaagttgctaatatggaccatgaccgttttactcgctccgagtgctttctcctgccaaattttctcaaaaatatattccgaactgaaaacacgacctggttcactcgctagtaaaaataaaatatcaaattctgaagtagttaaatgaagttctttttctccaacagttacaacatgaagcccgcgatcaactacaatgggtccaataataaccttatcttgactaactggctccgcttgactcatttgttgcatgcgtcttaaaatcgctttaacgcgaacggaaagctctaaaggattaaacggtttgaccatataatcatccgctccagttaataatcccataattttatcattatcttccgccttcgcgctaagcatcaaaattggcgttaggataccattattccgcattaatcggcatacttcaaggccattcatttctggcatcattatatctaaaatcactaatgttggctgcttttcttgcactaaacgccatacttccgcaccatcataagcttgataaattgtgtatccttcattttgtaaatataattttactaaatcaacaatttctttatcatcatcggcaatcaaaatagatgttgtcatactcattgtcctttccattcttatttctacctattgtaacactttagaaacaaatcgaatagaaagagctgatttttaatttctagttagcactcgctcttcttcaggttctaagtgaatcaaaacttctgctttcgcgtagaaattcataatctctgcttcaatttcatcacaaagcgaatgagcactttcaattgtcatcgtggaagatactactaaatgaaaatcaatatattcttccgcccctgctcgtcttgagcgaaaatcatgaaattcaataaatttatttttatgcgctaaaataatctttttaatcgcctcttcttcattatctgaaagacgtctatccattaatggtggaaaagattcttttaaaagcttaaatgcttcgtacataatataaaatgccgttaaaatagcgataactgggtctaaccacaaccagccagttatgtatactaaaaataaactaagcgcaataccaagcgatgtgaaaacatctgtatataaatgtagcgcattggatttcattgcaactgaattggctttaattgccgctcttttaataattcgtgacacaataatattaacaatcgccccaaaaagcatgacagcaataccgagcgctggaaatctaatttcatgcggatttaaaagtttattaacagattcaacaataatccaaatacccgctacaaaaatcaataaagtttcaatagtccccgcgatattttccgctttcccgtgcccatatggatggtcctcgtctgcaggctgattcgaaattcgaatagaaaagaaagtaatgactgatgcaaataaatccattgaagagtgaattccttctgaaatcacagctaccgatcccgtgaaaaagccgacaattaatttaagtacgacgataacaaaattactacacaccgataaaatagtaaggttagaattgttcatagaaaagcctccgatatgtttatgtttcactaaaaatttctctttataaaacactattttaacaactcgaattatcttaccacgagtagccaaattgtgtctatagcaatgtttttagctaaatgcagttctatatcagaaacgaaacttttttgcgcacgggcaaaaattaacacagaaaaaatccctgtatcactcactatacaggaattcaaaaatagctgttgcatcatgtaatttatacgttaaatcctttggttcgccgttcttaaatttcactaacgcggggactgacgtgatttccaagctttgagcaatatctggcacataattcaagtctacttttgtgacgttgctatgaatactgtctgcttctaaaaccacgtctactaagcggcttgctatctgacagctgccacacattggtgtaaaaaagaaaacgacaaaatccgcgccatcgttttgcgcctcactaaaagtctctttttcccaagtttccagaaaaaacgcctcctatcaaaaaaagccagcttcggttatcccaagccggcttctaataaattaatctaatcctttttcgtaatcatcacttgataaaagagcagttacatccgcttcttctacttcagtaagttttaaaatccaaccagtgtcatacgggttgctattaattagttctggctcatcttctaatgtttcattaacagcaactactttaccagttactggcgcataaaaatcagatactgttttaacggattcaatgctaccgattgaatcaccttttgttactgtatcgccaacttctggcaattcgacaaatacaatatcccctaattgatcttgggcaaagtcagtaattccaataatataactaccgtcttctgctttcacccattcatgttcttctgtgtacaataagtcttttggtaaactcattttaaaactcctccttttacttgcaattatctatattgactatttccaagttgcttcaaattcttcttctttgaaaccaagcgttacttctttgccgttagttgtaagtgggcgtttgattaacatgccatctgaagcaagcaaattataagcctcttccggtgaaagtgtatcaagcttatcttttagtccaagttcgcggtatttaataccacttgtattaaagaaacgacggattggaagcccgctagcttcatgccatttttgtaattcttcggcagttggggtttcagtcttaatatctacttcgttaaaatcaacatgctcattttcaagccatgcttttgctttcttgcaggtgctacattttggataccaataaaaattaatcattttgcctctccctccgattgcattctattactatcatagtgcattttttcttaaagtacaaatagcaacccttagaaaaaaacagagattttgaaagcgcattcatatcagttcaaaaaaatacaaaagccacttcgacttctgtatttttcttttaagatgcgtgattttcttctttcacttcaaacatcgatttcttaaagttaaaccttatcccgagaacgagcccgactgccatcatattcccgagcagagcactaccaccgtaactaataaacggaagcggaatacctgtgattggtaataaaccaatattcatgccaacattttctagcacgtggaacattaacatcattacaacacccgtacagatatatgaataaaatggaacgcccacatcaagcgccacccgaataatttgataaattagtaagaaataaatcgccagtagaatactcgctccaataaagccatagtctccagctacaatcgtaaagataaagtcattatgattttcaggaattgcgatggcatcatatcccgccccgtttccagaaatctgaccagaaccaattgccgtcatcgctcgcagcacttgatagcccccgccttgagggtcattttccggatttatccaagtcgtaatccggtcaaattgatatggtttaaaaccaagactcgttagccaattctgatgataaataaccatccaaataagcgtagtaccgattgctgctatcgagccaaaaagcggtacgataattttccaagtaatacctgaaataagaatcatccccgacataatggcgataaatacaagtgctgtccctaaatcgggttgtagcataattaaaataagtggcattaatgtaaataagccgattttcagcagtaaccaagcgtcataactaaagcgatgaactttatacgttcgattatgatcccagattacttttgccaatacgataattaatattacttttacaacctcagaaggctgaatattacctaaaaatggaataactatccaactcttcgctccttttacttctttcccaaaaagtaaaacaaacacgagtaaaaacagacctaacccataaaagtaataagcccatctcgtgagtcgatcataatccaattgcatcacgacaataattgcaaatgtcgaaaccacaaaccacatagcttgttttacaacaaagtttgcatcatattgattatttgttaattgcgcactataaatggacaccaaactgattatcataagtaacatcattgataaaacaatcccgtaatcaatgcgtccagctagtttattttgttgattcattatttaattactccttactggttggtttgtgtatactaacgctttctcccaaacagtttaaaaaagaaaatcatacgcgattcccttttcctaagttaacttctggggcattatatctcgcagataacacgagtccaagtgccataaatgcgccaagaagagagcttcccccataactgacaaaaagaagtggaataccggtaattggaagaagaccaattgtcatcccgatattttctaaaacgtgaaataaaatcatcgagcaaacacccgtacaaatatacgaataaaaaggaatgccaatgtctaatgccactcgaataatttggtaaatcagtaaaaagtataacataataagtacgcagccaccaataaaaccgaaattcccaccaataatagaaaaaataaaatcattgtggttttctggaatagcgattgcctggttgccaataccatttccttgtaactgaccagaaccaatcgcctgcattgaacggagcagttgcataccgtccccaagcggatcttcctcaggtctaagccaagaagtaattcgtttaaattgatatggtttaaatcctagtttttgtaaaaaatcttgattgtacataactaaataaattaacgtcccgcctagtaaagcgaccgaactaaatactggcactaagattttccatgtaacaccactaataaagatcattccgatgataatagcaataaacactaaaattgtacctaggtctggctgaagtctaactaacccaagtggaataatagaaacgatgcctattttaagcaataattgtatatctaattttaccgtgtgcagttgatattttttgttatggtcccaaattactttagcaagcgcgagaattaagaagctcttcattaactctgaaggttgcaaacttccaagtgagccaatactaatccagcttttagaacctttacgctcatcgccgacaattaatacaagcactagaagtaaattcccaataccatacaagtaatatgccgcccattgaagccgatcataatcgaaaaaaagtacaataacaacgactattccagtagaaataacaatccaaatagactgctgcagtaagaaattatttgtgtactggtcattaacaagtcctgcgacataaatagccattaaaccaatagtacaaagcaacatcatcaagaatataatcgcgtagtcaactcgaactgccttttttctatttctagccattgctttccgtcctttatgtttagatttaaatgtaaaaaagctgctattcttaaaaagagcaacagccttcatctattataataaagtttaccttggataggaagctttttcaccaaattctaatcttctttctgttttctttaatattcaaatctagtcgaagcaagcggatgaatgtgctgttttccatctttttcagtaatatctgctgtaatatgaaagacatttcgcaaaagctccgttgtaaaaacttcttgaggcgtaccatttttgactaatccaccattttcgcaaacaaaaacataatcactgtagattgcagcttgatttaaatcatgtaacactaacacaatcgttaaattatattctttatttaaatgaactaacaaatctaaaagctcaagttgatgggcaatatctagatatgtcgttggttcatcaagtagtaaaataggtgttttttgcgcaagagccattgcaagccacgcacgttgacgttcaccacccgataacgagtgaagtggtcgatacgccagattttctaagttacacactttaattgcccactgaataaccgcctcatcatcttcttgtaaagtagaaagccaacttctgtgcggcaaacgtccataagccaccaagtcatgcaccataacatcaactaaaccttcaggggcttgagataacatcgtcattttcttcgctaaatctttagaaggaatatccttaatatttttttcatcaagcaaaacttctccactatcaggtgtcaaaaggcgcatcatcaaacgaagcatagttgatttacctgaaccatttggaccgataagtgttgtgattttaccttctggaatgcgtgcactcacgtctttcatttcaaaatctcttttacgtgagaaagaaatattttttagttctaatgcaggtttcatgaagcaaccctccctctttgaagtaggaataagaagaatggtgcgccaatcatcgcaagcaaaatcccaactggaagctcaatcgacccaaaccaacttctagccgctgtatcagcaaaaccaactaatagtgcgccacctaaggcagataatggcagtaaatatttgtagtcattgccgataatcaaacggaaaatatgtggcacaaccagcccaacaaagccaattaatccagctacactcactgcgaccccacttaaaaatgccgctaacatgataatgaaaaaacgatgtcgttcgacggaaaaaccgagtaattttgctgcatcgtccccaagtagcaacacattggaagagcgaatagcaaaaccacttaaaacaaaaccaaccaacatataaggccaaatcatatccaagtgataccaacttttcccagaaagcgttcctgtcatccaagaaataacactttgaacccggttactataaagcaccataactccagaagtcattgcgccaataaaagcattaatagcaacaccagataaaatgacacgtaatggagaaacgccacgatcccacgctaataaataaattaaaattgccgtaccaaaagcccctaaaaatgcgccaattggaacaaaagaagccaaagcaggaaatgctaacgtcattaaaattgctacaaatccgccgcccgctgaaaccccgattacacctgggtcagctaatggatttcgcatcacgccttggagcaagcaacctgctattgcaagtgcagcacctactaagaatgcaatcaatagtcgtggcaaacgcaaattccatatcaattgattcgcaaggtcactcccgccgccagtcaaagtttgccaagcgtcactatatgtaactttcacggacccagtagtcagcccgtagaaaaaagctaaaataagtaaaacgattactacaataaaagttatccgtctacgttttcgccgcggatcatgcgccttcacagttgtcattagttagccaccttatttatttcatctgtcatataatccaatgcttgatcaattttcattccgggatttgttccgaaaagttctgctggaagtacgacaatatgatcatttttaacggcgcttgttgaattccaagcttcattttgtttcatttcttttttaaaggctgtttctgtttctttttcatctccgccgtgaatcattaagaaaatcacttctggatcagcagcaacaattttttcgacattcatcgaagcatattgcggaaagttttccacacctttaaaatctttcgccacgttttctccaccagcgatttctaaaacgtttccgcttaatgaggatggtaacgctgcgtagttacttcctggagctccgagcactagtaaagcgcgtacttttttaccttgctgtttttgcttcacttctgctacttttttatcaatgtttgcttctagttcatctgcttttgtttctttacctaaaagcttgccaagaacggctgtctgtttttttatttcatcgattgaattcgccccagttagcacaactttcggtcctacgccttccattgcaggcacatcttttaagttttgttctgaacttgctacaatagcatctgccccaagagaagcaattttctctaagtttaaatcatgcgtattgcccacttctgttgcttttttggcgccatctggaacaccacttgcatctgttgtttgacgaccaactactgtcccaccaagcgcataaataatattcatatctgcatttgtaagcgcaatgattcgttctggttttttatcaaaagaaacatcacgaccagccatatccgttaccgttaaggctgcttgcgatttattttctgtttttactgtttcgttattcgtatcagttgcagtatcatttccacacgaagcaaggagtagtgcggctgttatacttaacgtcaatatagttattttcttcataattcccctccacaatactgtccttttcattttactaaattataccacgatattcaaaaagtcggacccctaattgagaattattttcatctatatccaattagtcgatattttcacgttaatactttataattaaatcaaggaggcgatgaaaaatgactgataatctttttcctaatctagcgcatgaaaattgcaaagaaccgatgcccccagtcacaacagaacaattcaaagaagcagccattctagaaaagaatcgcaagcttgaagaaattttgaacatcgtggataaaaagaaacctagtataaaaaaataacgaggacctgttcgcgcaggttctttcttcacaccttaattccgagttaactcataagataagttatatttattttatttcactaaaaaatcatgtatactagaaaaaaagataggtcaggaggcccttacattggctattttagaactaaatttcaaatcagaatgtttagccatgcaaacaagtgtaacggtgattttacccgaaacagaaacactttaccatggttcaattcctaaatataaaacattatatattctgcacggcttgtctaacaaccacactacttatgtgcgcaatacgaatattgaacgttatgctaccgaaaaaggactcgctgtcatcatgcctgcagcagaccatagtttctattctaatatggttcacggtcgcgattttttccaatttgtcagtactgaacttcctcacgtgatgaaaaactggttcccactttcggacaaaaaagaagatactttcatagctgggcattctatgggtggttacggtgcgttcaaagttgcacttactttcccagaaaaattccaagccgctgcaagcatgtctggtgtcatggatattaattatatcattaaagaagattgcttcgaaaatttcagcacacgtgccatcactggagaaatgactagccaaactggtacggaaaatgacttatttcatttattagaaactaatctaacgaacaacgtggagttaccagctcttttccaaaattgtggtacagaagattttctttatgaagacaatcttcgtttccgtgattttgcgcttgccaaaaacgctccactagaataccgcgaaggtcctggtgatcatgattgggatttttgggataaaagcttaaaagaaattatcgactggcttccactttaataaaaagaagacttggactcgcatccaagtcttcttttttaatgcgtaaatccgtaagaatcgtttcgttccttatcatgataaagcactctagcatgttctaaattgtggagtgcatccgcgaaatcagctgcaaattcttctgccacattataacctaagtccgcccggcaaacaaaccgctgaataatcgtatcacttaaatcagccggcagcggataagccggaacttgccagcctttcataagaagctggtccgcaagatcatagagcgtccactcaacatcaaggtcatctttcaacttataacagacaatcggcaaattagagccatcattaataatttcaaagtagccacttttttctaccgtttttgagagatatagtgctgttttctttgttttttcgtgaatttctcggtagccttcaaaaccataacgcaagaaattataatattgaccaataatttgactagcactacgcgaaaaattaatcgccatggttggcattgaaccacctaaataactcacttcaaaaataagctcttttggtaaatattctttatctttccataaaatccaaccaacacccggataaactaagccatatttatgaccagaagtattgattgaaaccacatttttaagcctaaaatcccacggtaattctggatttacaaatggagtaaacattgcgccacttgccccgtcaatatgaatcactaattgatgctcgtttgcttcattataagcttctactttttcatctaataaagcaatatcatcgaattttcctgtgtaagtaatacctaaaatcccaacgataccaatcgtatactcatccactaactcaaataccttctcaacatcaagacttagatgctctttatccattggaacgacacgcatatcaacatcccagtacacacaaaatttttcccaacacacttggtagcctgatgaaataattaaatttggccgtttcgcttgaatatctagaccacgtttttcagcattattacgccaacgaaatttcattgccaagccgccaagcatacacgcttccgaagaaccaacagtggaagtgcctagataagacatttcttttggcgcattccataaatccgctaaaatattaacgcagcgattttctagttctgctgtttgtggatactcagatttgtcgatagcatttttttccagtgtttctgccatcaatatttcggcttctttttccatatatgtctgacaaaaagtcgccaagttctgtctcgcatttccttcatccatcagctgatctttcactaattgataagcaatgcgcggttccattggttccttttttaatacgtatttcgggatgctagtactttcttcttcagatccaaagagcgggattcgataactttcatgttttcgcttgtcgttttcactataaagcatcttttttcctcctttaaaataactgatcatctctttcaccaatacccattaaagcaaataggcaaaccgttcaatttttcacaagaatttgttatactacggtggtacataaaaggaggtttgctatgtttgatttaattttcccgcttttattaattattattggcattttttacagagttaatccacccaaaaataaaaatggccgctttagttaccggacgaatgcttctttaaaaaacgacgccaactggaaaaaggctcatcgattgcttggaatttactggataatcattggcgtgtgtattctagttttttcactgatacttgcatttattccaatgtatgccatgattcgcagctccattttattaactactagtgttttcgcagtgttattttcggtcatattagtagagaaaaaattacaataaaaaaagcaccgcgataagcggcacttttctgtaatccattacatataagtccaaaaaaattattcttcttcttttgctattgtgtttctttcagtaacgcggtaaatatgaattgcgaggtaaacacgttcgtctcttgttaattccgtatgatgcgtattaatcagatatgcatcaatttttttcgtacaattaaaagcttctggatacttaatttgcacttgttcatataaaaagtcatcgccggaatcgacaatttcttttcgaagtaaacgttgtgcgaaatactgtaaatgagtaataaaacgtgtatagttcagtgaagtttcatctaaaaccataccataatgatacgtgacaatgcttaaaatatcttgaacaatttgggtcattgctactgtcatgtgcatttgttgtccgtcttgtctcgcatttacaatgtggagagcaataaaaccagcttcatcttcgtctagcctaattcctacttctttctcaataaaatcaagggccttcattccaactaaatactctgcgtgataaaatcgttttatttcccacaatagtgcatttttcaagttaataccttgattataccgtgatactgcaaaattaatatgatctgtgagagttaaatagatattatcgcttaagtctgtttcaagtgtttcttgcgcgtactggacaacatcatccgcgatacgtaaatgtttcagcggaatctcactaagtaattctgaaagcttttctgaaagttcgtgtgtttccattacaaatgttttttcaatcttggatacctccacctcatctccaagtttcttttgaaaagcaagaccacggcccatcactacagactccttgccacttttaccctcggcgattacgacattgttattcagtatttttttgataatcatgcattttcacctctttcaaaagaaaaaaacccaaactaattccaacgctattaatatcaaaatagcacttgaattaatctaggttttgcctgcctcagcagtaacaatcctattcttttctctaacattatagtacaaaaagaaaccgattacaaggggtatttttgatattcaattttggattactttatatcttccctactttaacataacttattcattgacaggaagttttctgcatgctatttttggctggaggtgataaattatggcaacacgctcggaacaaatttttattaatttgcctgtaaaagatttacaagcaaccgtcgcttttttcacagaacttggctacgaatttaatcctcaattcacagacgaaaatgctacccaaatgctcatcggagaaaatattttcgccatgctcttgaaagaagatttcttccagactttccataaagaaggcatcgctgacacaacaaaagcacgcgaagtcctcatcaccatcacccaagatagccgccaagccgttgacacactggtcgatcatgcgctaaaaattggcgcaaaaccagcaggcgaaacacaagactacgatttcatgtatagcagaagttatcttgacttagacaaccatctttgggaaattgcttatttagacgaatccgctttaaaataaaacaagaaccgctggaattcatttgattccagcggcttttttaaatttccgtattttcttcatagcccattcatagtggctcgttgtgcttgaaataaaaatagcacctagcgacgttgtattcgtccacttataatatttttttgtaaacagttcttcattcgagtgttccgcgataatttccatttccgcatgatgcgttttatttagtaattccatcgccgtctctaaatccgtttcctggtacttctgccaaatgaccaaattcagttctggcgtagtcctccaagtatagccttccgccggcataaaaggtttatcgcccctcatcccaacctggtaccaatcaagcgccatattgtgccactcatgcaaatgcaccacaacgtcacgaatattcttatccctatcctcaaacggaaacgcaagctgctgtttttcttttggaatagagtcaattaaatccaatagcttttgataactttccgcactttgttgaagcaattcttctttattttttggtctcgccatgaaatattactcctttctaacaaatatgtaagtttaaaaatccatttcgttgccttttgcaagggtttgtcccgctcttttcttatacaataagtgtaataactcagcaaaggatgattgacttgaaaaaaatcgttatacttattataagcgtactattacttggtggaattattggtggcgtatattactttaaaaatgccaacaaaattggtgcagatgcttcctatgttaaaattacaaaagatcccacaaaaagtaatgaaataagcttcaacaataattatactcttcctgcatacgacgaaaatggtaaagagacagaagttactttttctgcagataaagaattacgtaaaggcgcttatttaaaactttatattaaagaagacaaaggcgtaacttcatttgaagaagtgcctgaaaaagaagtcccagctaaagcagctgaaaaacttaaataatgacagaatctcctccttgtgaggggatttttttaaatagaaatataaacttctatttttccattcgtatgataccattcaaaatctgttttataagcgcgctgtaattcactatccctcgcccagatttcttgccaaacttccgccacgcctttatgattcgtattatctacagtaaatacgagatattctcctgcttcaatttctgtatttttttcttcatcccagtcactagttcctactaacaaatcatattcacctgtaaaatcacttgcataattactatacaccgcaaaaatatctccggctggcttttcaaccatgacttcaccccaaagttctgcaattggactaaaatcactattacttgtacgtatttgctttccattaatcactttattttcttgcaacttcattgtttgtcgcctcctctaacatcattatagcgaacaaaacttgacagctatctgtcaacaattcaaattaaaataaagtttttccacttcagctttatattctttttgtagcgaagcaggttctaaaatcttcactgcacttccaaacatcaataaaaacggtataatattccgctcagggtcatactgaaatcttacacgaaccaaatctaactccatttgcatttcttctaataaaaagtaatccagtaattttccaagctggtttttcggaaactctaacacaattttttctgttacttcagcttgtttttggtcttcttctattttcatactagttttactcgtttctttcaaagacgttattcttgttaatttaaagtggcgaatggctgctcttttgtgacagtatgcttctaaataccaactgccatccattaagtttaatttttgaggtgaaatttctcggtttgtttctgttccgtccatcgcaatatatgttatatctagctgttttttcattgtaaaagctttttgaatataggcgatttttcgttttacttcggcctcaatttgtttgcgatgttgtgtcgctgaatcaaagaaaatataattgctagttggtttttccgtttgtaataaagtgattttttctcgtaaagtttcttggctatcattcaacataaattccgaacgcgcctctaaagcttcaagcaaaatccgcttctcttcctccgaaaaagtaaacgtcgctaatttatatgtatcaagcatcgtaaatccgccatttttccccggtaaagcaacgactggaaatcccgcataaaggagcgtatccatatcgcggtaaatcgttcgtgtgcttacctcgaatttttcagcgagctcacttgctagtacttttcgctctaaaatcatgactaatattgctaaaatccgctctagtttcatcccaaaacctccagcccttttagccttattatagcatgtattatcggtcaaaaacccatgcatatgtgatggataaaacttcgcgcatcattcctttgtacttggcaggtgtccgagattttgctggaagaccggttgcatttatcccctgacgttttgctagcattagcgccctatacatatgatagtcacttgtcacaatcactgtttttcctaaatcaaatttttcattgctatatttaatattttcttccgttcttttggatttagtttcctttttaatccgatttctcgcaatgccttcattaaccaaatattcttccataaccgcagcttccgtcgtgctttcatcagcaccttgcccaccactaacaatcacctttgcctttggatattcattcaaataagccactgccgtatccaatctttcctctaaaactaacgacggggtagccggatccccattaattttcgcacctaaaataagtaccgtatttacgttttcatcaggtttggccctcgtcccgctaaacataaatgccgctacaatcaagacatatataaatccaattacaattaaaataacgaaaaatttcttaaagcgtagcatcttatttctcctctccttacttctttatttagtttagcaaatgattcttaataaaagagaaagaaataatcaagttaatggaaaataaaaaaaggtcctatgttcttaaatggcttaataacaccattaaagaacataggactttctttacgcgtttcaaaatatggagatggtgggagtcgaacccacgtccagaaatatcggcacttgaatatctacgagcgtagtcaccgtattagcatttcgcataaacatcagcccggtaacaggcttccattcagctagtctgattaagctcttctatttaacctcagacggagattaactagtgtagcccacttagagtgagacccttaccgtagcacatgggcgatgcacggaggatcagctatgctactgcttattaggcagcgaaagctaggttttgtttttctttgccagttattattggctttgacgttgataacgaggacgatccccccgactcgcaactcaagctcgaactatccctgtcgaatccgtaacatccccagagttaaagtctaacattagatattatacaggaaaaaacgagcctttacaaacagaaaaaacttgtgacacagccaaatgtacaactattatttagcatgccacaagttttcaattaattgatagttaatttcagtgagtatttcataacttcgccttcttcaatatagggctctattccattaaaatcaataccaatcgtgtactcgcctttatcaagattacttgtaggaacaataatttgcgccttgtcctcatcataatttactttaaatgaatcaaacactttatcatcatctgaatttcgaatccatacctcttgaacaccattaatatcctttaaatcatacagttgtgtataaattggtagtgtgatatatgcatcttccccataagcaaccgtttgatctggtaaagttccaatttggcctagtacagttattttatcaacaatagtaggtggtagtatgtttaaataattatagctcaaatccatacttaccaaactatccaaatgagtgaaatctgtcatttctgttgtgaattgattcgactcaaagtttacttcctgtaaatttttcaagtttgtaaaatcaggtacatcttctgaagcaaggccacattcatttagcaacaacgtttctagtttaggaatattagaaaagtcaggcaagctccccacaatagttctactaccaaaattaagatactttaattctggataattttgataatctggtacggtaatattttcaggtggtatttcacttgttatacttacttctgctcttaaagtatctaatagaggtaaagtcggtaaatccggaaatttagtgaactttgtttgggtaggataaatcataatattatttacattggtaaaataagcatttcctagcatttctaaagtttcgtctgttaagtaatttgtaaaatagcccaatcctaatgatgtcgctgcatttatatcatcttgcgtaatgacgtctgtaacatcacttttgtgcaagttttctaccatatctttcgctaagttttcatctggaaaaacatcaattattctggctggcaatggatatacctctgtcacactagcatttgcatccattgcattcaagctgacaactccaataataatcaaactaaatactataaatagtcttttcatcttttctcctccttaaagaaaagagcgggatatatcatcccgctctatctaattatttggcagatggcataactctaacattatcaatatgaatacttgttccgcctttagaatccatcacaaaacttgtattaatatttcctgttgttactttgacatccttaattgaaacataatgccaaacattatcagctactaaatcaatagtctgaccttcactgctatcgtagttattaactgtcatttgtgcttttgcagtatcatctttacttactttaacccacgcttccacatcgtaattcgcattattagtcggaactgcgatttgttgcgctagtgtttgctggtaagctcctggtaggtagaaataagcgctctgacttccaaaagctggtgattctggaggattgacacctgaaccactatcaacgccatatgccttatcctgaccgtccggatgagactctacccaattagtagttgcagcagggtcacgttcaaaaccgccgttatcaagtagatttacttctgattgaacgggactgttaatcggatctgctgagataaggattctatcaatattgatatttcctgtagtttcaccgtccattaagaaagtgattttatttgtaccagcttttaaattcacagctttttctgtatcagtccaaatattccagttttcaccttctgaagggaaagttacgcgagaattataagtaccatttgtgtacaaatcaagcgtttgcggcatcccacttccatttgcagttcgggtatttagcacatattccccgtccgctggcacatccacttcaaacttgatttcatctcctgctgctccaaagccgccaacaaagccttctccactatagaaccaatgatcatttgccacttttaaagttccagatagagctgcttcttccgcttctacttttgctacagttggagtgaaaccaatatttactttgtctaatgcgacttgatctgctttgtcgcctgtgtctgtaaccactttataagagatactatttttccctgctgcaagtggtaagttttccgcttgaacagtccagtccgctactggttttaaagttgtttgttttacatattctccatttacaaaaatacttaatgattggttatcttcggaagcatttttgtatgttaaatcgacattataatcgccagcatcttttacatttgcataaattgttgttccagagccatctgaatcatatccatctacataggtttgttcagttacaggtttctcggcaactgtatttgcaaaactagaacctttttccatttcatatgttccagtttgttccacgcttttagaaccggttgctgtaataactgtatctgcgtctccttgagctggtactttcacataagttactgcgccataaatatcgctagaaacagcataaccacttccatctgcattttcgagtgcagataaatcatcgtataatttgctatcagtgccattaacttggacactttcagcagcatttccgtgtagttttacaatgtaattttctgtgtcagctttgtaacttccttctttcgcgccaactgtgaaagtagtagtatctgctgttttcgatgttgtcattatttgtttcaaataaacttctttttcataatcaaaagattttccatcgtcatcataatgtgtaaatgaagtatctttttcagaagcaaatgtgtctaaataaacggttttaactgcggattcaccaacatagttttgcggctgttgcattggtataattgcgccttgtttaacgaacatcggaacatccgtccagtcatcgtcatttacttcataattgatagtttggttcccttcgtagacatcaccacgattatagtctacccaagttcccgctggtaaatagatttcacgcgaaccagcaccctcttctaaaataggagctgcaaggatagcatcaccaaacatccattcatttgttaggttaactacattttcatctgttggattatcaaaagtaagtggttgaacaagtcctactccagattcataagcttgtctttcataggcatacatgtatggaatcattgagtagcgccaagtcatactacttttcgccacttcttctgcagtcccgccgtaataccaaggttgacgttgttgattatcattaccatgtgttctaaatactggtacaagagagctaaactccatccaacgactataaagttctggatctggatttaatacttgtccagaattggcattaaaaccacctgtgtccatgccccatttcgtttgtcctaaattgatagtagacaacatcgtacttggttgttcttgcattccatttgcccagtcaattacttcgccttttttccactgtacgccgatatcgcctgaccaaatggatgttgaatagcgctgagctcctggataatatgttcttccagtctgccaaacacgttcattcgtgtaatcacgttgaccttcatacattgcttgagatgtaaaacctgttgtgaaattcccaaaccaataatccgctccattggaggatactttgtcagtttcatcattccaccaaccgacgatacctttatccagcgcatcttcagaatgagaccaccaccaattacgttcatccggattatacggatcgatacttctaacagtaactgggaacgcgtaatcttcatacgcttcttggcctggataccagtaaccatttgcctcagcatctttaccttgttgcgtttccgttccatcttgtagattagttaccacacgaggtttagtaataccaatcatttttacacctagtgcatccatatcattttttaaagtagtgtcttttgcggatgggaaattagttgtattccaagcaaattcaccgtaatcccctccataaacaggatctccgtaaaacttccaatcgtagtcaaaagcaaaagaatcaatcggaattcccttagcacgatacgtatcaatatttttacggaattcatcttcatttgttccccattcgaaattggagaaaccaagagaccattttggcatcataggagtatgaccagttacatcagcgtaagaggacatgatttcttcaggttcccctgacatcaagtacatttctacattttctttttcataacgacgtccttcaacaacggtatccccgtaatagaattccagcttttcttcgtctgaaacagaataaggataacccccgtcactgtctactaaaaggccataacctgctgtagaccacatgaacgggccaccagcattaccttgttgacctgcttgagctgtctttccgctatttgcagctgtattatctcgctccatcccaaggtctccgtcactaaaactaataccataagccccataaacatggtcagctgcaccgcgtttaaatctcacaccaccatcgaaaatcccaccatcagccgactcagataataaagtttttccctctttatctttaaaagtcattcgcgctggttctttagaaatttcaagtgtgcattcgtccgttgaaataaccataggatcagattctaaatcaatcttagccccaattgctgtaaaagttgcattaggatcaatcatcggtgtcgactcactattttcgatatttcgcggtcgtaaattaactttaagcagattattggcaagtggtgaaatttctaagtagtcatcttctgcttcatccccgttatcaatttttagcatgataacattgtctgttacagttgcctctaaaacatttccaagcccttcttctgcacttagcttcgcatattcttctttactaagctgttttgcagtttctccattcgcttgttgtttcacttcttttttctctgtttcttctgcgttaacttccacttctaatggttgtgttatccctaaattcaaccaaacaagcggcacaacagccatactgacacaaacttgcttcatcccttttttcatcatctcgctccttttcattcagtaattgttacaggaaaatcataccaccctaaatattctgatccattgtaatttagtgagatttctaacaaatgttcaccaggctctaatcctgctgtttcaatagtgtacatgtaagaacccgtataggatggatacactggtttataaagaaattcaccgttatcattaattatcatctcgttcccaggagctggtgcgataaaatctagcgcttgataaataaacggcacaaaaacatctaaattttcgccttgtttaattgtccttggaggataggttgccgtctgtccatcaaacgaacgattcctaatttgcccagttagaaaaatatcttctggaattgatattaaatgattatcacgaagaagtaatgtttctaaattaggcatattcatccaaatatctttcgctatatatccagaaagttctgcttgctccatgttaatactgactaatttttccatcccaatgaactcaggaatattaattccgaaattatttttactaaagtctactgtcgttaaattaggataatttgcgtttggaaattgagtaatgtttgcatcagatgcttttatagtttctaaagcaggaagactctccgataagtcaggcatctcgccaatattattactccaaatagctaattctgttgcgtttgtaaaaacttcattattcaatacattcaaatcttccccagttaaatttaaccctggaaatggtaggattgtgattgtatctaaatcttcttgcgtgataatatcatttacagaatctttatccaattcttcagcaatcgcctcagcaattgcttcaactggaaatgcctcaatgattggagctggcaaaggaactgtatccgcttgcacttttattgttggtgaaagtaaaatacaacaacttacaatgaacaacaatccaattatctttttcatctcttactcctttcaaagcaccaccctcttcacctcgaaaagggtggcaatgtgtttattatttaattacaacatgatcaaagttaattcccgctgtatcgcctgcttcaaaatcaaagacaacttggttaataccatcttgcaaggttactggcacttccactacgtcccaagtatcccagtcagccgttttcggtaaagcaatttgttgtttgttgccatttacataaaccgttcttgtagcatcttccacacccgcgctataacgcacttccatcgtataatcggatgcgccatcaactgcatcaatatcaaactcaactgcttctttttcttcatcaaatccagctacaaaaccagttccagtgtagccagcatggtcacttgcagttgatacgtttgttaaatgcccgaattccgcttcataaggcgcatgatttacaccatttaaaacgatagcttgagtagtatctgttgccgcagttttgatgtaagttaagttttgtacagtgtcatagtaataagcgcttgttgcttcattaaaggcatctagtgtgtctgctttagctacctcagctcctgcaactgttacacttgttggctctgtactgaaaacttgcatcgttgtttcatctgccattgccggaagattgaccgtaactttttcatttgcaaagtcttcagaaacgctaatatcacgcatctcgccaccatttacatcatcatagaaactgtactcgctgtttcctgatgggtaaactcggaacgttaaattatcatatgcttttaaatcgtttcctacattttgacctagttggtaaccatctgtcatattcattggaataatcgctccagcttttgcaaatacaggtagcgtatcaacatctgcatagtaagaaattgtttcgccacctggatggataccgccgttccaaatatctatccattcgccttctggtaaataaacttctttttctgtttggccttcttgtacaattggtgctacaagtaaatcatcgccaaacatatattgttcatctaaattacgcgtattaatatcttctggataatccatagccatttgacgcatcatagatttcccattatcagcagtatcttttgccgctgtataaatataaggaagtaaattcatacgtgtatataaatatttttggaatgttggtaaaatcgtttcgtcgccagttctagctactgcattccacggtgagcgttcttcacttggcgatggatctgatttttccgagtggaactgcataatcggtgcaaaagccgccattgctgttgcgcgtttataaagttctgctgttggataatttcctgtgaatcctgccatatcccatgcccagtaagaaacgcctgatgttgaagcactaagacctgcttttacggatgcttggaaagaatcaaatgtagaagtttgatctccagaccagtaaatgcccgatttttgtgcccctgaagttccagaacggctaaaggaaactgcctctggatttatactttttgcaaaatcgaaatagctggaaacataatctgttggataacggtttctcatttcttgccctttttccccgttagaaaaagttgtatcacggccccaaaccatttctccaccatctgtcttgaatccatcaattccgacatctgttagtaaatattcacgttgagatgtccaccaatttaccgcatctttatttgtgaaatctagtaaaatcccgttaccaaaccactgagatgctggaactcggtaaggcgcccctgttccatcgtccgcactgtacccttgacttatcatgtagtcttcatcattatctctttgttcatacactgtattatcatcttttaatacaggaacttgccataatacaatgttcattcctgcatcatgtacgctgtctaccattgcttttggatttgtccatttcccgttaaatgtaaaatcatcataggcaaaaggttcaccatttttcttcgcagtatatgtcgcgtcgttccaaatgtagtaagtttcttcatcactccattgttctaatacaaatcccgttgctggaatttcattttcttttgcattagaaagtgctgtacttacatcagattctctatcccattcatttgctgacatccaaagtccgaatgcccattttggtaataatgtagtttttccagtaatatctgtgtagttatttacaatatcattttgatcttttccgctgatgacataataatcaagcatattcgtcatatcgccatcattatctaaaataaagctatatttgtcttctacttttgaagccatttggaattgtgaatgaaaatcagaattcacaaacataccatatttatttgcacttacaaaaaacggtactgctaaataagttcgttcagtttgtgcttggtcttggtactcattataaacataggtttcaacatctttgcctcgttgattaatagtatcgtaacgttcaccaaaaccatagaacgcctcatcacttggcgtcataaaattattttgatactgattgataacatttttgccatctgtcaaccaacctaagctgttggcagttgtatattcacttgtaagtagagttccatctgcttggtacacttccatgcggtaaggagacttttggatttctactcgcaaatcgtcagttgtaactgttactttatctgcaccatcatctactgtgtaaccagtttttccagcatgtccagtttctttaccggttggtgatagttccatacgaagtgtatctaaatcctcaaacgaaagatataattttggagtgaattcacctgcagtagctgtcatatttaatgtaatagaatctccattatctacaacgctgctgacatcttgcacatactcccagtccgtcacgtaaaatgtaaacggaccactttcatattcagttcctccgtcagtagaaccttttgttgtataagtaatttcatcgcctttttcaaattttcctaaatctgctttccagtaagtattgttcccgctattataatcataagctgctgtaacattttcttgtgctaccccgtttttagtccattctacccaaacattttgtccatcttcaattggccaggtagtaatatttaatgtcacgtcttcaccagcttttggatctctaggagaacgttctgttggttggacagtatatagatcatcatccccatatggcgagtgatattccccatccatcgcgaaaacgtttgtcccaaatccacttaaacaactaaatattagtatggtcaaaatgaaaattaaactagattttcttccctttcgcttcatctctctttcctcccttaatgtatatttttactaaaaacatattacttttgatgtattatttcgcaaaattattaatttttgcatatctatgattgtagaaataatcacataatgttataattctttcacagatacactaaaaaagttcaaattactaataatcctacaaaaaaacgcaactatgccagaccattcttcatggaaaaacaataattgcgttcatcagaagaccttgcttaaaaaactttaaaacaaccagttaatacttttgaacaaagttaacatgtcttctccctcctttttcatctatacagaaatactaactcacaaatcttacataaaattaaaaagcatcaaatttgaacaaatggagctgagttttatgcaaaatattggtgatacattaaaatttattcggaaaagtaaaaacttaacacaacaagaggcctgtacaaatgctctcagtcgctctaattatcaaaaaatcgagaataataaaatcatgcctagtatggaccgttttattcaaatcttacttaatttcaatatgacgttagaagaatttgaatttataaaacgagactttacaccttctccaaaagaaaatatcctttatctatactccaagattattacctcctcagaaacagatatgatacttaatgttatttccaaatgcgacgactacttagaaacccacaacgatatttttatctctgacattaaagcctcacttgaaggcattttactagctgaaaaagaacataattttaaacttgctcgaaagaaagtaacctacatttgggacaggctttcggaagctgatgaattattttggaatgacatattaatattaagaaatattttctttatttttgaaaatgaaaccgctcaacatattgtaaatcgtcttatttctcaacttaaaaaatatcgttacttatatccaaccctttcgattgagatttcgcttcatgttaatcgtgctacttatttaattttggacgaaaaatatgaactagctttgcactacattgaattatctattaaaatcgctaagcataaccattattacttacaattttgcatggctgttgcgaaaaaaggaattgttctgtataagctaggtgaaaaacaaaaaggtaaacactttatgcaacgagcgctcagagtggctaaagtgcttgaagaagaacgtattttaagcgggattaaaaatgaaatcgattattttcttcatgatgagatgcataacctctctttgaatgaatttacaaaaatagacatataaaaaaagcctaaatctagcttcttcaactgttgttgaatgactagattcaggcttttattgttggcgctctttaaaggcgcgttcaatatcacgttttgcttctttttgttttaagtcttggcgtttatcgtatttctttttacctcgagctacaccgatgagtacttttgcgtagccatctttaatatacatttttagtggaacaatcgaataaccggactctttcgtttctccaattaaacggctgatttgcttcttatgtaagagcaacttgcgcgttcttagtggatcatgattgtagcggttcccttgttcatatggactaatgtgcatattgtgtaagaaaatttcccctttgtcgatacgtgcataggaatcttttaagtttacccgtgcgtttctgacggatttgatttcagtaccttgcaggacaatgccagcctcaaaagtttcttcaattgcgtaatcgtggcgcgcttttttattttgcgcgactagtttaccatcaccttttggcataactccccatcctttctagcgacgttttttcttcttcgggctttcttttgctacaccttgataaaaaggttttttcttctttttctttttaggttttgtataccattcgtcttctttacgttctgattttggtttcacgtcttctgatttaccagttctacgtttgttacgaccttttttttggttactcttaaagtttctagttttatcaatcggtttttcacgttgacgtttttgtttatcgctcactggacctggtttgccttcactacgaagagcaaaatcgatttcacgagcatctacgtcgactttagttacttctacttccacttcatcaccaatacgataaatttggcctgttctttcgccaatcatcgctaattgattttggtggaatttgaagtaatcgcctttcattgcgctcacatggactaaaccttcaatcgtggtcggaagttcgataaataaaccaaaattggttacagagctaataattccgatgaatcgttcgcccactttatcgaccatgaactcagttttcttcagttcgtcagtttcacgttcagcttctactgcacgtcgctccatttttgagctatgttcagcaatctcaggaagctcctcagcgcgtttttctaaagtttctggacgaacatccccgtttattaaatattctctaataagcctatgaacgattaaatccggataacgacgaattggcgacgtgaaatgtgtataaaaatcagtagacaagccaaagtgtcccgcgctcactgtatcatacttcgcttgttgcatcgaacgtagcattacagtcgaaacaaccatctcttccggtttaccttttacttcttctagtacttgttgtaaggcagctgggtgaatatcattggcagttcctttgacaattaagccaaaattagtaataaattcaaagaaacgtgctaatttgtcttcttttggatcttcatgaatacgataaataaatggtacatccatccagtgaaaatgttctgcaactgtttcattcgcagcaagcataaattcttcaatcaaatgctctcccgctgaacgttcgcgcataacgacttcttctggatgaccttcttcatcaacgactacacgtgcttctttgaaatcaaaatcaatcgcgccacgtttttcacgtttacggcgaaggatttcagccaaatgttgcatcgcttcaagcattggaacgattggcgcatatttttcacgcaatgcttcgtctttttcaactaaaatatcattaacgtctgtataagtcattcgttccgttgttttaataatactttcaaaaatttcatgattaaccacgtggccctcttggtcaatttccatttcacaactcattgtaaaacggtctacttgtggattaagtgagcaaatgccattcgaaagtttatgtggcaacattggaattactcggtcgaccaaataaacacttgtaccgcggtcttgcgcctctttatcaagtggcgagccttctgttacataatgcgttacgtctgcaatatgcacgcctagcttccagttgccatttggtaattgtttgacagtaactgcatcatccaagtctttggcgtctgccccgtcaattgtaattatcatttggtcacgaagatctcgacgattgccaatatcagaatcatcgaccacatcaggtgctttacttacttgttccataacttcttccggaaaagcaatcgaaattccatgtttatgaataatcgataaaatatctactcctggatcattacggtggccgataattgacttaacaacacctcgagctctggcatgtccagttgcatattccgtcaattcaacgataactttatgaccgtctaccggttttaagccatcctctaaatcaatttccacttcaccgaaaagtcgtttatcatctggcatcacaattggagtaccagctaagtcttccatataagttccgacgatttgcgttgtcttccgttcgacaattttcttaatcgtaccttctgccaaattatcgcctttacgtttcgtgattgttgcaaaaactaaatcaccgttcattgcatctttaacttcatttggcgggataaaaatatcgtccatttctttctcttctgggagaacaaagccaaaacctcgttcatgtgcgcgaaatgttccttttactaagtccattttttctggtaatgcataccgattcttccttgagcggacaatagttccggaatcttccagttttactaaagctttcaccattaatttaaaatcatccgcattgtttaaagctatttctatttctaaatcttctagcgcaaatgttttatcaggcgctgaagttaatagattcataattttttcttccatttgtttttgttccacttctgtccctcctctctctgttttaaaaaatgtttattcttgccaatctaagctatctaaaaatgttaaaattgcttggtttacgtcttttctttctttgtctaatgtgatgacatgaccagattctttaaaccagtgtaactctttctttgttgattctactgtatcataaatcagctgtgccccgctcacatcaaccatatcgtctttttcaccttgaacgaccatgattggtgcataaatcatatctatttcagacacaacgccattaatttcatcttttagtttagcgatagtattcattggcgcgtctttataggcgaccatttctgcatcgatttgttcaggcgttttaccttctaattttttataattacgcacataatctaaaaagccttgaattattggtgatgagctgtccattcttgttggagtactcatggctataattccctttaacggcctagaaaaacctaattttagtgaaaaaagtccaccgagcgaaagtcccgctacagcgatttccgtgtaaccgagtgattttaggtgatcatatgccgcaagaacatcttcccaccagtcgtttggtcccgtttttaacaataggtcaggagatacaccatggcctctgtattgaggcgcatagcaagtgtaattgttttcttgtaaaaacctacctaatattcttacatccgctgagctacctgtgaaaccgtgtaagagtaacactgctcttttgcctttttcgaataaaaatggttgtggtggtgttattttcatagtaaatatcgctccttggttctttttggaggtttggttgatctggggtgggtgttgtttttgttggagttttagggggatttgttgtacttaaaaatttgtgctcccctttttgtgttgttcgtccacttttgttatggaaacaacgctccacttcgttacgccttgtattgtagttctagggaagcggactacgcttctggagaactacaataataaaaaaccacctaaattttcattcaggtggttaacatctcgttactgtacaaaatatgccagtgcaattagtattgcgaagaaaacaatggatagaacgatggttgtacgatgtagaataagttctagtcctcttgctttttgcttaccgaataattgctcagctccaccagagatggcaccggatagcccagcacttttacctggttgaagtatgataactgtaattaacagtactgatacgatgatgagtaagaccgttaaaactgtactcattgttctttcctcctaaaaccgcccaatttgactaaggttaattttaccatatttggtattgtacgtaaaggtttgtttctatacaatagttaaacaactttttcctcaagccaaactagatcgtctaagaagtaaatcaagtcttcttctaaaatatctttttcacagtcgttcacaatatcgtgacctgaacctgcgtagaagcatagttgtttatcatttgtatgaatgtgtttgaagatataattggcgttatctgcgtcgatttcttcgtcttggcagccttgaccaatcatcgttggcacatgaatcttttcaatatcacgcgcaacatttttgtagaaagtagcacgtgcttccgtcattacgtctatttcaggaaggtagttttttaacatatcatctgcttcttgttctactataccttgtttctttaattgtttagttaaatagttttcgattgggatatagcgcattttacggtttacattggcgcataaaggaacaatcgcttttggtgaaaacgattctgccattttaagcgcaaaaacaccgcccattgccacaccgacaattgcaatttcattatatccgtctttttcaagttgacgatatccagccaccgcatcttcataccacatttccggtgttgttttcaagaaaatagcgggttcatccccgtgacctctgaagtttggtgcatgtactgtgtatccattttctgctagagtttctccaagttctcttacgtcttctgtagtccctgcaaagccatgcaagagcaaaacagcacgatttcccgcttttaacgtaaagctacgatccgcactcatttttacgcaatcctcctaatatcatcacttttataatccactctattgtagcccatctgaactaaataagctaccttttgagttctgaccaatagaccaatattaacgctatccaaggaacttgtcaaatacttttttcacacccctcaaacacgttggtattaaagggttttaaggtgtttctatttgtgaatttccgcgcttaaattggaaaagaaagtatgaattaatcgtaacaattgttttggtttttgcctaggtaaataatgaagcccatttctaacaataaccatttcgccgtgttgaacagaatgtaccattttcttcgtatctttagaagaaatcaaatcgtattcaccaacaactgccaaaagtggtgcgcttattttctttaaatccgcttctgacatatgtggatgatagatggttaaagcaagttgctgtttcatacgttcaaaaaaacggctaaacggagctaagagaactgtagctccataagcaacgcggcaaaacaaatctggtaaaaagcggatttggtttacatgataatttgtgccaataacgacagaggcgatttgacgttttggttgcattttacccatgacaagagcaacaataccaccgtcgctataaccaacgactttatatttatcaattttcaaaaaatcgagtaatgaaagcatatcgagagccattatttcaaaatcaagcggcatatttcctgcgtcacttctaccgtgtgcgcgactatctacagcgattacttgatgatcaagtgctaagtcatcaataattcgttttaaggaacggtgactttgaccattcccgtggataagaagaatcggttcgccagtcccgtatatttgataaaacaagttaattccattgatttttgttatcataaagcatttctccttgctcgagacttctaatactcttattttacacctgattatacttgatttcatataaaaatgcttctaatatattaaaatacgcctgattctaatcaagctagaatcaggcgcactatttatttcataagtctacgatggtattgttgttgcggtacgtctgcatcaataattttctttggtacagagcgcttttccgctaaggggtggcttttttcatgcaccacagcgtctttgattttcggagtttcgagcacttttgaggcctgactattttttactttcatcagcattacctcctcttccaaatcattacccctctcgctatttttaaaacagaaaaaactccacgaaaatgttacttttcgcggagcttagcgttttattcaatcaacttatttttttaagttgtagaaagtgtcgttaccatgatattcagcaagatcagccaaattgtcttcgatgcggagtaattggttatattttgcaacacggtcagtacgagtaggcgcaccagttttgatttgaccagcgtttgtagctactgcaatgtcagcgattgtggaatcttctgtttcaccagaacggtgagagataactgcagtgtagccagcgcgtttagccatttcaattgcatccaatgtttcagtcaaagtaccgatttggttaactttgattaggatggagttagcgatacctttttcgataccttctttaagtttagttgtgttagttacaaatagatcgtcacctactaattgaacgcggtcaccaatacgttctgtaagtagtttgaatccgtcccagtcattttcgtctaggccatcttcaatagagatgattgggtatttagtaatcatttcttcataccaagttaccatttcttcagaagtacgagttacgccttcacctttaagttcatatttaccagtttcgcggttatagaactcacttgatgcagcatccatcgcaagtttaacttcttcgccaggtttgtaaccagcatctttaattgcttgcatgattgtttcaagagcttcttcgttggatttaaggtttggagcgaatccaccttcatcaccaacaccagtgtttaagcctttacctttaagaacagctttaagtgcatgtaggatttcagcacccatacgtagagcttctttaaagtttggagctccaacaggcattaccataaattcttgaacgtcgacattattatcagcatgttctccgccgttaaggatgttcatcattggaactggaagaactttaccgttcactccgccaagatattcatataaatgtacgcctagttcgtcagcagcagcacgagcagcagctaaagaaacaccaagaatagcgttagcacctaatttacctttgttaggtgtaccatcaagttcgatcattgctttgtcaattccgatttggtcagttacgtcaaaaccgataattttgtcagcaataatgtcgtttacgttttcaacagcttttaaaacaccttttccaaggtaacgagctttgtcgccgtcgcgtaattctacagcttcgtattcaccagttgaagcaccacttggaactaatgcgcgaccaaacgcgccagcttcagtataaacttcaacctcaacagttgggttaccgcgggaatctaagacttcgcgagcataaacttcagtaataatagacatttataattctctcctttgttgggattaattgaacgaaatgaacaagatattcacttcaaatcaaagacccatccgtttttaaattcgtttttattgtagctctgtttgcaaaaaaactaaagtaataactaaaattatttttgaattaaactttcgcctgtcatttcggcaggttttttaacgccaagtaaatcaagcatagttggcgcaacgtcagccagacgaccaccttcacgaagcgttacaccttttttcgttacaattactggaactggaacggtagtgtgcgcagtgtgcggttttccttctggagtagacattgtttcagagttaccatggtcagcaaagataatagctgagccacctttttctaaaataagatctactacacgaccaagattttcatctactgcttcgattgccttaatagttggctcaagcatacctgaatgtccaaccatatctggattagcgaagtttaagatgatcgcatcgtgtttgtcgtttttaatgtcttcaacaagcgcatctgttacttcatatgcactcatttcaggttttaaatcgtatgtttctacttttggcgaattgattagaatccggttttcaccagggaattcttcatttcgtccgccattcataaagaatgttacgtgtggatatttttctgtttcagcgatacgcagttgcgacaaaccttcattagaaagtacttcgccgataacatttttcatttcaattggctcaaaagcaacttcagcatcaatgcttgggttgtaaagagtcattgtaacgaatttgatgtttttagggtggttagccccacggtcgaaatgatcccattctttatcagtgaatgcattagaaagttgaatcgcacggtcaggacggaaattgaagaaaatcactgcatcgttgtctttaactgttgcaacaggtttgccatctttagtaatgatagcaggaacaacgaattcatcatttttgtcattagcgtaagaagctttgacaagttcgattggatcttcaaatttttcaccttcagcgcttacgattgctttgtatgctttttcaacacgttcccagcgtttatcacgatccatcgcgtagaaacgtccagaaacagtagcaattgcaccatagtttaagtcactaatagctttttctagtgtttctaaatattctagtgaggattgtggtgccacgtcacgtccatcaaggaatgcatggatataaacgtttttcacgcctttatctttcgcagtttctaaaagtgcaacgaggtgattaatgtgactatgcacgccgccgtctgatagtaaaccgaaaagatgtaggtccgaattgttttcttttgtatgagtgaaagcattgtttagggctttgttctcttggaattcgccttcttcaattgctttatcaatacgagttaagctttggtagacaatacgtccagctccgatgtttgtatggccaacttcagagttacccatttggccttctggaagaccaacatcaaggccagcagctttaagttccccgtgaggaaaattagcccagtaacggtcgaaatttggtttgtttgcttgagctacagcattacctactgtttctgcacgtttaccaaaaccatcgaggataataattgctacaggtgatttactcattttattttactgcctccaataatgctaagaacgatgctggttctaagcttgctccacctacaagagcgccgtcaatgtcggactctgcaagataatcagcaatgttttcaggttttacgctaccgccgtattgaatacgaactgcgtctgctgctttttgagatacagcgtctgcaacttctgcacgaataactgcacaagtttcgtttgcatcagcacttgtggaagatttcccagtaccgattgcccaaattggttcataagcaataacagatttgattacttgttcttcagttaatccagcaagagctgcacggatttgaccacgtacccaagtatctgtttgaccagcttcacgttggtctaatgtttcaccacagcaaatgattggtgtcatgccgtgtttgaagattgcgtgtgcttttttgttaatatcttcatctgtttcgtggaagtactcacgacgttcagagtgtccgataataacataagaaacacctaagtcagcaagtgcaaacgggctaatttcgccagtgaaagcaccttcgtcttcaaaataacagttttgtgcagcaacgcgaagattagttccttcagtaagacgaactaattcttgtaaaaatagagccggtgcagcaactactgattcaacagcatcgcttgatggcacattattttttacgtcttctgcaaattgtcctgcttttgcagcagttttattcattttccagttaccagcaataattggtttacgcatttggataaacatcctctcgatattaaaaattatttttggttcagcttatttgtcgctaatagaagcaacaccaggaagctctttaccttcaagatactctaaagatgcgccgccaccagtggaaatatgtgtgaatttgtcagcaaaacctaagtccatagctgctgctgcagaatccccaccaccgatgattgttgttgcatcagttaagtttgcaatagcttcacaaacgccaattgtacctttagcgaagttgctaagttcgaatacgcccattggaccattccatacaactgttttagcgccttgaagttcttttgtgaataagtcaattgtagcttgaccaatatctagtcccatttcatcagctggaatgctatctgcactcactgtatggaaaggagcatcgttactgaattctttagatacaactgcatcaactggtaatactaatttatcgccagctttttcaagtaagcctttagcaagttcaactttatctgcttctaaaagagatttaccaatttcttgaccttgagctgccatgaaagtgaaagtcattccgccaccgacaagtactttgtctgcttttgtaagtaagttttcgataacaccgattttgtcagaaacttttgcgccacctaggattgctactagtgggcgtgctggattatcaactacaccgccgatgaatttaatttctttttccatcaaaaatccggccgctgattctaagttagaagcgattccaacgttagacgcgtgcgcacggtgagcagtaccgaaagcgtcatttacgaaaacgtcgccaaggctagcccagtattttccaagttctggatcatttttgctttcttttttaccatcaatatcttcaaaacgtgtattttcaaaaagaagtacttcgccgtcttttaactcatcaactgctttttcaagttctggaccacgagtagtaggaacgaatttcacttcttttccaagtaattcgcttaaacgagcggctactggacgaagagatttcccttctttatcttcttctgtttttacttttccaaggtgagaaaatagaattgctttaccgttttgttctaagatgtactcaattgttggaagtgcagctacaatacggttgtcgttagtgattttgccgtctttcattggcacgttaaagtcaacacgaactaaaacttttttgttttttaaatctaaatcagttacaacttttttagccatttagagttcctccattaattttaaaggattggggtcgcccccgttatttcagaaaataagcggaaacaatagtgtctccgcttattcttgttattgctgatgtgactagcacttcagtaaaattaatctgctaattatttagcgatttttgcaaagtattctaaagtacgaactaattgagcagtgtagctcatttcgttatcgtaccaagctacagttttaactaattgttgatcgccaactgtaagaacttttgtttgagtttcgtcaaataatgaaccgaaagtcatacctttgatgtcagaagaaacaacttggtcactagtgtaaccgaatgtttctggatcagaagctgcttccatagctgcatttacttcatcaacagtaacttttttgtcaagaactgttactaactcagtaagggaaccagttggaactggaacacgttgagcagctccgtctaatttacctttaagtgttggtaatacttcaccgatagctttagcagcaccagttgtattagggataatattttcggcagcagcacgtgcacgacggaagtcaccttttggatgtggagcatctaatgtattttggtcaccagtgtaagcgtgaattgtagtcattagaccttcaacaacaccaaatttgtcttctaaaactttagccattggagctaaacagttagtagtacagcttgcgccagagataactgtttcagttccgtctaatgtttcatggtttacattgtaaacgattgttttcatgtcgccagttgctggagcggagataacaacttttttagcgccagctttaatgtgtaattcagctttgtcttgtgctgtgaagaaaccagtacattctagaacgatgtctactcctaggtcaccccatggaagttcttctgggttacggttagctaatactttaacttctttaccgtttacgttgaagaaaccatcatgtacttctacttcaccgtcgaaacggccttgagttgtatcatattttaacaggtgagctaacattttagcgtctgttaagtcgttgattgcaacaacttcaattccttccacattttgaatacgacggaatgctagacgtccgatacgtccaaaaccattaataccaactttaactgtcataagtcaatttcctccttgaaaatagtgtttttttatttcaaaagggtattactcccttttaaaagcgattttgctgctccttcatccgtgattaaaatcgtattttttggagcacttttcatatacgacttgattgctttggcttttgatgtaccgcctgcaacagcgataatgtgcgggatttgcgctaagtcttcgaactgaagaccgaatgtaggaaccttatgtacaacctcgccttgttcatcaaaataataaccaaatgcttcaccaacagctttacgacggatgattttttcaagtacatcttcgccggtatgtctgcgtttcgccatcgcgagcgcatcacctatgcctaaaataatagcatttgcggattgtactaatcgtaagccttcttgaattgccggctctttcagtaaagaacgataggcttcttcgccaagttgttctggtacatagagaacacggtgttttgtgtttgtctttgttgccatcttatcacaaattgtattcgcttgattgtcaaggtcttcaccaatacctccacgaccgggaacgaaaagtagttctctgccttttgcgaaatcagttgtcatcatttcggcaacagttgccattgtagagccgcccataactgcgacgatgtttcttttttcggtgagtgccatgtctaattgttctaccgccacacgtcccatttcttcgcggacccatggtgtatcatcgctatcaccttgcactaccaagcattttttgatttgcaattttttcgctaattgttcttccattgaatgtaaccctgaaagctggttcatgacattttctaaatcacgaaaaactaccaagccttcttttgtaacggtcattccggaagaagcaatttctactaaaccttgtgctttcaaaaattctacttcgccgcgcaggactcgttcactcatgcctaacattccggcgagtgttcgtcttcctactggttcagaaaaatatatcgagcgtaggatttgatagcgtttttgcataatcattaaaacgtcgggcaataactttttctgaatgttaattaagtctgacatttttaattgctcctcatctttggacgctttacgacccacttagtcatctggcgtcccgttagaactaaaaaaagtagagatagaggtttttacaactttcaagactattaaactagctacttcagcttgttaacaaagtgtctctcaatgtgatttttaccccttctctttctgcttacgctggtgaatctttttttaatgttctttaactaccctacgttccctattctaacagtcttggcacaaatcttcaagtgttaagtgggacatttatgaaatattcacctgaaatttacaattaagttttaaaatgtaaacttctaactaggctatactagttgttttccacgtctattaaaaatgaaacatgctcttgctgatttttttattttaaaaagacattttttgtcccacagcctagttgtgaggcaaaaaatgtcttttaaaatctttttcttttggaagatgatggaatatttaactccaagcgatatttagcgatagctcttcttgaaacttgaatttctttttctgcgagcatatcaactattttttgatctgaaagtggttttagtttgtcttctgctgctacgaattcttgtactagttttttaatcgtggtactggagatgtcgccaacattttcgttttccgaagattttttctgtaaaccagatgcaaaaaagcgttttagttcgtacacgccggtatttgtttccatatatttaccatttaccgcacgacttacagtagactcatgcaccccaagttcttctgccacttcttttaaagttaggggttgtaaatgggctgaattgtcgagaaaataggctttttggtgacttacgattgcctcaccaactctttgtaatgtattttcccgttgttcaattcctttttttatccaatcaaattcacccgctttttcacggagaaattgggccacgtctttttcttctgttgctcgcattgtttcataataagcctcttggaacctgacttgtggtagaaattgttttgccaaagatactgtaaattcatttccatgttggagtaaaattaagtctggtactacatactggacacgttctgactcaaactcagagccaggtttaggatttaatgtttggatgtaatcggaaacttcttgaatatcttgcaagcttacatccatttctgaggcgattttcttccattttttctccgcgaattccgtgaagaatttttggatgacatcgtaagcaatatatggagcatcaggcgaacgttcgatttgtagtaaaatacattctctcgcatccctcgctcccacgccagcaggttccatcccttgtaaaatttcaagtccttctaaaacactggaatcgtccatcagaagtgctgcactgacgtcttttaaatctatttgtaaataaccattgtcatttaaactttctattaaatataaaacaataattttttgggtttgcgttacatccattaaatgcaactgttcttttagcgcatcggccaacgtcagcttattatcggctatttgttctaaccaatctgtatcatcagagcttccagagcttttacggctactataggaaaaatctgttgcaaaatccgagcctggaatcacttctattaatgggttctcgagtgctttatcttctaaaaatgccactaaatcagctgtcgcaaattgaagcatagcaatagactgtgacaattgttgcgtcatatttaatttcagcgattgtttttgttgttgcttttggacgaaattagattctaaacgcacattaaaacccccattaaaaatcagtctgatactactaccaaactggattatattccatttctagtcttcattataacatgccatttttcaaaatacagcacattatatttgaaaaaagtccaagcacgagttggagtgcttggactttttttattttggtaaatggtttaagaaattgcgagatgcaaatccttctacttcttctttcgtatagtgtttctctaatgtttggaggaagctttggtacttaccgacatgttccagtcctttgacatgatctgggataccatcaaaatccgagccaaaaccaatatttttcaatccaccaagttcacaaatatgatcaatatggcgaataacatcttccatatcagccacaccagagttcgtagtaaatagtgggtggaaaataacatcaatcattgcatcatgctctatcatcgctttaatttgatcatcatctaagtttcttggatgagagcagattgctttagcgcttgaatggctggcaataacaaactcagcttcatctaaagtttcccaaaaagctttcacactcaaatgcgaaacatctgtaaatacttttcttttatttaaaagctggatgatttctttgccaaaatgggtcaagcctgcaccgcgttcttccatgattccatccgctgccaggttagcattattccaagttaaaccgacagataatactccaccatcaagcaattgtgttagtttatctaggtcacgtccgattggttcaatgccttctaatgttaacattgcaccgattttatcttccggcagattttctaattcgcaccatttcttcacatgctgaatcattccgcctttatgaagaacgtgttgtttaaaaatattaacttgctcaactgctttcttccatttatgttcaacaggaacctcttcgtcaagaaaaatggcgaatccttgtaataacattttagcttctataagccgttcaaaattcacatcaagttcttctgcatcttggaaagtgtattttccttttccagcctgtaacttataaagcgcatcacagtgggtatcaattactctcattttctgtcgttcctccttttagatacatctattatatacctttcagaggaatagacaagaagtttatttaggacattattattttgtcattttatgttgtttacctggccaaaatgcccattttccaaggagtacggtaattgatggaacaaggaatggacgaacgataaatgtgtctagtaatacaccaatcgcagtaattaaaccgaattgtactaatagctggattggcagcgtggttaaaacacaaaacgttcccgctaaaattaaacctgcggaagtgatgaccccaccagtttgaccaacaccttctgtaatggcttttcgaagtggcattgtcttactgtttttccaaatactagaaatcataaagatattgtaatcttccccgagtgccacaataaagacaaaggcatatagtggaatcaagccagaaatagcttctactcccattgcataatggataatgacccaaccaagtccaagtgctccaacgaatgaaagtagaactgttgccactaagtaaagcattgctgtaatcgaacgtaaataacaaagtagtaaaatggcaattaaggtaatcacgagtgggataatcactttttcatcatgctgtgtcactgcccggtcatcatattgtgttgctgtttggccggctatataaacatcattgcctttatcagcagcggcgcgaacttttggtacgacatccattgcttcattgctgtaaggattgtctttcaaaataagtgtgtatttttggtaacccttgcttcgttcaggcccagtaaccgaagctactccatccacattttcaagcgaacttttcattgattctttggaattaacaaccacttccattggtgcgagcatacccgcaccaaaatgatcactaattagtgtgaaaccttctcgagatggcatgtcttctgggaatgtcgaaagtgtatcatacgtatatttgacttgagtcgtgaaaattccacagccaattagaatgattaaagtaataatcaaaatacgcacaggatgttttgcagacatttcaccaattttatgccaaaaacggttttctttgtggtgtttcggtgttttcccttttttctttgcacgggcttcttccatttctattgttcttgggataaatggccagaatgaaacacgaccaaataagccaagtagcgctggtacaagtgttaacgaagaaatcatcataatgaaaatcgccaaactaaaaggtacggcaaagttatggaacgaaccgtattcggcagctaaaagtagcagtagcgccgccataacagtcaagccactaagcgcaattgcccccgctgtcccactaaaagcttctttaaatgcttggaaacgatttttttctgtgtgtaaatggcttcggaatctagcaatcaagaataaacagtaatctgttccggcaccaaatagtaatacggtcattatcgagagtccttgtgaaccgtatgtgataatcccttcttttgcgagtaatccaagaatcggcgtaattactaaataagcaaaccctactgcaatcaaaggaattaatgccaaaattggcgaacgataaataactaataaaaagactagaacaagaagaaccgtaccaattaacagtgaaacatctgcgtctttaaataatccgctcgcatccacactgataccagctggcccagttgtccgagcaactagtgtgtcatcagctgacactttcttcgcaaaaggatcttcgccaatcgtttctttagcagttgtttcgagttgtttaaagctctcagctagttgatctgacgtcgcactatctttcataataacggtttgaataaaagtggtcccatctttagaaacttgttgttttaacgcaactggtggcattttatcatatggaactgccattttttggaagtcaactgggtttttagttaattctttgctgtatttttgaatattagttaaatctgctgttgttaagccagttgaacgataccaagtaacaagtgctggcgtcccgtctgtcccagcaaatttatcatcaattagtttttgagcaactactgaaggctctgaactaggtaaatctttcgctgcatcgtctttgtaatcagcagcttttggaaagaaaaactgtaaaattataatagcgataatccatatacctagtgttataaatcgacctttcttgccacctacaaaactggctattttacttaaaaatccatctttcattataaatccccctttagtttgcttattttttcgtttatcaaatgataagtgaaacgccaaaaaaagaagcacgctaaattatacctcttttttacaaataccaaacatcattaaattgattaattcatcgatttgttctgtagtcgtttgtttttgcgcgaaactacctttaccagaaaacagtgggctaatagttgacaagcagtatcgtgcggccgtttcagcactgacacctgcgcgcaactctcctgcattttctaagcgctcaaaaaattgttgaaacggcattaaatatgtttgttgccataacttatatagtaaaaactgattttccggcttcatttcattaagaatatcgtgaatcattagtaaaatattagtcggatgttcttcaattaacataatcaacatatcatgtaactgttcttctttcggcttattcaattgtaaaatcggatgcatttccacctgaatattctgcgtcagttcacgaactacttcaatataaagtgattctttatcttcaaaatgatgataaagtgctggttgggtaattttggcgattttagcaatttctcttgttgacactgcccggtaacctttttccatgaataaatcccgcgctgtgtcgagaatttttcttcttgttattcctagttcttctgcccgagttcgtttcttttccatcattaccccacctttctcatttgtttatagtaagtagttgtatatttttatcaattaatttttgtaaagtttctttgtgccatttccgtcctagaactcgtttacttacaagatattttccttcttctagttcgccgtcctctgttaccgcacggataaataaacggtacaccaatttctttttaactagcgcaatttgttgaatcgtttttgcatctaaaaagtgcatttctgcgtcacttaatttgaaaacaaatgtaaaaatcccagcttccgtaaaggctaaaataagcgagtggcgtcctcgcatatgaggtcctgcatataaaaaatcaattgtttgaacgttcaaatgattatcttcactatatgttcttacttctttttctaaccgttctttcaaactagcagccaaaataagcgcctcccttgctgatttatattttaccagaaaatgctgggttgaagtagactaattttagcagaaagttaaataaggtatttatctcttctactaaacatggtaatatcaatcttggcatttaaaaagttagtataaacgttattgcgattatataaatattaaaaaggaagttggtaagagaatggaagaacagcacatcattgaaacacgaaacgggagaacatcatttttcgatggaggtttactgcaatatattggttggacaatacttggcactttggtgacgatttgtaccattgggatttgctatccatgggctttatgcatggtttatggttggaaaattaatcatactgttatcgaaggcaaacgtttgaaattccaaggatcagcctttggactttttggacattggattaaatggttacttctaactattattactatcggaatttatggtttctgggtttttattaagttagaagattggaaagtaaaaaatacgatttttaaataaaaaataaaaacatcttacaaatgagctttcgccaattgtgagatgtttttttctatgccctcggagggattaacgagtattgatacatagccatttataatgcgattgccacaaatcatgccacaaatttttaaaacacttgcaattatataatacatgtattataatataaatatagaaaggagttgagaaagtgaaagatgttttagaggaaataaaaacagtccttgaaattatcactcttgtagtagcgctgacaacaatacacaagaatgataaagacaagaaccgctaaatcagaggggtgaaactcccctccctctattaaaagtatatcacgtctttcataaattatgaataaatatatctgggttatattaattgttatctgtgttaacggactcgctagttactttcagaatatagcattgaccatcattgctatactgactacattagcttgtttagtgtacttaataaaaattaggaagtgattaattatgacgaaaaaaacgacctctgacgcgcagttgaaagcaaataaggaatggcaaagcaagaacaaagaacatgcaaattatttaaaaagccgttcagctgcgcgatcttttataaagaataaagctacgttggaagatttgaaggaacttgaaaaattaattatagagggaaaaattaatcataagggaatgattaaggataaatgatgcacgctaagcacatgcttggcgtttttttgcataaaaaaagccctaacggtggggttaagggccatatatttctagttattcgaattaactaccactctgtcaattaacatttctttccacgtttcaggaaaaccaatcatttctagttcaataacctcttggtatttttgtattaattcttctattttatttacaaatatttcccactctgtttgatcaacgcacaaaaatttgaatataaatataacaataaatattctctttatatttagtttagccgtcccattaggtaattttggcgatactgttatcgttctattatagagcctcccattatgggcgcatatatttcgtattaacacaactgtgtgtaaccaactttgaatatattctgcatcatatccataaattttaaccattttctttttaattttaatatgtaaattactataaaacttagaaatatcattgaaattgcaaacttctactacaatccaaaaaggaaatttcccgttatattcttttttataccattcaatataaagttctctattagtatcagaataacttatgctactataaaatttattaagccattttgcgtagtattctggtttattaaaattattagcatatttgtaagctaacgggccgcaattatgcgaaaaatcataagcaagaacagatttaaattccgtttcaatcgtatctagcatagacaataaaatatttcttaattctttatcaaataaataaactgaagaaattttttcaaatgttattccaggtttcaaaatatctttttctctatcttcaaaatatgataaccagtatccacttagtctataatattgaaccttttttaaaaaactaattgcaaatgcctcatcttcaattattatatttttttgtttcatcttttcaatttgaatttggtatgttgtcgccggtttatcctgcctctgcatctacgaacacctctcaaattatataaaacgaccccgcctgttccacattattaagaggtgtgcggggttttattaattaaattataacctatgcatttcattttgtcaacaaaaacaaaacatattagtataacacaaaatacattataaagcaatttacgttttttctcattttagtgtaacatacaacactaaaatgcgcaaatgtaatcaaaaataacccttatagagcattataatcaataaaacgttgcatttctgcggtttttatacaattcgcttggattattacagtttcattacatttttttgttagtcgctttcaaaataaaagccccccgctcaaagcgagggttttcgttttatttcaagaaatagttagctgtgtaataccagccatcagatggataccaaagctctaagtatccttttccgttgttgtaccatgctaatttcgtattaggtgcataccatttaattttgcccgaactcaacttcgtattattccaaaccggaatgcgtaaatcttttgcgcttttaattctaactttgatgcgacctttcgcatcttttttagctacaacatcgcaaaagctcttatacatgtagtataatttgtcgttgatgtacgtcttgtaccaatattgattatgttcgtatactaagaactcagttcccgatttatacatgcggaatggcgacgatttaaagtccatttttggaagcaatggcgcactgtcaacaacttttccatcatgtctgtttttattttgtgatgcacctttcaattttgcattgactgcgtttctgaaacgtgttaattcggaaggtttcgcaacccaaggcgcaggacaattttttccggttacatcgtaatgacggataatgtcactagccgttaaatcgtatgttttgcatagctctgcagctacatcaactgatcgattaaatgttgctgcagtgatattcccgtttttatctaagcacatttcaataccaattgaggttaaattcgcatttccgccgcgatagtaacttgtacttgcttgaagagctgttaatttgcaacttctttcgtttgcatggtatgcaacttcatttagagggataatacaaatagcttcattatcatcaataaaaatatgtgcagaagcgtaacgctcttttaaatctctaaaatatcgtctgtgattatctgcgcttgccccagggtttgcagtatagtgcataacaatcttacttactctaagcaacttatatcctgggcgtgaaaattgatttttattgatataattatattgtagtactgacattatttatcatcctttcttggttctgaataattcattactttcaaactatcggagaatttactagttgttgggtccatcaaaataccgacaacggctacaattgtggtaataattgccattgggctatttaggaaccttacaaacgaaagccacaagacggaccagttatctaaatcagatatagtaaagcctcccgctgtccacgcgacgcctagaactgtaataagagttgccacaacagttcgccagtttttcaatcgtaccttccagttaattttcatcatttcacctccttttcatttttttcagtaacatatttccaaatcgctttatcttcccgtttcaataaagcaatctctttatcgtggtcgttttgcttttctcgtaaactcatacgatctttcttgctttcagacatttcttctctaagactttttaaagttatatcaagagaatctatcatattccgcaaaggtgcgactaatgcccatctaattacaaatcccacaattgccgctattaagctaattaaagctattaactcccccacgctcattcctgctatcgatatgctcccaagtaccaattttcatcatcccctcgttgtcggtccataaaaaataagcctattcggcttttgcttctttcatagcgattatttcatctgcttgtgatctcgttattttttttaaagtaacgaatttattaacatctgctttagtatagtagccaccgacaaaataatcttttactttttcataccaattaatcatctacaaaacacctgcttccgccaaagataatagtaagtttgcattatcttgttgcgtttgttccgtcttctgctcgacttctgctacatacagcattaagtcagcataatcttgcgttaatttttctatttctgatagtggaggagggtccataacacttgcgtcttcaccagcgctccatttttgggtctttacattaaaaactggatttacagaaggaactggcggcgcaattaatgtataaccatctggaaccttttcccctttttccaaaacaattaagtcgtcacgttcaaaaataccgtctgcatcatatttaaaaacttttattaactcgctcatgttgtcacctctttagttaaataaattatgccgtcaagtccagtgttcacgtctaccgagccaacaccaacaatatttatatcagcactcacacttagatatatattcgcttgattacttgctgctgtactctgctgtgcagcggaataaagtttattccagctcgcatcaggagctaaaaaagttggcaatgttgcacatatacctgtcccgttcccggtcccttttcctacaattccgctaacaataactagaaaccggttgccaaacttaatgtatcgagcgactaaaggctgacttgcaacaaatccgttttttggcgtcaaagtaacgctttgcaccgcactagctagttcgaaaaaagtttttgcatcagcaagtgctttatctgctttagcctgtgcgctagatgctgtttcttttgaattccagttagttttatctgctgcggtgacatgaatatccgcattatttacatgcacatttacgtctgttttttgtgcaaattgtgacggattaaagctatcaaattgcgtttgtagattattcgcttctgtctgtagtttactcgtttctgtgtcaatttttgcgtcaagtccagctatttcattatctagccgcacactctcacttgtcacctcatcgtgcaaacctgtaatttctgtttcaacatcagcaatcaaactttctaatcgctcgaaatcacttatataactctcagcaataactttaccttgaagcgggtctttctctacgtaatatgtgaagcgaggcattccgcttagttccgttttatccgctttttgtaaaataaaacgggctgtatcatatacgcccggaacggaaaacgcttcttttacgaaagtatactcgaaatatccttcgctcaatctgctagtatcaaaatgtaaatcgtcaataacataatcgtttgttcccggtaaaactaccgcgaatgtaggcgtataatcggataagttcatgccttttccatcgagaacgattcgcgctgcaattgttaatgaattaatatcgccttgtattgcctcaattcgctcaatactccagctttttctattcaagtccaaagtcgcatttatttttcgtaagttgctcatttattcacctcattcactaatttatttactaagtccttcaactcttttacttctgcttttaatgcttctttttcggcttcattttctttcgcatattgataaagccatgcaacggaattatataaatcaattgcctttccgtctgctgtggtcaatgaatcagaagcttgttccgcgataaaaccgattttcttttcgttagttttatctgcgatatgtgaatacgtataaacatccgtttcagtaataacttgcttagctgttttaccaaacgcagttttctttactttacgtatatttttcttatattcttctgaactagcagtctcaaaattactagctcgatgcggcacataacgtaattgtggacccccgccagagacccacgtgtatctatcgattgaagctgttttcccatccgggttcgcacctatgcaacaccaaccgtcgctttgaatgagaggcgtttcaattcccgcgaacggtgatagtctgacaaccatatcagcatctatcgcacccgtattttcattcacagcttcaatggcaagccctaaatcaccatttgtatttagccttacttgcattgcgggatatggttttgttgtagactgcgcttgtaaattaaatcctgttccaccgcccatctgcagctcttctcggtattgcggtgatggtttactgggtaaaaaactcgaatataaaacatcaaaataaccagctgaacctgtaattgtcacgccttcaatgtcaatagctcttaaagtccctgccgctatcaaatcagctactatcttaccatcttgtgtgagaccaatagtgtattcaccattgtatcctgtttttgaatgacccagccccatttgattaaatctccacaaattgactgctgtactaatattatcagtatccataattaacagttccgctggtttttcaggaggacgaatgatcaagtttccgccttgatttcccgttatttgctttgtcaaatcatctacatattcttgcattcgattgtcgccagcttctatttcatcttttgtagccattcctgcagtcatcgttgattttaaatcactcttgatactcccgacggtacaattaacatattcacctctcaaactgtccatcgtgaactctaccatacgtgcagttgcttcgatgttcaattcagaatgaaatacagaaagcgtatcaccgataaatattctattcatattttgaaacattttatactcttctgtttgtcctaaatcttgaaagcttatttctaaatctaacttaggctcattaatagtattactagaaaaataatttttagatgcattgcgaagtgtgatttcatcaactacgttttcatcagaagaataatcaatttcaacagcgtttatctcatcgcccgttttgtaatccggagagtagatataactctctgacaaagaaataactgtatctgagtcgttcactgttttaatcgcgtaaggcatgattgcatttaccatatcaagcgtatcagtatttatgtttaatcctgtcatattctttctatatgcaatcacaacaccgctgtccgtccctcgttttttcaacattgaaatcttgtttgttgttctttcaatttcaccgcgccatgtatccaaaatagagccttccactccacctatgcacgataatgcattcttaaaacgtagaaacgtactattcaatgtagaaatatctgaataaaattcaatgtttgtaggttcaagtaacgagtctttcaatctattcattgcagttccacatgaaactttatctactttaaattctttaatcattttttttcttaatttatttgtctgatgtgatgctttgatgatgaatgtatcagcaaacaaattcttttctacagtgtctatttcaaaaggattataacctctctgcgaatcaacgaatgcagaaatataacgtccgtttatcaaatcgtgtgcatgggaaccgttgacaggatactctaattcaagttcaaactccgcattcataacttcatgaacttcacaacgcacagtttccgataacgaacaaatcccgctatgcaggaactctgtttcatctgcttcatataaaagcggtatatttaaattacgctcgaccatcttgtcgtcacctgcactttcgaaacatttccgctccaagaaattgtattttcttctaaatcaaaaaacggaaacgcatttttactataatatttattgtttattgacacataagcattatctatcaattgatatacttctctcacttcactatctattccgtaatttccttgaagtaagtttttaaatataaattcatttccgttcacattgatagtaatatctcccgaacctgaaaattcaatgagcggttgagaaatgaaagaattcattttataaattttagcgccgttttcaattatagtaggatagatacctgacaaatcattttttagaggcgagcaagtgacttttgctgtgaaaggtacaccttcgatataacttgtttgataggataaagttatttctgtgaattttacagaataataatagttttcatcgaaatagaatttcgctagatggttcactgagtcttgcagtttagaagtgatttgataatactcatcaatagcagtttctgtattttgcgctttcaagaataatgataatgtaaattcgacaggtgagtaagtcccgtcccaattcgtcaatgggaggaatcttcccggaatttctacaagtgtttcatttctttcagctcgcggaatttccggtcgttcttgaatgtatacattattttcataaaaatttataccgttaaaaataaattctccatctctcatattgtcacaccgcccatgctactatctttccgtcttgtttgttcaacaagaattttttgcatttctttcttcattaaattaatcattgacttgtccacattgccattcacattgatagtcaaatcgtatgtgtctccaccactttgcggcattgtgtcagcaatcattttccctatcgtgcctaaattttttgcgtttaacggcaacacagcttcttttccagcttctccgccgaccatggcagaacttccattcatgccaaacatggtaggttttgttaaaattccaccttttgcgtaccaatctacatctatgcctgacgggaattttatctccttaccgaagaccttttttgtgcttgtttttaaactgaaatgtggtaagtcgggcattgatggtttaggaatttttaaaatcaggtttttgaaaaatcctttaattttatcaacaattcttttcacactgtcttttgctttttcaatcggatcaatgattgatttttttattgaatcaaatttttctttaactgccctttttgcgtcatcaaatttttctttaatagaagaaaccagattactgattttctctcttactttattgtacgcttcgacgatagggtcaatcattctttgtttcaacgctgcccatgcagcttttgtaatagctttagcaaactcccatttttcttttatccaatttgctaaatcagtaaatttttgcctaacgtagttataagctgcaatgacaggatcaatcatatattccttaaatagcaaccaagcaacttttgtaatgagttttacttgttcccatttttcttttatccaattcactatttttttaaatatatcctgaacccatttccacacgttttttaaagggtcaattataaacgtttcgaacgctccccaagccacttgagtcaccgcaacaattgccaaccacgccgcttcaattagagtagtaattaagctgattatcgggtctaagaaagtcattaacccgtcccaaacagcgacaatagtatccacaatagactgccaaacttccgaagcagttgtttttattagttcccatttttctttgaaccattcaataatcgggtcccaaaactccatccatttttcttttaatccattccaaatatttgcgaaaaactcaacaataccgttccaaatatcatagttccatttagcccacgcaatgaaaagatccatgagccattgcttgattccttcccatgcatctgaaaaaatttgcttaacattttcccataaatcactgaaaaagtctgctatcgtttcccaaacgcctttcaaccaatcgacaatagcgccccagttttttataattagaatgacggcggctattgctgcggctattgcagcaatgacggcaatcacagtacccacaacgcttcctaatattacaaacgcagcaattactggagccaatgcagatacaattgacataataactgtaaacacccctgtcattattcctacaaattccatgactttcttcgaaaacgggcttaattcatcaaaccatttttttaaatctttaattacacttacaactttcgggactattgtattagctagttccaataaatattctcctattggcgcgagtgccgtttgtaattcatgccacattttagttaagtcttgtttgctatttgtctctgtcaatttttctgatgcgccttttacatcatcatatttcccttgtactgcacctagctcaccatttaaatcgcccatcgcagttaaaacttttacagtattgtcttctccgagagacccaaatattgctgatacaatagatgccctttcttgttcatctccaactttatttatttcagtagccaaattagcgaaaatttcattgttatcgtagccatcctttttcatgtccgcatacatggttttccactttccgcccagaccttcgacagctttttctatcgagtcatctgacacacgaatcccaaattcttttactaaatcattaaccttgtctaaattataagcgcctgaatccaagccagcctctaaagtttcgaacatcccttgtgcgctatagccgttttgcttgaactgcccggaatattctgctagattgtcccccaattcgtccgttttattgagtccgttttgcgctcctacagtcattaaatcaaatgattgttcagcggacagcccgtaggtttccatcaaagcattagcgccgcgcaacgtttcattcatatcagaatcaaatgttttagaaaatgcaagtgctttttctgtcacactttctagatctgttgagttgaggtcattcaattgtcttttcgtttgagtcagcgcttcgccagcttcctcatatgaatcaactaaaccagtattgtaaaagtccacaatcgtatctttagtttttttcgcttccttgccaaccagaccgaaatttttgttaaatttccctgttgcagcgtctgcatccaaagcgctgtcaaatgaagctttccctaattctatgactttatcagtcacaccttgaacagcttcggctccttctaacaatattccagtgtccattttcttactcataccttcgagagcttcaccagtttcattactttgtgtcgataaactttttaaatctgtttctacactttgaatactttttccatcatctactgtatccaacgcatttttcatcttaccaacatcaacatcagttcctaatgccgctcgaccgattttatttattgcttcttctaattggtcagacgtggctgtaccattgcgaattgcgttagtcagtctaccgcctaaaatgtccgcaaaatcatccacactggaacccgttgcatcaaataaagtattaattctttttgtgttttgacctaatttttcttgttctacttgtatgttatttaattgtcctttgtaaccattcaaagcgccttctgtatactcgatttcacgtctaaaagctcgatattgttcttcaccaatttcaccacttttaaactgtgcttctacttgactttctgcttgctttagttgatttaatttttgagtagttgtctctatttgctttgtcaaaagttgctgtttttgtgcaagtgcttcaacattgcctgggttaaatttcaatagtttttcaacatctttcaattcactggttagcttagcggattgagtgttaacactttttaaagctgaattcaacccttttgtatcgccatcaacttcaattgtaataccttgtattctaccttttgccaatttatttccacctcctaaaatgcatcgaagtctgcttgtgatgctcttctagcttttttctttttattcggattttgcgcttcttcatattctgcaaagtaatccaaacaagagcctaaagtcatcatttctaaatcatcaatcgtcaatccaacttgcttgcaaatataaaaaaacgactcagcggttagcggttcatcgctagcgcttcgagacgtgtctgttacttttttttagtttgaatacttgcagcaaggagatcttcaatttcgggcatgatttccacaattgggaatgaatcaaatccatccaaccattctaacggttccggaatagtaggattagcagttttagcaagaacccagataaaattataaaggatctcaaaatccagaagtgataaatcactatccgctaaattagtcatttttttattttttttcattggttcaatagcttttgtcattttcaataattcaccaaaataatctttaccaaattgttgtttgtatctaagtactgtagcccctgtacttttaagcgggattttcttaccatcaacttctattgttttttccatttctcatcctcctaaatattaaaaaaaagaacctagaaaaattctaggctcccgctggtgttttttcataaactgctttataccaattgttgtaaatttcatcaggtactcccgccgctgtttttgttttaactgctttatctgttgcgcgtggtcctgctgaaaatgaaagctcattcgtgttaggttctacagaatcagttttagtagaagatgcaacggttggtctgctagcagtacaattgtacagaacttgacgaactgattttacatcaccatcaaattcaaataacaaagcgaatggtttcggtttagcatccgatttttcggtaagtacgccatccacagtgtccagttcttcccctaagcaatctgttgcaaaaccttcgggaatacttgcaattgtcaatgttccttcgtatccttggttatttggcgcttgataataaacaatgttgtccgcataaaatttaatcatatctccttgtggttctacggaaatttctactccgcccggtaatggtttaggagtatcgtatgtgattaccccatcggtttcactgtatgttgcgtaatgtacattttcaagtccgaataatactttattttcttgtccttccatttaaatcatcctcacataataatattttacaaacattttttcttcctctatccattctgtttgagaggaattgaaaggcagtttgtttgccattaaagcattttctaaaagtaattctgctgatggtgttttatattctgtatacagttcgatggtgtaatttgatattttttttaacacaatattatccgccatcaagttgacactgtcagactcgttatatgtcagatatggaagagcgggaattggtgtgttgtccgtttcggtgaagtggttgtatgcgacaggtagtcctgtttcgcttaaaacatcttttaagttcatcgtctcaacgccctttccgcttctctaacatattcttgtattacttcttgttccactggctcaatatgtttgtaagctttaactcttcctccgcctcgtttagcatgaccgttttccaagaggtgagttttaccagggtcggaagcattgtaaataacatatcctgtggcagtctttttagctttccatcctctcgcgtatctacctttttttacagggcttctttgttgtagttttttcgtagcattagttgcgacttttttttgaatcgtttctagttcttgttcaacatctttagtgtatgttttcaacacatcagcgatagcgttatttaatccttttatcttcaagtcaaatcaccgccctcctaaatcacgttcacaagtaagttctagtctttctgaatcaacgctatatgttcgaataattacatactgtttgttttcaaaaacaagtttcgtttggttcccatattcatacccatgaatattcaaaacgagggatggtttaaaccctctagtactcgcctcgtaaaactcttgacgtgtaacatttttcttctcacatagtattttaatttcagttgactgtggtatttgatttcctatctcatcagtaacaagtttttctgatactaaagttacttcatcattccaattcattcacatacacctctcgatattgaataataagattatgcaaacgatactgtaaatgacgaggcatgttttcagagtcacgattgttgtatctccaagacgtataatcaactacaaacattaaatgattcgcatcatcaacatttaaaacaatgcttttttcattttctaactcttgaattactccgtcgattatcgcaagtaaataggtatctctaacattgctagaaataccttctcttgcttttacaagttctaaaattgtatcggtatccatcacttatcactttctaactctgtaataagtggttcacctagtttattatcagatgacattaatttatctatacgaggtttttttggtttcccacgaaaagggtatttgtcccctttacgataaatatgtttttcatcttctaaatcagagaaactttttagcacaacatatttactcatattctcacgctccttgtgtaaatgttaagaagtacccagcattggaatctgcttgttttacatcaaagcgagtgccaacttgtagatattgaccgtaaatttcgttatctacccaacgcgcggtaatgtctacacgatccgcaaatagaacagcacgttttaaatcgcctaagaatgcatgtgcttctcctgctagtcctagaagttcgtcattaacaacctctaatttgattccgaacaaagaagttccagacggcgaagtaatatcacgatgtaaaatatattgaccgtcagagtctttcaaagtatcgacccattgcaagaagctttgagatacgaccgcattacgttcatacgcagggtctaatgtcacatttaaaatttgtttaatatcatctgtatctgttacagctttagcggtgaatgtttttaatacttctgaaatagcataatttgttgtattgattttttgttcttgtgcgttttcagatacgatactaaccaagtcaactgctgcgtcgtcaattgattcttgagaaatcggaatagcaccacgataagttacaacttcccaattaatttgctcaaattcaggttttgctaattgaggattggcttctaattcaggtacagaatttaatcgagcagtagcacgttttaaaatcggatatttaccggaagcggtgctaacttttgttttagatactaattcagctaaattagtgacagtcttaacttctttttcaggtgaataaataatttcttctggaatgataacccctgcatcagtagatactaatccagctcttgtttgaccctttgttcgaataaatgtatttactgcactacgtacttctttatctttatattttcccatgcgttcttcgccctctcctttttcttcgtctttagaagcgttaggtttgtcatttgcttcttcaagttctttttctaactcttcaatttttgctgttaattcgtcacgctctttttctaatttttctttttcggtttctaattcatcgacacttttttcaactgtctcaacttcttcttctgtttttgcttcttcaagtgcgcgagttaatacgccttcttgttctttaaaagatttagaacgagtttctaattcctctaattcaccgcgttttgaatctaattttttttgaatcattaattgttttaatgccataatttcaatctctcctttaattgatttttttttgcttccagttttcttttctcatgccttttgacatcattttgtcttgcttcaacacctgtatccgaataagccggaaatgtacaaacagaaacttcatgtagttctacttcttctaacgaccatttgactgaaccatcgtctcgccattcttcttgttcttttatgatgttgaaaccaaaactacactggctcacatcgcctctttttactcgttcgtatagattaattgcatcggagtccaaagggttaatttttatctgaccccaaagtcctttatcatctacacgaagagagagagtcttagatacatttcgtcccagcacaagtgccgtatcatggttaattaaagctctgacatcattttctaacgtattatcaaatgcaccgggtaatatttcttcaaatgcgccggggaataattctgtttcagaattaaaaacagcgaaatagccttcaatgactttttcgctttcatctgtttcatttgtattaagttctgctcgtctattgactatttgacgttctccatttctattagtcattcatcatcacctcctttaagcttgttttgacttcctagcttttcagaaggaataaagttttctaatgcaagtaattcctccatatcctcacgtggtgccatgccaatccaatcgcgaagttcgtttctatccattgcgattctatccaccatttgcccacctgctgcgactaattccgtaatgtcatatgaatacaaacttcgaggatttagtttgaaaaatcgtgttggactgattaataaatctctagtcaacgtttgcgagataatcattgcgattgacatgattcgtgtattaataaaattattaaactcgtttttgtcaaactctcctacaccaacaaaaaaagcaggtactcctaagagtcccgccaccgttttcttatcaatatttactgcttcattaatagcaatgtcatttaaacttaaaggtttaacttgttctatttctattaaatccgccggaattatccaaggttttccttcttccgttcgctgcaaatacatatcttcaattttgtttttgcctttttctgatgacaattctgctgcatttgcatctacttttacaattaagttcggcataaatttactgctcataaatgccttcttcgttgctgttgcctgatttaaattatccacaagtgattttaaagctaccctgtaacctgttccgataaacggatattccgagtctggattaatagcgaaatggaccacttcgtcgggattgtatgttttgtttttataatgaatcttgtacgaatcatctcttacatcgaagtcaactaaagatgggtcaagcggttttaattcactaatcagtccgttttttatctccggtaaaacaatcgcatttccatcaccgtaaagtaataaattagatacgatattataaatccatgtctttcgagtcatcagggagtacggattaatatcaatctttcgagacaattcgtctctaattctaatatctcccttttctgtattttccatcaaatgcactgtcatattcgagactaagtctgctattttatcgacggcaattttcacctctgcattatcggaaagcttagtatatccgctattcaatgcaaaattataagactctccattccaaacaaagccaaaatcttgagaccttttctttttccacggaactttaattctccaattcatttgttcacctccctcaattcgaatttagccatttgcttgctactgcactcatttgtatatcttctaacatttgtaccgctccaaaaactgcggcgtcaaacaaatcaatacgttgtgagccgccgtcaccatccactttttcgtattgaatcatgtcatccgttttttcaatagcgcggacgttttgaacacaatattcaaatgattgattatgacaataatagaaatgcccatcttttgctttcgtctcaatacgtctaaacccttccgattttttataaaaatattgcggttgatctactatttttatgccactctttttcatcagataaaagaattcacgaccaaactttttgtcaaagcctactagtttaatgtcgaaacctttatttttcatttctttaaaccagttgactatcactgcaaaattggtagtcggggtgttcgtcattgtcaatactccatcatctttccaaccgaaaagcggaatattatcttcatccgcttttttatttgccatcacaattggaaagaaggcatgtgtgataacgatgtctacctctgtaccatcatccattacatatcttccataaagtgccgccgctgttaaatcgtgaagttttgccaagtcggcaccgccgtaccatttaatcggtagttttgctaattcttctaaggtccagttatattttgaatcagatgctttaaattcatcaatattaaaatacgctttcattgcgctagtatatatatttaaagatttagataaaaaatcttttctctgttgtggatcgttttgcgcttgcaaactgtcattcgtcatatcagcaggtctaatagtgattccgtaatttggatttgctttttcgtgttgttttgggtctgtataatccacttcgcctttttcgtcttcatccgcttttgctataaaaacaaaataagcctcatctttcacagtgtcgtctaaaatctttttgcaatactgtaaacgttgataacaaaaagaactcatattatcaccagccgtagtgataccaatcatcaatttatttgtatatgctttcattgcttctttaatgatgttgtattgtttaggcgttttatacgcatgtaattcatctgcaattcctacattacaattaagggagtcttggcggtctggattagcagctaaagctttgatgtataaagagccatctccgaaatcaccagaaatgctatgttcttgattattatctaaaacacgaaatgaatcctcttctcccatttctttaatattgaagttaataaaattaaagctttgtaaagattgttcaagagccgcgccaacgatataaatttttgaccctgactttctttctaaaagtgctaacgcccacgataatgctgcaacaaatctagtcttaccattttttcgaggtaaaaaaataaacgcttctttgaaacgtctaatgattgtaccctttatataaaatcccaataaggagtaaataataaatttttgccacggttctaaaataaacggtgtccctcgaagcggggttccgtcaattctttccccttgatcatgaacaaaagttctttcgataataccgataacaaattctgcgtctttaggattgaactcatattctttattcttcaaatctcttttaaatcttttcgccgcttgttgtatttctttccccgctatttttttgcctttcacaacttcatttacataattcatcacactatcgtaattaaaaaaatcttttgcagtcatcgcatttcactcaatatatctgctaaactagattgctttttattttcagtcgtgatgttttcgattgctcgcgggtttaaacacaatcggtcagaataagcaatgatgtcttttcttagattttccagagttgcaacaatagcagatttttttgttccgcccgctgcggttgaagtttcatattgataatcagagtcaataaatttcttttgcgcgtcgtcatactgagttaataaatcacagtaaatagtaatgatgttatcatattccgttttataaactcctaaacctttcatatctttaatcactctttcctttacagagagaggtttgtatttttctatgctttcaactttactcttttttgccattgaagttcctccttcctaaaaaagttttctcatcattgcgctattggaaaaagtccccaccctcggtatccccagagcttttttctgaaacgtttgacgggggggatgaataaaatgactcgaattccttttttcgtttttcttgccatatcaagcctttcgctgtcagttcgtgagttcctctcttatgcattgaattatgtgaacgatttgataaagaaattaaattccagtcctcaaatgctaattcaggatattcttctttcgtaaagatgtgatggaccatctcagctgattctgttcgtccgaaacgcctcgactcctgacaaaggtattcatctcgtcgcagtatcttcttccgttttcgtttccactttgatgttaagtagaatggatctgttgctttataagacattcgctagttcgctcctatataaaagcccaacactaatgtgctggacttcattgttctatgtatccgtagttatgaaaccacttaaacttctacggtatcactcgtcagcgataggtttttatcttgcactactcgccgtgttgtcttacctttggctttcacaagggtggaccctataaaaccttcccatcagaacgtatctgcaattaaattgagggaaggtattgtcgttaatatactcggcaaggatttgcacctcgcatgaagtcaacggtttactaagcagcatagcaacctcctgctatgtcatcatgtgattatagatgctcagttccgtctaacagttcatgttccattgcttcgatttcattatctgaagcaacacctttaatcgctgatatgtgagacatcttatttgttcttgagtaataagacggaatgaacccattatgtttgtttcttagttcttgacgttctttatataatgctttaatagaaggaacaagacgtctaatattttgttcaataaatctagttggtattctaataatttcccaaccgtgttcagatttattcaaagtattaaggataaacacatctcgttctgaatctttaccaatcctaaaacgatggtgccctccatcaatctctaatacaaccttcatgtctggcaaaataaaatctactcgtttgcgccctattctttgttgtgtttttactttaatctgacttcttaacaattcgatacaagccattacttcatgggcagaatcaaacttgctactgtcatttctataaaattgggctactgtattatatgggtcaaggtattcatccattttcatactacagcattcttgcatttctataagatgtattgctctttcaagtgttgcttcgattttgtgcgcaatatattcttttttcttttcttctattttttttcgatacttatgttggcattcaacgcataagtttctaccgccagacaaatctctgaaatgtacggaagcttcctgcgaaatatattgctcgcattcccaacacctaactaaattcatatagtcccctcgactttcatttttaataggccctgcctataatactataataaacttattttattgttcaaaacgggcataaaacgggcaatatattttaatatcccaacctttcagctattgaaagaatgattgttttatttcttcttctagctgtactctcgtccatattcaacttactagcaatccatacccacgtcggtttgcttctgtcccagtatctaaactgaatcaattgtttatcctcgtcgttcaatctattaagcacagactcaattgcatttataatattctttaatctacttatctctttatccatttgcagtaacatcacacgatcttccacttcattactaatattccctgcactgccaccaccttggttctcgtcaatgtattctctatgccaagcgcccagtgttacattaacttccttttccatcaattcttttttagtagaatgataaaattttaattcatcttcaatcaatttatattgtgctttacgtaatcgttttgacatttaatcactctcctaataaaattctatctcacacgttttgcctagtatttgttcaattagttttttcagttcttccttgttgacatgcgccgtgtaatactcttcattttgatttccaaatatcgttgtaaagttaataaactgttttagaaattctttagcatctctttcgtatctatcattttcaaacatttttaacatttcatatttatctaaactgatatttacatattcctccattgtcaaccagccccatttttttatattttagcaatacttgtaaaggcgaagagtcacttgtcatttacaactctcattcatattctcaaccatgataagagaaatgattaatagtaaattaaactctgcttctgcgagactaaaaaagccaaaagcacgcaataacacggtaatgaaaatcatagaaaaataaaatgaacttaatgttttaaacattcaatcactctccatccattcaatcaaattatttaaataaaattgcgctttttttaaatcctcaatgccattcttgtgctcgtatcttgagacatatttaagtatgtttcctacagcatatgacggataatcatttactttagctttaatgtagtcaagcgtttcaataccgcctgctgtgtaatgtgcaggattatttactttgtcgttattttcgtttttcatagatactccattggatgaaaatgctttcatggcatttgtagcgccaccgaaccactttgcaacttcgtcttgtttcactttgtatttttcaattggtgtgttggggtgtaaatatttagcataagaaagactcccccaacttactccttcttcctctatatgcacaacagtatcttgcttataccgttcccaaagttccgagtcatatgacggaataacctctccgaaaaaccagctatacccttcatttttcaattcttccaataaagcatcaaaatcttcttgtgtttctgtgtgatatattttcatttgtttatcctccttatttaatgggattgtcgcatcaagactcatagtttcaatgtacatcccttgattaaatttccatttgtttataaatttccgaaaccagttaaacattgttatccctccactattttcaaagcttcctctgcactcctagcaactccacaaatagctggtgttatttccatcgcttgttgaaagtttttctgttcttgtcgtaatttccctatctcatttttcacttcaataaaaaacatttttccatctgttccgcgaaatccgaataaatctggaaagcctttcggtaatcctgtatcaaatattcgtccgtttggcattctaactttgcccacgttggctctgaaaacataatgcccatggcgggaaagttctaaacgtatagaattctgtatatctatttctgccgtcatttgatcactcctttggtcaaattggtgaaaaaggtggatagttggtggatagttgaaacaaaccctccacctctgaaatccattggtatcactacctttataactacttcttttttaaaaggtggatagttggtagtaaaataggaaaagtattactaggaggaaaaaagtagaaggtttatggaaaaacacccaaactatccacctcctaagaaattaagtagccaaaaccattgcgcctctaaggctaaaggagggtggatagttgaaacaaaccctccaccttttttaaaaatttaagttcaaattataataatcgtcatttaaagtaatgccctcgtatacatttgcggttttagtttttttcttagtaaacttcattccaatttctttcccaaatttcgtactactcattaaatattgaccgttttctttcgcccactcatgatatgtttcatacatttttttggcatttaccttttcgccttctctcacatcacaacaatcctcaataaatgcagtaataacatccatttctgatttatattcagagctagcattttcaactgctttcggcatccccaagccttccttttgccatttaaggaagccttctacagcccagttcaatatcccagttaattcactgcggagtttatattttagctgtttatctactttttcgtcaggaatttttactgtgaaaggtactaaatgtaatcgacgccaaattccatcatctctccctcgaataattggtttgtggttggttgccatccagattttgaattctggcgtgaattcaaattcatctttatatagatgacgtgcagtgaccttgtcgccacctgtgagctgtttaactagtccttcgtctaaacgcacaccctcgtttggttcagtggttgtaacaaacctggctccatgtaatcgggcaatatcactatttgcattactggattgctgtttgaccatgattgtttgcggctgtatattggttgcataagaaccgaaaatgtcattgataatgtcgagaaaaacagacttcccattacgtccatttccgaaaaggataaacattacttgctccgatgtagatccagagagagaataaccgactgctttttgcatataattgattaactctttatcgcctgcaaaaatatcatttaaaaacgcttgccaaagcggtgcgtcaattttatctgtatattcgatgttgctgatttttgtaaacattttttgcctatcatgattgataagctcaccattttgcaaattgatatatccattttgtgtgttcaaaaaatatttgtagcgatcgaattcttcgggcaaaactggcattaaatgttgcgcttctttcaacatgttcgtttttcctttattgcttctagttgcttttaagtgcttcatgaacgctttttctgcatctgattcattatccatgtaagcaaattcgcttttcatatctttaattacatcatcgacaagtgtttttacagcccctatattatcgtatttccacacttttgaatcgtagtaataaaaccctttgttaatgtatgaaaaacggacaatatcatgaaatttatcacgaaaacgttctgcattaccagtatcatccagcccatatactttacgtgctgtattattctgatttttgatagaaatagaatatccttctagttcactgccaggttggtaaatttcagaggtattagttatagctttattaataaccatttcaccgtaaagttgcgcaccgcgtttttggtcccattttgttcgatacaaaccacttgaacggaaaatttcgtccattttttctgcattacatcctgtccaaaatgccagcatatttgcaaaagctaagtctgcttcggattgcgagggatatagtccatcccataatccatcgtaaagcgttttaaattgtgcgccttgtttgcttcgttcagcacgttgaataatatcgcttacaggcaaatcaactgtagattgtaaattatttatttgtcttacttcatttgttccgatgtatttcgtatgcaaatattgaatagcggatgtcgcttcattgacttgtctgtagttatcaattacttgacctgtcataacgaaaaatcgaccgtccgggtacatttcaatgtttcctttacgccgaccaccttccgggaaactgccttttgcaataatatgaattcctgtcccgctcacactgtattctgtgtaactagacagtgtttgaataaattcaccagcaatattttctgtattaccataaaggtaatcttcaatttcatcctttatatcatcaatatccacaccaaaatatggtttcttaaagtaaaaacctaacccatcaaaacgatatttttcaagggaatcaagggcagtttcaaaatctgcccatgtccgctcgtctacactattaccgtatgaaccgttgtttgcgttcatcggtatttttttgtttttgccacgctcttcatcccaaacaagttgaaaagcgcaccattgttttaatttttttaattcgtccggaatttgttcatacacgtttgtgcgctcctctcattgcttagaacggtagattactctcgtttatttctggcataggttcagcatctttctttttaaatacatgttgtaatggtccagtaattttactttcagcccacgctttcacatttaaatttttataaatttgaccattatactcagactcttcatttttcacagtaacttggcatgtcttagttaacaggtcttttaataattcatccaatgtattataatctttgccgttaggtaattggattgctttagcgattgtatttaatgccgtttgactatattcatttgttgcttttgctttccatactcggtgaaaaatatgcgcattctggaatttttgatttacatcattacgaataattaaatcaatattaatgaactccgctccgttttttgtcgcatcttcatttgcgttgtataaaaccacctcatacgtaccattttctactccatttgtgaaaacatcattatgatctactttaaacatttttaaattccttctttcgtttttatttgataaatcctcttgcttttccttgatggaatgcccatcctcttttataattgtgttcttttgcatattcatataattctttcatgttcgtacattcgcttggactactataattcactttaaaaactgcttctgttatttcttgtagctctgctgcctcatcaacttgcattggttttacttctactttgaattcatgtccacaatgcgagcattttatattagtagataaaactgtcataaaacagtcagggcaaatttttacaggtgcttctgctttgttgctgttacttccttttttcgcttctaaggaccattttcgttccatgtctggcaaaccaaagcgattgacatttccaacgtggtcaataataatagctgttttaccagttcggtatcgcatacctcgcattgattgctgaatatacagggatagagattgagttggtcttagcataatcacagtagaacagtctggaacatcgaatccttcaccaattaaatctaagttgcaaagcacctttatttcgccttctcgaaatcgttgtataatgtcatcacgaatggatttaggtgttttcccgtcaatatgtgcggatgtaatgcctactgattcaaaactcattgccattttttcgctttgataaagagaagaggcataaagtattgcttgttctccgtttgctaacttttgataatgtttgatgacatcgccccaaatcattcttttattgaattgatcatcaagtcctgtcatgtcaaattcaccagttcgtttgatatctaatgtttctgtttgaacgatttcgggagcaaaatatttgtaaggtgctaagaattgattttcaattaaccatttcacattaaccttttcgattaacatatcgtttatatctcctaaaccacccccatttattctcactggtgttgctgtaaatccgaccactttagcattagaaaagtgattgattatttttttataactgtttgctagcacatgatgactttcatcaataatgattaaagctggctcggaagttttttctaaacgtctaacaacagtttgaaccatccccaaattgacgaatttcatgtcaacatcattcatagtgagtgtatttctgatttggtcaatcaattcttttctgtgaactaggaaaagaacattatttttattgcgcgttgtcatgcgaattatttctgataaaataactgatttaccagcgcctagccacagggagcaacaacgcacggtctgttatatccctgtaaaaaagccccctttacatcatttataatttcttgttgatattctctaagctttaacatcaacatcacctatttggaataggtcttcttgcaaggcaaactctctattatctagctgattttttgcaaaattaccattgttttctgtgagtaagaaacccctctgacctgtttcaggatttcttattaatcttgcgactataggaacaattcccataacgtgattaactaccttttctctaatgtcaggcaaaaattgattatacagttgcccactttccatctgtatttgacgcgtgttttcccaagctgtatatactatatttgtgtttggtaaattattaaacacggaaatcaaatctattaaatgtgtgtcaaatattccatagtgttgtagttctggttgacctgattttgtatttctcccattaaacattaaccataatttttgataatggcttaaattatcaattactacattgtcatattcctctgcatgtgccttcgcatatccataaaaatcagccatatcttgtacgggatttcgaggatctaatgtcgcaatcgtgatattaggtaatccacttaatactttcgacgtaccatcacaatccaacattaatgtttttccttctaaatacttaatcgtcgttgttttccctgctcccggttttgcataaatcataatattaaaatactccgaccttttcattttttctgattgaataaattccaatgaaatccctccttattttatttgtagtctttctgtttgaaccaaaacagctcccggcacatcaatgcctttttttaagtcatcttttaacttagttttatccagctttttaggttgctcaactaaataattaattagcttactctcatcttctacaaacacactgtgagggtttttccgaatatctaatgtaaataaattcgtttttattttttgcttattagcaactagcatagcatcatgtagtgattgtttcagtcgcttcacattattgttaatcgtgttttttcgttctgataaacgtttaatttctacatctaaaataagtgattgcccttctaattctttaatgacaaacgcaacattttctgcttttgtttctaattcatcttcaatgctttcaagggtatcttttaatgcctccggatctaattgctcagctaaatttaataactgttgatacttttcttgaatggaataaagtgttgtcatattaatcatctcctttcaaaaatgctgttgctgttattttgccttttgatgcagaataccacttcacattgtttctttcgtcaaattgtggcttatttacattagatacaaacatcttagctttatctgtatctgcattatatatactaaaacttactgagtctgattgttcatatagctcatttactaattgactattcctattttctttcattttcttgacttgagttgttggtatgttaaaggatgaaaatccgtcttcatcttcaacagtaagcagaccattgttgttaatcagaacatgaaactgctctccgtctacacataattcagctacccctgccctatcctgcacttctactttatcgcccggccggatactcatttaatcgcctccaattcatttttatagtcccacatttcttgtgataatttatccagcccaatcgcgaaacgttcgagatcgcgtggtgttttaataatggatttacttagctctttgcttttcctgtgaagtaaactgtttgcttcgttgatgattatttgttcggtcattgtttttcaacctcctctgcaacaatactaaaatctgtttcatcatttatacgctcaatcatttcgtcaattgactttgaacatttaataatttgtttcactttatatttgtgtttattcacacgatttacagaacatatgttacctagcctttttaaaatagatgtttttaaatcttcagatgacacatcatattttgtgaaatcaattagcttacgttttacgctattttcaaaagcggaaagtgtgatatggtagtttgtcatgacaccgctcagaagtgatatacaatatttcagataaatcagccacgaatatttgtctagaactttcatcaaaataattgaattcggctcttactatattttctgtgtgtttatgtctgtaaattcctaaactgtccgtttcaattgttgttgctattgaacttccatttttaaaatgataagttaaaatactttttctgttcattcttcaaaaacatagcttgcaaaatttttatcatcttcatcgcaagttccgagaaagccatctacatcgtaatatctggatttagcccaaacagcataacgtattggaacaagttctacacatctctcgtgaaaccatccatggggatctacgttaattatgtcatcatattcactaaaagcttcttcacatacgccacatcttactaatttagtcattattccaaactccttccgcacattggacagtaattgatattcctagctgttaaaccgtagtagctgaaaactcctaagttgccagtgctatctagtctaacaacaccaggttctttatactcttcatcaaaacttagtaaaggctcattattcatcatagagtcattcttgcaatactcacacattattccgacacctctctctttcttgctctcacaagtgctgtagcggttcctccagatagatagttccaatcagaagaggagtatgtgctgaaatgcacttcgataatctcgtgcgttttggaaagctcatttaattgattgtctatgtttacgaatttcgtttgagactctctgtatcccacaaattcaaaccattcctcgttcattctgccacctcttccgttatccagtacggacttttttcgtagaacttcttcacttctctgttaagtgagcgtgtcatgctttccaataaggttgctttagtccccatatttacatgttttcttttcgctttaacaatgtaattcaattcgcctttttctgtaactgtaataagaccaataccgctatttttcaaacgagtgtcaaataacttgaagtttaaactgttaaaggattttgctgtgtgatctctcaaaacttcaagcagatgctctggaataacatagtagttaaaatctccgtgaaacgataagcttgctttacttttaaagtctgaaaggcttactttgatttcatagcagagaaactcaccagtcgttttgtatgctataaagtccactatttctttgccgaaccaaccaatcgttacttcaaatgcaccgaaaaccccttgctttgcatgagctttccaaagcgcttcttccactcttctcgtgtcgtttgttttgctcattccgccacctcgctaacagtttccgcatcaacttcataacacgtcttgattaccggaatagcgctatatccatcattctcaacggttataatatatgcacaatcacagtcatccatgacaaagtatccgtgcgcccatttgccgttgtctttgcgctttcctttgaatttaatgtcactcatgcctcaccctcctatctcaaattaaatcagcatcaattagtaaaatcgtttcattggcagtttcataaaacccttgttttatttcttcctcggtttcatattcttgcaaggatgacatgaagagtttcagtgctttttgctctgttacttcaacggaattgaattcaatcattagtccagtttttgcaaattcgtcttcgtgcttaacaacatcacgccagtatacaaaatcagcttgttttttgctttctgctttaattagcgcataatattcgttttcttctcgtgtgtattcgaagtatttgctcatgcttcagcctccacttctactaaactgatttctactatttcgtcagaaccatttaaagcacagttattttctgctgtttctcggtttacaaataagcaatctttagacagattagcatcataccaactgtgtggaaaatgtttgtacaagccatcttgcttgattgcatacaagtttttactcattgtcttcaccctccacttcctccaagtaatcctcaagtctgtattctttagcttccgaatcgtccatccagccgtcatcaccatttagtcgataataaaatactaccggttgctcttcataacaatttccacagaataaatcttcacgtacttttaataaatatgagccttcttcaatttcttgtttgcacattgtacagataacagattcttgttttgtcgcgctttcgtctaaaatcaattcctctctactgcaaaacaccaaatcgctaaatccaaaatcaaccgcgcactccatttctggtggtctaaaatcgttaatgctaactaccttcccaataacatttttatctttaatccaagtaactttatctcctactttgaaattcatgcttgttcctccttgatttttttagagttaatataatgcgaatatgtcgcatctgcttcttttcgccaaccgttcatctcgttttttgattcccttctataattgattctgtgatttcttatatagtttttaattaaacaataaggcaaattcatttctgctgaaatctctttgattgtgtacccttgatttccaagatgacgaatcattttgtcatcttttttagacatgtgtttgtttgtcagtcctaacagtacctttcttgccgctacagaggcttttgttcttcttaatcgttcagctaattggtcattcgacataataatataattattttttagtatctcatcttcttttttggtccacggacgcctaataaaagaaactgaagaatctctttttcttaacttcgctagtctgtttataactgcatcttttgtacgtcctaaaaattcggcagctttgctaatattgtcgtcgttttcataaacaaaatactctaaataaatatcctcatcttctgtccacaccgagtttttactgattccaagtcgcaccgctttgttttttattgaatgataagagcgatttaaaaaattagctattatttcagtgtctacgtattcgtaattattctgtaaaactctgatttcctcatccgtccaattttttcgcatctaatcacctcactaagcaatctgcatcaaaacagataacattttttgatcatctttcttttgtaattcgtctaacacatgcgcataagtttcttgtgtgacacctacgtcagcatgtcctaatcgtgctgaaatcgtatgaatcgaaacaccttctgccaacaatacacttgcatgcgtatgccgtaatgcgtgaaagctaatctgtgtaatgcctgtttcattgcatttaacagctaaaaaattgttgatggttgaattgaattgacgtttgtaagtgccgtctccaaatttttcaacgaaaatgggttcgtcttctggaaaatcttttataagcggtttgaactgtccgacaatctgccaatcaattttaatggtccttactgacgataatgttttcgttttagcaaatcccttgttatatttgtaatcccatgttttgttgatagatatagtctgtgctgtccaatcaaaatccgctggagtgatagctaaagcttctgcatagcgcattccggtcttagctgcgagcattacgaaccatccaaatccaatttggctcatatcgagtgattgtaataacttcgataactcctctttctgtaagaatttccgttttttcgctcgtgtcggttctgcgcctttgataaccactcgatacgttgggtctttatctattaatccatcgtgaaacaaatctttaatgcacgctttcacatgatgatgaaagtcttttacggtctgtttctcatgtgtttcagcataaacattaataattcgttgatattctcgtctgtcaaaatctgagataaaaagttttgggcataaatctcgaagttgttttgctgcattatagtatttagctagtgttatttttgcaattgctcccactttatacacttcgacccactcttcaaagtagtcacaaaatagtatttctttttgcttcttagccatgttctccctcctaaaaaagtttcaattgtgatgcttcttcgtcctctatttctaactcatttaaatatctatcagctactgaaagagggctttctatatgttcgataactggttctagccatttatgaatattaaattccttctctactgtttcactgtggatcatgatgttgaaagaactaaaatttaataaatcgtctttatcgttttgaatgaaatacacttgtttcgcttctcttgttagcgcatcaccgtgaataactgttgcgttcattcctctaattaataaattgaaaagaaggaaaggtaacgcacgatctgataattcttcacattgatacaaatacatagatggtagataatcaaacggcgaatattttaggcaatcttcataccatttgcaaatcgttaaactacccgtaccagcggcaacatctagtcttgttcctccctgactgtctgttaatcctcttactaattgcgatgcaacactacttaattcagttggtgtaaaatcttgtgcatatttctttttattcgcatgctcttcttcaaaatagacgtgaaaccaatctttttctaaatgcgtatcatgttgtaaaaactgtttaaatatctcttctcgtttttctctatcaaacaaaattttcattagcgcatcagatgcttgatatgattcttttattccgattaaattattaattgtttccgttgttaatgtcacgcttgcacctccttcataactcataaattcttaatctcttctagcttttcaatcagttgttcatgtgttaaatttctaagaacatcgtttgttacagatgtgctgtattccagctcccaatttttgtcatttataaattgaataaccgcaagttctacgccaggacccatatattccttgattacactagcgccataatcgttatcaaatttataaatagtttgttgaattccgaattggtcattttccgcttgctctaaaatgtgctcgttaatgtattctttatactcatttgcgattgttttcatgtcttcgcctcattcctcagtgtcgaaatccatcgtcccacaaatcgtctactaccagcggattttctacattcattctctatcactccttgcaagcagcattaatagaagtatcaaagcaacaatcattattaatttagccatttagtatcaatccaccgattcctacaacaagtgcgattaatacagtcaaagctaaacaaaccaatgtgtatctatctgatttttcaatatattcatttccgttttcatcaatacttattagcccaaaaaatcgtaataacttcattcaaaaacctcatttcaagaatattttaatccactccgctacaatatatgtgactgacagtaatgctccgatttggaaacaaaacagaaaaagtaatattttattttcatgctcacttatgaatttcttcattctcatttctccgtttctatgttataattaatacaaatattatttcgtaactcacagttttagtaagctctaacttactatttatagctgtgggtttttcttttaccaatgccgctcaatcgaattcgcgaacctatgcttgtacttaggtcttttcttatatttaatttgatgatctaaatgccttgattgaagttcaactagcaaatattttccaaccgatttcggaacgtaatttgggtcgtattttcgtattttggcaagtagtatttcgacttcatcaatcattttcagacctccttatatacaaattttttaatcagccaatcatttgcttttactgcatcgaatgcccacgcttcacgttgattctttgtagcccagttactaaattctgcaagctctggaaagtctttaatgttatctaaccaccacccgtaacttcgtggactagcttgcgcaaaatcttctaacgtccaaactccgtacaggaaattcacatgcctgtttttatttttcacaggacgacccattttcttattctcctttctattttaatcaacatctatttctaaaatttccgcaatttcttttctaactttcgatgcgtctcttttgccgtttatgatgtctgataaataaggattgctaattcctagcatttttgctaaatcagattgtttcatatttatagcttttaactttgcgtataccgcaacagcgaaacgctgatgttctactgacatgtttttgctcctttcttgttttggttttcacgtgatataattatttttgattggaggtgattgcagatgactttttatgattttttaataacttattaccttagcgaaaatagtcctttaggcgatctagctcatgatgttcaactagatggtaatttcccaacagaaagcaaaagcgaagatgaaatcagggattatttttctaatattggtactcctggcttccaagaggatttagatgaggcgttaaattattttagaagactatgacaattcttttaactttgattaggtcaatttccggtgctccatacttagctttaatttcataatttttgtaaagaccgacttcaatttgttgaatgttggttttttttctttttaaatatcttttgttcacctctccatcactcctttctatcttattagctaattatttagcatgatgttgacaaaaacaaccaatagtgatagtatatacccatagctaaataagcctatcaaaagccattaatcgttggggaacgagtatttttatggggttatttgttgtcttgtttagctaaataattagcttatgaatatatcttaccaccacttatggtagttgtaaagtatttttacaaccttttttggtagtttgtattcaataatgctgtgaggtattgatatgactacgtttgaacgaataaaaaaactttctgctaagaaaggaataacaatttcacaattgactagcgaattagaaatgggtgaaaactctatatacaggtggaaaactcaaaaaccagctttagacaaacttcaaaaagtagccgactatttcaatgtatcaattgactacttattaggaagaaccgacaatccgcaaattgactccgacatccctccggaagcgacaacactagccgctcacattgatcccgcggcaacagaagaagatatgaaaaaaattcttgagtatattgatttcattcaacaaaaatataaataagaaatgagatggatttatgtggttagataaatacagagagcgatatcctgaactaactatcattgaagacaaaaatatgcaggaagttcacaaaggattatattataatagtagaatattcgtaaatcctcaacaaaatgatgttgaaatgcgttgcactttagcggaggaaattggacatcataaattaacagttggaaatattattaatcaaaatacagttaataatagaaaacaggaaaagcttgcaaggagttggggttatgaagcgcttgtccctttgcgtaaaatcatagatgcttattatgaaggattcactgattactacgaagtcgcagattttttagaagtgacagaagattttttaaaacattctatagaatattataaaggtaaatacggtaacactgttgagtgtaacggatatgttatcatttttagaagtagtatacagattattgcttgttagatatttgcacaaatgtgtttatataaaaaattgataaagggagaattgagatgaaaaaattatttttgttagcgagtttattacttatttttagttttggtctatcagcatgtgggagtagtaactctgaaaacgagacaagtgattctaaaaaagaagatgtaaaaaaggttgaaaagaaaacaagtgtcgaatttccagacaaagaattaggtcaaggagagattattctgaaaacagaatcgggatcatctgaagatggaaatattccatttatgtataaagaagatgacttattgacgccatctatcggattcgaagcatgggaatttgatggttctaaattaacatatgtttatattgatgatgttcttaatactaaagaacaacttgcggacacacaaacttcattagatttaacaacaagtgagtatgaaacaggagaacacgaagtaaaagtagcccaatttgataatgataaagaaaccgggaaaataatcacatacaagacagcgaaatatgaaataaagaataaataacaaaaaacgccctccccgcacaggaataagcgttttaaatacacacataggagtatgcaaattcattttaacataatttgctgtacccttcaaaagaacatacgttctaaatcagagaggtgatagtattaatgaaaataaaaaaaatgaaaaatggtaaatatactgttcgtttgcgtattaaagttgatggagagtggaaagaaaaacgtttgacagatacaagtgaaacaaatttgatgtacaaagcatcaaaattattaaaacaagttgaacatgatagtaattcactaaaagaatggaatttcaaagaattctattcgctatttatgaaaactttcaaagaaaataaaagtagtcaatcaacaattaacttgtatgacttagcttataatcagttcgttaattatttcgacgaaaaaataaagttaaattcaattgacgctgttcaatatcagcaatttattaatcatttagcattagattacgctgtcgctactatagataccagacaccgcaaaattagagcgattttcaataaagccgtccatttaggttacatgaaaaaaaaccctgctctgggcgctcacataagcggtcatgatatagcaaaaacaaaagcgcaatatttagaaacagataaagtacatctattattagaagagcttgcaaaacttcattctatatcaagagcagttatttttttagcagttcaaacaggaatgcgatttgaagaaattattgcactgacaaaaaaagatattaattttactaaacgttctatatcagtgaataaggcatgggattataaatacactaacacgtttacggacactaaaacaaaaaagtcacgagtaatctatattgataattcaactgttcaatatttacagtcttaccttgcttggcatgctgattatatgaaagagcatgcaattgaaaatccggtgatgttgttattcattacttatcacaataaacctgttgacaacgcttcatgtaacaaagcactgaagaaaatatgtactacaattaattctgaaacagtaacattacacaagcttcgacacacgcacacaggtctatgtgtagaggctggtatggatattatttatgtagctgacaggcttggtcatgatgatattaatacaacattaaaatattatagtcatctgagttctaatttacgacaacaaaatcaatctaaagtagatgcttttttcacactaaaaacagatgaaaataccacaaaatttgccacaaatgccacaaaaacaacggaataaaacgggtattgcaaggtataaaaaaatctctaaaacattcgtttatcctttaatatcaaggatttccaacgttttagagatttctttacatcactacttaatgccctcggagggaatcgaacccccattttaagaaccggaatcttacgtgctatccgttgcaccacgagggctttatgtacaaagaaaatgtttaccgtacgaataataattatagcgaaattcgtatgtttttacaagctttattttgaatgaagaagccagcgcatcctgagatttgctggcttcaatagttaatttaccactatccaaatagatgaactatctggtttttcacctcgtacccaccattttgcttggtagattttaccattgtatgaaactttttctccgccattataggctttttgggtgttccaaactggcaattcggtgctgtttgatttccatacatcgctcgtatctggtgcgttacctttagtccaccatttcgctgtgtaagctatcccattataataaatttggtcgcctgcattataaattcgatcagctttccaagtgttcattgggtctagtggtttagttttggctgtgatttcgttacttactagtgaacgattacctgatgtatcaactgcatatactttgtagctataacttgtatcacttgctagctttgtatcttcaaacatcgtggaagtcgttgttgcgattttcgtattatttcgatatagttcataatttttcacttcaacattgtccgttgaggcttgccaacaaagtgcaatagtagtgtctgtttgtgcatgtgacattaaaccttttggtgctgttggagcttcgttatcaacagctggtgcttctttcgttgttaatttagcgctattactaagtgaagatgtattaccagaaaaatcttttgcgcgcactgtatacgtataggttgtattgtcttttacagttgtatcttcgtatgcggcaacttgactttccccgattacttttccatcacgtaaaatttcatatcctttaattcctacgttatccttagaagcagtccatgttaaacttacttttttagcagtggttgttcctgttaaattagtcggttcagtaggtgcttcattgtctaaaactggttcaatatcagaattaatgatgtttgcgtcgataacttggtaaaatgcatttccagtgtccgcaattgaccaaacacctaagataacataataaccagaacgatcatttggaatagttatttcttgttttgataatctatctggtacgctaccatcagctgtaattgtcgctaatggttcaaagtcggctcgtgttaaaggtttatttggatcccaaccttttttggtaataaaataatcccaactacttgttctatgtggcgctgttaaagtccattctacagttaatgggcctgattctacatctacttttgcccatcgatcttgtgtttgagcatctaacagtgagtattttcctccgcctgcaattttgccatcaacagggccacttgctggaaaaccttttggtgcttctacgctttgtggctcgtactgtgctgccccaactcccgtattaatcccttgattagctaaatatacccgactcgctggtttagatatgtatccgtgagcagaggcatttgtttcgaaaagcacgacagataatattgcaacaacaaaaaacattccaatttttgaaaatttattcatggtgcaccttcctttcagtatagttcattatacctttttgttaatttttttaaaaatagtttgctccaaactttatcatttgacctaatttgaccattcgtgtatgatataaacaaagctaaattaaaatatacaatttaacaggaggaatcttgatatgaacttaattccaacagtaattgaacaaactagccgcggtgaacgcgcatacgacatttattctcgtttattaaaagacagaattattatgttaggctctgcaattgatgataatgttgctaactcaattgtttcccaattattattcttagatgcacaagatcctgaaaaagatattttcttatatatcaactctccaggaggtagtatttcagctgggatggcaatttacgacacaatgaatttcgttaaagctgacgtgcaaactatcggtatggggatggctgcttccatgggctcattcttattaacagccggtgcaaatggtaaacgtttcgctttaccaaatgcagaaatcatgattcaccaaccactaggcggcgctcaaggtcaagcaactgaaattgaaattgctgctcgtcatattctaaaaatcaaagaacgtatgaatacgattatggctgaaaaaactgggcaaccttatgaagtaatcgctcgcgataccgatcgtgataatttcatgactgctcaagaagcaaaagattacggtttaattgatgacatcatcgttaacaaatctggcttaaaaggctgattaaataaaaaaagtgggcttgaaattacaagcccactttttttgttgccttattttaaacgtaaagcagaatgttttcttccatagaatgtataaacaataattccaagtacaaaccaaacaccaaacgcaatccaagttgttttagataaattaagcattaagtatacacaaagtaaaaacgaaagtgctggtaccactggataaaatggtgtcttaaagcctttttgattaagctcagggttgcgacgtaagaagaaaattccgactgaaaccatcgcaaaagcaaataacgtgccgatattaattaattgtgccaaatcttccattggtactgttgaggcaatcaagcccattactgtcgcaaaaatcatcgtatttctaactggcgtatcgttcttgctgatttttgaaaaagattttggtagtagtccgtcacgtcccattgcaaacaataatctagttccgccgtaagacataacaagcactactgttgtcattccaacaattgctccaactgaaagcaagcctgcaatccagttttgattaatcgcttgaagcgcaaaagcaactggtgcactaactccaactaagtcagtgtacggaacaacgccggtaagaactgctgataataaaatataaagcaacgtacacactgccaatgaagcgataatcccaatcggcatatttttttgtggatttttcacttcttctgctgcactagatacggcatcaaaaccaatataagcaaagaaaaccgtagaagctcccgtaattacaccttgcactccaaatggtaaaaacggcgtccaattatctggcttcacatagaatgcacctacgataataaataaaacaacaactgcaatttttactaacaccattatattatttactctcgtagattcgcgaataccaaaactaagtaaaattccaataaccataactactacaaaagcgagtaaatcaaagtaagtacctgcgcttgggttataagcggaagatatagctgttggaatgtgtaaatcaaaacccgctagcaagctcttcatataagatgaccaaccacttgcaatcgctgctaccgcaagtccgtattccaaaataagtgaccagccaagaatccacgctactccttctccaaatacgtgatagctgtatgtataagcgctacccgcgactggcagttttgaagcgaattccgaataacaaagagccgccaaacaacaagcaatgcctgcaataataaatgaaataataattcctggtcccgctatgacagaagctacctgtcctggaagaatgaatatcccacccccaacaaccgctccaactccaagcattgttaaatcaaatgcgcctaaagttttgtttaaatgatgtttatctgtcgctgggttatgaaaactcttttttctgaaaaaagaattaactttcgtcataaaaatccctcctacttatattccaattttcagttaatttatttgtgtatttttaaactaactagaaaactattattcatactaccacaaacacactgaaaaatataccacatatgtataactttatttaaaatgtaaaaatttttttagtgttgtattacttgaaattacatttacatccaatcagtttaaataaaaaagcttgaagacgacaagttgtggtcttcaagctttattaattatttccaagctcgtgaatattgttttggcgcttcgattgtttcacctaacgtttcagcagcctctttagcaaaataaggatttcgcaataattctcgaccgatgataattaaatctgctcgttcgttgcataaaatttcttctgcttgctcacctcgtgtaatcagcccaagtgctccagttgcaataccagccccgcggcgaatttcatcagcgaatggcacttgataccccgggaaaactggtggttctacgttgactaaaccacctgtacttacatcaattaattccacgccatctgctttcatccatttggcaaaaggaatgtggtcttctaattgcaagccgccatgtgcataatcagtagcggaaactcgaacaataatcggtccatcccatacttcttttaccgccttaataatatcacttaaaattttataacgattgccagcaggtccgccgtaattatcttcgcgacggtttgaaattggggaaaggaactgatgaattaaataaccgtgcgctgcgtgaatctcgattacatcaaagccagcttccttagcccggtacgccgcccgtttaaaatcagcgacaacttctttaattgcttctttcgtaagttctaccggtttagcagatttttcgtcaaaaggaattgcagaaggagctacaatttcgcctggtaaaacagcttttcgcccagcgtgtgctaattgaatacctgcttttgccccgtgataatgaagtccatctactagacgttttaaagctggtacttgctcgtcattccataagcctaaatcaaattcagaaattctgcctacttcttgaaccgcagtagcctctaatattacaagaccggtaccgccagctgctcttgaaacgtaatgcgcaaaatgaaagtctgttgcgatcccgtctttattttctactgaatacatacacattggcgacataacaattctgttttttagcgttacatcttttaatttatattctgaaaataattttgacattctaattcgcatccttttcttttaattaactattgctaacttttagccctacttgcgctggagtttcaccgcttctaagtcgttctgcaatttgatccagtttgcgaagacgatggttaatgcctgatttacttacttgaccagttgttagcatttcacccaactcttttaaagtaacatcttcatttgcaatccgaagcgcggcaatttcacgcagtcgttctggtaaagcttcaagtccaactgtcgactggatatacttaatgttatcaatttgccttacagcagcgttaatagttttattgagattcgctgtttcacagttaactaacctattcactgaattccgcatatcgcgcataatccgaacatcttcaaaatgaagaagcgcactagttgcaccaataatacttaaaaattccgtgattttttccgcttctttcaaataggtaataaaaccgttttttcgttcaagggttcgcgcattgagatcgaattgattcattaaagcgcaaattgcctcattatgctcctcataaacagaaaaaatttctaaatgatacgatgaagtttccgggttattaactgatccacttgccaaaaaggctccacgtaaataagcacgtttggcgctcctcttcttaacaaatcccctatcaatcgacttcgtaaacgtcattggaggttcaagaattcgtaaatcttctaaaatccctcgcgtgccagactttaagcgaacgatatatacattattttttttcagtttcattttacgacgtactagaagttcaattggcacttcatacaaatcttttagtaattggtacattcgtctagctatagctgcattctctgtttggacatccattataactaattgattcgaaaacgagattgcgccattcattcgaataaaagctgcgagttccacttttgcatcgctatcacttacgtccatatgggttaattctttcttcgtttccgatgcaaatgacatggcttactcactccttttcattatttttattaggcaacattgctaaaagcgcatccgccaccttatcagctgcgtggcgcacaaggccatcttctgtagaaagaaaatcttgataaatagcttctactccaagtttttccatttcttccgcattatgctccacttgcgccacatcttcaggaaatagtaattcttttggaacagttgtagtgttaattaacgttttatcgataaaagatttaccaacatgttcgtggatgactttaatatgatccgcatctgagaaaaagtccgtttccccaatttgcgttaaaatgttcgtaatgtatactttctgggctttacttgctgtaatttcttcagctaattcttctaataataaattaggtaaaatacttgtatataagcttccaggaccaataacaatcaaatctgcttctttaactgcttctactgctgttggatatggtttcacattttctggttctataaatactcggttaatatgtttgccttgaagtggaataagcgactcgccgtggacaattgatccatcttccatttctgcatttaaaataagtggttggtcggttgctggaatgactttaccacgaatttttagtacggtagcaagaacatttattgcatcaacgtaactatcattaagttgcgataatgccgtcaaaatcaagttaccaatcacatgacctgataaatccccatctacagcaaaacgatattggaacaagtctactacacgcggatcaacattagataaagcaagcatgacgttacgaatatctccaggaggaagaacgtccatttgttcgcgaattttaccagaactaccgccatcatcagcaactgtaacaatcgctgttaaatgaatctcttttttcttaagcccttttaaaacgactgggagacctgttccgccgcctataacgactactttcggcttcgtttctttgctcatattagcgttcctttctacgtttcatatctcggtgtgaaatcgttgtttcatatttttgctggattgctttaccaacatattctgttagagcaacagaacgatgctgtcctcccgtacatccaattgcaatcacaagctgcgtttttccttctcgtttgtaaaaaggaagagtaaacattaataaatcaactaatttatctaaaaaggccattgtttccggccatttcatcacgtactcataaacatcttcatcaagccctgtcagtgggcgcatcttatcaatataatgcggatttggtaggaaacgaacatcaaatactaaatctgcatcaattggaataccatatttaaaaccaaacgacattaattggacattgaaaacatccttgtcttctgtttgaaattcattgttaattcgttctctaagttcacgcggcgccatattggaagtgttaattactaactgtgagcgcccttttaaatcactaagcagttcacgctcagcattaattccatcaagcacagacccattaggctccagtggatggtgacggcgtgtttctttataacgcgaaacaagcaccttatcatcagcctctaaaaagagaattttcgttgttataaaattggtattatctaattcatctagcgctggttcaatcgaatcgaaaaactcacgaccacgaagatccattacgagcgcgattttatccatcttatcgctttctttcattaactcccagaattttggaagtaaacttggcggtaaattatctacacaaaaataaccgagatcttctaaagactgcattgcaactgttttccctgccccagacatcccagtaataattactaattttaattgtttagaagccatatacgcctcatcctttcgcacaaataatatctacctttcattttagcacacttcccactagaaaatcccggaaaagtctctaaatagagtttccgggatttttcttttttaagcttcgatatattgcatcaaatcagcttttactttttcaagtttttgcgtgctttctgcttcattttcaccgcgaatgctaaaatagaatttgattttcggttcggtgcctgatggacgcaagcagaaccatgaaccatcttcaaaataacatttaattacatctgcggtcggtaattgaatctcttcagttttacctgtttcaatccaagtagtttcgcttcttaaataatcttccgcgcgctcaattcggaaaccgcccatgcttgtaggaagttgctctctaaagccacttgtaatttctttaatgcgctctgatccatcttttccacttaaagtgagcgaaactaaatcttctttataataaccaaattcagcataaatttgttctaactcttctagcaaagtccgcccttccgttttgctcacaagtgccacttcagaaatcgcgagaactgcctgaatagcatctttatcacgagtaaacgacttaaccatataaccattactttcttcataaccaaattcaaatgtatgcttccctgtttcctcaaaatgcttgatttgttccgcgataaatttgaaccctgttaaaacttcaatcatctgtacaccaaagtgtttcgcgatttccgtcccaagattacttgtgacaatcgattttaaaacagccgcattttctggtagttcattttgcgctttcttttgttttaacaagtaatgtaaaattatcgcaccaatttgattaccggataaaatctcatattccccgtcattattccgtactgcaactcctaaacggtcagcatccggatcagttcctactaatatatcgccatcatgttttttgccatattcaattgcgagcgaaaatgcttctttgttttctggattaggtgattttacagtaccaaaatcagggtcgttcacaaattgctcctctactttaacgatattcgtgaagccgacactttcaagcgcaggaacccctaaaatcccacctgtaccatgtaatggcgtgaaaacaattttcaaatccttaccacgttcttgcaccaactcattattaacaattacttcttttaacttttccaaataaggacggtctactttttcactaattatttcaagtaaacctttttcaattaattcgtcttggtctgctacttctacagaaaaaatatcttccacggcacttatgtaatctattacggcacttgcaccagttggcggcatttggccaccgtcttctccgtaaattttatagccattatattctggtggattatggcttgccgttattactatcccaccaaatgcatttaaaaatcgaactgcaaaagaaagttccggtgttggtctaagcgcatcgaacacataacttttaacaccatggtgccctaaaaccgccgctgactcaaaggcaaattcacgcgacatatgacgaggatcgtaagcaataacaattccgcgtttcttagcctcttcaccgttttcagctacaaattgtgccaaaccaagtgatgcttttcgaatagtatagatattcatccgatttgttccagcacctagaacgccacgcatccccgccgtaccaaattccatattacgataaaaactatcttctaattctttttcattcttttctatatctaccaattgtttttttagcgactcatctagttctttatttgtaatccatttttggtattcctcttgccagttcattcccgacactccttcacattatgctactttcatttttatcattcttagctttcaaccgcaaaacgaaaagctgttttcgatttaaatggttgatctggtcttaaaatgatattgccgaatccttcatgattaatcgcatccaccaatccttgtgtttccatcgtgatacccgcatatttcggtactggtttgttttgaatagaaaagttgccagctagactattagccgtgtaaattaacacggagtccgcttctgtttccatttctactcgccgccccgactgggtatcaagcaacaccgcatcaggtcgcccgttttcatgttttagaataaaggcatgatccagtccaccaccaactagttttatttgttggtcttgactcctagtaatctcagcaatttcacgacccgctcgcaagtcaaaaatagtattttctgtcggcgcgatggctccagttggcaaagattcattatttattggcagaaacgcctcactacttacccaaagatggtgcgataccacatctgtaccagcctcgcctgttaaattaaaataaatatgattgcttggattataaatagttggtttgtccgtttttgcttcatagtgaattagccattcgttcttattattcagtgtataagtcattgtagcatcaatatttccgggatagccattttcgccgtctgccatgtggtatgtaaacgtcataatcacttcatctaagttctcttcgaccgaaacatcccaaagctttttactaaaattaagcttcccgccatgacgatggttagcgccttcattttgcgttaattgaaattttttaccgtccaaagaaaattgacctttagtgatacgcccagccaccggaccaagtgttgcaccgaagtacggcgaatatgctaaataatcctctaaattcgaaaatcctagactaatattagcaaattcaccaaatttatcttttgtttcaatagaagtaacaattgcgccataatttaaaacgctcattttcatcccatggtcatttattaacgtccattgccatacatcattttcttccaaccgtccaaaatgttcttttaatactttgatataaaccacattctttcgtagttattaatagccatttggatgtgacacgtgccagttccaagcagtagcaataatatcttttacatccgtatacgttggttgccagccaaggatttcacgcgctttatcgctagaagcaacaagcgtccctgggtcaccagcccggcgcggtaccacttcagctggaatttctttaccagttacaattcgagctgcttcaagcatttctttcactgaaaagccattgctgctgccgaggttgaaaatattactttctccaccttttttcaaatattcaagcgcgcggatatgcgcatcaattaaatcttctacttggacataatcacgaatacatgtaccatcaggtgtattataatcatcaccataaattgctaatttttctcgttgaccaagagcaacttgtaaaataatcggtactaagtgagtttctggtttatgatcctcaccaattgatccatccgctttagcaccagcgacattaaaataacgtaacgcgacaaacttcattccgtaagctttatcgcaccatttcatcattttttccataattagctttgtctcaccgtaagtgctttctggacttgtcggcatatcttctgtgattggaactcgctctggttccccgtatgtcgcagcactagaagaaaatacaatatgtttaacgccaaattgttccataacttctaaaagaacttgcgtaccgtaaacattattattcaaatattctaaaggaacttccattgattcaccaacaagcgaactcgcggcgaaatgaatcacactatcaatagattctttttcaaaaacagtacttaaaaaagctttatcccggatatcaccttcataaaattttgcttttttgtgaatagattccttatgacctgtccttaaattatctaccacaactacctcataacctcgattaatcagctcatctacagcatgagaaccaatatagcccgctccaccaagtacaacaatactcatcatttatctctcctaactagtctttgtatttcattttacactacccaggtcaaggtagtcacgcaaaaaaatggacctaagataaataatctatagatccatttttgtttttttattatttagctgcttctgcttccaaagcttcttttaattcttctacatatttttgcgcattttgtccagcaagtccgccatcgcctgtagctgtaacgatttggcgtaagcttttcgcacgtacatcccctgctgcaaaaataccaggaagattcgtacgcatttcttcgtctgttacgatatatccttcttcatcagtaatacctaaacttaaaaatgctttcgtaagtggtacaagaccaacatagatgaagacaccatcaactggcataattgattcagaaccgtcaacagtagaaacgagtttgacgctagtaacttttttgccatcgccaataatttcttctaccgtgttattccaaataaaatcaactttttcatctttaaaagcacgatcttgtagaatttgttgtgcacgtaatttatcacgacggtgtacaattgttactttatctgcataacgagttaaataagttccttcttcaactgccgagtcaccgccaccaacaacgactaattctcgatttttaaagaatgctccatcacaaactgcacagtaagaaacgccgcgtccgctaagctcttcttcaccagctgcgccaagtttacggtgttcagctccagttgcaataataatcgcacgggctttatacgtttttgatcctgctgttacagttttaaattctttgccgtcaattacttctttaatatcaccataagcgtactcagcgccgaattgtttcgccccgctaagcatcttgtcggataaatctggtcctaaaatactgtcaaagccagggtaattttctacctctgctgtatttaccatttgtccgcctggtacaccacgttcaatcattaatgtatctaaatctgcacgggaagtatataaagccgctgtcattccagcaggtcccgccccaataataatcacatcataaattttttcttcactagccatccttttgccctcctcattaatgtgtatacaatagttagtctaaattaatcctaatacggaatagcaaaaaggtctatttatctgctcagaaattgttcaatatctcttgcacacttgctacattcaaattcatctactgaagcgagtttcatttcaggtaaaaatatttttgcaatcgcgctagcaaccgtttcaatcgtatagcgaccaagaatgagctcttttctattttccatcaagactaatgaaaaaatcgtttcgtataaaggaagattttcttcatttaacaaaagtccattttcccgtaaaatagtcattgctttcataattaagtagcagttctgttctacgttcccatctggaaaataatcaaaatcggtaaacatcaagtgctccatatacgaccaactactcatatcaagcagtggatgaaacaggacaaattccggtcgatttcccgagactgtcatcgcgtagactccaagaagatgcgtcatatcactttccgcttgaagcatttctaaaactaaacgagtatcattggttaaatccgcctcttgctcccaaggaaatctagtatcttcatataaatcgcactctaaaaaggaatgccaaaacattttagcctcttcaacttcatctaaataatatgctgatttcgcgcgataataatagtatttactacgctccgtaacttccaaatccgccacttgttcaagtaaatcatctgcttcttcgtagtcgcccatcatcgcatgaattaagccgattttttctttatgatgcgagagaactggcaaaacatcccgcaactccgagtaaagtgagtcagcttcttcccgattacctttataaaaatgataaataaacaagtcacataaacccaataaattccccgggtttcttgcaattaaatcacttaataccttaacgccttcctcttcttttaattgctcaaaataaagggcagctagctgattataggcaggccaaaagttcggtttctcatcaatcacttttttcaaaatatcacatgcagaagcactatcttcttccgctaaataacgattaatttctttcttatatgaataaaattcctgttctaatttagaaaaaccattttcaattgtttcaccaaatggcgtttcttcgagtaatacttcaattaaatctttagcttcttcggcatagtctccatcagctgctatttctaaataacgacttgcatattgaagcgccctacgataatctttcatataagcaaaattattggctataaaataatagcagtattccatattaccaagacgtttttccattatctctcttagtaattgatttgatttatgaaattgaccgatctccgtatagcaaattgctaattgacaaagtatcactggctctccaggttcaagttctgacgctcgtactagataacgaatcgcttctttgattctttgctcacgaaacgcctctactccacgctcaaaataaaattgaccatttggataaaatggataaatttttgcagttgtttttttgtctttttccattttcccacctccaacaatatccttattcttctgagtataacatagaatttatttctttgggcaagaaaaaaagctactctgatttcactcaaaagcagctttttcttttattactaaaggatttccatatgcaaaactttctggcggaacatccttcgaaacgactgccccagcagcaacaatcgcaccgtctcctatttcgattccaggaagaatggttacatttgccccaaccatcacattcttaccaataacgacttctccaacatgatactcagacaacaaatattcatgagttaaaattgtcgtatgatagccaataatagaattttctccaatcgtaatcttctcaggaaaaaataaatccggcataactttataggcaatagcagttttcttaccaattttcattccaagacaagcacggtaaatattacgtttaccacccatccaaggaaaaaaacgtccaaattcaactactacagtattctttacgactttccaaaaagaaatggttttataaacctggaaaagcgtgttgactttctcatccggcgccttaaacctattcagccgtctcaaaatttattcctcgtcccttacaatagcaagcaggtcactcattttttctaacataaagtctggttggaactgcgccaaatgttctggacctttaatcgcccatgctactccagcagttaacgtttccgcatttttcccagcttcaatgtcatgataattatcaccaatcataatggcttcttccttcgttgcatttagcagagaaagagccatctcaataccttctggatctggtttcgcattagatacttgatctaacccaatcaccacttggaaaaatttatccaagccagtcactttaagacctcgcataatcgtatcgtacattttcgtcgatacaattcctagtttataatcttcttcatacaaagctcgaatcgcttcatacactccatcatactctaaaattaaatcatcatgatgtttcaagttatattcccggtaaaacacacgcatttcttccgcatgtgctggatttatttcccgaaacgtttccattagtgaaggaccgataaacggtaaaatatcttctcttgtaaaaacgcggtcaggtaagaattcttgtaatgttgcttggaaagttttaataatcaactcattcgtatttatcagtgtcccatctaagtcaaataacaatgtagtaattttcccagtcataatttcttcctttcttatacaaactcgaaaatcttcaactttttatttctttttagctactttacccaatttatcttccatataatacggcggattcattttcacgcgacgataaataattaaaccaatggataacacaattagcagtaaagataaaacctgcgaaactctaaagtcgccccacattaaactatctgttcgcattccttcgataaagaatcttccgaacgagtaccaaattacataactaagaaaaagttccccactacgtatcttggtccgacgaataattaataacacgataaaaccaagaacattccataaactctcgtataagaatgtcggctgataataagcaccatctatgtacatctggttgataataaattctggcaaatgtaagccctcaagaaatgctcgagtcgtttccgccccatgagcttcttggttcataaaattaccccaacgaccaatagcctgagcaataatcaaactaggtgcaacaacatccgcaagtttccaaaacgaaattttcttaatccgcgagaaaatgactgcagttagcacggcaccaattaacgcaccataaatcgcgattccaccatgccaaatcttcactatttcgcccaaattattcttataaaaatcccactcaaaaataacataataaatccgagcactaataatcgaaattggaatcgcccatattagtaaatccacaataatttctttgtccattttacgtttatttgcttcactaagcgcaagaagtaacgcaattacaacagctgaagcgataataactccgtaccattttacggaaatactaccaatttgaatcgccaccggatcaagtggctgaacaccattacccataattcccctactttcaaaaaaagacaactccgcaaccaaacaagattatcgtactgtttgtttaggctgcggagaacttttctctatttatttaatcattcatgctactattatgacctattaaattgtttaggtcttgtgtaaattgttctgccgcattgtagcccatatttttcaaacggaaattcattgctgctacttctataataacagataaatttcgccctggacgaacaggaacagtaatttttggaatgtccatatcaaagattttagtcttctcttggtccaacccaacgcgatcataatgcttatctgggtcccagttttcaaggtgcacaacgatagtaatttttttactggaacgaacagctcctgctccaaataaagtcattacattaataattccgaggcctcgaatctctagtaaatgctcgataattgctggcgatgaaccgatgagcgtcatttcatcttcttgacgaatttctacattatcatccgctacgagtctatgtccacgttttacaagttcgagcgctgtttcactcttaccaacaccactactacctgtaattaaaacgccaagtccgtaaatatctactaaaacaccatgcattgagataacaggtgccaatctgctttctaaatagttcgtaatataaacggataaacgcgtagtctttaagcgcgaacgaagaactggaatatctgcttctttcgctgctgctactaattctttcggcacttctaaatttcgagaaatcacaaaagcaggcgtccgtttcgtacacatttgcttatatcttttaagtcgttcttccggctccataccttctgaaaaagaaatttccgtcattccaaaaagctgcacacgatcttctggataatacgagaaaaatccagtaagttccaaaccaggccgagataaatcacttgttaaaattggtctttcaagtcccgtttctgaacaaattagctctaaattaagtcgttcctttaaatcctttaccgtaaccgattttgtcatgcaagtacctccaaatgaattataaaagtccattactgttcgctacaaaatattgtttagaaagctccttatcattttagcactttagagagaatcaagctacctctttcttcccaaatggctctacacagcaaaaccagctacatttaaaaggccgtttgaagccttaaaatgtaactggaatgtttaattttctttattaccccataaaacggaattaataatcatgtttgcaaaagccataattgctgcaataatcaacgctgtaccaaaaccatcaatttggaaagaatctccaataaagaaagtagtcatttcaagcataattgcattaatcacaaaggtgaaaagcccaagtgtaaatatattaatcggtaaagttaaaaggagtaaaataggtctaattagcatattaagaattgctaatataaaactcgctagtagcgccgtcgtgaatccatctacgtggaaacttgtaaagaatccagataatgctacaaaaagcaccgagttaatgattacgcctataatccaacgcatattttagttcactcccattctgattcaggtgttgcttttggcataataatcgcagctaagatataaagtaaaatcccagatccaaagaataaagtagccactacccagattagacgaacgattgttacttcaataccaaagtattctgcaagcccaccacaaacaccagcaaacattttttgtgatgaagatttatataactttctcattgttttcccttcctttcattttattaaacgttctttgtttcgagttcagaaactttgataattccatttcctactttcgcttgaagtgttgccatacttatctcttctgcattttgagtgaaaacaaaagttctttctgcgtcatcccaaatttttgcattttttaagtcgaagtaaattttttctttcttcgttccgagtgttccatcaacattccacgttggcgggatttgaatccgaatatcgccatttggtgcttctaaatctgcagctgaggaagtttcattttcgagaatatattcaacatccccttgagccgccttagcaattgttgtatggaaattaccttgaagagcaatgtctcctttagcagtagacatatctacattttcaactgagctgcgtttgaagaaaatttcgccgtctttggattccgtgctgaggaatttaccactagctcctgaagaacgaatatcgccgtgacgtgttttgataatagcatcttctgcagctgtatcatcatatttcaaattaccattaagtaattgaatttttacttgttcatataaacgttttggaatagtaacaactaaatctgtttttagtaattcattttttgattcaaaagtgaaactatctggtgaaatgtctagcattgtttggctaaagaagtaatcccagagtttttcttcacttaattgacgaatggagcgtgctttttcgtgtacagctagtacggcacgaattttcatttgatctttgtcccaagaacggataataacatccccagtagctactcttattgtaaaagagcggaaagttgcatcgtcaaaattgaattctcgcactggacgaggacgagcttcttttcttcttgctccgtgatggattggttctggtctaactggtttttgtctgttgtgatgacggctatttctcatcgcttctcgcacttcctgtctcgcttcattacggtcggcgtggcgtcttcttttttcatcaacgcggcgacggtgccgttcaagtacttcctcattacttgtgtcagaagaaggaatcacaaacaaggcaacgatgtaagcaataatcgcaataccggttttcatcgtaataatcgtgatgataatatagataaggcgtagaagtgtggcatctattcctagaaattcggctagtccgccaaaaacaccgccgactttccggtccactcttgatcttcttaattttttatccatgttagctcttcctttcttatttctatgtaaaatctagcgcgctttctccgcgctagatttcaatttattattttgcatcacgaatcttaacggaacctgtagttgcttctgcttcgatttttagtgaagaatcagctgctgttggtagtttagtaaatacaattgatttacttactgattcagtttttgattgaagtacttcggcatcttttaagtctaaatatagttttccaaggtttgtatggaagcgaccatctacaccaatagttgttggtacgattacttcgatattaccggcacccgttttagcttttaagaaagtagcttcattaccagttagctgataattaacgttaccatttttagtttgcaagtttgttgagtaataattaccttttactgccacattaccgttaaatgttttaagtgctacatcacggatttcaccattttggatacgtacattcccattaattgattcaatttcagctaaagtagcatttagtgtaccaatgctaacattaccatttgttgtttttacaaataaatcgcggcctgataattcatccatgtggaaattaccattcagcatttttacagaaacataatcatactcacgacgaggcaagtacacagttaaattcgtaacgatttgtttcgatgttgattcaaaacgcaatgtttcttcatctacacgtaaagtcgttttatcaaaaaagattttaagtgcttcatcttctggatattctttgaaaagtttaatcatcgcgtgaactttaatatcatttgagtcggatggtttaaattcaacattaccattagcaatttcaaattctaaaattgaaagcgttgtgtcgtggtaaatgaaatcacgttcaatcttagtagatgtaagaaatggaaacggcatatcttttacttgtttaaacgcgctgtttaggaaagaaccgatcttttcaccagcttgtgataagtcattgaccatattgcgcatggagtcttcacggtctttagaagaattttcattttcttcttggtgctcatggttttctggagttggttctgggcgtctcttacggcttttcggagcagtgtaaggatttccttcattgttccaacctttgctataatcatacgttggttcttcttccggttcttcaacacgttcttctcttggtgctgtagaacgacggatattttcttttgctgcggatttaccttcttttttagaaatattttcaagtagggtaagggcctcttcagtagaaatgataccttgtttcactaattcgagaatacgtttacgttcattttccattttcatttcctcctaatttttcggtttagctattttaggcttgcttcatgtgcaagtaatctatctgttttatctatgactctattatgaaggaaaaaataatttctgtcatacaaccagaggatgattatttgtttagactttgggtggtttggtcttcggcacaagaaaaaaatcccgcttattaaaatataagcgggatttagatttattttttcttagctgttgcaatacgttcttctgtgcgttctttgtcacgttctaaaattggttttaagtatttgcctgtgtatgattttttagaacgcgcgattttttctggtgtgccagttgcgataatttgaccgccgccatcgccaccttctggacctaagtcaatcaagtagtcagcttgtttaataacatctaaattatgttcaataacaagaactgtatcgccgttttcttctacaagtctttgtaatacttttagtaaacggccgatgtcatctgcatggagtccagtggttggttcatcaaggatgtagaatgatttaccgttgctgcgtttatgaagttcggacgctagtttcacacgttgcgcctcaccgccagaaagagttgttgcaggttgaccgagacgaatatagcccagtcccacatcgacaatggtttgcagtttgcgagcaattcgcggttggttagtgaaatattctaacccttcttccacagtcatttctagcacttcggcaatgtttttccctttgtagcgaatatccaaagtttcgccattatagcgtttaccatgacaaacttcgcaaggtacataaacatctggtaaaaagtgcatttcgatttttatgattccatcgcccttacatgcctcacaacgaccgccttttacgttgaaactgaaacggccttttttgtaaccacggactttggcttcattagtactcgcgaatagatcacgaatatcatcaaacgcgccagtatatgttgctggattagatcttggtgttctaccgattggagattgatcgatattgatgattttttctaggttttcgattccttttatttctttatgttcacctggtttggcgtgatttcgattaagctttctcgctagcgcttttcttagtacttcattgactagtgagctttttccggaaccggataccccagtcacacatgaaaaagtagctagtggtattttggcatttacattttttaagttgtttgctttagctccgacgatttctaattcaagtccgtttccttttcttcttttggcaggaacaggaatgaattttttgccagaaagataatccccggtgatagagtttttgttcttcgccacttcttctggcgttccggctgcaacaattcgcccgccatgttctccagcacctggaccaatatcaatcagataatctgctgccatcattgtgtcttcatcatgttccacgacaataagcgtatttccaatatctcgcatactttgaagtgtgttgatcaatcgatcgttatcacgctgatgaagtccaatggaaggctcatcaagaatgtaaagtacgccagtcaatctcgaaccaatttgggttgctagtcgaattcgctgtgcttctcctcctgataaagttccagcagcacggctcattgttaaataatcaagcccaacattttttaagaaccctagtctagctcgcacttctttgaaaattggcgccgcgatttgcgtttctttttctgaaagctctaggctatcaaagaaatcaagagcttcattgatggaaaactcgctaatttgccctatgtgatgattgttcactttgacagaaagtgtttcttctttaagacgatatcctttacaagatgggcaaggtaaatccgtcatatactgcgccatttgatcgcgagtgaaatctgaattagtttcacggtaacgacgttcgatgtttggcagaattccttcaaacggaatccaagtttctcgtgtcataccaaaatcatttttgtattcaaagtaaaattctttgtcttttgaaccatttaaaacaatatctaatgcttctttcgaaagttcttctatcggtgtatccatatcaattccaaattctttacaagcagaagctagcatttgtggataatattgtgaactaattggtctccacggaacaattgcgccttcatttaatgttaaacttctatccggaataaccgtgtccacgtctacttctaattttgttccaagtccatcacaagtaggacaagcaccaaacgggctattaaatgaaaacattcttggctctaattcaccaaccgaaaaaccacaataaggacatgcataatgttcgctaaatagtaattctttatcacccataatttccactactgcgtatccatcagccaggcgtagagcagcttcaatagaatcatatagtcgagtatttatgccttctttaatgacaatacgatcgattataatttcgatagaatgttttttgtttttttcgatttcgatttcgtcgttaatatcgtatatttctccatcaacccgaatacgtacgtagccttcttttttaatttcttcaattgttttcttatgtgttccttttttaccagaaactataggcgccataatttgaatacgtgttttttctgggtattcgagcacacggtctaccatttgttcgattgtttgggaagtgatttcaatgccgtggtttggacacactggatgccccactcgtgcatagagtaaacgcaagtaatcatgtatttctgtaactgtcccaacggtagatcgcggattacggctagtagttttctgatcgatagaaatagctgggcttaacccttcaattaaatctacatccggtttatccatttgacctaaaaattggcgagcataagcagacaaagactctacataacgtctttgtccttctgcataaattgtatcaaaagctagcgaagattttcctgaaccagaaagcccggtcatcactactaatttatctcttggaatctctacatcaatgttttttaaattatgggctcttgcaccttgaatgactattttttctttatccaattccgcttcatccttccgcttttatttccagtaaagcatcacgaagttcagctgcacgttcgaaatcaagtgctttggctgcttctttcatctcgtgttccataccttcaatgaaaatatctcgttctttcttagacattttacttaaatcatgttgttttattgcttctcgttcatctgcggcagaagttgctgcgataatgccacgaatttcttttctaattgtttttggtgtgatgccatgtttttcgttatattcaatttggattttacgacgacgttcagtttcactaatcgaattgcgcatggaatctgtcattttatctgcgtacataattactcgtccattttcattacgggcagctcgtcccatcgtttggattaaggaacgttctgaacgtaagaaaccttctttatcggcatctaaaattgctaccaaggacacctctggtaaatcgattccttcacggagtaagttaatcccaacaataacatcgtatacccctaatcgaaggtcacgaataatttcaattcgctctaatgtttttacctcagaatgtaaatattgaacttttacgccggcttcttttaggtaattcgtcaaatcctccgacatttttttcgttaaagtagtgattagaactcgttcgttcttctcaactcgatcattgatttcatccattaaatcatctatctgaccttggataggacgtatttcgacaattggatctagtagtccggtaggtcgaatgatttgttcaattacatctggattcttttctaattcgtatgggcctggggttgcagagataaacataatttgattaatatgcttttcaaattcttctaatcgaagtggacggttatcaagtgcgcttggcaacctaaaaccatgatcgactagcatttgctttctggcttggtccccgttgaacatgccacgaatttgaggcatcgttacatgtgattcatcaataactatttggaaatcatctgggaaataatctagcaatgtatatggagttactcccgctggacgtagtgataaatgtcttgaatagttttcaatacctgaacaataacccatttcttccatcatttctatatcgtaattggttctctgttcaagacgctgtgcttccagtagtttattttctgctcttaagactttaaggcggtcttcaagttctgcttttatattaacaattgcttttttcataatatctggtctagtaacaaagtgagatgctgggaaaatagaaacgtgttctctgtcgcctatgatttctccagtaagggcatctacttccctaatacgttcaatttcgtcgccaaaaaattcaattctcatacagtgttcatctctagatgccgggaaaatttcgaccacatctccgcggacacgaaaacgaccgcgctgaaaatcaatatcatttcggtcatattgaatatcaaccagcttgcgtaacaattggtctcggctaatctccatgcctacccgaagcgaaactagcatttctccgtattcgaccggcgaacctaaaccataaatacaagatacactggcgataataattacatctctacgttcaaaaagtgctgctgtagcggagtgacgaagcttatctatttcgtcattgatactagcgtctttttcaatgtaggtatcactctgcggtacataagcttctggctggtaataatcatagtaactaacaaagtattccactgcattattcgggaaaaactctttgaattcactatataattgtcccgctagcgtcttattatgtgccataacaagagttggtttatttacttcttgaattacattagatacagtaaaagttttccctgtaccggttgccccaagtaaggtttggtgttttaagcctttttttaatcccgcaactaattgttctattgctctaggttggtctccttgtgggctatacttagaaactaactcaaatttatccttcaactcggattcccccattccttatcggtccgattctggcatctaaaagctttaactgtaaaatatccagcaaagcaaaaagcggatttttcagatccgttaatgtttctattttatcataaatattttaattagcctagcaaaaaccgaacatattttcgtattcatttgaaaataaaaaacgcaacctgttgattacgcttttctttattttatcacttttagagtattctacctatctatttgctctttaaaagtcactgccgcttttctttaaacgtcgtaacatgtatgtggctacgacaaaaccaattgtcatcgaaaaggcgtctatcgtgattagccaaaacgaacttgtgtaacccaatttggcagaagcggctatcaaaaccaccataagcactaaggcgacataacggttatacgtgatgcgcgcaaagagaatgacaagcagacaagggaaaataagtgcagatataatttgatccatcttacttccctccccaattttttactcgtcacgcaatgcttttgtcgttatttctgtagtaagttgtggtaattccgtcttttcaatacctttttcagcaagcatatctggtaaaatttcttttaaaaagtattttacactggccatttctcggtattcataaatagtcgcaagtgcttcactataaatttcaacaaaaatgttttctggattacctttttggatctcgccaaaggactcatataacaagtctactttatcagatatagcgagaattttcccttctaacgtactgtctttcccttcttttaacaagtgtcgataaatcggttggaaagttgctggtatctcgcggctaataaaatttttagtcatgctttcttccacttcagagagcatttctcttagttctgtcgttgcgtattttacaggtgttttaatgtcaccaataaaaagctctgaatagtcatgattcaacgctttttcatataaagcacgccaattaacctcattgcccgcatcttcttctacagctccaaaaaactgtgcaatagaagtaaccttgtaagagtgttctgcaaccgaatgctcttgatatttaaattttcccgggcaacgataaatgttctctaaatccgataaactttggaaatattgatgaattcccatactatcactccattcttcgttttattcctctcttttttgttttttattggcaggattagtattttcgatttcgcgcatcattaatgctgcacagtaaccaattagagcgatcattgctgcggaataggttctaaaattatctgtagcaaaaataaaaataattgctgaaaacagaagtgtcgttaatattccccaactaaaaagtttcgtacctcgtgctgttcctactttcatatgcgaatatattcctacataacataccaactgaataataataaattgtgcaaccgacaaaccaataactgccgcaagattgctattccaaataactgctaaaatagaaataataaccatgacaactattcccgcaatgacgataaatttttgtactggcgataatttgctcaaaatgtttcctccaaatttttatttgttaactactttatcataatctctcattatttggcataaaaaacacccatcattcctaaaaaggttttctgagcgcttgttgttagtgatggtgcacgtggcgaattgcttgggtcagtaattctaatacgtgattatcatcttgcatataataaattgtagtgccttcacgtcttgatttcacaagccttaagttttttaaaaaacggagctggtgtgaaaccgttgtttgattaaaagtcagcgttcgcgcaatttcattcacagagtattctcgctcttgaagcaggtttaaaatttgaacacgtgtcggatcagaaagcgccttgaaaatttgcgttacactaaaaagcgtctcttcatctaaagtttgttttgcgttttccatcagaatcacctcattcttcatatatggtcatatattcatatgatacttaaataggaatgattccgcaagtttaactacctcttcattcaaaaatgattaaatatgagcaaaaaagtaatattctctcttaaaatgatacaatttctttataacaacgaaaggagtattggaggatagctaaggttttaaatatttgagaagttatttaaaccgcctaacacacaccaaaaagagcccgattaacctgtggaaaggaaaatcgggctttttttatctatttaaatcttcaatttcaccgctcttcaagtaaacaatccattcacaaacattcgtcacataatcaccaatgcgttcaatatattgagaaactaaaagtaattgcgatacatcttcaatgtgctcaggttcttcttgcataaaattaatacatttttgataaacgattttatgcagtttatctacttcattgtcgcgtgctgctatttcacgagcagcctcatcatcttccgaaagatatgcttttaagacatcttgcagcattgattttacaatttcacccatttctggaatttcaggaatcggctttaaaactttactttcgccaattaaaatagctgttttggcaatacttactgcgtgatcaccaatacgttctaaatctgaacttgttttgagcacggtaacgattttccgtaaatccataccgactggttgttgcaaagcgattaactcaaaagagcgttgttccagtgagagctccatattattaattgccttatcttctgcgactacttgtttagcaagctccgtgtcacgatgtacgagtgattttactgctttaaaaatcgcttcattcgcaagcattcccatttccattagatgttgatgcaagtcgtttaactgttctgtgaaaatttttctgactaccataataacactcctttatccaaatcttcctgaaatatagtcttcagtttctttttctgctgggttggtaaaaatacttgttgtatccgcgaattccacgatgcggccattaaggaaaaaggcagtttcatcagaaatccgggatgcctgttgcatattatgtgtcacaataacaatcgtatagtctttctttaattctaaaatcaaatcttctactttcgctgtcgaaatcggatctagtgcagaagtcggctcatccatcaagataacatccggtttaactgcaagcacacgtgcgatacaaagtcgttgctgctgcccacctgacatgccaattgccgaacgatctaatctatcatgaacttcttcccaaagagccgcctgacgcaaacttctctcaacaatctcatctaacacttttttatcttttataccgtgcatccgtggaccataagctacattatcataaattgaaaatggaaatggattggcttgttgaaagaccatacccactttttttcgtaaattaaccatatcaattttcggatcttggacattttctccgccaatatggatttcgccagttgtttttacatttggaattaaatcattcatccgattaagcgttcttagaaaagtagattttccgcatcccgacggcccaattaatgcggtaacttgattctttttaatatttaaagcgattttttgtagtgcttgtttggaaccataaaataaatctacgtcttttgtttcaataatgtactctactttttcagcagtttcggttgtcataaaaaagctcctttctagccaaagttaccagaaatatagtcttcggtttgtttttcttgtggattcgtaaatagttcggatgttcctgagaattccacgacttctcctagataaaagaaagaagtgtagtctgaaacccgtgctgcctgttgcatattatgcgttacgataataatggtatatttatttttcaattcattgattaaatcttcaattttacttgtggaaattgggtctagggctgaagcaggttcatcaagtagcaatactttaggctgcattgctacagctctagcgatacaaaggcgttgttgctgtccaccggaaagtgatagtgcactttttcctaaatcgtcttttacttcgtcccaaagagcggcacggcgcaagcttttttcaacccgctccataatttcttttttgtttttcatgccatgacgtttaagtccaaaagcaacattttcatagatagatttcgtgaatggatttggtttttggaataccatgcctatttctttacgaacattgtataaatcgacttctttgcggttaatattaatgccgtcgtataaaatttgtccttccatacggcaaccgtcaatttcatcattcattcggtttaatgctcttaaataagtcgatttcccgcaaccagatggtccgattaaagctgtaactttattttcagggaacgttaaatcgacacctttaattgcgtgattatctccataatatacgtgcaaatcctctgtcgccatcgcagcaggaagtgagtgaggatctggtgtagtttgtaaaattgtattaatttcaggtttcttcgttaacatcatttaaaatctccttttcctggctttttacgacgaggtcatgcgtttataaacaaattttccaagcaaacgagctaggacattgaaaagtaatacggaaagaattaatacagccgaagctccgtcagaaacagcttgcgcatctggcataattccctcaccattaattttccaaatatgaacagctaacgtttctgctgggcggaaaatatttagtggtgaagctggattgaccgggttccagtcagtgaaatcaaggattggtgtactttgtcctgctgtgaaaattaacgctgctgcttcaccaaatacccgtcctgctgctaaaataaccccggtaataattgctggtaatgccgctggaacaagtactcgcgtaattgtttcccatctggataaccctagagcaagtcctgcctcacgttgcgtgtttggaatagcattaagcgcctcttcgacaacacgaattaatagtggtaaattgaaaatcgttagtgtaagcgccccggaaataacggagaagctccaccccatttgaataacaaaaacaaggaaaccgaatagccctacgacaatagatggaagtgaggaaagcacttcaatcgttgtacgaattaaatctgtaatccaatttttacgcgcatattctgccatataaattcccgcaccgagcgagataggaacagaaataatcattgtgataacgagcatataaaatgagttccagatttcaggaccgattccgccgccagcttggaacgactgtggtggggtcgtcaaaaacttccagctaagttgcggaacaccttttactaaaatatagccgagtaaaccagctaagataatgacaattaatacagcaatggcatagaaaacgcctgtcgcgattttatcttttgtttttacattcatttgactttcctcctacgtccgatgaaacggatcacaatgatgaaaaatagtgacattgcgagtagcaccattgcaagtgaccaaaggatattattatcaagcgtacccataaccgtatttcccattcccattgttaaaatactagttaacgtggaagctggttcaaataaggatgttggaataacagcagagttaccaataaccatttgtacagcaagggcttcaccgaatgcacgagccatcccaaatacaatcgccgtcaaaatccctgaacgcgaactacgaagcactactttccaaatcgtttggaaacgtgttgctccaagtgccaaagaagcttctcggtaatgacgcggaactgatttaattgcatctacgctgagtgaagtaacagtaggcaaaatcattactgttaaaacaacggtcgcagctgcaataccaaacccacttcccgaaatatggtcgcgaataaatggaacgacaacgcttagtccaatgaatccataaacaacagatggaataccaactaaaagttccataactggttgcaaaatcttcttaccaaacttaggtgaaatttctaccataaaaatggctgcaccgattgcaagtggtcctgcaatacaagcggcaaaaagcgttactgcaaaagagccaataatcattggcaaagcgccaactaatggatttccatttgcatctttttgcgaagggttccagtctgttccagttataaaatcaacaaaagacactttattgacagtaaatgttgctaaacctttcgatataacaaaaaacaaaatagacgctgcggcaataaccatgatagaaatacagatgaatgtaataattttgcctctagtttctagatgcgcctttttagaagtttgtgtaagcttcttttcttttatcgcttccaagtcacgtaagctcctttctcctcccatgtttactcctaacatgggtatacgtctatcctgatattactaggatagacgcccatttcattctttttattttacgtcagttagtttaccagatgcatcgcgttccactttcatggatttgattgattggtaaccaagttgtggtacgatattgttttgtacttcatcagaagtcatatattttaagaaagtttttgttaggccttttggttcgccatttgtatacatatgttcataagaccagattttccaatcgttagttgcaactttttcttctgttggttcaacgccatctaatgaaagaccaactacggaagcgtcaatgtaagagaatgctaggtagctgattgctcctggagtttcgcttacgattttacgaactgtaccggatgaatcttgttcttgtgctttaactggtgttttaccatcaagtccccatttttcgaaagtagcacgtgttccgcttccttccgcacggttgatgattgtaattttttcgtctttaccgccaacgtctttccagttagttgttttaccagtgaaaatgtcgattaattgttgtttagtaatatttttaacgcctacatctttgtttactacaggtgccattccaacaactgctacacgatgatcaacaagttttgaagcatctacgccgtctttttcttcagcgaatacgtccgagttaccaatttcaactgcaccttgttgtacttgtgttaaaccagttccagaaccgccgccttgaacattgatttgagctttagggttagtgtttgtaaattctttggaagctgcttcaacgagtggttgaagtgcagtggatccgactgctgttaatgagccagaaacttctttatccccttttgttgatccgtttgctttatcttttgaactgctgtcacttccacatgctgcgaagacaagcattactgctgctaacattgctactattcccaaatacttctttttcattatcttattcccaccttgtttttttaatagttattccttacaagtatcactataacgcgtgagatttaaggtggtgtgtagctaatgttaagtaattgtaaattacctcattttttgtcgaaaatgtaaacttttttatgaatatctttcaaataaaaggcaaactggtaaattattacaccaaatttgtttctttcgtaaataaaataaaaatatcctgtccgaaagattacattctttcaaacaggatatttattaggctttttttggtaaagtgacgcggaaggtcgagccaacttcttcttggctttctacttcgattcgtccaccacagttttcaactaaatgtttgacgatagaaagtccaagtccagtgcctcctgagtgtctgctacgtgctttgtccactcggtagaatcgttcaaacacgcggtcaatatctttagcaggtattccaattccgttatcggttacttctattataacctctgcttcttgattaattaatttaacttcaacttttccatctactggggtgtagtttatcgcgttagaaagtaaattaattaaaatctgctgcaatttatcacgatcagtttcaataatgattggcggaatcgttttttctggaacagatacttggatatttttttcggtcgccatttcaaaaatagtccgggaagattgttcgataacttcatctacatctactggctcagtgttttctgccacaggattttgttcaattctagaaagtgcgagaatatccattatcaatcgatgaagtcgatcactttcttctttgataatcgttaagaattttttgagtagcatttcatcgtacattgcgccgtctagtagtgtttccgcgaatccttttagtgcagttactggtgtttttagttcatgggatacgtttgtcacaaattcagaacggacattttccagatggcggatttgagtaatatcatgtagtagtaagataatcccggtaatttcaccgttttctgctaaaattggcgaaacacttgcatctaaaatcatctcccgcgggaaataaagaatgatttctttttgttgcatcgtttttgtttcaaaagttgcatcaattaattgactaagtgcgaaacttttaattacttcataaaatggttttccagtaatttcggtttctcctaaaatttggtacattgttcggttagtcatgattacttgtttatcgacattgataagcattacgccgctcactaagttttgaacaatagcattaagtcgttgttcattttgcttaatttcgaacatctgtgtttctaaactttctgctaacatattaacactgacagaaaggtcttgaagttcgccgcttactttaccgtgaatgcggctgtcgtatttatgattagccaaatcggtcgaaacttcaataatttcattcactggtctagtaatttttctggcgatgaaaacactgatggctgcgataatgactagagcaataccgaaaatcagagctaaattgccccaaagtttagcaactgctgcatccaccgactcaagggaaattgaaatccttaaaacgccgtctgtcttcccttgatgtttaacgggaaccgcaacgtaaagcatactataaccaagtgaatcactttcccgaattgaaatgccaacattctttcctttttcaagaatatcagctacttccgggcggttcatatgattgtttaagttatcaggatcttttttagtgtcagctacaacatcaccatcattatcaatcaccgtaatacgagcatcaatttcatcaccaagcggatcaagtgttttttgaatcgttcctgcatcttcatccaaatttaaattctcaatgttagttgtttgcagtaagattttcgcgtcatcttctagctggttttctttcatcgttaaataagtggatttcattaattccccagagaaaatacctacaataaccatcacaacgaaaaataagataaaaaaagataacccgattttcagccataattttttcattattttacattctccattttataaccgaatccacgtattgttttaatgtatttcggttgtttagtatctagttcaattttatcgcgtaaatggctaacgtgaacatctacaatccgcgtttcacctacataatcataattccaaaccgtatcaagcaattgatctctcgaaaaaactttgccgcgatgattggctaggaataagagcagctcaaattctttcggcgttaaatctaataaatcatcttgcaaatatacttcataactatccggtaaaattttcaaatcaccaattaaaatagtcgcttctgtatcttccgttttttcttcggtaacttcggccttgccttctgtccgtcttaaaatggctttaatccttgcgacaacttctctagggctaaacggctttgtcatataatcgtctgcacctaactctaaaccaatgatcttatctagttcttcatctttggcagttaacattagtattggaactccaactttatcttggcggagttttttcgttacttcaattccgtccatttcaggaagcattaaatcaagtacaattaaatctggtttttccgatagagcaagttcgtacccagttctaccatcttcagctgtgactacatcaaacccagctttttcaatattaaattgcaacaaggtaacaatagaagcctcatcatcaactacaagaatttttaccaacttacttcccatcccttctttatgtaacccttttatctaaaatatagcatgaattaactattttcgggtagaaatgcatttatattaatcttatctttacaaaaacttaaaacaccaatgctgccactggtgttttaaaatcatctcggttcaactaataataaacccagttcaaaagattcattttcataaagtgctgtttgttcaaaacgtggctcaccagcgttatcaattacttttaacttgcaaaatgcgcggtttaagttaagcgcctcgtatagttcttcacgattgtgcactttttgtccgttaacttctgtaattttttcgcctgcttttaaattcaaacgggtcgaaggagtgctttcacgggcgccaagaactacaagcccatcaggttgcggaccaaattttttcggtagtaattgttcggagcggtaatgacgataggaaatccaaaatcgaccgatcacagcgaacataaacgcaaaaagtgttagtactggcattacgattccaatcaaaccagctacagcaataatcgttgctagtgtagttacttgaacggcaatttttttactagcttcttctggcaattgcgcttgtacttgctgctggaaaccaatgaataatggcaaaataattaacgaatatgactcggacccaattgtaaacacaggccaccactcaaaaatcttcgtaaacacatctccaggaataaaaacaacaagtggtacaaaccataattttcttaactgaaatgaaccgactaacttaccacgtttacttttacgaagagatggtgacggatttttcgcgcttgtgtattgaatcaagaaagcttctacaaacagcaaaatcgccagtaaaaatgtcatcgaaatcataaaattatctataaatattgcatcatatgtaaactctagattggtaaatggtgacaagttaacatcgaaataatagcagaaataaaagattaagctggtaattccaatagtaaaagcagtagagctaagtcggaacatcccaacaattaataagaaacaagctacggcattaaaaatcgcaatccattcaatcattacactaaatccaataagtgtagtaataatggatagcactagaccaaacaacaaactcacgccaaagaaattcttcagttctaaccacggcgaataaatgctaatactaaacgatttccgctcccacttcactcgattaaaaccagcaattatcactaaaataattcctacatacaatgctggttgtagaagtagtctccctattccattaagtatttcactaaaaacatccattttctacaccagctctcccttaagttacttctataatataggcgataaaagtcgacttaccgcttctttaaatttaatccataaagatcgttttgcatataattcaggtgttaattggtacgatttcaaaatatcttctaaaaatgcatcttctaatttttgaaccattttcttttcataaataaaagcattgacttcaaaattcaagcggaaactcctaaagtccatattggcagttcctacagaagcaatttcgccatcaacaactaaggtctttgcatgaataaaaccattatcataaatgaagattttagctcctgtttccataagttcaccggcgtaattagttgttgctcggtaaacaaaagcatggtcaggtttattcggaatcatgacacgaacatcgactcctgaaagtgctgcaatttttatcgcctcaagcaagctcgcatctggaataaaatatggagactgcaagtaaatcgtttttttagcagcatttatcattttaatataaccattcttgatttgttgccattcggaatcaggaccactagacacaatttgcatgcttgtatggcctttaccgtgaaatgttggaaaatatctcgctttatagtcaattttatgagtagatgatgccgaattccagtccatgataaatcgggtttgcatagcatataccgctttaccatgcacgcgtaaatgtgtatcgcgccaataaccaaattttttcgaacgtccaagatattcgtcaccaatattaaagccaccaatataaccaacatctccgtcaataatcgccaattttcggtgattacgataatttaaacggaaattaattaatggtaatttagatgggaaaaatggtcttactaaaccgccatttttttcgaaagtacggaaaaatgattttttcgtcgtccgtgaacccattgcatcataaataatttttacatttaaaccttctgctgcttttctttcaagcactcgcatcaaacggtttccaagctcatccgaatggaaaatatagtagatgagatgaatatgatcttttgctttttcaatatctgctattaaagcatcaaatttttcgtgaccgtcaataaaaagctctacttcattatcttgcgtcaaaatagctccatcattaacaagcaataagtaaattaaatcgcgatgtttttttacatttggatcgctaaatggaaattctttttgacgtatcatttctatttgatttgctgttgactcttgtatcccgattttttcttgtcccttccaatcaaaaatctttttccctgaaagctttctcccaaaaattaaatagataatgaatccaaatattggaacaaaagttaagactagtaaccaagcccaagtggcggatgtatcgcgtctttctaagaagaccgtcactgccgcaaagaatacgtttaaaatcagcaaaatgactaataaataagctaatagtcccattgtgttcccccttttcttacacaaactgatagtagtatcatatcataaaaaccgtatttagcctattccagttcgttttcacctaagaaaaaccattgatttatcatcaatggttttcaaattaaatataaggtgctggatcaactggaataccatttttgtgaatctcaaaatgaagatgttgtccggttgattgaccggtggatcccataataccaattggttgtccttgtgatacttgttgaccagttactactttcaagctaccggcacgcatatgagcatataatgtttggaagccattaccatgatcaattttcacgacgtaaccataacctccaaagccgctacctgttgcgccaaatcctgaaaatacgactctaccagatgccgcagcggatactgtaatcgtacctccgcccgcaatatcttgacctttatgagattcatattttccagtaactgggttagtacgctcactaaatccagatgttaacattcctgatgctggcttgataaactgcccgccaccagaacttactgtgtcagttgcgccagttcctgctgaagatgttacagagcttggttgctgcgctgcgacagtggcatttttagccgctgcttcttgcatgcgtttttcttcagccgctttaattgcagcttcttgttttgctttttcaccagcaatattagaagcaagtttcttttgttcgtctgaaagagcaccttgttcattagttaaaagtgtttgttcacttttcgttaagtcttttttatttgcaagagccatcactaagtcattcttttcttgtttttggctttccatgttgtttcttgatacttctagctcaactgctagcacttttaagttttctaattttttttctgaactattttctgctacttttagtttattttgatcgtctttttgatcttgcattatattttggtccgctttaacaattgcggatacaactgtcacgcggtcgataagttctttaaaatcatcagcttcaaaaatcatgtctaagtatgatgtggcagttcctgttgtttgaatagctctcgctcgactatcaagcactttttgacggtcgcgaatatcattgcgtagcttttcaatttctttctttagttttttcagcttttcattttcagaatcaactttatcttcttgttctttcaactttttattcgtttcatcaatgctatttaaaagtgattctaattctttagcagcgtctttttcagcgttttctaaatggtttaattctgagttttttgtgtctagattcttatttagctctgattttttttgctctatttcgctttggcgtttttgcatgtcattaatactttccgccttaacacttgttaatggtgcagaaataatcaaaaggctaagtgctgttactaccccatattttttaagcataataagctccttttctattatctatttgactaggaacttcttcattcccttaacgttccatataaaaaagcacctttgtttttaaaacgacaaaggtgcttcttaacttttcaatacttattagaagttagctacgcggccatatcctacaagatatttagcccagtaaccgctagtgatgttgtcatatttaacaccgttgttttgagcgttaatcatttgaccaccaccaacataaattccaacgtgagcaattccgccaccgtagttgaagaacactaagtcacctggttttgcttggctagcactaattttggaagctgctgcatattgtccgccagaagttcttggtagagaaactcctgcagcgcggaaagcataagatgtaaatccagaacagtcaaatgcgctcgggccagttgctccaaggctataaggttttccaagttgagctcttgctgctgcgatcattgcagaatatccaccacctgatggagttgcagcgcttggtgcttcactattgttagttgattctactttgtttgaagttttgctgttagatgaagcattagtgtttgttgtttgttgtccaacatttgcatcagtagcttcacgtaaagcagttgcgcgagcagttgcttctttcgctgctttatcacgttcacttacaagaccagctttttcgttttcagcacttgcttgatcagctgctaattgagcaacgattgcttctttttcagctttttgtgcttcaattttattttgttgtgcttcgaattcatgaattgcagttgcttgttcttcttgttttttctttactgcagtttgtttagtttttaaagctttttcatctttttgttgatcttctaaaatagatttgtcagaatcaactaattggtttactgcagaaacacgacctactaagtcagaaaggttttctgcatctaagattacttcaagataggcattagaattagaagttttttgcattgcacgagcgcgttcttttaaaacagtttcgcgttctttaatacgttcattgatatctttaatatcttgattaagttgtttaagttctttgcctgtttggtcaaattctccttgtaaagatttcgctttttcttgagctttctcaagatctgctactaaactagaaagatctgattgtaaccctgtttttttagacttaatgtcattgatttttttatcttgattttgaatgtctgtatttacgtctgcaaaaacatttgttgtaaaggctggcgtcaaactgataactgctgcgagtgaaatcgcaataaacgtattctttttcaaaaagtttacctcctaaaaagctccctaagctttttcttttaaattatttttatttcaagttaagtaatttcttagttagactttcaagaatctacggatagagataacactaccccaaattcctattagaactccgattgcaataatcaaagcactgatttgataggcgaacggtgttggaggcagaagtgatagtgaacttgtcaccaacttcggatttaccaagttgtaaatattaacatagcctataaatgttaatacaaccgggacaatcgaaccaattaacccaagccatgcaccttctaaaacgaaaggccagcgtatgaaccagttggtcgctcctactaatttcataatttctatttctctacgacgggagaaaatcgcaatcttaattgtgtttgatattaagaacatcgctgttagtaataatccaatgcttaggataataccagcatatcgtccccattttaaggtatcaaacaatttgtcgactgttttctcaccatattctacattatctacgtactgtaatttttctactttttgagcaatcgccttcgtttgtgttggctctttagcctctacaacgaacacatcgtatagtggattatcttgtttaaacaattcgaagtttttgccgtacgcgccaactaatttcttcaactcatcatccttggaagaaaaactgacactatcaactccattaatcttctcaatgtttttctcaagttcttgctgctgtttcttgtctgcgcttagagaaatatgtacgttaatttgtacattgttttctacatctgttgcaagcttgttcatgttgatcaatattgcaaaaaacacgctgactaagataagtgttactgttactgcacttgctgctgcaaaggtcatccaaccattccggtaaaggctcttaaaactttctcttatatgtcttcctacagtcctaaatttcatagccatattctccttgctgctcatctcgaacaattcttccattctcgatagctactacccggtgtttcaacgtgttaacaatttctttgttgtgggttgccattacaatggttgttccgcgattgcttatttcttcaaggatattcatgatttcccatgaagtatcaggatctaggttaccggtcggctcatctgctattaatactttaggcatattggcaatcgagcgggcaatggatatccgctgctgctcaccaccggaaagttcatccggcaacattcttactttatgcttgaggttgactaaatctagcacttccataacacgttctttaattacggttggctcagtttcaaccacttccatcgcataagcaatgttttcataaacagttttgctttgaagtaatttgtaatcttggaataccacgcctacgtttctacgtaaatatgggatttcacgatttttcatattaatcaaatcaaatttgtctacgatgattttgcctttcgtcgctcgttcttctctgtaaatcattttaataaaggttgatttaccagcaccactcgggcctactacataaacaaattccccttcaccaatgttaatattgagtccattagcggcagttatgccattggggtatttcttataaacatcttccattaatatcattttatcaccttactatgcctttctactgagttacattttaggtaatgcatggtaaccatgaagatgaactgtttgttggctcgaatttaaactcacaacataagcttaattataccatgacagtttttcatctataggttaattgcattacaattatatttcagggtatgacaatatctcgattattgtaataggaaacacaatttttgattttaaattcttttgaaaagttatccgtggttcttattttcttagacaaaataaaaaagcacctgtgttggtcttttctactgctaacattgtaacttgtttttaccctaaataacattacaggtagattaaaaaacattacagttatcgctaccggaatagaccaattagaacaaaactgcttcaagtctactattacgctaaaggttcctgtcatcaaattgttaaatagggaggtaaaaaacttgaaaaaggcaacatttctcccctaaaaagaggagaaaatgttgccttttatgacgtgaaaccttcccccattacttcacttgcgctcattacaacgacaaaagcttctgggtcaatttcttttattacttcttttagtctagaaaactcactttgagcaataacacaaagtaagatttgcttgtcatcttcagtatagccgccctttgctgaaaggcgagtaataccacgatcaattttaaagaggattgcttgtctgatagcttcttgattctctgaaataataaacactgttttggattgattaagccccacttgcactaaatcaattgttttactagttgcaaaaagaccaataagtgcataaagtccagattcaatatcaaaaacaaacattgccgagataactacaaagccatcaattaaagctacacatatccccaatgttaaatgagaatatttatgcaaaatttgggcagccacgtccgtaccaccagttgaggccttgccacgaaaaacaattccaagtcccattcctactagcacgcccccaaataatgcagcgactagcggttcatgcgtccatggtgctaatccttgtgttaaatacacaaagaaaggtaaaagcattgtaccaacaaaagttttcaaaccaaattgataccctaagaagaataatccagcaagaaataaagggatattaaaagcccactggataaatgctggattccaaccagttaaatagttaataatcgtacttatcccactcacaccgccagaagcaacatgattaggcaagagtaaaacattgaaggctagtgcaattaaagcagcaccaataataacatataaatactcaattaatttagaaaccattggggataaaggttgctttttccttttatttgtcatcgttcttatccaatcctagaacgcaaatatgcattgataaagtcgtctaaatctccatccattaccgcttgaatattaccggtttcgtaatttgtacgatggtctttcaccatggagtaagggtggaaaacatacgaacgaatttggcttccccaaccaatttctttttgctcaccacgaatttctgctagctcgcgttctttttcttcttgttctttttgatatagttttgttttcaacattttcattgcttgttcacggtttttaagctgcgaacgttctgattggcaggttactacaatcccggatggaatatgtgtcatccgaactgctgaatcggttgtattaatatgctgtccgccagcaccagttgcacgatacgtatcaattttcaaatcttctgtacgtacttcgatttcaatttcatcatctaattctggcataacatccactgaaacaaaagatgtatgacgtctacctgatgaatcgaatggagagatacgaactaaacgatgcacacctttttctgctttcaaatagccgtatgcattgtgccctttgatgagtaatgtaacgcttttaatacccgcttcatcacccgcttgataatcgagcatttcgactttaaaaccttttttctcagaccaacgttgatacatgcgtaataacattgagccccagtcttgtgattctgttccaccagcacctggatgcaattctaaaatagcattatttttatcatatggatcacttaacattaacttaagttcaaattcacttatcgtcgccacatatgctttaatatctttttctaattctgcttgtaaatcttcatctgcttcttcttttagtagttctaaactgatttccatgctttcttgttcttcttcaagcgcatgaaaagcttgatacgtttctttgtatccatttgattcattaattactttttgagccgcttgttggtcgttccaaaaattcggatccaacatctggtcttctaactcagcaattcgaacttccatgctgtctaagtcaaagagaccccctaaagtctttgatttgctgcgctgttttttctagttcattacgaatttctgctaattccattctaattccaccttttttaaatttacttacaaactttcatagcaaaaagcgccatcttgcaggcgcttttttagttgtttcaatctatgcttctttaccatgacaatttttatattttttgccgctaccacaaggacaaggatcattacgtccaatatgttggtctttacgaacaggttggcgtttcgcttctggttttccttcagcaggattgattgcttcacctttagctacttgttcgcgctcaaggttttggcgaatttctgctttcatgatataacgagccacgtcttcatcaatggatgataccattgcttcaaacatctcgaaaccttctgattgatactcacgaagcggatcaatttgaccataagcacgtagatgaataccatcacgtaaatgatccattgcatcaatatgatcaacccatttcgtatcaacaacacgaagcaatactactttttcaaactcattaaattcttcaggaggcaacaatgtttctttttcatcatatgccgcttttatcttgtccaaaataaggttttgaatatcttcgcttgttctgttttgtaaatcttctagcgtaattgtaccttctggaagtaagttagcatcgacataatcgataataccttgtaaattccatgcttcttctggttcatggcttgatgcattactagaaacaatgaaattcactgtacgctgaatcatttgttcaatgatttcgcgaagactgttttctgcattaattacttcatagcgttgtttataaataacttcccgttgttggcgaagtacatcatcatattgtaaaacttgtttccgtgaatcaaagttatttccttccacacgtctttgggctgattcaaccgcacgactcaccattttactttggattgcatcttcagccataccaaaacgttccatcatgctcttcatgttatcagagccaaaacggcgcatcagttcatcttccatagaaagatagaattgtgttacacctggatccccttgacgaccagaacgaccacgtaattggttatcaatacgacgtgattcatggcgctctgtaccaattacagctagaccaccagcatcaatagtaccttcaccaagtttaatatccgtaccacgaccagccatattggttgcgattgttactgcaccacgttcaccagcgtttttaataatatccgcttcacgttcatgttgtttggcatttaagacatcgtgcttaattcctttgcgttttaatttgctcgaaataagctctgatgtttcaatcgcaacagtaccaacaagaacaggttgtccttttgcatgacggtcagcaatatcttctactactgcattaaatttcgcttcaatcgttgtaaaaattaaatctggacgatcatcacgaataattactttgtttgttggaatttcaataacacgcatattataaatatcacggaattcttcttcttccgttttcgcagtaccggtcataccagcaagttttttgtacatacggaaatagttttggaatgtaatagttgccattgttttagattcattttgaatagtaacgccttcttttgcttcaagcgcttggtgtaagccctcactgaaacgacgccctttcataatacgacctgtaaattggtcaacaatgagaacttcatcatcttgaactacgtaatctacatctaaactcatcgtgtagtttgctttaagcgcttgagcaatatgatgtaaaatcaccgtattttctaaatcaaaaaggttttctacatcaaagtagttttccccttttgtcataccatcttcggttaattggacagatttagttttaatatcaactgtataatcttcctcttctgtcaaagttcgtacgaatgtattagcacgaacgtataagatagtggatttttcagcttcaccagaaatgattaaaggtgttctagcttcatcgaccaaaatagaatcgacttcatcaataacggcaaacgctaatggacgttgtaccatttcttctttgtaaaccaccatgttatcacgtaagtagtcaaatcctaattcattatttgtactatacgtaatatcacatgcataagcttctcgtttttctgtgctagataaagcatttaagttaagccctacagaaagacctaggaaattatataaaacacccatttcttctgcgtcacggtgagccaaatattcattgaccgtaactacatgtacaccttcaccagaaagcgcatttaaataaactggtaatgtcgctgttaatgttttaccttcaccagttttcatttctgcaatattaccttcgtgaagaacgataccacccattaattgaactttaaatggatacagtcctagggcacgcttagcaccttctctggcaacagcaaaagcttctaccaataagtcgtctagcgtttcacctttttgaactcgttctttaaactctactgttttctcgcgtagagcttcatctgaaagagctgcagtttcgtctgctaaagcaataatttcatctgcttttctctccaaatatttaacatctttttttcctgattcaaaaatcttcttcaatagtccagccatttaaattctcctctactgttttcgctgtcgtcgcgcagtttcatctatgataactttcaggaattatcttctcttaaaatatacacactaattctatcacttattagataaaatatacaactggttatctctttttaacaaataaaaatgcaaaaacgtcatagattcttcattcctaataaaaatgggggccaaaattttggcccccatgctcattatctttgtactattaattagtttcaattaatccatatttaccgtctttacgtgaatacacaatgttagttccatttgtttcagcatcagtatatacgtagaaactatgtcctagcaagttcatttgtaaaacagcttcttcactgtccataggttttaaagaaaattgttttgttcttacaatttcaagatcaaaatctccttcattttcttctggtggtgtgctgccgttaacatccgaatatgcaaaataatctctttctgcacctttatcacggaatttacgatttacttttgttttatgtttacggatttgacgctctaatttatccacaatcaagtcgatgctagcatataaatctccactagtttcttctgcacgtagcacaagatttgggagaggaatggtcacttcaaccttcgcatttttatcggaatatacttttaaattaacatgaacgttagcgtctggagtttctgtaaaatatcgttctagtttatcgattttcttttctacgtaatctcgaatcggttccgttacttcaatattttcaccacgaatgttgtacttaagcatagcaattcctcctttgaaataaaacaaaataacgataaagaagagtattcttcttacccttagtctacgtgaaaacgatagcttttgcaaacatttgcacaaagagtaaagaagcgtttatctacttatctttatttagtattttattccctaaaaagcctttcgcaaacctctttcagcgataaatctcaactatctaaatatggttaaggagctcacctttttcacccctgattcttttaacgcttgcgccgctaagttaagagtactacctgtagtgtatatatcatcaaataaaattatttccttttcactgcttccaatctcttcatctacataaaatacttgctctgtttctaatcgttctcgctttgttttcttagattgtttttcagagtgtttttttgctaaaagttcctcatagtgaagattagattggttcagtattgctgttgtttgattaaatcctcgctctaatttgcggacttcacttaccgggattgggacaatagtcgttttgttcgcggcgaagtatttttttagttccttttgaaaaatagctccgatgatataatcaccttgaaacttaaattttttcatatattctttggcaaaatcattatattggtacaaagatcgattactatctagaaaaaactctctaccttggcaatctttacaaaattcatcagacgattccctgctacacatattacaaagcggtccagttaatttttcaaagcccgctatacaatcggaacaacacaaaacttcctcgctaagaaaccaactaagttcccaactagctgattgtttaacaggttgtaaacaaagtaaacagttaatcatctaataatccttctttaaaacctaattgattcatttttttaatatgcgtaatagcccgattcatttctgtagtcttgccataatgaaaaaaacaaacatcgccagttggatgagttaatttccttcccgcacgcccagctatttgcactaatgcagcttctgtaaaaatcctcccctcacttccaaaaacagctacttgaacatctttaaaagtgacccctctttctaatatagttgtcgtaagtagtagcttgattttgccttcacgtagccactcaactttttctttgcgtaactgatctgccgaatgaacggtcactgggcgagtaaaatcataatttacgagcgcttcagcaaattgattcattgcttcaatttctggaaagaagattaatactggttgatttttaagttctgctttttttatccaattaattaacttaagggttatttttccttgagctaaatttttcttccatggaccaatccagcaagttctaggaacaggtagctgctttctatggtagcgggcagggatttttacaaagttccgtttaccggtcgcgcattcttgttgccactttttctctggagttgctgtgattataattgttgaacctactttagttctagcctttctaactgcgtattctaaaaaaggatcttttgcatatggaaaagcatctacttcatctataaaaataacttgaaatgtatcataaaaacggattaattgatgtgttgtagcaaccacaaattgttcgccttggtatttgtctttggaatctccgtacaagcaaactatatctatctctttgaaaacagcttgcaaacgcggatataattctaaacatacatcaaccctcggagaagctatacaaattctaaaaccttgctttaatgctaaatccattccttcaaacatcatttctgttttaccagacccagcgactgcccataaaagcatatcaactttctgcttaatacttgaaacaactgcacttgcggcctttttttgtcctggtgataaagttccttcccagcccaaacaagattctattctttccggcagaatgtctgctttttgatagtataacttctggcagctgttcacccgccccataactatacagtttctgcagtacaaacaatcctccctatcacaagaagcacatgtcattttgccgaataaaaatggatttgtatttccacaacgaaaacaacgattagctgaaatagcaagaatttcctgtagtccctcaactgtttcgacttccttctttagatataaccttccaggaaaaatatccatcacttttcacctctcctaagttatacacttttttatatttctttgcagaagttaatttcttattttccagcctcaatttgaccataaaatactattttcgctaaaggcaaaataaccattttcaataggtgaaattggcgaaaatacaactttagcctaaataaaaaaatctctagctaaaaagctagagattctattattttattgaccaggttaatcccagtgcgccttcacctaaatgtgtgccgataactgggccaaaatagctcaactcgaactccacttctggaaacttggattctaaatgtttgcgccatgtttctcctttttccggatcatttccatggataacgtaggctttttctgcatttttatttttgatagctacttcaagaatatcttcaatccgttttaatgcctttttttgagttctaactttttcaaaaagaacaatttgcttatcattaaaatgaaggattggtttaatttgaagcaaactaccgacaagcgcttgtgccccgtttaagcgaccaccgcgttgcaggttatttaaatcatctaccataaaatatgcatcttgcgcctttttaatcttatctaattcggaaataattcgttctaaaggttcatttgctaaagccatttcagccgctttaacagcaaacatcccttgcgccatacatgaaagctctgaatcataagcaactacattcaagccatcaattagttcacctgcagaagctgcgttttggaaagtcccgctgatgccgctggatagatgaatactaattactgtatcaaaaccttgttcttttagtttctcaaacaattgaataaattcaccaggggcaggttgcgaagaagttggaaaattttctgcttcttttacttttttgtaaaaatcagccgtagaaagttcttctccttcacgataagattttccatcaattattacggaaagtggtacgacattaattcgtagctgctctttcacttcatctggcaaataagtggtgctgtcagtaaccactgctattttttcgttcatatagtccccctgaaatttctttagcgaatataaacccagccgtgcttaattgccgttaccaccgcttgagttctatcattcactttcattttttgtaaaatactgctgacatgatttttcactgttttttcactaatgaaaagcgtttccccaattccgcggttactttttccatcggtaagaagctgtaatacttcacactctctatgcgttaaaatatgcaaaggcattttcacttcgggttgctggtaaccataaaccccttgcgaagtattcgtgcttgctaaatgtcgatattcgcgaattaatttaatcgctacacgcggatgaatatacgcgcctccattatctactattttaacagcttctacaagttcatgtgcatccatttcttttaataaataacctactgctcctgctctaagtgcctctgttacgtactcatctgtatcgtgaatagtcaatacgataactttgatactagggaattgacgtactaacatttctgttgcgtctaacccattaacagttggcatattaatatccattaaaacgatgtctggtttatattcgcgaacttttgctacgatattcttaccattttcagcttccgctacgacttcaaaagaatcttccaactctaaaattcgcttgataccttcgcgaaacaactgatgatcatctacaatcatgattttgagtgccataatgactactcctccttcacttatctaatttcaccaagccactttgcaatcgaaaacatcatcctttttaagtagcaaaacgcttaaccttataatccctgccataaaattggcaaataaacttttctcttttaagtactatttactcaaactaacctattttcattacaaactgtagctcaattatacagcaaagttttagaaaattacttctatatgcctataaaatgcaatcgaaaaccagtctaaagtaatagtagtttttattataacacgaatttgccaccacttcacccgctgcacttagaaaaatatctatacaatcgctttgctttcggataaaataaaagcagactgaatgtatcaacttatggaggttccttatgttggatcattatttaaccattcgtagcgatggaaaacatgaaataataattgaaaaatctcgctttatttgccatattaagcgaataaaaacagaatccgaagcacagacattcatacaaacaatcaaaaaagagcaccgtgatgctactcataattgctctgcctatattataggagaaaatgaccaatttcaaaaagcacatgacgatggtgaaccaagtggaacagcaggggttcctatgttagaagttttaaaaaagaaagctttaaaaaatgttgttgtggttgttactcgctatttcggaggaactaagctcggcgcagggggccttgtccgtgcatatggtggtgctgtcagtgaagcaatccaaactatcggtataatcgaatgcaaattagctactattattgagtgctcttttgcctatccacttttaggcaaaatagagaatgcacttgagcaaaaaaattatcaaatcgttcataaagaattcacagaaaaagtcgtacttcaagtatttgttgataatgaggatctttcaactttttccacttggataacagaggtttcaaatggccaagttacttacaaagaaggcccacaaaaatatagagaaaaggatgttacttagaatgtccacaaacatatttttacatttacccaccactatttctacggaacgaactattttgagaaaaacttcttttgcagatgcaactaccttatttgatatttggtctgacaatgacgttgctcagtttatgaatatcgaaaaattttctaccatccttcaagcggaggaaatgattcaagccatcgaaaacgaaccaaatgcttgtaggtatactatttttacaatggataattctttaaaagcaatcggctctctgggaataaacgatattaacaaaaacaaccaaacaatcgagatcggttatgaattagccaaaagtcattggcgtcaagggcttatgttcgagattttaacaacctttttaaatacaactaaagctcacctcccatacaaaacaattacagccaaagtcctccctgaaaatatagcttctataaaactacttactaagcttggttttgaacttatttcaacggggcaagaactagatttacactctgggaaaatttgtgaaatcagtaattaccaattaatacttaattaggcaaatattacatttttgaaagatatcatcttttttgtattttttttcaatgaaattctgtataataacatcaaagttgaaaaattaaagaaaccgtaaataacacgtaacattctttagttcaacaaatgatacaataaaacttagaaaagtgactataaggagaattaatatatgagtaaaggcactgatgatagccgaagaagcagcaagaaatacaagcgtagaagaaaaattttattctggattctaattcctgtgatgtgtttagtacttgcaggtgtcggatatggcacttacctttttagcaagacgaaactcgcagcagacaactctttcgataacgtgaggaacgggaaagcttccacacttcgcacaaatgatgttgaacctataaaagatagtttttctattttaattattggcgttgatacaagtactacaagagcatctaacggaaaccctcgtagtgactcgcttatcctagctacatttaatgtaaaggatgcacgcgtagaaatgacaagtattccccgcgactcttatgtacacattgaagattctgcaaaagagattaataaatacacgaaaatcaatgcagctcatgcatatggtggtccagaacttaccatgaaaacagtagaagaagaattcaaaatcccaatcgactactatgttcgatttgactttgatgctttcctcaaaattattgatgcattagatggtattgatgtagacgttccagtaaactttactgaacaagattcaaaagataaccaaaacgcaattacgcttaaaaaagggccgcaacatcttaatgctgaacaagccctagcccttgcacgtacaagacatattgatagtgatattgaacgtggtaaacgacaacaacttattattaaatctattgttagtgaagcgacttctgtttcttccgttagcaaatactctgatattattgaagtagttggcgacaacatgaaaaccaacctaactttcaaccaaatgctttcaatcgcaaaatttggaatgtctaataaaattgatattaaatcactcaaccttaaaggtgatagcaatccaatgaacggcatttattattacaaactgaatgaatcctccgttcaaagtatctcgaatgaatttgctagtgagttaggaattaaacaaccattccctggcgcagcagcttattcagatgaaagttccactgcatcaaactaacaaaaaaccaacaactaataattagttgttggtttttttatttgcgttttcgatgtattttttgaagtaaatttaagattggtcgataatcttcaccaattaaaccgataaattcaacaataatttcaatacaaaaaattagtaataagagtaatagtaatgctccccaagttgtagaaaaagaaaatacaaaaccagttatagagaatagtagtgccatgcagtaaattaacaacactgtttgtttttctgtaaaaccaagagccattaatctatgatggatgtgcgagcgatccgcagacgatataggcatgcgctctttcaacctccgtacgatagcaaaaaatgtatctgataaaggaacacctaaaataataagtggcactaacaaagaaataaaagttacgttcttaaagcccataagcgataaaacagctatcatatagcctaaaaataaagctccggtgtctcccataaaaatacttgcaggcggaaagttgtaaattaaaaatgcagcaactgatgcggcaagaataagtgcgactggagcaacaaatgcatctttaagaagtagagccatacctgcaattgtcattaaagcaataatagaaatcccaccagcaagcccatctaacccatctatcaaattaagtgcattgactatggccacaatccaaacaatagataatggtatcgcaaaatatccaaagtccaattccccgtagaaaggaatattaataaaattaattgttatttcgccccaaacagtgacacaaagagcagctaaaatctgccctaccattttccatttaggagataaatcaaatatatcatcaataaaccctgttgcaataatgattagagcaccaaaataaattggaacaaaccctgatttatcgattggtactaacaacatccccactgaaaaacttataaaaatagctaatccacctagtgtggctgttgtttttgtatgtttatgtctttcacgcggcgtgtcaaccgcattgattctgaatgcaaactttctaattattggcaccatgataataccaacagcaaagctaatcaatatactccatattagcaatattttttcagctccatcctttatttagcaaaatttcttctgttgatttagtgtatttttttaatacttttaaatctagcgttacaccaatgccttcgttcgttggcactttgagtctaccttgatttaattcaaaagcaggcgttacaatatcctctgcaaagaaacgattcgaggcagatatatcccctggaaaaacaaactcgtttctcgctgctagtgcaatgttatgagctctgccgacaccagcttcaagcattcccccacaccaaactagtatttcatttaacgcgcagtactctgctattttaagggcagatgacatacctccaacacgtgccagcttcaaattaatagcccgacaactaccaatgctatgcgcttgctctacgtcttttacggatctaatattctcatctaaacaaattcgtgtttttaattgtttttgcaaccaagcatgatccacaaaatctttagttccaaacggttgctcaatcatttctaaatcatattgatctagttcttttaataacaagaaatcttctctattatacgctgaattcgcgtctgccatcaagcttagttttggaaaacttttacgaacagcttcaacaaattgaatatctttgtttggtgcgatttttagtttcactcgttcatagccctgatcgacgtattgattaactaattgaagtaaagtttccacattctgttgtaaaccaatactgactccaactttgatagattctttagtagccccaatcattttagctaacgatcttttttccattttagcaaaagcatcccaaacagcgagttcaacagccgcctttgccatctcattaccttgaatccaactgaataactcctgtatttcttccggcttacgaatctttctttgagcgaggagaggtagtagctgctccttaatgattagaatagcagaactaagtgtctcttcagtgtaatctggtaacggaaatgcttctaattcaccatatccgtggattccttcttcatttattaattcaataatataaaaatctttgcttttcaattcgccataactagttttaaacggcgccaaaagcggtagttcagcatgaattaaccttgccttctgaaaatacattctactcaccctttttcaaacgtttacgctcttttcggataacaagcataaattgaggtattgcaaaaaaacgtctccatctagaaggattcgctagcaatctgtatacccattcaagtctcagctttatccaaattttaggcgctcgctttacattatcagttaatacatcaaaactcccaccaacaccaataaaaatacctttggaaaaattagccatctgagataaaatccatttttcttgagcaggtgaacctagagcaacaaaaataacatccggttcagcagcgattatttctttagcaatcgcctcactctcaagcgcatcaaaataaccatgatgaacaccacaaacaattgcttgcgggtatttttcgttcactttactctccacgccttgactaacttctggtttcgcccctaaaaaataacaacgtagcggcttttctaataaaccaatcattgtatcataaccagtaactcgttcttttagcggattcccaagtttttcagaagccatgataataccaataccatccggaacaatataatcagcttgacgtaaaatcccctcaaactctttatcagtccgagcatgcattacaatttcaggattagcagttacaacaaaacgtctttccccattttgagcaacattatgtaattcctcaataaattcagcttgggttgtattataaaaaggtatatttaaaattgaaatttcctgctttttcatttgaatctcctaaaaaactttattatgtataagtttatcataaaaaagagcctcttcctatttttaatcaaaaaaagctgcaaatagcatatgccatttgcagcttttcgatatggagtagattaatctaaaatttgtactttaacttgttttacaccccagttattaacttcttgtactgagtttaaatgtacatcaattttattacctttaattgcgccaccagtatcggctgcaattgcttctccgtatccttcaacatacacttttgaacctagaggaataacagatggatcaactgcaataacacgtgaattatcgtttaaatcgattcctgttgctgtcatatggctcattcctggttcagctttactataagcagttgctgtaactgttagctcttttgaaacatttccttgagctgacgaagagttatttgacgattcattagatgttgttgatttttgagttgtttgtgttgatttttcttcttttggttgctgtgctggttgttctgtagcattactttctgatttgttgttttcagaaggtgtgctttcactagctttagcattttcacctacagacaatttttgaccaactatgattaaatcagatgaaagattattccattcttttaattggttaactgtcacaccgttatctaatgcaatatgtcctagtgtgtcaccagctacaactgtatatttcgtaccgttactagtagcagcttttttctcgccactatttacttgtaacgtttggtttggaaaaattaagtttgagcttaagttgttatcttctttcaattgttttatagagatattattttcatttgagattttccaaagtgagtcaccgtcttgaactttatactcagccgcaaaagcttgagttgaaccagatcctgcaataattaaaccagccgcaatggctactactgttttcttcatgtaattaattccctccttgattactttcgagaacaatcgtaccacatgaaactttggacttggttactaaaaaattaagcatgtatgacaggcgcctgaagagccccgagaatcctgcaatatttgtaaattaccattattgtctgatttttattgtttacaccttcaattggttctcaaattctttcaacataactcgccgttatagttcacgcctcttttatatcccaattaaatacttcataaaataaactatttatatttaaaagatagaattggaaaatttttccattacaaataactcctaaaatcaacgcttttaatcgctatttcaaccaaatttttataaattataagttaaatctagctttttataacaaagtattacatcattcatcttcttcatgagagatattaactacattttcgcctttacctctacttgatagatacctaatttggtgaactaacacctcagtaatatagactttctgttcctctttattcaaatattgtctagattgtagttctccgattacacctactaattgtcctttactacaaaattcagcagttgcttctgctcgctttccccaaataacgcattgaataaaatctgcatcattgtcgactctcttattctttctaaaacgatttaaagctattgtcaaattcaaaactgccctatcttctgtggtccatttcagttctggctcttttgttaaacgtcctactaaagttacttgattaatcatataatcgcctctttcttttggtgtaaagcgattatatttgataaaaatttctttgtaaaatagctaaagttccattttcatgggggttaaagaaacaaaaaaaccgttttctgttagaagaaaataatacttttctagagagataatgaatgcaaaacactattttactaaattgcaactttttttagcacatgctattctgagaacatcaaaaaagcaccaaaatccattttggacttcagtgctcattatttctattgtggtaaatctgataaagcgaacataatttccgcttcacaaaccaaatcgccttctactgtagccttaactttggccttggcaatagcgcctctcattcgagtgatttctgcttcaagtaagagttgatcacctggcacaacttgacgtttaaagcgacatccatcaattcccgcaaacaaaccaattttgcctttattagcttcactttgcatcattgcaatcccacttgtttgagcaagtgcttctacaattaggacacccggcattacaggatactccggaaaatggccattaaagaattcttcattagctgttacattctttatagcagttactttttttccttcttcaacagaaataactctatccactaataaaaatggataacgatgaggtaaaatttctttgattttcttaatatctaacatataaatcccccaaattcaaatttagatacgaccacgttttttatttgttagtgattcaagcaaaatgccagtaccgagagctacaacatctaaaggattttcagtaattagaaccggaacttttaattgttcagacattaattcgtctaaaccatgtaataatgaaccgccaccagtcataataattcctctatcaataatatctgctgaaagttctggaggtgtttgctctaaaacttgtcgagctgctaaaaccattaagttcaatgaatcatgaatagcttcttctacttcagaactagtaatggagatagtcttaggtaagccacttactaagtctctaccgcgaatctccatagtttcttctttagtacctcgggaagcagttccaatagttactttaatattttcagcagttctttcaccaataagtacgttatactttcttttaacataatttaagatatcagcgtcccatttattgccggccacttttacggattggcttgttacgatgtcgcccatagataatacggctacatccgcagttccaccaccgatgtcaataatcatattaccagaaggctcaaagatttccatgccagcaccaatagccgcaactttaggttcttcttctaggaacacttgctttccaccacttttttcagcaacttctctaattgctttttgctcaacagaagtaatattcgttgggcaacaaattaaaatgcgaggacgcgaaaaaaaggttttcaggttcaacttttgtataaagaaacgtagcatttcttgaacaatatcaaaatcagcaataaccccatctttcataggtttgattgctgtaatatcccctggagttctaccaaccatatctctagcttctgttccaactgctagaacttgtccagtcttattgtttatagcgacaactgaaggttcattaacaacgattcctcttcctttaacatgaattaatacattagctgtacctaaatcgataccaacatcttttgccatttacattttaactcctttcgtggtgtacacctaattttacatctcattctgaattatagcataatttacgttacgctgaaatgtatatttcatgacaacgtggtttttttcacgataataaaaaaaaccgtaccaaaagatacggttttaacaaatttaattttagaatagagaagctaaattcgttacatcgattttagaatcatctacacgttctacatctgcaccaagcgcttgaagttttccgtggaaattattatagccacggtctaagtatttaagttccgttacttgtgtataaccatccgcaacaagacctgcaagaataagtgctgctgctgcacgtaaatcagtcgccgcaacttcagctccttgtagttttgctggaccggaaataataacagaatgtccttcaattttcatatctgcattcattcgacgcatttcttcaacgtgcatgaagcgattttcaaaaacagtttctgtcataatgcttgtgccttcacttagcatttgaataaccatcatttgtgattgcatatcagttgggaaaccaggatgtggcattgttttaacatccactgctttcaatttatctggtccaatgacacgaatgccattttcttcttcaataatttgaacgcccatttcctctaatttagcgattaatgaactaatatgttcaggaactgcatcttcaattaaaacatttcctcctgtaatcgctgcagcaatcataaacgtaccagcttcaatacggtcaggaataatagaatgttcagtagcagttaattctttaactccttcgattctaattacttcagttcctgctccaataactctggcacccatttggttaaggaaattcgctaaatctacaatttcaggttcgcgagcaacattctcaatcactgttgttccttcagctaatgtagcagccatcataatattttgagttgctccaacacttgggaaatctaagtatactttagcccctactaatttttcagcagtagcttcaatataaccattttcgatttttacaattgcgcccattgcttcaaagccttttaaatgtaaatctactggtcttgagccgattgcacatccacctggcaaagctacacgagctgaaccagtacgagctaatagtggtcccatgacaacaatagaagcacgcatttttcgaacatactcaaaaggtgcatcagaagtgatttctcctgttgcatcaactgttacttcatcatttacaaaagaaacatcagcatttaaatatttaagtacctcattaattgtgaatacatcagacaaatttgggacattttttaatacgctagtacctttactcgcaagtaatgtagcagctattaccggtaatacagcatttttggcaccttccatttttacagaaccatttaactgttttccaccgcgtacaataattttttccaaaaagaacccctccgcgttactaataactaaatcatttatcgaattttaaaattaaaacatatcttagtaattctaccacttatcaccctaaaatatcaactgattttaacccaatattaaacttgttataagcttatattaaatttttactacaatagtactttttctagccaaaaaaattaattaactgcttagatgccgctaagtagtctaagaaaaagttacttaatgtataaccgagcacaatcgaaataatcacaaatagtagtctagcttgcgttacatgatttttcttaatgaatttttcgtagttgattgcttgcaaagaccaaaaagtaataacgataaatagtaaatgtgaaatgatgatgacatatggtgattccataataatattatacatgtgttcgctcctcatttttcgctactactcattttaacaaatacagagaggaaaaaacagttaatgcacttatggttatataaaaaaacttcctggctaaaaaccaggaagctaaattattattaattgtgttctttcgcgtgaattcggttgatcgctctttgtagtgctagtcgagccattacttcatccactttttgttcttttgcacggctaagttcttcttctgcacgttgttttgctttttcagcgcgatcaatatcaatatcttgttcgcgttcagcagtatccgcaagaatattaacttcttcaccgtttacttccataaagccaccatttacagcgacccattcctcaccagactctacttttaaacgaacgatgtcgattttgagtggagcaactagtggaacatggccaggtaaaataccgagttcacctgcttttgttctagcaataaccatttgagcaacgccttcataaacagggccgtctggagtaacaatactaacatttaatgaacccatacgtatttcctcctgtttttatcagacttcaacgcccatatcttttgctttttcaagaacatcctcaatacgtccaactgaacggaatgcatcttcaggaatatggtcgtattttccggctaataagtctttgaatcctttaactgtttctttaacagggacataagaacctttttggcctgtaaattgttctgcaacgtggaaattttgagataagaagaattgtacacgacgcgcacgagaaaccgattgtttatcttcatcagataactcatccataccaaggatagcgataatgtcttgaagttctttatatctttgtagtaaacgttgtacttccgttgctacttcatagtgttcttcacctacgatatcaggagaaagagcacgggatgtagaagcaagtggatctaccgctggataaataccttgttccgttaatttacgttccaagttagttgttgcatctaaatgggcgaaagttgtagccggagcagggtcagtatagtcatcggctggcacataaatcgcttggatagaagtaacggatccaacgttagtagatgtaatacgttcttgtaattgacccatttcagtagctagggttggttggtaacctaccgcagatggcatacgacctagtaaagccgaaacctctgaaccagcttgtgtgaaacggaaaatgttatcaatgaataaaagtacatcttggtgctcttcatcacggaaatattcagcaattgttaaaccagttaaggctacacgcatacgcgcacctggtggctcattcatttgaccgaataccatcgctgttttttcaataacaccagaatctttcatttcaaagtaaaggtcgttcccttcacgagtacgctctccaacgcctgcgaacactgaaataccaccgtgttcttgtgcgatattatggataagctcttgaattagaacggttttacctacaccggcaccaccgaacagtccgattttaccaccttttaagtatggagctagcaagtcaactactttaattcctgtttcaagaatttctgttgttgttgctaattgatcgaaagttggtgcttcgcggtgaattttattacgtttaatatcgcttggaagtggttcgtccaaatcgatggtgtttcctaatacattaaatacacgaccaagagttactgtaccaactggaacggtaattgggctcccagtatcaataacttccatacctctttgaacaccatctgttgatgccattgcgattgtacgcacaacgtcatcacctaattggatggctacttctaaagtaagttggctagttggtgcttcttctgcatcagatttatattcaataactagggcgttgtagatttcaggtaagtttccaccttcaaatttaacgtctacaaccggacccataacttggattacttgtcctttagacatgcaattattcctcctcacttaccttcccatttattgggacgttacaagaaacgccgacttctattcgagcgcggctgctcctccgacgatttcggtaatttcttgcgtgatcgcagcttggcgagcacggttatattgtagtgataagtcactgattaaatcggatgcattatctgtcgcgcttctcatggcagtcatacgagcagcatgttcagcggctttggcatccagaagtgctccgaaaattaggctttccacatattgcggtaataatacttccaggatttcttgttcggaaggctcaaattcgtaagtagttaaatctacatccgtttctttacctttttcgtgaaattccgtcagtggtagtagttgctcttttctcagttcactagaaatagaattgatatggtgattataataaatgaaaacctcgtcataaacaccatcttcaaacatttgaactgtgttactagcaatatctttaatttccgcaaatatcgggtgatctgtaataccttgtacttctaaaaccacattcatttgacgcgctttaaagaagtcacgagcagatctacctacagtgattattgcatattcatcacttgacgtatgctttttattaatttcttgaaatacttctttgattacggaactgttgtaagaacctgcaagtccagtatcagaagtaagtacgatataaccagtacggtgaacaggtctagatacaagcattggatggtcgctgctgttaccagtgctagcaacatgtgttactacgtctttaattttagaaacgtaaggctcatatgaacgagcgtttgattctgcacgacctagttttgctgctgataccatttgcattgcttttgtaatttgacttgttttacgcgtagaagttattcgttgtttaatatcgattaaagatgccaaagattttcaccacctttgaatttattccgagtctaaattatttttcttcagaaggaacaaatgtatttttaaattcttttaatgctgcttcaagtttcgcttcgtcaggaagttttttcgttgtacgaatttcttccaaaagctctgggtgattatgatcaaaccatgtattcatttcggactcaaaacgcagaacatcatgaactggtacatcatccagatatttatgaacaagtgcataaagaatcaatacttgtttttcaactttcaaaggtttgtgcaaatcttgttttagaacttctactgtacgtttaccacgttctagtttcgcacgagtagctgcgtccaagtcagaaccgaattgtgagaaggattctagctcacggtaagcggcaagatctagacgaagtgttccggcaacagttttcattgctttaatttgcgctgatccacctacacgggatacagaaagcccggcgttgatcgctggacgtactccggagaagaataaatcagattgcaagaagatttgtccgtcagtaattgagataacgtttgtaggaatataagcggaaatgtctccggcttgtgtttctacgaatggaagagccgtaatggatccgccacctaagctatcatttaattttgcagcacgttcaagtaaacgggagtgtaagtagaaaacatcccctggataagcttcacgacctggaggacgacgaagtaatagagacagctcacgataagcagctgcttgtttggataagtcatcatatacaactaaaacgtgtttaccgctgtacatgaattcttcagccatagcaacaccagcataaggtgccaaataaagaagtggcgctggttgagatgctgctgcagttacgacgattgtgtaatctaatgcgccgtgatgacgtaatgtttctacggcattacgaacagtagattctttttgaccgatggcaacataaatacaaatcatgtcttggtcagcttggtttagaatagtatcaattgctacagatgttttaccagtttggcggtcaccaatgattaactcacgttgaccacgaccaataggaacaagtgcatcaattgctttaatacctgtttgtagtggttcgtttaccgattgacgttgcataacaccaggtgctactgcttcaatcggacgagttccagttgtttcaattgggcctaaaccatcaacaggttgacctaatgagttaactacacgcccaataagcgcttcgccaacaggaacttccatgattttaccggtacgacgaacttcatcgccttcacggatttcagtgtaaggacctagaataatgataccaacatcatttgtttctaagttttgggccatacccattacaccatttgagaactctaacaattcaccagccattgcattatcgagtccatgagcacgcgcaataccgtcaccaatgtaggtaaccgtaccaacatcactcacttttagttcagattgataattttcaatctgctgttttatgattgagctgatctcttcagccttaatgctcattgatttcacccctcgttaaacggaaactaggctttaatttgccgttccatgtcctttaatttcgtttttagactgtcatcatatatacgggttccaataaccactttgactccaccaagaagggatttatcaatgtgattttgaatgtttaattttgttttgttcattttcgcagcaaatactctcgaaagcgccgtaagttcttgttcagaaagcggtacaacagaataaacatctgcatccgcaactccgcgcaagtcgtttacgcgtttttggtaaacgtccgcaataacagaaagataatcttctctgctacggtcaattaaaagataaataaaatctcttaatgtcggattgattttttcaaaaacagcgctggcaagatttttcttttgctcggtcgtgaaagtaggattttcaagtagttttacaaaatctttatttgcatttaatgccgcttttaattcagttagttcttctgaaaaaacgtcgactaaatctttatcttgagctacttgaaaaagcgcattggcatagcgacctgcaacttccaaatctttactcatttgtcatcccctagcctttcgatataatcttggataaggttagattgttctttttcatccagatttttttcgatgactttcgatgcaataagaacagataaggaaccgacttgttcacgaagagcagaaatagcatcttctttttcacgtgcaatatcggcttttgcttcttcttttatacgttctgattcacgtctagcagttttgacaatttcttcgcgttctttttcaccaagctgttttgcattctcaatcattgtttgagattcaacacgagcttgttgtaaaacacttttttgttcggcaagtagttgttctgcttgagcacggctttcttcagccgcatcaatttcagaaccaatatgctcttcacgctctttcataactcccataagaggtttccaagcataaattcggattaaaactagcaaaatcgcgaaagcaaaaagtgtgaagaatgcatcaccaaacgtaaatgcggaaccaattactaaatgtggttgtaacacgccagtttcactcctttctatacattcgcttgaattattcgttcaaaacgaaagagatgaggttttatttcctcaacttccttcaaattatttattaagaaccatgaacgcaataactacagcgatgataggaagggcctcaacaagaccgataccaatgaacatgattgtttgtagcatagaacgcgcttctggttgacgcgcaacaccctcgacagtttttgatacgataagaccgttaccaatacccgcacctaatgcacctaatccaacagcaatagcagctgcaataacacctaaagacatataattatcctcctaatttttctaaatattattttttattacttttataaatgacttatttgaaagttagtttaatgttcgtcacttaccttatgcgacatgtaaaccatggtcagcatagtgaaaatgtacgcttgaattgccccaatgaaaattgagaatccttgccatagtaacgcaggaattattgctagcacacctacaaatatgttcatatgagcaagttgtgttgcaatgatggttaacaaaacttcgccggcgaaaatattaccgtaaagacgtaaaccaagcgttaaagtattagcaaattcttctactaatttaagtgggaataaaaatttcattggactaaagtaagtaccaacaaaatagtgcttgaaaccacgcattttaataccatagtaatgcgttaagccaagaaccattatcgcaagtgttaatgtgacaattggatccgctgtaggtgaacgccaccatacttcatcgttaatcgcgatttgaaatggcagtcctagcatattagctacgaaaataaacattagtagcgtaataccaagcacatggaatctcccaccggttttccaatccatattactattaataatacctctgacaaaatccataacccattcaatgaagttctgctttccggtaggtcggcgttgcagatttctggtacagataatggctattagaagaacgatgacacaagtcacagtaatcatcaaaatattagatagattaaagtcgatccctaataggcttatcgttggaaattcctcttccaattaggttcacccctctctttttaaaaacttttttctgcggtacatggaatacacaaaaaaatccagaaaaataattgcatatgcaagcccaagtccgattaccatgctataaacatgaaaatattccggcagttgcgtcgctataatagtagcaaataacacgctccccattctaaatggcattcccataccataaaaagaacgattttcagccaaagctctagtcattgattgtgtacgcctcattaataaccagtagttaaaccagccgacgattaaacccaatttaagtcccaagaaaatatgtatgtaaggggttaaaaaccatccacaaagacaaacagcaataaaaagaaccatatacttttgatgacgatgatacatgccaattagcgattctaacattcggggcgcaatcctttctttttcaaaagatttttctttccagatgaccattttgaaatctcagggagtaagtttggtttgtgaaaacaagcacattttccccaattcatcccaatcccaaacacacatgaaagccttatcagcgtgtcagttcttagcatacaacagccaaaagagaaaagtcaatacactttcacaaattgtgcgtacatctattactaatagtaccacaattgaccctatccataaaagaatagcccattatttctgagatttttttgatttcaaaatctagtcgtttcttagattgctccgccagaattatctttgtccatttaacagcaatcaacacctccgtaatcgatggaaaacttgcctcctgttcgtgtgatatttcacaaaaaaggcgacaaaaactctctttcgtacaaataaaaaaacttctaccattattggtaaaagaattcgatacgattattcgcaaatttcgcgaccgaaagttcttttcccaagaaaaagaacggaaaaaacagccggactcacttatcatgagttgcattttgatatagagtgcccgtataaattccaattcagtcaacgcgaaaactagcgtcggcgggattgtagtgaatactgagcgcagtcttctatccctatgctaaaaacaagctattttttgggctcttatattaataacattgaccatcttatcacatgtaacataaaagaactagtgaaaatcgagcgtgtaacatatctgtaacaataaggcgctttcattctaaaaaaagaggaaaactagacttttaacgcctagttttccactgtgttttacacgataaaatcttctggtcgcttcgttccattaaactgacttttgattgcttctaaaattctatttgcagcaagtccatcaccatatggattggccgctttcgccattttatcatggctttctttattatcaagtaattctaatgcttcttttatgagattttctttactcgtcccaattagttttaacgtgcctgcttcgatgccttctgggcgttctgttgtgtctcgtaaaactaaaacaggtactcccatgcccggcgcttcttcttgtacgccacctgaatcagtaaaaacaaggtaagatttgcgtaagaaattatgaaagtcaatagcatctagtggttcaatcaaatgaatgcgatcatgaccacctaaaatactcattgctttttccctaacagctggattcaaatgcatcggatatacaagttccacatcctcacgactctcgacaatttcgcgaaccgcttcaaacataccttgcataggttctcccagattttctctccggtgagcagtcatgagtattaagcgattatcaccaagattctctaaaataggatgatgataatcctcttgaacagttgttttaagggcatcaatggcagtatttcctgttacaaaaatagtagctggatttttcccttccgcaagcaggttttctttagcttgtttcgttggagaaaaatgcatatccgccattactccagttaattgacgattcatttcttctgggaacggcgaatatttattccaagttctaagtcccgcttcgacatgtccaagctttttttgttgataaaaagtagctagtccggcggcaaaacttgtagtcgtatcaccgtgaactaggacaatatcaggattttccttagcaataacatcattaattccgttcattacgcgtgaagttatatcagctaaggtttgtccttttttcattatatctaagtcaatatcaggttttatatcaaaaatttctaagacttgatccaacatttcacggtgttgcgcggtaataactaccgttgactcaaacgtttctgattctttttctaatgccaaaacgagcggcgccatcttgattgcctctggtcttgttccaaagatgctcattactttgattttagccaattgcgaacctccttataaaaaaactcctcagaaatagctcgacaaaaaattttccagtctgccaaaaagcagcactgtttataattccttatctcactaaaccgaggagattgttaattatttagttccgaataatctatcgccagcatctcctaagcctggacggatataaccattttcgtctagcttctcgtctaagccagccacatagatttctacatcaggatgtgcttcttgaagagctttaacgccttcaggagctgctactagacacatgaatttcatgttgcgagcgccgcgttttttcaagcaatcgatagccataattgctgatccaccagttgcaagcattgggtctacaacgatgaaaagacgttcttccacatcagaaggtagttttacaaaatattctactggttcaagtgtatcatgatcacggtaaagacctacatgacctactttagcagcagggataagttttaaaatgccatcttgcataccaagaccagctcttaaaattggcactacacctaattttttacctgtaagtgtttttgcagttgttgtttgtagtggtgtttcaacttggatgtcttcaagttccatatcacgtgtaatttcgtacgccattaatgtagcgacttcatctacaagttcgcggaatgcttttgttcccgtatttttatctcgaataattgttaatttgtgttgtactaaagggtgattaattacgtgtacgtttgccatcgattagttcgctcctttgatattgaaaatttccttctcttattgtatcagaacaagacacaagtgcaaggattaatttgctatacatgaaaaaaaccggatttctctaaaattcagaaaaaaccggctcacttattttataaacttggataaagcggatattcatttgttaaattagctacacgagctttcacatctgctaaaacttcttcattttctaagttgtgcagcacttcagaaataagtactcccactttttcaatagctacttcatcgaaaccacgtgttgtaactgccgccacgcctacacggataccgctcgttacaaatgggctttctgtttcaaatggaatggtatttttattcacggtaataccaacctcatctaatactttttcagcagcttttcctgttaagccaagtggttttaaatcaattaatagtaaatgattatccgaaccgcctgttaaaacagcaacatcattagcttgaagtgtttctgctaattttttagagttgcgaatgatttgttcacagtacgcagtgaattcaggttgtaatgcttcaccaaatgccactgctttcgctgcgattacgtgcattaatggtccaccttgaattcccgggaaaatcgatttatttaatttttgttcccattcagcttttgctaaaatcattccgccacgaggtccacgaagggttttatgagtggttgtagttgtaaaatcagcataaggaactggattttgatgtaaacctgctgcaacaagaccagcaatatgcgccatatcaaccattaagtatgcgccaacttcatcagcaatttcacggaatttagcaaaatcaattttacgtgggtaagcacttgctccagctacaatcatttttggtttatgttttaatgctgcttcacgaacgatttcatagtcaatttctttcgtatcttcacgaacgccgtattcaacaaaattgtataaaacgccactaaagttcactggactaccatgtgttaaatggccaccatgtgaaaggttcataccaagcactgtgtcgcctggttcaagcacagtatgataaactgccatgttcgcttgagcgcctgagtgtggttgaacattcgcatattcagcgccaaataatttcttcgcccggtcgcgtgctaaatcttccacaatatccacgaattcacatccgccgtagtaacgttttccagggtaaccttctgcatatttattcgttaatacagaacccattgcttccattacttgctcactaacaaaattctcagatgcgattaattcgatattcgcgcgttgtctaccaagttctaacttaattgcatcaaaaacttccttatcttgcttttgtaaatagaccatctgtggaccccatccttttctgataaatttttcaagtgaactgttatgtattatctttaataattacttaaatcgggtagaaaagcaagtattttggagcaaaaaaacgcaatttccgatagtgaagcgcttcacttattgaaaacgttcggaaattgcactttttagttcgtaataggtaatttcatattgttcaattggtcctccgaatgggtctgtaatatctgtttcatcttcagaaatcaattggattttgttactcgcggccggaaaaatactttttagctcagcttggtgatttttggtcattacataaacctcgtcagcccagtcaatatcggcttctgtaattttctttgcggcatgttcccctggtaaattcatttgcagcagtatctcgcgggagttttccgatatagtgacgccatctaatgctcgcgtccctgctgaacgaacttctaaatcaggtcgcatattttgtaaaattttttcggctaatggacttcggcaagtatttcccgtacagacaaataaaatattcattcgctaatcctcctattcccagcagctttttctaatcggttcataatcgctgctccgagttctgtttctggatagacttcggcaaaaataatatcaacatcggcatggtcaaaagcccgtaagcctttgtaaagactagtagctatctcatccattgctttaatgctaccggttgattgaatgaccgcacttgtagccaatttgctcgtcaattcttttgtagctaaaatacccagttttttccccgcgattcccactttattaatctcactttgccaaaattggctagaaccttctacaagataaactggtgcttttggcgcgtaatgagtgtatttcatgcctggcgcttttggtttttctgtttctgtcgtgctattggtcgataaatcaactgttccgataacttgctcgatttgttctatagtaatgccacctggacgcaaaataatgggtacatcaagtgagcaatctatcacggttgattctaaaccaacacccgtaggaccgccgtcaataataccggcaatttctccgtctaaatcttctattacatgttcggctgtggttgggcttggttttccggaacgattggcgctcggggctgctataggaatattcgctgttgctattaattctaggcttactggatgttccggcatgcggacgcccactgtggataagccagcagaaacgttagctgctagactgtctttttttaaagggagaataaccgttagcggacctggccaaaatgcttccattagttggagcgcttttgggggataactcgcgataaattgatccatttgttcacgcttagcaatatggacgattaacgggttatctgacggacgcccttttgctgcgtatattttttgaatggcagcttgatttgtcgcgtctgctcccagcccataaacagtttcggtcggaaaagccacacattctccattttgaagtagttctgctgctttttgatagattaaattatttgattgttgcttatttattttccaatggatggtttgcatgatttccagtcccctttacataacttctattatattttaacgttttctaagctatttttacagtattgttttttattttggaaaatgctaagttttgaacacgagttatccccaaactgtggataataactttgtcaatggggataacttcttgtgaaatgtggataattcttaaaactaagtaaaaaagccattttctttattaagatttgattaaaatatttttttgcacaacattttatccacagctttgtggataactttcattaaaaaaagacgtcccttttacagaaacgtcttcataccagtatattagagcatgttacgtaacgatcttttgaattaatatctttgtggataaggaccgttgcgtgtggataacttttttcaaagagttgttttactcgttcaccttgtgtataacctatctccacacccacccaaaaggacggattcagcacatattttaagttatccacaaaacgttcataaattgctagcccatcattttcggcaaataaagcaatcgatggctcattttttaagacataatccgacatttctgctttttcggcttcagaaatatatggaggattagcaacaatcatatcaaatcgctcgttattttgtttgaaggattcgagtaaatcagtttctacaaaacgcacatcggcatttagtaataaagaattttttttagcaatcgcaagtgctgcggccgatatatccgaagctgtcactgtcatatccggaaatgctttttttagcgcaatggcaataatcccgcttccagtacaaacatcaagcaaactcctaagcggatgttgtttcaaaaaagcttctgctgtggctacaagttcctctgtttcaggtcgtggaattagcacatcttctgttactaaaaaatcatatccataaaaaggcgctgtcttcaaaatatattgaaccggttctcccgctaaataccttgcaaagtcttcttgaaactgtttttcgtgatttggttcaagttcgcggctcatttccatccaaagttcagaacgcgtaagtcccattctcgtttctagtaaaatttccgctgcattttgatccaatcctttttcaagaaggatggcttctgcattttttagcaattgattaatttgcgtcatttaaatgctccaatttacttgtttgatcttctaggataagcgcgtcaatgatttcatcgagtttaccttccataatttgatctagtttttggatagtcaagccaatacggtgatcggttacgcggttttgcggataattgtaagtacggattcgctctgaacggtcaccagttcctacagccgatttacggtttgcatcatattcttcgcgagcttcacgttcaaatttatcgtaaacacgtgcgcgcaatactttcatcgctttatctttgttttttaactgggaacgttcatcttgcatcgaaacaacaatcccggttggaatatgggttagtcggactgctgacatcgtcgtattgacactttgaccacctgcaccagtagaagcaaatgtatctgtgcgaatatctttgtcgtgtagctcaatctccacttcttccgcttctggcaaaatagctactgtcgctgtggaagtatgaattcggccaccagattcggtttctggaacacgttgaacacggtgagccccattttcatatttcatgcgagaaaaagcatcattgccgttcatcatcgcaataatttctttgtaaccgccaataccagttgggttagcgtccatgatttcgactttccaaccgcgagattcagcgtacttgctatacatccggaataaatcgcctgcaaataaagctgcttcatctccaccagctgccccgcgaatttctaaaataacgtttttatcatcattaggatcttttggaacgagtaatagttttagacgttcttctagttcagctttttctttttgaagttccgcgaattcttcttttgccatttctcgcatttcatcgtctaatttttctcctagaagttctcttgtttcatcaatttgttcattcacgtttttgtattcacggtaggtttcgactgttgctgtgattcctgactgttctttggaaaggtcgcgtagtcgctttggatcagatactacatctggatcgcttaataattcatttagttcatcgtaacggtcttccaccgcctgtaatcgatcatacattgtatttcaacacctctttaccttattttattggtggattggcatggcatttgcgacacacagggtaatagtggtcattgccgccaatcataatttgttcgcctgtgtaaactggttttcctttgtcatcaacgcgcagaaccatcgttgctttttttgcacaaaaccagcaaattgttttcatttcttctaatttatccgcgtatagcagcaggtatttcgagccttcaaataattcatttctaaaatcatttttcagaccgtaagcaattactgggatatttaagtcatccactatttttgctaattgaaaaacatgttctttttctagaaattgtgattcatctaaaagaacacaatttggtttcggtttaatatttgctacgatttcaaaaatatttgtgtcactaaaaataggggttgcttctcgtttcaatccaattcgacttgaaatgaaacctacttggtctctatcatcaatacctgaagtaaagatagcgactgttttattttgttcttcataattatgtgcgacttttagaatttcaatggttttcccactattcatggaaccataacggaaaaataactgtgccattaagaccgctccctttaactttataaactcttttcctattttatcatagagccgtacaaattgggacatatagttttgtcttcatgaaaaaagctatgccgcaagtggacatagcttgattttaacgaaaaacttctgcaccgcttccttcaacatcaagaagaagaacgtctgcatcaatttcaagtgtttgtaaagatgtttgaagcgtatctgcaacgtctcgcggagcaaatactaagacagttgggccagcgccacttaaacaagcagcataagcaccattgtttttagcaacttctcgaatttgtgttaaatgtggcactaatttactacggtatttttcatgccataaatcgcgttccatcatttctccagcaagagtcatatcattgcgtagtatagctgcaatcataacgttcgcaatactacttgctttgaccgcttctttgaaaggaagtgtttcaggaagaacgccgcgactttccgaagttaacagttctgcttttggaataaaagcaattaaagcacaatcgggaaataaatgacgtacgtagaaatcttctccgtctaattttgctccaactacccagtttccaagaacagctggcgcgacattatcaggatgaccttctatttcagcagctatccggactttttcctcttttgaaaggttaagttcagcaagtgtattggctaattcaattcccgcaacaaccgctgccgaactactaccaagtccacgagcgggcggaatatcacatgtcatcactaaatggtgcggtgttaaattaggcgctaggtttaaggcagtttcgataatcacattggtttcatcatgcggaatcccaccgccaatattatgttcgatataccaagaatccgctttttcgccaatgtctaaagtaagatataacgtcaaagctaagccacacgaatcaaaaccaggcccaagattagccgttgttgccgggacacgaatacgcattaagctttcactcctgaacgtaaatgtgtacgcattgcttcaatatcatctacatgggaaatcggaatttcatgtacactcattgctgtatctgggtcttttaagccatttccagtaaagacacaaacgactttttccccttgtttaattgttccattcgccacatgttgaataactccagctaatgatgcagcagaacctggctcgatgaagactccatcttgcgctgcgatttttttataagcattaacaatttcatcatctgttacagaatggatgtatccgccagattcgtcgcgagctgcttctgcaagctcccaactagctggatttccgatacgaatcgctgttgcaattgtttccgggttatcaatcggtttcccttggacaattgcagccgctccttctgcttcaaatccatgcatccgtggaagtccagaagcgtttgcctcattccactctttaaaacctttccagtatgcagaaatatttccggcgttaccgactggaattgcaagaacatctggagcagaacctaattgctcacagatttcgaatgcagccgttttttggccttctaaacgataaggatttactgagtttacaagcgttactgcttctgtttcagcaagttcacgaacagattttaaagcttcatcaaaattaccttgaatcgagataatatcagcgccatacatgactgcttgcgctaattttcctagagcaactttaccttctgggataacaatatatgcttttaatccggcacgtgttgcatatgccgccgccgctgctgaagtattcccagtcgatgcacaaataaccgcttccgcaccttcttctttcgctttagccacagccataaccattccgcggtctttaaaagaaccagttggatttaacccttcatattttccatataaagttactccaagttcttttgataaatttggtaatgggataagtggtgtgtttccttccgcaagtgagatcattggcgttttttcagttactggtagatattctttatatttttctagtaaacctttatacataattaaccctccacaacggaatattttgcgagcatttgcatttctggctcatttttcactctagtaatagcttgttctaattgcgcttgacttgttgagtgtgtgacgataacaactgtcgctgtaaaatcatcatatggttgttgtaaaattttatcaaaaccgacgcctgcttctgcaaaaatttgtgttaacttaaggaaagttcctgttttatcatccattgttagacgtagataatattttgagaaaacttgttctttcggcgtatgtttcgtttcgtgtttataactattgaaagcattgccgtttgtacctagacggctgttttttgcgacggtaattaaatcactaacaacactggttgctgttggtaattcgccagctccgggaccataaaacatggtttccccaacggctgcacctgttacaaatacagcattattttcatagttaacgcctgcaagcggatgtgcttttggtagtaacactggtccgacatttacattaactgttccatttgtttcttctgctgtacctactagtttaattttatagcctaattgatatgccacttcaatatcttctggagaaattccgcggataccactagtttctacattatctaaattaacattcataccaaatgcaagtcttgtcataataaccatttttctcgctgcatcaatgccgtccacatcatttgttggatcggattctgcaaaacctaatgcttgggcttctgctaaaacttcttcatatgactttttctctgtcgtcatttttgttagcatgaaattggtcgtcccgttgacgattcccattactttttgaattttatcagctgcaaggctatttacgattgtacgtaaaattggaattccacctgcaacgcttgcttcataaaacaaatcacagttgttagcttgtgcaactgccaccaattcgtcgccgtgtagcgcaatcaaatccttattcgcagttacaacatgctttccagctttcaaggcctgcaaaatgtattcccgcgcagttgtgatgctgcccataacctcgacaacaacagcaatttctggatcatccagtacatcagacggattggtggttagttcaaaaccttttgtttcataacggcgatttttctctaagtcacgaactagcactttctttacagaaatatgatagccagttacttgactaattttttcttgatgctcttctaaaatatgaataacaccgctacctaccgttccaaatcctaacacacctacttgtaactttgcttccacttgaaaacctccttattattgtttaacaaaacagaaaatttaacttttttattacctactcataaaaaaagtaattagtgatattatacgcaacttcacagggaaaagtaaacccttgaagggaaagtttttatttttagtagtctcaggaaataattccataaaaaaacacacccagcaaaagctgagtgcgcaaattatttcgttcgttacatacagtcttatttgagaccgtattttttgttgaagcggtccacacggccgtctgcagtcgcatgtttttgtttaccagtatagaacgggtgcgaatcagaagagatttcgacacgaagtaatggatactcgttgccatcttcccatttaattgtttcgcttgagctcttagtagaacctgacaaaaatttgaaatcagtactagtatcaacaaataccactggacggtactcaggatgaattccagttttcatttcttttcaactccttcgccctgaatcatctgaaacagagtaattaagtgcttttacacacagtataaatattataacaatgttgaagcaaacaagcaagattatttttgtgctttagataatccatttgctttaatttttacttaggcgcatttttaagttctatatctttaggtaagttaaagaaaatcttgaagttatctgcttggaatccaggaatcattaacctactattccataagaatttctcatgttttagtggtttaacagttaccacttttttaccttcgtcaatttgtttttgaatactatccattctgtcattatcagatatttttatttgagcaaaaataataccatacgcgactactaaagataaagaaagcgttataatcggaacactgatagcatttagattaacatatccctcatccacaaaataaacaagaagtcgtataataaataaaacaaaaaatgtataggaaataataaaacatcttgatccaaaaggagttacaaagaataacggtcctgcaacgaatactgcagaaattagataaaaacttagctccacttttaaagaactctttcggaaaaataaaatgatagtaaatagaatagttaagtaaaataataatgaaatccaagcttcaagttctgaagtcttagctacatccgtaaaaatacttaactgcattctatcaacaataagtggtcgatagaaaggatatatagttagtattaccatgaaaatgtttttaacccataccttccaaataggtagattagttccaattttcactaacaagaaaatacaaaatatagccaatgcaaagttcaataaaatattgttcataattaaaaacttatacatgctagttgagaaaattgaataaattttttcaaaaattcccatatcagtatcaattgttcgataattatctgcgccagtaaatatttttacataggcaccattagaaaacattataactgctccgatgagggctgaaataaggtatacaatatggaaataaaagaactttctaaatttcataaagctataaattataacaaacgcaccagcaaatacattataaattgtagcatgttctacaaacaattgagagccaattccaagtggaacagcaaatattaccaaccaaactgaataactaggatttttttcataaaaaatattcttcacaattagtaaatatactaaaatacaaatcgttgcagtattatagttagcaaaaccagctgcccacgcaaaagtagaagaaaacatatcactggaaacacctagcatcaagaatagacttagaaaagcgatagttaactttgttgcttttgcaattaaaaggggtattactactattgcagctccaaatactcccatgattaaaaagcggaaccaatctactctagtaattattaattcacatatattaccaaaataacgaccattatagtctttaaaaccatcataaaaacgattcattccaagtcgtatgccccaagtccagtcatcatgagttaacggggtacaataagacagatataagtaaaacaaaaaaacaataaaactaaaaattccaatcttgacgccatctttttttatgctatttatcatagatacacatccctttattttctcactttaaaaataatccatttactaaatacataatttaatattaatactattacatttgtccatatctttgcccatagttcatttattcctagtccactaattaacagaatcattactaagaaatcaacaatatatgttaaaaatctaaagccaaagaaagaggatacttctctcgccttttctttccaagtaggtgtgtagctttcgaagacatattttttattagaaaaatatgcaaacagtacagatgctacccatgctatagtattcgcaattctataatcccagtttaatacatctgtacataaccaaaaagttacaatatttataagtgttgtaaatccacccataattagatacatcaaaatactatgtatattgtctgtataccatggtaatttgtctagcaactgccttactctactcatttgacatcttctttctctccgttatattcttctacaaaataaagcggccgttttttcacttcattaaaaattctgcctaagtattctccaattatacctatacttgttaattgaattccacctaaaaatagtattgtaatcattaatgtcgggaatccactagcgttagaacccataattaatgttttaattaagatgtaaatcaaataaataaacgttccaagtgatattgcaaaaccggcaatagtagacaatcttagaggccatgtggtataggatgtgattccttcaagagctaaattaatcaatgaacgataattccattttgtttcaccagcatgtctcggcgcagcatcaaaagtcacttctactttcttaaatccaatccaattgtaaagcccttttgtataacgttgagtttctcttaatttttttatagcatctacacaacgtcgatcaagcaaacgaaaatcaccagtatctggtagaaccggcgttttagttactttttgtaacatcttataataagattttgatgttgctttttttaaccaactttctccgtgacgtttatttcgtcttgcataaacatcttcataacctaattcccagagctcaaccatttgtgtaatcaactctggtggatgttgtaagtctgcatccatagtaataacagcatcacctttggcatagtcaaaaccagcagccattgctatttctttcccataatttctcgataaatccacaaaacctactcgatcatctttttcatgtaactgttttactatttccagcgtattgtctttactaccatcattaataaataataactcaaacgtatatttatctttaatagctcccattacttcgacaatagtttcatacaatttaacaacggattcttgttcattatatgcaggaacagatattgtaattagtttcattatctttctccttcttattacttcgctcattaccctacaaatgatagtatcaaaattaataagaaaagtacaggtttggtttattttttaaacatttcctcttgtaataattcataaaacgcttcattgttttcggtttttttcaggtatctgacaaagcgttctgaaatatctaatccatcgctttgttttggcattgcctttcgaattttccaaagttgttctaagcgttctttagataagagcaattcttcttttcttgttccagaacggcgcatatcgatagcaggaaagacgcggcgctcagcaagttgtcggtcaagatgtaattccatgttaccagtacctttaaattcctcgtaaataacatcatccattcgtgaaccggtatcaactagtgctgttgcaaggatagtcaaacttccgccttcctcaatattacgtgctgcaccaaagaagcgtttaggacgatggaaagcagctggatcaataccaccagaaagtgtacgaccacttggcggaatgacaaggttataggctcttgctaatcgagtaatactatccattaaaataacaacatctcgtttttgttctactaaacgcatcgcacgttccagtactaattctgctactttaatatgattttctggaacttcatcaaaggtagagctaacaacatccgcttttacagagcgttcaatatcagttacttcttcaggtcgttcatctattagtaaaacgatcagttcagactcaggatgattagttgtaatcgcattcgcaatttcttttaataaaacagtcttacctgcttttggtggcgctacaatcagtccacgttgcccaaaaccaattggcgaaatcaaatcaattgtccgcgtcgaaattggcatttttccagtttccaaatgaatttgacggtcagggtaaagcggagtaagtcctgggaaatgcactctttctttggctacttcaggattttcgccgttaactgcttccacatgtagcaagccaaaatagcgttcattttctttcggaggacgtacttttccagaaaccttatccccagtccttaattcaaaacgtctaatttgagaagccgaaatataaatatcttccgaactagaagaataattaattggccgtaaaaaaccaaaaccttcattcggaataatctctaaaacgccttccataaaaaagaaaccttctttttcggcatttgattttagtaaagcaaaaataagttctctttttgttagtttgctataatatgcaattttatgttcttttgccaaagcgtaaatatcttttattgttaaactttctaagtatgcaatggacagttttgccatatgtgtaccacctttttgagttaataatattttataagtttttaggaataagtggaaaatgaggtgaaatcgagggaaggctgaagcgaactgattcgctcagcctctctttttttataatttagtttctgctgcagtgctacgagtaatatcagcgccaattgcagaaagcttttcgataattttactataaccgcgttcgatatgttcaacaccatgaatttctgttgttccttccgccaaaagccccgcaataactagagcagctccggcacgtaaatcagttgctgtaactttagaaccttggagtttaacaggcccacttacaaccgccgatcgaccttctaacttgaacttcccgcccattcgctcaatctcagctatatgcttaaaacggctcgggtaaatcgtgtcagtaacaacgctgctaccttctgcacgggttaaaagtgccgttaacggttgttgcaagtcagtcggaaaacctggatacgcatatgttttaatatctacttttttgattttttctacttccccaacaaaaatagcgtcttcttcaatatccatcggaattcccatctctgtcatttttgcgatgattccttctaaatgagttgggataacattctcaattcgtacgccttttcccgatgctgcggcaagtaccataaatgttcctgcttcaattcggtcagggataattgtatgatgacagccatgaagatgctccacaccagtgattcgaatagtgtctgtcccagcacctttaataatcgctcccatattggaaagaagcgttgcaacatcaataatttctggttcttttgcagcgttctcaataattgtttttccttttgcgcgaacagctgctaacataatatttatagtcgcacctacacttacaacgtctaaataaatacgagctccttttaattcatcggcccgcaaataaatagccccttgttcattcgttacttttgcgcctaatgcttcaaaacctttaatgtgttgatcaattggacgcggacctaaataacagccacctggaagcccgataactgcttttttaaaccgacctagcattgctcccattaagtaataagacgcacgcaatttcttcacatttcctgttggaagtggcatagaaatcatatctgctggatcaattaccgctgttttattatcataacggacactgccgccaagttcttctaaaatatcataaagtgtataaacatctgaaatatctggtaaaccttctaaaaccacttcagattccgctaaaattgcagctggaatcaaggcaactgcgctattttttgcaccatctacttgcaaagttccggctaattttttgccaccttgtataatcaatttattcgtcacaaatgtacccttctttcctgaagcatgtaatactttttcattatccattaaattgttttactttgcaagattctttcttcaaaaaaaagccgggaacagttcattccaagcttttcattacgacgaaatattttttactggtgcttttgttaatgcttctatatgaggtttaatttttttagaagctgtgtctttaattaataaggctcctgccccaaaaacaatgcaactataataggtaataattcgccataaaacgagcgccatcaatagttttgctggtccaagcaacataccaaacaacaacgtaaatgtatactcagcaccacctgcgcctccaggagttggcataacagtagcaaacataataataaaggcgtgataagtaatcgccatatacagcccaatgccagttacaccaattgcttgtaaaatgaagaaaggtattgagaaatatatccataattggagcgtcgtataaaaacaacagcgcacaattaatttccaatctttcccaatccgactactttcttcatggaaagtaataattttttcgtctagtgtattttttaaattcgcgactttttcttttttcataaataatctagtcggaagtaatagcacatgtactaattttgtggtgaatttctgacttctaccgactaaaattaaggctacgataactaccacatgaacgccaaaaccaagcaaaacaagaaatttaagctgcgttacccctgtcatcaagtaatgaataccgaaaatcaaaataactaaaaaattaagtacaaccatcgcttgataaataataaatttcacgagtaaaacagaacttcctcgtccagcatccatgccttgttttgttaacattacgagctgtgccggttgtccacccgtcgccatcggagtaatcgtattaaaaaattgaccaatcatcgttatccgaaaagaagaaaagaatcgttggtctttatttgcaggctttgaagcggtttgtaaaacgactgcttctaaaaaccaataaataaacatcgccgcaaatgcacctagaagccaccacggattgacttttaacatcgaagcaaagaatgtggaaatatctacgccttgaaattgccaaataatgaagccgatactaatcgccagtacaatagctatattaaatagattcttcttcgcgcctccactcatatgctcactccttcgttaataatccttgataaaaggcaaaccatatttttgccaaacgatcttctgaataataggttgcgccctctttagcggcttgcaacatttcgttataataatcagtatcatgttccaagcgttctatagcccgtataaaaccaggattatcaacttcttttacataatagccagttaaaatttcttcatataattctaaatttcgaagcaaaataggaacatccgcgctcattgcttctaaaatcgccattggaaacagctcattatacgatggcataaagaataaatccgccatattaatacaagcattcatttctgaacgatcgacaatgccaataaatttcacatttgctggcggattatcataaattttcttaagttcttcatagcccgaagtaatcttcccaaaagaaaatcctcccgcccacacgaactggatatgcggtaattgttttgccacttcaataaagtcgagtacaccttttcgatgttgaacttgacctatcccaattacggtgaatttatcagccggaattccatatttttcacgagcaagctttttttctgccgtagaaattgggaaaaaagtttttttcgagacaaaattaggtatataatggattttttcttccgggatgtcatatgcagttaattttggaatgaacgagggattaacaacaactatttcatccattcgcttataaaaactaattaaatatttataaaacacaacgcgagcaatccaaggcaatttcaaactaccttccattgtttctggcaaaaagtgcacataaccaactcgcactccgcgtttcttcttaaaaaaggtcgaaagaaaaaaacggaaatcaacggtatgataatgcgtgatatccgatttctcaaaactattaatcttcatatcaatctcatttgtatatctttcttctagtaaattcacaagttcgcgataagctgatgctacaccttgtccttttactttttctgctgaagatagcattgtcaacttaatcacgccgcgatgacctctctttcctttgtacgtgcgtagaggacgaaagtgaaaatacttgagaagcaattttactttttattaatgtcggctttactttaatcgtgccgttttgtcgctttacacggtatatttcgcgaacctcattgtatgtagactcaacattgatgccaaattgttccgcggaaattgattctacttttactcttccatttgtagctactaaagtcgccatttctttatcagaaaatattttaattaataggcttgctagttcctcgtctttatcgaataaaaaggctgtttctttatctgctaaaaagccttcaatactttcgtcacgttttgcaacaactggtaacgaggccgccattgcttctgcgtaagttaaaccttgtgtttctgtcgttgaagcactaacaaataaatcacctaattgataatataaactaatgttttcccagtcaactgcccctgtgaaaataacatgattttctaattgtttggtttctactaatttttctaagtctttgcgtaccggcccgtctccaacaatcactagttttgcattaggtttcgtttcaaggacttctggcatcgcattaataatggcatcgatatttttttcatgagcaattcttccaagcgaaagaattacagaatcattttcttcaattccaagtgattgtttcaaatccagaattcgctgtttttcaaccggagcaaatgatgaaatatctgtaccagttggaactgtatacattaatttatgaatcccttgctcttctaagtgatgccttacctttgcagttggagtgattatggcatcatagctatcacaaaaagattttgtcattttgccaaccattgaaggcgttaaaattttaccttttgcgatatagtgcaagtaatcaacatacattgtgtggtaggtatggatagatggaatattatattttttagcaattcgcttacccaaaagacctaatgaaaactctgtatgtgtgtggataatgtctaaatttaagcgacctactagcttaataaacttattcattcctgcaattgctacgcgacgttctggaaaaaagacaaacggtatgctaggtaaacgaaacacacgtccttcttcgctttctctatcagcgttaggatccgtcgttgtaaaaatatatacagtgtgcccttgttttcttagttcgttttccataatcattatcgatgtagctacaccgctaatttgcggactgtaggtatccgtaaaaatccctatattcattactatcgcctactctcttcctcgttggttcattcatcatttaatatactattataacataactatagtaagtcgtatcacataactaactacattatggctcatttatctagataaaacatgcgcctgaagcatgatttttaatcgggaaattacaaatcttgatttcttttgaccgaaagctatagttatcataccatattcatcttgataacgataattaatttccttctataagtacttaaactttacataaaaaataactggtcaaatcaacaagtgattctaaccagttattttttatatcatcataaagttcgtcttacgctttaccgttagaaccaaactcttgaattttttctgttacagttttgataatcgcgtccacaccagggccgattactttacgtggatcataaactttgtcatcagtagctaatttttcgcgaacagctgcagtccaaacgatttggcattcagtgttaacgttgattttgctgtgaccaagttcaattgcttttttaatttggtgttcaggaattccagaaccgccgtgaagtacaagtggagcacctgtaagttcggagatttctttcatttcgtcaaaaccaagaactggttcgccgtggtaaggaccgtgaacagaacctaatgctgcagcaagtgcatcaatgttagcttctttaacaacacgtaaacattcttgtggatcagcatagttgattccaccagtaacgccgtcttcatctccaccaacagttccaatttcagcttctacagatacgcctttagcatgcgcataatcaacaacttgtttagtcattgcaatattatcatcaattgggtggtgagagccgtcgatcattacagaagagaatcctgcatcgatagctgctttacaagaatcaaagcttgaaccatggtcaaggtgaatcgcaacaggtacagtgattttcaggtcttctacaagtccttcagtcatttttacaactgttttgaatcctcccatgtatttagcagctccttcagaaactcctaaaataactggtgatttttctgcttctgcagctttcaaaatagcttgagtccattcaaggttgttgatgttgaattgaccaacagcatattttccagctaatgcttttttcagcatgtctgtcatgttaacgataggcataatacaatttcctccctcaggaatttaggaaaaccatttttgatttcccctaagatttgaatttccgccgtgaaaaatagtggcagctattttcccctaacaaacttatgataacagatttgtgatgaatttaccataaaaactagaaaattttctggtgaaaacgctttagcctctaagacgggctgaaattcttttttcatcagcaaatacttctaacgcttctggaatcacctctaacgtataaggcgcttttccaccataaaccccatcgtaacttacatttaaatctgcgtcacttttaatagtaactttatttgtacgggcatgaataacatgaggactatttagatgtgtccctttttttatagaagcaaataattggaataattttttaggagaaaccttctttaaaattaaaagctcaaacataccactatttaattgcgctggcggacataacgtttccatgccgccaacagaattggttttatttacgaaaaatagtaatatctctcctttaaaaatttcttcattgtaaattatttcaacgttaacaggggacaacttaggaagaacggttaatccactaaagagatatgcaagtctgccccatttagacttcattgattcttttaccgcataagttatttccgtaattcgtccacctgctgcattattaataaaaaattctgtctcatttgcttttccaatatctactcggatagtttcttgcttagctattatttgaagcgcttctagcggatcttttgcaaaatttagtgctcttgcgtaatcgtttgttgtacctactggcaagatacctaattttggtcttttctctacttgcattagtccgttaacaacttcattcacagttccatctccacctgctgcaatcactacctcataccctgcttctgctgcttgtttcgcgattaaagttgtgctttttggcgctggtgttgacgggactaaagttacttcaaaatccgcatttgttaaaattttttcggcatctggaagtaattttctgaatttatttttccccgctgctgggttatatataatcatcgctttcttctgcaaattgctgctccctctttcctttagatattgtttagtttcctattttaaatgggcgatgtcaacttgtttgactggatgtgggagcaagtcaccaaacaagcctttatacctattacaaattacatctttcatcatgttttaaattacatttttcgccccattttttaattatattacttttacattaaaaaacatgtgcaattaggttcattgttgcttttagtcattgactaccacttaacgtgttgtcataattaatgtagaataattttatttattagcaataaatatagcagttaggagaggatttaaaatttgaaaaaattagtaaaatcggcggttgtttttgcaagtcttgctttaattggcacgtccgcaaccttgattacagagaaagcaagcgcttcttccattgaaacagtacaaaaggtagatgatcaatctatttatattccccaaggcattagggatgggactgctacggaagaacatgacggctttgaagatgaaactaatagcgtactaaagacaacctctttacttcgcgccacaacaggatatcctgatgtaaatgcctatattaaatcgaataaattttcaacagcttccattgaaaaacaattaaaaagccaattccctaaatttaattaccgtaatggttacgggaaaccagaaggcgtcgtcattcatgaaacagcaaataattcatccactattgagggcgaaattagttatatgagcagaaactacaataatgcattcgttcattcatttgtagataaatctcgtatcattcaaatccacccaactgaaaatggggtatggggagcaggtcaatatgccaacgctcgttttatccaagtggaattagttcgttcgaagacatttgatgaatttgcacgctctatcaataattatgcttattatgcggcctacctattggatcaatataaacttccagtggatagtgcgcacagtgatggtaaaggaacaatttggtctcatgatgcagttacacgctatttaggtggaactacacataccgatcctgtaggttatttcaaccaatggggctataatttcaacagttttgttacgttgattaatgaaaaatacaaagcaattcaagctagcaaagttacttacgacaaaatcgaatacgataaaggcgtcacagcctatgctagagtgaaaacagctccaggcaacgctgtttggacaagaccttacagaacagaaggctctaaacttgttaatcaactttcggtctaccaaggcaaaaacatgcggatcctgcgcgaagctaaaacaccaatcactacttggtatcaatttagcatcgacggcaaaacaattggttgggtcgatactcgtgcacttgatacgttctacaaacaaagcatggagaaagatgctaatttaactcgctatgtcgcttccaacaaaacaggtgaagcgtactacaaagttccggttgtagatgcagatgtcaaatggggcactataggcacatataaaagcgaaaaactaaccgtcgataaacaagcaactgtggaaggtcaactttggtaccgtgtaaaagctgggtctaccttcattggttggacgaaagcatccaacttaacagctacctctccatttgataaaatcgaatatgataagggtgtcacagcctatgctagagtaaaaacggcgccaggcaatgctgtttggacgaaaccttacagaacggaaggttctaaacttgttaatcaactttcggtctatcaaggcaaaaacatgcgaatcctgcgcgaagctaaaacaccaatcactacttggtatcaatttagcattgatggaaaagtaatcggttgggtcgatactcgtgcacttgatacattctataagcaaagcatggagcaatcgactaatttaactcgttatgtcactgccaataaaacaggcgaagcttactacaaagttccagtagctgattcagatgtcaaatggggtacacttgcaacttataaaaatgagaagttaaccgtagatagtcaagcgactgttgaaggtcaactttggtaccgcgttagaacaagcactacttttatcggttggactaaagctgaaaacttaacaactacccctccattcgatgcaatcgaatatgataaaggtgttacagcctatgctagagtgaaaactgctccaggcaacgctgtttggacgaaaccatacagaacagaaggctctaaacttgttaatcaactttcggtctaccaaggtaaaaacatgcgtatcctgcgcgaagctaaaacagtaattactacgtggtatcaatttagtattgatgggaaagtaatcggttgggttgatactcgtgcacttgatacgttctataagcaaagcatggagaaagatactaatttaactcgctatgtgattgcgaacaaagtaaacgaagcgtactacaaagttcctgttgtagatgcggatgttagatggggcactttagctgcttacaaaggtcaaaaactcaccgtggataaacaagcaacggtcgaaggacaactttggtatcgaataagaacaagctccacctttattggttggacaaaagcttcgaaccttagtgctactaaataataataaaaaatctcccagccataaatggctgggagatttttttattaccttatttgttattaagcgcagcaccaacaaaatctttaaacaagctttgcggacgatttggacgggaaatgaattctgggtgatattgacaagcgacaaaccaaggatggtcagctaattcaactacttcaactaggcggccatctgggctcgttgcagacacaatcatgccagcttcttccatttgttctctatattcgttattaaactcataacggtgacggtgacgctcttctacaagagttgtaccataagcagcctcagctttagtgccctgcttaatacgtgctggatacagtcctagacgaagtgttccacccatgttttcgatatttttttgttctggtaataaatcaatgatgttatgttttgtttctggttcgatttctgctgaatgcgctccttcaagaccaagcacgttacgagcaaattcgactgttgctagttgcatacctaaacaaataccaaaataaggcactttatttacgcgtgcatattcgatagcagcaattttaccttcgatggcacgatctccaaaaccaccaggaactaaaataccatcaacgtctttcatgatttcagcaacattttcttttgttactttttcggaatcaatccagtcgatttcgatttccgcatcgtgctcatatcctgcatgacgaagtgcttctgctacagaaagataagcatcttgtaaggatacatatttaccaactagaccgatacgaacttttttggataggtttttcacgcggtgtactaagtttttccaatcagtcatttcagcttgcggtgcttctaattgcaagtgttctaggacaatatcatccattttttgtttttgtaaagaaagcggtacgttataaagtgtttcttcatcacgagattcaataacctctgaagctttaatatcacaaaatagcgcaatcttatctttcatttcttgagaaactggttgctctgtacgaacaacgataatgtttggttgaattcctagactgcgaagttctttaacgctatgttgagttggtttagttttcatttcaccagctgctttgatataaggaattaaagttgtgtggatgtaaagtacgttttccgcaccaacatcacttttaatttgacgaattgcttctaagaatggtaatgattcgatgtctcctacagttccaccaatctctgtgataataatatctgaattggtcatgcgagctgcacggaaaacacgatcttttaattcgtttgtaatgtgtggaataacttgcactgttccacctaagtaatccccgcgacgttcttttttaataacttctgagtaaactttaccagttgttacattgctgtatttatttaagttaatatcgataaaacgttcgtaatggccaaggtctaggtctgtttctgcgccatcatctgtcacataaacttccccgtgttggtatgggctcattgttcctggatccacgttaatgtatggatcaaatttttgaatggtaacactaagtccacgatttttcagcaaacgtccgagcgatgctgctgtgattccttttccgattgacgaaactacgccacctgtaacgaaaatatactttgtcatgttaaaaaaatctactccttcctgaaatgaaaaacttgcagggtctgacgattttcctgctggggtgggaaattgccagataaaacaatattgtgattatcttgctagcgtactaatcacaatttcaagtattttgtaaaccaaaataaaaaacactccgcctactttttaaaagtaagggagcgctgattctcataaatatccgtccctataaaagggagcccaaataaaatactactaatgatagcgagataagtcaagcctttattttttgaaaccgccatcaacccattaaatacgttaaaaaaatcagatagacgctttccataaaaatggatgtatctatctgattaacatttagttattatttatcttctgggtcttctgtataatctccatcagtataatcatcttctactgtagctaaatcgccttcgataccgtctggcaagtggtcatcgtcatcttcgtcttcatcaagtaagacatccgcaagagagatttcttcttcaccaagctcttccacgatttcttcatcatcgtagtccacgtcatcgtccaggatttcttcatcttcatcgtcatcatcatctgatttacgttttttcttcggagttgtttgcgtttgaacttcctcatcaattgcatccattggataccatgcacgaagtccccacgtattatttcctagtgaaatgaagttaccatcaatattcatatctgtataaaattgaacaagacgctcccttatttctgcatctttcaaacctaggaacgcttgaatctctttcactaattcagggaaaagaatggtttctttccgctgttccaaaataaaatgtgcaacatcaattaaagatagttcactacgttcttcttgcgttaagttctttaaatccaaaactggcacgccctttctatcgtaattccaatttatttagctgttattttttcgttcagcccaacttcactattttacatgttatttctggcaagtacaacctaaattttcttaattacatcaattcttcttgactattttatatccgatgtaaaagaataggatggccattaaaagaattgggattgatccaagttgaaagtcgtagagaatatagactgcgacgcacagaaacacgaaaagcagcgccaaaattattaatcgcttcatcatatgctctccccgtttttttcaattacctatgtttcttttaactttagtacattttggttatgacgtcaacgagtaacctatatttttaggatatcacattttttctggtgcagatacaccaagaagggtcaaaccatttcgaagggtaatttgtgctgttttaatcagtgctagtctcgcttttgtaacttctaggttatccatatcgagcactttattactattataaaaacggtggaatgctgtcgctaaatcatttaagtagcgaacgatacggtgtggcgctctttttactgcggcttcagcaacaacatctgcgaactcacctaatacttttaataagtcatattctgcttcagtttctaaaaggctcatattagcatcttttgaaacttccaagccttgctctttgccagaacgtaaaatactagaaattctcgcatgggcatattgtacataataaacaggattatcgttggacgttgattttgctaaactcatatcgaagttcatatgagtatcagaactacgcattgcaaagaaatatctcgtcgcatccagaccaacttcttcaattaagtcacgcattgtaacagatttaccagtacgtttactcattttaacttgcacgccatcttcaaataagtgaaccagctgaatgatttctacttctaattgattcggtgagtaaccaagcgcttcaatcgcagcacgcatccgcggaatataaccgtgatgatccgctccccaaatatcaattaatacgtcgaaaccacgctctaatttatttaaatgataagcaatgtctggtaagaaataagtgtagctaccatctgatttgattaaaactcgatctttatcatcttcaaaatcagttgttcttaaccaagtagctccatcttgctcataaatatagccattttcgcgtaaacgttctaaggcaggtaatactttgttttcttcatataatgacgtttctgaaaaccactcatcaaaagaaacacggaattcttctaagtctgcccgtagttttcctgtttcaaatgcaagtgcatctacacggaaaacggaacggcgctcttcttcgctagcattcacatatttatcgccgtatttagcggctaaatctttcccaagtgcgataatatctgaaccgcggtaaccatcctctggaaattcagattctaagcctaacgcttcaaaatagcgcgcttctgctgaaagaactaaattattaatttgattcccagcatcattaatataatattctctggaaacatcaaatccggccattttcataatgtttgcaagagaatctccaattgcagctccacgggcatgcccaagatgtaagtcgccagtcgggttagcggaaacgaattcaatttggaatttttcacctttaccgaaatctgattctccgtactttttatcctcagttaagatgactggtactaaatctgttaaataagcattatctaaataaaaattaataaaaccaggtccagcaatttctacttctttaattaatttggtgtctttttttaactcaggaacgatactttcggcaatttgacgaggcgctttcttagcaactctagcaagctgcatcgcaatattagtcgaataatctccatgcttcttgtcttttggtacttcgagtaaaatttctggtacttctgtttcttctaaaccaaccgcttgaacaactgcttgtttgatatgttcaattagtttgatttggttctcttgcatgacattcattctgcgtcctcctctattttcattaaaacagtatatgagccgatgtattcgccgtgactaagcaaatcatattgaaatgcaacttcactaagcacatccggcttattttcatatagttcttccattgatactagttctgattctaattgtaatttccccgcccctgaatcaacagaagcagtacttctcctattatctcggaaaaagtgcattctcatatttacggcaccgcttctcattaaaagcagctcgttgtcagcaattttaagaaccgtgcgaatcgttccagctaattgtttttcctcataatgcagatagcgattccctttatcgcggtagaaaacacccgaaacagacatatcggatttctcttctgcatccatctgacggatgacattggtgatatgaatagttactttttttcgttccatttgattggctgtcatatcgcttatttacccctttccggtcagaagaatagacgcattatattatagtgaaaaatagcatgaaaagcaacaggttaaaatgctgatagtccgaaaatcatcaatattatatcaaaaacaaacggaataacagtgtcgaaaattggttgaatagtaaaattggaaattggtgttaaagctataactaagaaaataagcattgcatagcgttccactggctcaagtttagctctagctgacatcggtaagaattctactaatatttggtaaccatctaacggtggaattggaattaaattaaatacaaataaaacaagatttaattgcacaaaaatcattaaaaacgtttccgtaactgaaccgtaagtgaaaaatgcatagttcagaaaaagagcgtacaaaccaacaccaatcattgctagtagaaggttacttaccggaccagcaagagtgacaagaatactaccaagacgtcttttctttaatttaaaacgattgactggggttggtttcgcccaaccgaatccagcaattaaaatcattaataagccaaacaaatcaatatgtacaagtggatttagggataaacgaccttgattttttgcggtatcatccccaaacgctagagctactaacgcatgcgcccattcgtgaatcgtaaaggcaattaaaagtgtaactacaacataaggtatcatttcaagtggataagcgagaaaactaggcataagcgcctcctttatcttttatagagtaatttttatgtgctataatgaaaaaaacttttatcgaggtgagaaaatgccatttgttaccattcaattcttagaaggtcgtagtgatgaccaaaagaaagctttagtcagcgaagtaactgacgtagtttctaaaaacctaaaggcgccaaaagaaaatattcacgtaattttagaagaaatgaaaaaaactgattacggtgttggcggcgtaagaaaatctgatatttaagcattactagaagcaaggttttaatcgccttgcttcttttatttttcttttaatgaatgcgcatgaattaatgaaatcattctttctgctatctccggctccactcgtccgctttcaatgaagtcaagcggataatatagcttgatgtctgttcgacgttcccgcccgattgcctcaacaactggtgattcagtcgacagttcacgcagttcgccatttcccatgagcagttttataggttcttttccaccaccaacgcctggaagataataatcatacggcaggtcactagaggaatcaactactaaatagtacgagggatcgatatcagctttttctaacaatccttttaattcagcgtatagttcggcatcttctttcggattataattaagatacctgagcaatcttctatttaaaaagcggctgcataaatcgctcaaaatcggatccgtttcctcttgccaaattgagaaatagtacattaaaacaatatcatcaagcacaatatagtcttttaaactcacttcatttacaaaaaacggtaaaacttgaatgggtgagactttaaaatcataacccgcgcaatacaacttcttcgctcgttcgaggattttccataacaatacttccccactacggctcactggatgaaaatacacttgctgatacatttggtaacgactcataatataatcttccacagcatgcattccggagtacttcacaataactccattaccatcagggctaggtcgaagcactcgtaaaatccgttctaaatcaaacttcccataactaacccctgtataatacgcatctcgtaataagtaatccattcggtctgcgtcaatttggcttgagatcaacttgactagcgtttgattaggatagtttttcttaataatcgaggcaaccttgagtggaaaatcatcgctaactcgcgaaagcacttcgctaacttctgtattaccaataataatcgcttgtgtatactcctcatggtccgtgccaaaaaccttctcaaacgcatgagaaaacggaccatgacctaaatcgtgtaaaagcgcggcacataaagcaaccattcgttcttcagaatctaattgtggttcttttgcaaaagtcacatcaataatttgacgaacaatctcatacacacctaaagaatgattgaaacgactatgttcggctccgtggaacgtaagcgaagtcgtgcctaattggtgtattcgtcgcaaccgctgaaattcttttgttgcaattaaatcccaaattaacttatcagaaacatgtacgtaaccatgaacaggatctttgaacactttttcttcaattaacttttccgttaaataactcacgctaccctctccttttatgtaatttaagaaagcactttatcatttcgggcaattaaacgttcatagtaggctggaaataaatcgagttcttctggtgtcagggtacctgattcaagttttcctgcataatgacgcaaactattaaataatcgtactaaacatccattaacagtcatattctctttcattaaatctgacaatgtacccataacttctggctttacatctggaaaactgtatttggtttgcttatcttttccgctgattgtatagaaatcacgaattagttccgagcgcgcggcttggtcaccttcaacagctaaataaatttgaacagcgacgcctttagccattctgcgctgtgaaataccagcaaatttctgcccttgaatgctaagatcatagcttccaggacaataagaattcacaatttctttcgcttcaattacttcattacaatctacaaacatatctttaattaaggtaaacatggtttcgtaacctcgttcaatcgcaattccacgttcggcatctggaagtaccattgacaagttaagcactcctgaatcaagcacaaccgctaaaccaccggaattgcgcacaacgactcgataaccttgttcttgcaaaaaagcaattcctttatctatatccggtaacttggaatcttgtattccaagggaaactgttttttcatgaacccagcctcgaacagtgggcggcaccattcttgctccaactgaacgacataacgtatcgtcagtcgcaaaagattgaatagcatcaaaagctggattgattgtcgtgttatcaatgaaacgccatgcttcttgctttagtagtgtattttcaatgtccatctctatgtcctccaagaatttctttttgttattatagcatatccgttccgactttagttacaaacggcttaaaatagccatttaatcgttatttttgatttttctgtacttattttacttttttacgtctgatgttgaaaactagggcagtaatgattgatataacaatagatttggtaattatatcttttttcattttcatcgcctcatttcctttaccttattataacaaacttaccatacaaaaaaacctaacttctgtaaaagaaattaggttctgtatatctaaaagcctagggagcttatttagcaaaagattaccagtcgtaacggtctttattgtcgcgttgacttgtatgtttcggggaatttccccacatgcgataaagtaaatatccaattccacctaatacaaggactgggaataagaagtgaagtgtaattccaacaatatcaagtacgatattaagtgcaataaatcctaaaataactgtaaaaaatattttccaaaaactattcattttcaattcctcatttctaatttttatttactacttgcaagtggaacactgtttatttccttggcttgaacgagtagttcgttgtcttgaacgacgattttatactgtttgttctttttaagttgtgtagttgacatgaagttaactttgtgactgtttccttgattatctagacacgattcgcggaaagaataccctttgaactttgacttggtaacttcttttccatcgtttttgattgtaacgtaatatgtatttgctgctgatccaactggtgccgaaaattcaattacaaccattgttaatacaaaaattgcagccagtaaaccgaaaagtccctttttcattgtttttaccgtccttttttgttgataggtttattataggggagattcaaaaaaggaacgaacggctctaggctgaaaattggtacatcctaagtcttattttcattcgggtacaaaaaatgagtctagtaaagttaactagactcattttaaattaatttttttcaatccatttgtagttttctgatccaattggataggttgtatagtttttaagattgcttttttgcaagtatgctcgaccgccttgatacagcggaatgagtacggcgttatctttcagcaagatttgttcggcttctagtagggcttgccatcttttttccggatctgctgagagtttacctttcgctccaaggactagttcatcgtatttcgcgtctgagaagcctgtatggtttcctgggctgtttgtaaggaataggttgagatatgttagtgggtcttgataatcgcctccccaacctcctagtagtagttcaaagtcttgtgtaacgtccgcttggaaactagcttggttcgtaacattttttagtttgatagttagtccaggaaggttttcttccaattgattttggataaattctgtttgtttgcgttgtagagatgtatcaccacttgttaaagtcagtgttaattctgattttccaatttcttttaagccttgtttccaagcgcttattgcttcttgttgatcaaatttgagtaaatcaccattttgtttacggaaatcttcttttgtttctggatcgaacataatatcagccggaacgtcgccatttaaagctttagaaccgttagcaagaagtgtgttgaccatgcctgttttatcaatagccattgctagagctcgacgtaaattcaagttggctaaatccgttttcatgccatctttgccttgattcatcttcatatagacagaacgtccagttgcttctttatggaaatttttatcatctttatattgtttaacaaattcgccgtcaagctctactcggtctaatttatttgtgttgtataaatttaaggccgcattggtatctttgacgacagttacatggattttctctgtaggaacattctttttatcccaataagttgggtttttaacgtaatcccaagtcatatttgtgccattccaattttctagtttgtaaggaccatttgaaattaaagtgtcgctttttgttccataacgatcaccttgtttttccacgaatgcttggttttgtgggaagaacgtgccagtcgttaagagctctttgaaaattggtacaggattttctaattcgatttgaagtgttttgtcgtctagcgctttaattccaagttcatccggggacatttcaccttttaaaatttgggttgcgtttttgacaatttcttccatttgcggtccgtatgcagctgctgtttttggatcaactatttttttccaagcatactcaaaatcatgagccgtcactgggtcgccgttagaccacttcgcatcatcgcgaattttgaaaataagtgttttcccgccatctttttcttcaggttcactggcagctagagcgagtgccggttttccatttttatctaatcgatataatccttcaaaaatctgattgattactcgaaaacttacgctattgtctgcgagtgttggacttgcatttggaattccactcgtttccatgatgttaacaacttttgctttcttttctgatgttactttttcactttcccctttatcgccagactgacatgctgtaagtactagtaaacataacaaactgagtgccactaccatttttctggctgttttatgcaaaatttctcctcctctttttgtaagcgctttttgattacgcaaaaaaatgacggacttcctgccaaattcgcgcagaacttccgccaccattataaaccgaaactgtatcaattgtaaatataaactgttatatttttatttcttattaagataaactccagagccaacaacaataacacacatcgtcattaacattgctaacattaagtagctgggatcatttcgcatgaacaaagctaggataaaacagattgtaccagctatattaagtgtaacagttgtaatttttctaagtagatttcttgaccatgcatcaatctttttaaaaccaatcatcgttaaaaatttaaagagttttttagaatattgaatgtaagctgcgacaacaaacataaatgctcctgctgtcactagcgatagtctgccagttggaatatcataacctagcgcatatacaattatactcatttgaataatcgtaagtaacacgagtaacagtctaaaacagtattcaaattctaataaactctcttgattcactttttctttcccgtagtattccgttcctgtaaacataatcattaaaaagggaatcagtattaagccgagccacttttgcataaacatatctggggagaagtccgtaccgaaatgcaccgccacttcagaaggtagtagcggatataacacagcagaaattcctactgtgaaaagaattatcatactaggaaataaaccaactttcctcattcccctcacctcttccaatataattactggcagtaggcgacaagttcctcccttgtttcgataagttgaactttctcggtattcgctaattgctcttttgtttcatcaaaaccttgttcagataatgcacgtgtcgctggtaaataaactaatacagaaaagcctgccctacttaactgtataaccgtagttttcacacaaaaatcaaatgctaaacctccaacaagaactaaatccacctgttgttctcttaaatattctagtacacctgttgaaagctgttcgacaatatcgtgataacaagcgccgtacggatgaatgtctggctccatgcctttccaaataaagtaatcataatccgtcacaactggcaatccgtctaataattcaaaacctttcgtaccgggttcgcagtgtctaacccaagtccggtccgcatttggatattcgagttcagccagcatttcgtctttggaatcaactacccatacggcatttttgggatgcgcgtctttactaccaattcgtagagtagcaagacttgccataaaattaagctccggcacaattttgtcaccgcccgaaactggtaattcatccggacaaagtggtgtaaagcctttttgtgaatcaatatcaaaagctgcaattttcatttacttttcctccaaatttttataagtaagttgagcaaattgtccgaaacgagtcacttcttcaagttctaacgcatgttcttgatcttcttcaaataacggaattcctttccctaaaatgataggcgcaatcgtaattacaaaccgatcaatcgccttttcttttaaaaattgtttcactaactgcgcgccgccgacaagccagactttttcaccatcgatgttgtttagccacgtatctactgtgccagcgacaaaatcagcgtattcgtcttttgtccctgcttttgtgttagaaaaaacatagacatcttttttactatatggaaaagtatctgtaagcgagaaaatttgttgatacgtagttcgtcccattacgactgtatccacgttatcaaagaaggcctcataacctgcatcgccttcgctatcaacagattctagccattctacgctgccgttttcatccgcaatgtagccgtccaaactcactgcgatatatagcgcaacttgtttttcactcataatcactcaaatcctttcactactaattttccaatcatttttccggatgagataattttgtgagcttcttctatcgtttttgcatttacaggagataagactttatttaatgttgatgttaagtctcctttatctagcatgcgcgccgcttctgtaagaatttcatgctgtttgattttatcttctgtattgtatttcgaacgagtaaacataaattcatagctaaaagtagcactcttgtcttttaaaagagacatcttcactggttctgcaagttccacaatcgaacaaatttttccttgtggtcgaattgcttcttgcatgtcatcccagtgagcatttgtattatgcaaacacaaaataaagtcgacaccttgttcaaaaccaagttctttcaattgttttgttaaattttctcggtgattaatgatgtgatttgcaccgtgtttcttcgtccattctattgtttcttcacgtgatgctgtagcgataacattaagtccaatgtttgcagctagttgagtcgcaatcgaacccactcccccagctccattaataattaaaatggattttcctttatcggcttcaacaattcccaaacggtcaaaaagagcttcccatgcagtaatagttgtcagtggcatcgcagcggcttcttctaaacttaaatgtttgggttttaaaccgactagccgttcatcaattaacgtgaattcagcatatgcgccaggccttgtaacatcacctgcgaaatacacttcttgtcctgttttaaataaagtcacttttgaaccaatctccactacttcaccaactgcatcccaacctaaaatccttacttcatctccggttagtttggtcgcttcgcgttgtttagtgtctactggattgatggaaatcgccttaatttttactaataaatcatgattttctggcactggttgtttaatttccatatccacgaaatcagttgatgcctttgttaatcctaccactttcatttgacaacacctctcgtttccttttcccgaatttcttaaaataatgcacatttacataaaaaagcctcctcaaatttatagagaaggctttaaaagttatttttcgtcgagtatttcgctatctttgaatttcatttttgcattacaagctgggcattttatttttattttgccgccgtgtgaatgagtatggtcgctatcttctttttttgtaagaagcattttgctagctttttttagtagtgggatagcgataataacaccgatgattgtgaacattgctagaaccccgataaatactaaggttacggcaactacagcgataaaagtttttttcaaaaaatgacctaaatcaacttgttcttccatctaaaccaactcctctaattgatatagtaatcatatcatgaagttgtattaattgcagtgatgatggtgagcatgacttccttctaattgaatcgtactatgttctagcgagaagttttcttgtaaataatgctcaatatcagttaaaattttatctcggtctgcgtcttcagctacggttaaatgagctgtaagagcgttaaaatcagaagtaatcgcccatacatgtaaatcatgcacttcagtcacgccatcttgttcttggaagaaagttttgatttcttctgtatcaacgttcgcaggtttcccttccatcaaaatatggatagcgtcttttaacacgcgccagccactaactaaaattagcgctgcaacgataacactcgcgattgggtcagcgatattccagccaaagaaaataatgagtagcgcagcagtaatagcaccaacagatccaagcaagtcacctagcacatgcaagaaagcactacgcatgttcaagttttcgctcgtatcacctttcattaaaatccaagcaactaaaatattaataagcaatccaatgacagaaatagtcatcattcctgctccaattacttgtggtgggtcaaagaaacgtccaattgcttcatagaaaataaaaacagaaatcccaacgagcgtcaatccattcagaaatgctgctaaaatttcaaagcgtttatagccataggttttatcagaacttgctgctttttcgccgaacttaaatgcagccaaacttaaacctaatgccacagcatcagaaagcatatgtccagcatcagaaagtagtgccaaactattggtcataattccaccaataacttcaactatcataaaagtagcgattaggataaaactaataaataatgattttttgttggcattatgcgtatggttatggttgtgaccatgtgcatgatcgtgattatgtgccatatgattacttcccctctgtaaagacctaatttctttatatgcatatgttagcatatatacatttttaacgcaagctttcttcaaagaaaaaacttccactcttgatttaagtggaagtttcacacatattttataaaatttcttcttgcataaataagcctaatccaccaatatcatgatgttttgcaattttatcagctttttctaaagcaagcggaataccgttttccatagctacgccaatctctgctagttcaatcatgccaacatcattttcattatcaccaaaagcgatagttgaatttaaattaatgtaaccattatctgctaggtatgtaaggccttttgctttatcaataccttcattcataatatcaattaaattagatgcagaagctaggacagatagcggtaaaccttgcagagctgctttgatttctgctcgtttttctaagtcagactcaattacgagaacttttagcgggaactcaccttcgcggagcacactgaaaggatctgttgttaaagtaattggaacttgctcattttctgataaagttttatttagctcattgaagaaagcgattttgccagtatttgttggtccaataattcgttctgttgtataaatatggtagttaacacctaatggttcaagcgtttctaatacagtatgcactaggtctaactcaatattacttttatataaaatttctccagtcgtaaaatcacgtactaatccaccattacaagaaataacaggtgttttaatattgagttcatggataaatggcaaaatagctaagtctagtcgacctgtcgcaaggaaaagtttttttccgtctgcttgccaatttattaaaacttctttatttaggggatgaatttgatctcctttttttacgagtaatgttccgtccatgtctgtaataactgtatcaatcgctacatttgccaatagttttcgcacctttctataattccgttagtatgtattttgattatagacgagtttcacatgattgtcacgtcgatttttggtataataatttggaatggaggaagatacttagtgaagaaatattttattacaatcatgattttgctttttggtacgctaattcttgctgcatgccaaaatagcgatgaggcagataattacgagcctcctaaagtagatttgaaagatcaaataccaattattttaattcatgggagcggcggtaatgcaagttctcttgataaaatggcagaccaactaatgaacgaatatagaagttctaatgaagcattgactatgactgttaattcagaaggaaaaatcaagttcgaaggtaagcttacaaaagatgccaaacgcccaattataaaattcggcttcgagcaaaatcaagcaacccctgacgattggtccaaatggttaaaaatcgcgatggaagatttaaaatcacgatatggctttacacaaatggacggtgtagggcattccaatggaggtttagcactaacttattacgcggaagattacgcgggagataaaaccgtacctactttgcgtaagttagtagcaattggttcaccatttaatgacttagacccaaacgataacggaatggatctatcatttaaaaaattgccaaatagtactcctcaaatggattattttattaaaaatcaaacagaggtaagtcctgatttagaagtacttgcaattgcaggtgaattaagcgaagataacccaacagacgggattgtcccaacgattagttcactcgcaaccaggctctttatgccaggaagtgccaaagcttatatagaagatattcaagttggagaagacgcggttcaccaaacattacacgaaacacctaagagcatcgagaaaacatattggtttttagaaaaattcaaaacagatgaaacagttatccaattagattacaaataggaggtatagcagttgatacacatagaagcgaaaatccaagtgaaaccagactttatagaatcatttttaaaagaagtggagctagtcatccaaaattcgctctcagaagccggaaaccatggctatgaattagttcgttctgtgaaaaacgcatctaccttctatctcttagaaaaatgggcagatgaagctgctattcaattccataattcaacagagcactataaacgatttaaacgggaaattcctgcatttttagcattcccgaccgaagtggatgtactcactaaaatttaaaaatgattttatcaaaaaagatgggctctattttcatagaggccatctttttttgtaagcgaagcattttacaagaattagaatctttccaggggcacgaacacatttggtgccaaactagttttcccgacaattccctacagagactaatttaactagtaaaagagaaagaaagccgcatatgaacatcatgcttcatacgcggctttcaatttttatttatgagacatttttttgaaaaagccaaacgttccagcgattagtaataaccctattaataaataaaggatattttcttggtcgcctgtttttggtaattctttactttgttttgttttcttaacagggtcattagctggttttatcgtagcagtaatgtttgtgttctcagttgccggtaagatgtcatccattagatcgtcttgatgtgctggatctgctggttgaatcggatttactgggtttactgggtttactgggtttactgggtttactgggtttactgggtttactgggtttactgggtttactgggtttatcggatttaccgggtttactggatttaccgggtctaccggaactactggattttgggtaaagcgcgcatataaggctaaatcattagcaggcattttgtttgtagcaaaatcccatttattaccacctgtttcggcatcataccaaccatcaaatgtataaccagcttttgtaagtgctggcggttcttgtagtaatccttggtagtcaactgtttgtgttgtaacttcttcaccattaagtgtggcagtatatgatttaacggtaaaacgggcatatagcgtaacgtcttttgctggcattttatttgctgcaaagtcccatttgtttccacctgtttccgcatcataccaaccatcaaatgtgtggccttcttttgttggcgctgtcggttctgtaagcagactgtcgtaatcaacggcttgtgtcgttgttgttccgtctttatcaaatgttgctgtataagcatttgtgctaaaacgggcatataatgtaacgtttttcgctggcatttttttcactgcgaaattccatttgtttccgcctgtttcggcatcataccaaccatcaaatgtgtagccgtctttagtcggtgctgttggttccgtaatcagactgtcgtaatcaacggcttgtgtcgttgttgttccgtctttatcaaatgttgctgtataagcatttgtactaaaacgggcatataatgtgatgtttttcgctggcatttttttcgcagcgaaatcccatttatttccacctgtttcggcatcataccaaccatcaaatgtgtagccgtcttttgttggggctgttggttctgtaattagactgtcgtaatcaacagcttgtgtcgttgttgttccatctttatcaaatgttgctgtataagcatttgcactaaaacgggcatataatgtgacgtttttcgctggcatttttttcgctgtgaaatcccatttgtttccacctgtttcggcatcataccaaccagtaaatatataaccggcttttgttggctctgtcggcgcttgaatcaggctatcataattgactgtttgtgtcgttgtcgttccgtctttgtcaaatgttgctgtatatgatttgactgtaaaacgagcgtacagcgtgacattcttggcaggcatttttttggttgcaaaattccatttgtttccgcctgtctcggcatcataccaaccatcaaatgtgtaaccctcttttgttggctctgtcggttctgtcagaagactatcataattagctgtttgtgtcgttgtcgttccgtctttatcaaatgtcgctgtataggatttgactgtgaaacgagcgtacagtgtgatgttcttggcaggcattttgtcagttgcaaaatcccatttgtttccgcccgtctccgcatcataccaaccatcaaatgtgtaaccctcttttgttggcgctgttggttctgtcaaaagactatcataattagctgtttgtgtcgttgttgttccttctttgtcaaatgttgttgtataagatttagcgctataacgagcatatagtgtgatgttgttccccggcattttgttcgtcgcgaaattccatttgtttccgcctgtttgtgcgtcgtaccaaccttcaaacgtataaccatcttttgtcggttcagttggttctgttagcgcttcttgataatcgactgtttgcgttgtcgttgttccatcattattaaaagtcgcagtgtaattattcattgtaaaacgggcatataaagttactggatttgcaggcatcttatcttgagcaaaattccactttttaccgcctgtttctgcgtcataccaaccatcaaatgtgtaaccagctttcgttggcgttgttggttcttctgcaagaccatcatagtccactgtttctgtcgttgttaccccgccattatcaaaggtcataggatatgttttagaagcaaattgagcatataatgtgatgtttttccccggcattaaatcgttagcaaaatcccattttttaccgcctgtttctgcatcataccacccaataaatgtataaccatcttttactggttttgtaggttcattaattttcttttgataaacaactggttgggtagctgttctttcttcagagattaatgtagctgtgtaggtctctattgtaaagtatgcgtataaagttacatcatgagccggcattttattatcctgaaaataccatcttattccgtaaccatttggttcttcataccatccccaaaacttatacccttcaataactggatttgctggggcagatttaattacttcgtctgcttcatattctcccattaaattatcacgtttaggggttgataatatcaatttgtattttgtcgtctctgtttctgccgcatttacgttgtttccattattttctgaagcccatatagcaaatgggtctgcgcttaattgtaaaaggattactcctactgcaattagtaaacatatttttcttttcatatgatcctcctcatctaggttgcaaaattagatttataattaattttatttcattgttcataattaaatagcacctgtattttcgttaaaggcgtccaattatttattcactttaagattatatcttgaagaacgttgttaaagaatactaaaaacagacttatcgctatgttttttgtgacggttcagtgacgaaataagctatttttaagcaaatagtgcaaaatcggttattttcgtgtactatttcaagactttttgctagtactcttacattttatagcctgtttctaagctaggatttctataaataactaaaaaaatttggcccccacaagaggaccaaatttttattctgcttttaaatagccatcttcaattcgaatgacacgatcgactaaatctaacactcgttcgtcatgtgtaaccatgatggcagctttatttttctgttttacttcatctgcaatcatttgaactaccttgtgcccgcgatttgcatctaaactagctgttggttcgtctgctaaaataatatcggggtcgttcatcagcgctctagcaatagcaacacgttgtttttcgccgccggataagctttctggataattgttttggcgcgcggttaagcctaattcttgaagcaatttatctgctctttctttcgcagcgctacctttttcaccggataattccgcaatgacgagtagttggtcgcgaacatttaggtaaggaattaagttggcaccttggaaaataaagccaactttgtcgagtcgcaccttcgttaatgctttttcagacatgttatttaatgtcgttccaccaatggcaatttcgccttctgttggagataataaagcgcctgcgattgataaaaatgtacttttccccgcaccagatgggccgacgattgcaacaaattctccttgcgctacttctaaagaaacacttttcaatacttcgatgacttgctcgccatcttgataatttttagaaatatttttcatcattaaagtcattagtttgccctcccaattgcttctaacgcgtccactttggctacacgatagagtgataacattgatccgatgactgctacaactaggaataatgcggaacaaccgattgcaagtattggactaagtgtaaacggcatgctagctggcaaaattgccgccagtccaaatgttaggccatttccaatcaataagctgacgacagataagaaaacaacttgggtaacgatgctccgacctaaataagctgttcgtgcgccaactgcttttaaaataccaaattgattgattttttgaatcgtaatgacataaaagaaagcagctagaacaaatgcagcgataacgaataaaaaggcaatcatcatcagtagcgaaccttgttcttctgaataacccggaatgccttggagtacttctttacttgaggacaattccatcgagccgattgatagatttttagcggtatcccgagagacatttagtgctacagcattatattctccttctgcggcttgatttgtttgatgaactaatttccaagcatcccaatcaacaaaaataaccggggaatggctaaatgtattgtttttcgtaaaggcagtaatagtgaacgtttctcctgttgcgctgtctttgagtttgctgcctaatttataaccagactcttttaaagaaatatcagctactacttcttttgttttctctggctctgttccttctgagatggtcggtttcataaagcccgttttatctataccgaaataagtaatatctgtttttttgtctttattgggtggtgtgattgttcccatttgcacgcctaagttggtgctttcagattttttaagttgctttgctacgctttctgtttcagctgcggttaaattggacctcgttaagcgattatctgagtctttttgtagtacataataagttgctttatttgatgaaatcgccgctccattatcatttgcgagtccattcgctagtcctgtaacaaacaaaacgagccaggcaattaataccataattaatccaattaaaatatagcgtagttttgagtgttttaattctcttaatgccaaaaacattccgttcaactccttctaagatcttacacttagtttaaagaagttttgtaaacggaatgtgaatcggattttacaaatttagtttttaggtagcttgactttgaatgttgttcctttatcagtattactttcaacagtgatttcaccatgatgtaacgtaattatttttttgcaaatggataagcctaagccgcttgaaccttcttctcgggtgcgactttgacttgctttataaaaacggtcgaaaatcttcgccatatcttctttgctgatgccagcgccactattccagacttcaacaaaaacattggtcgtttcttcataaaggcgcacctggatattcccgcccagtggtgtatatttaattgcattgtttaataaattagaccagacttgataaagtaattcggcatctccagaatagtttatatcagctaactctagatttattgttagttctttctctcgccaactccattcagtcatttggattagttggcgccactgttctgctaattgcactggttcttttttccgtaactcagattcttggtcaagtgaagcaagtgtaagtaactgtttcgttaaagaagaaaggcgtgtcgtctcctcggataaaacagttaaatattctttttgttctttttcggttagtgttcctgaacctaaaagtctggcgaaaccttgcatcgatgtaagtggtgattgtagttcatgagaaacatttgcgacaaattcctgacgggctgcttcagatttttcgagttcgctcgccattttggcaaacgagtccgccagctgaccaatctcgtctttacgccggacttcgagcgccacatcgtaatttcctctccggatttttttcgtagcattcgtaagcttcacaactggtttcactatgtatcggccactaataagcacaaataagatactaataatagatgtgaaaacaagtatcatcgcgaaaaagattctaagttcaccgaattgctgttccggatcttgacgtataaaaagcgccagttgctccccgtccgccttaactggaacaccaattgtattcctgacatcattatcaaaaaatcctgtgataaaaatgcccgtatcaaacgtatcaatcccgtgataagtctcgcccgctaacacttgttgaactgttttgttaggtaaatctttttttcgaaacgcaccaccgaaataactcgattgatctttgccatccgtcagatacagttcatagccaagttcacctacattttccaagtactcttttagagaaatcgccctattcgactgataaaattgttggacttcctcagctatcttagccgttttttcatcattaaaaggttttaattttatctggtaataaatgttcgcaaagaaaaaaccgagcaggctactggaaagaatgacaactagcatcgtcacaactattcgactatataatgacttcatgttgtttcctccaatttatagccaacaccgcgaaccgtgacaatccgaatcccgtccttttcctcatcaaaatggtcgcgcaaacgtttaatatgtacatctactgttcggtcactgccgtcgtaatcgcgttgccaaatccgttcaattaattcttcccgagtaaaaatccgaccgggatagctcgctaattgatataacagttcaaattcttttacaggaatcatccgttcttggttgccaatttttatgccgtaacttttttggtcgatggtgatatttccgatagtaattttcgcttcactagcctgattggaacgtctaagtaaagcccgtattcgaaaaatcaactcctcgggttcaaagggtttagtgacatagtcatccgtccccacttcaaaaccgcgcgatttatccgcaagtgcatctttggctgtcagcataataacggggatatcaggatagcttatgcgcagttttttgcatagttcaaagccatccatgttgggcatcatcacatcaatcaccgccaaatgaacttgctccgtttccactatcttttctccttctacgccatcactagcttctaacacatgaaaaccttctgcgcggagatagtgccctacaagtttaagaatgtgccggtcatcatctactactaaaatttgtttcattttctctattcaccttaccgtcctattttactgcatcatatcaaacttaagtgattcgttcaaatccagaatagacatttaacctgtccccgcggatgaagccaactgtcgtaatgttcaattcttctgccatattgatcgccagttcggtaggtgcagagcgagataaaattattccgcatcctaatttagctgtcttaacgaggatttctgaggagattcgcccgctaaaaataatcgctttatcatctgtagctgttccgtcttttaaagcgcgaccatatattttatcaagtgcattatggcgtccgatgtccatccgactataaataatttccgccgaactgcatagcgccgcattatgaaccccgccggtttgatgaaacgttgcggaattttgctcaaatttttccattaagcggaaaatcctgtctgttgtgagtttcagatttgaattttgcttcacgttgacgagtgaggcatctgactgaaagtagaaattttctcgcgacttgccgcaacatgaggtaatataacgtttgccgcggtatttggcattgaatttgttcacaaagttggcgctaactttggcatgaccagtcgcttcaataatatccacagaatcaatgtcgcccggcccacgaacaatgccttccgaagttaaaaaccctacgactaaatcttctaaatgctcgggcgtgcaaacgatggtcacgagttcttggtcgttaacgtagatagtcagcggatactcggtcgcaacacttgattcgatttcttgaaaagtgccagcttcaaaacggcggaccttttgacgcgatacaatatccatcaaaaaccactcctctctaagccgaaacagcgatactaggaagtctcgctgtttcaaatgattattttaatgttttccctacttctttcaaaaaagtcatgccgtaacggagcgcgcggttaatatctgggtctttcagcgccttcataatcgctaacatacccatgatttcgtcgttttttgcactttcttcagcttttttcgctgcatcctttaaatttgaaatcatttcctcggtttgctctggttttgtatcggttagcagtttacttgaaatcatcatattatttatcgcatttgtcattggttctttacgccattcatttaaaaatgttttcgtaatatccccccgtgccttaatcgcgctatttaaagcttctagcgctccagattcttgcaataattttaccgtttctactatttcgataaaaccagaatcttgttcagcaatgtcagctttcatttgcgctaaacgttcttgctctagttcttctggtgtcttttttgtatcacgaatcgttgaaattggttctgccatcaatgattcctccctttccccccacatccgcagtttccaccacaggcgcagttcactttagaaatcggttgataatcttctcttgaccacttgcgctccacctcagccccattttgcgggaatcttttacggttccgcggattgtgatctggaagtggatttttcccagttttttcaagtacagttagatttactttggtttgtttatatgcgggtgtttttgtccgaacgtccccagcacttgaagttaaaaggtttaccgctgtttcgctactcactgaatgcatcggtacatagacttcattgcctttcatccgctcagtaacaaccgcccgaagcttgatgcgcccatacggcgaacttaaacgaacaagcgaaccactttcaatatcgcgttctttagctaattcgtgtgaaacttccacaaacacttccggtaatttgtaatccaagccttttgatttatccgtcaaattaccctcatggaattgttccagtaaacgaccattattaagtgttaaattaaattcttccgggaaagtaatcggcgcaatatatggcaatgtcgagaactgtgctttgccatcagggaaattaaatcgttcttcataaagtagcggcatatccttcccgtccgcactaactggccacacaaggctattaaacccttgcatccgatcataacgaacacctgcaaaaaatggtgctaaacttgcaatttcgtccataatttcactcgggtggtcataattccaatctgttcttccacatgctcttgccacttcttgaataatccaccaatctggtttagaatctccaagcggctctaaaacttcataaagtcgttgtacacggcgctctgtattggtaaatgttccttctttttcaagtgatggagcagctgggaaaacaacatcggcaaattgagccgtttttgatagaaatacatcttgaacaacaaagaaatcaaggcttgaaaggatttcttgcacgtgattagagttagagtcaacccaagccatttcctcaccaatgacatacatagaatgaagtgtgcctgcttcaatcgcatcaagcatttcattatttttcaatcctggttctggtgaaatcgacaccccatatgcttcttcaaaacgagcgcgaacttcatcatttccaagtggctgaattcctggtaaaacatttggtaatgagcccatatcacaagcgccttgaacattattatgacctctaagcggataagcacccgcaccgtgtcttccaaagtttccagttacaagaagcaagttagcaatagctgatgatgtatgcgatcccgcaatgttttgcgtaactcccattccccaacaaaccgctgtcccatctgcttcatgaatcatttccgccactaatttaagtgtttcagccggtaatcccgtttctttttccgcgtattccagtgtaaatggttctaaaaatgctagataatccgccacattgctaattcgattttccataaagacctgatcatgccaattttggtcaataatatatttagcgactgctgttaaccaaacaaagtcagttccttgttttggatggataaataaatctgagcgctccgccatttcgtgtttccgcaaatctgaaacaatcagtttttgaccgcgtgttttttgtgctcgtttaattctgctggcaagtaccggatggccatctgctggagatgcgccaacaataatcacgagtcccgcactttcaatatcttctacagtccctgaatccgcgccaataccaactgtacgagtaagcccatccgaagcaggcgcctgacaataacgcgaacaattatcaatattattcgtttcgaacacttggcgcgctagtttttgcatcaaataattttcttcgttagtcgttttagaagagctaataaaaccaatcgaatcatttccatatttagcttgaatttcgcgtagtttggttgcaactaggtgaatagcatcttcccaactcgctggcacaaattcatttccttcgcgaatcagtggtgtcgtaatccgtttttcactattaacaaaatcccaaccaaatttccctttcacacacgtagcaaatttgttcacagggccttccccagttggctcgactttcaatattttgcggtctttcgtccatacttcaaacgtacaaccaaccccgcaaaatgtacaaactgttttcgtttttttcgtccgcgtttcccgcattgccgcttccatttccgacactgcaaaaacggtttgataatttggctcgacttttttcaccatatcaatcattggttctagcatgtcttcatcaagtccggtcataaagccagcttgaccaagcattgatttttccattaaagcgttacatgggcatactgtcgcacaaagtccgcacgaaacacaagatgataaattcgctggacgatcatcatcccaaataaccctcggctgacttctttcccaatcaatcgaaagtgtctcattcacttgaacttgttgacaagcctcaacacagcgcccgcaaagaatacattgatccggatcatagcgataaaatggatgcgtaaaatcatttaagtagcccttttcccggtatgggcggtcttgtttttccacgccaagcagttctgttgtattatgtactttgcaattgccattattattatcacaaaccgtacaatacagtaaatgattttccaaaatccggtccattgcttctaactgagcatctttagctagttctgaatttgttttaatttccatcccatctgtaagattcgtgctgcacgcccgcataagctccccgtcaacctcacacatacacgtgtcacaagattgaataggaccgatttgctcactataacaaatatgcggatgctgtattccttctgcatttaaatagtccagtattcgcgttccttccaccacatcccgcgcctcaccattaattcgcactgatacttttgcgcccatcacattacctcctaaatagagaaagcgtttacaattttcgcttatattataacagttcttacttaaaaatcacagtaaaaagacagttgataatcgttctcaaatagcactactatgcgatttccctcacaaatcatgctatattcattgacacttatccaacttttctgtattctttataacaaagctatgacgagaaaagtacgacatccgttttttcaaaaagagagttcccactgctgaaaaggaacaaaaaacaatgtccgaaaatggcctctgagctttgtcgctgaaaataagtaagccacaacggatttggcgtccgttatcaaacgccctaagtattttacataaaatgcttatttgaggttttcagtgtgagctgaaaataaattaaggtggtaccgcgtgaaatttttctcgcccttattccaagagtttcttggacgagggcgagtttttattttaccctaaattgcccgaaatggaggagtttaaaatgacaaaacagctacttgttttacaatctgattttggtattagtgatggtgcagttagtgctatgtatggtgtgattaatagtgttagtagcgatttacaaatatacgatttaacgcatcaaattcctcaatttaatatttgggaagcttcttatcgtcttttacaaactgttccttactggcctgaagctacgatttttgtatctattgtcgacccaggtgttggttcaaaacgtcgcagtgtagttgttttaacagaggatggtcattatattattacaccagacaacggaactttaacacatattgcccattacggaacgattaaagcggttcgtctgattgatgaagagaaaaatcgccttccaaggtcaggtgcttctcatacattccacggtagagatatttttgcctatactgcggcaagacttgctgctggtgtgattagttttgaagatattggtcctgaagccacacctgaatccattgtttcgttaagcctaagtgactcttatttagaagatgaacaggcttatggaacaattgatataatcgaccgcccatttggcaacctttggacaaatattcgtcggactgatttcctgcaacttggcgcaaaatacggcgattccatcgaagttctaatcaaacaccacgaccgcgtagtttataaaaatttcgttacctacagccgctcattcgcagacttacgcattggtgaagcactcatctatgtaaactcacttgataatcttgggctcggcatcaatcaaggttctttcgtagacgcatattcggtaggaacaggcaccagctggaaagtttctcttaaaaaagtataaaaaaacagggtcatttatccaaattggatgtttgaccctgtttcgatattatttggtgtattctttgacgattggctcttgttttttatttttaaggaataaacttaagatcatgcctaaagccgcaaagattgctgcaaccataaacgccgcacgcattccgtccagactagcatcttgtgctttttgagcaaaactagctggatcagtcgccataagcgctttaccaggcatattatctttcgtcacattcgttagcacagtgatcagtaccgcagtcccaatcgaaccagcaatttgacgaattgtattatttaccgctgaaccatggttaattaagtggttaggaagtgcattcatccccgcagtcgaaactggcatcatcgccatcgaaatcccgaagaatctcacggcataaaacacaacaatataccaaagcggcgtatccattgttaaaaacataaatggtatcgtaccgatagtcaaaattgtaaccccggtaatcgttaaccatttcgctccaattttatcaaaaataatccctgtaattggactcattatacccataataatcgcacctggaagtaatagtagcccagattgaagcgcagactccccgcgaatcgtttgaatataaagtggtaatacaatctccgcaccaatcattgccatcgttacaattgaaccaagaataacagacaatgaaaatactggatatttaaacacatgcagttcaagcattggattttcaataacaagttggcgccatacaaataacgctataacaacgacaccaatgattaatgtcgtaataacagtcgcgtctccccagccatcattaccagctgaactaaatccgtaaagcaatgccccaaaaccaatagaagacatcacgatggaaagaaaatcaatttttgtatcagttaacttcactacttttttcattccaaaaaaggctaaaataatatcaataaccgcaattggaattaaaataataaataatactctccaatcatatgaatccacaatccaacctgataacgttggaccaatcgctggagcaaacgcaataacaagtcccatcagccccatcgctgccccacgtttttcacgagggaaaatcagcaagaatatcgtttgaagtaaaggcatcataatacccgcaccagccgcttgaacaatacgaccagtaagtaaaatcgggaatgaacccgccacagacgaaataattgtaccaattgtaaatacagtcatcgccgtaataaataacgtttttgaactaattttttcaattaaaagtgctgtaatcggaatcataatcccatttgtcagcaagaaagctgttgttaaccattgccctgttgctgctgtaatatgcaaatcatccataatcattggaagcgccgttgctagtaacgtctgatttaaaatcgctacaaatgccccaataatcattgttactactaataaacttctactataagatttcccattaacatcaacgggccgttctactgctgtactattcaaaattaataccccttcccatgtggaaatttccagatgaataatagaagtataataaaaaaagaccaacaagtcaataaaaagtgactagttagtctaaaatttataaaagcccgttcacgcacgcttctaatttattcacttctttggttaaagtagccggtacatgctgtttaagatataaaagcgtgccttgaaccatgaaatctctcggcgcttcattattattaatctcgccaacaagtgcattcatcgattctttatactgccacttatccgaatcagcaatatccgcattctcaattcctacattaagctcctcaagcgcttctcgtaacttagcaagacgcttcttacggatcatcgtttgatctggcaccaaattctctgtatcagcctcagtaaaaataatttctccgctttccaatatatctttaacaagcgcatctagccttctcacaacatacggaatagctctttcaattaaaccagagtcaacatttttactaccgctcgcaaagacatacatcgccgccatcccactcaagagcatcgtaatatcgttaatataaggctccgtttcctttccataaacctctaaaagctgatttttaacccattccatattcttaagtcgaacattctgcaagaacgcattaaagtcatcatcaatcatcgtctgcgaaaaagtaatattcaatatctccccattttccgtataaaaatgaataataattttcaagcattccgtgaaattattcttcttcgtcccatctagcgccatcgtatattccaaacgctgatgcaatacagaatactcctgcttaaagatgacaatggccagctcctctttcgaagtaaaataattatagaaagtccccttagaaatcccagccgcatccaccatatcttgtacagaagtcttcaagtacccttgcttttgaaacacctctttagctgacttaataatccgctgcttcttctccttcaaaaaaacaccccatccgtccttgtatttatacccctagtataatctatttatacgacctattcaagacatgtaataaagcctccataaaaatagaccccagttttattcccagggtcataagatacatatttttttagttataatcacttagaacttccttatatatatccttatacgtatctttcatatctatcgcttcttccttgttttcctcattttcaaggaacagctcactttcactcaactcagcaacaggatatttacttaacatagcatttgtaagtacataattatctccagatgtacttttccttataaatagcgtatattcttcgtcttctttcatatttttatacccatcaatcgttaaatcgtattcttgtccatcgattttaacattttcaacactatcttctaataccttaatcgttttattttcttctaaggtcttcgtttcatctttttctatattatttataactacttcactcatagtataaaattctgtaggcacattgctattttttgattcttttgtaatagattttttttcagagcgtttcgttacagtaacaataataggagaactttcttctagttcttcaatattttctgcaagatccagatactttccatcacaagaaactatactacttttttgttcaactttttcgatttcttttcctactatttgtttttcatttatatttttattattagtacaacccgtcaatccaactatgctcactaatcctatgataacgataatacttttcttcatttttcaatcctcctttttatttatatattgctttaataccgtttaaatcatccctttgtggttttattttctttgtaaaaccaacatctagcatgattgcattcttcgttttcacatgtcctaaaccaaggccatggccaaattcgtgagctatagtttcagtcttatcacctacagataaagatctaaaagctttaaaagtagttatttcatttttggctactaacttagaccctttatatgcccaagtttcgcagacagcaacagttgcccctctgtctatagttgaactactaattataaagtgagggtttgcatctcgtcccttacttaccgtatttaaatatggagaagcattccaagattttgctccattaataattatatttttataacccatcgccgacccattaatataaaatttaaaattcttagcatttgatttacttaaagaataacctaatttagtataggcatttgcattcgttggcattagaatcgttgtcaatagtacaataaaaagcaaaattgttaccgcagttttttttctcatgatgttatctcctttttaaaattttcttacacatatataaggtatcataataatacgatgtatgaccgaaaacgaaagaaaatggctgtttcttgtaaccgactactaaaaagtaaagaaaattttgttttatttccacacaaattgacttttataattgtttcattgttaaaatcctacacgtattagcttgttattcatattttatacaaccaatcttttaattatgtctaaaaatacacatttttctcaatataataataataaatccaagaaaattcgatacttatttaattacttaacatttttcataaaaacacattgaataataatgcatatgtatacttctgataaggagtttattatttttagacaaataaaaaaagcctcgcatactagcgaaacattctaagtacaagcatattatattaagccacttgtcggatttgaaccgacgaccccttccttaccatggaagtgctctaccaactgagctaaagcggcagcaaagcctttcaaataaaaaaatggctccacaggcaggactcgaacctgcgaccgatcggttaacagccgattgctctaccaactgagctactgtggaataataaattgcccggcagcgacctactctcgcagggggaagcccccaactaccattggcgcagagaagcttaactaccgtgttcgggatgggaacgggtgtgaccttctcgccataactaccagacaatatgaagttgttgaaagattgctctctcaaaactagagaagaaagggttcagttaggtaacttcgtttcattttttggttaagtcctcgatcgattagtatttgtccgctccatgtatcgctacacttccactccaaacctatctacctgatcatctttcagggatcttactttccgaagaaatgggaaatctcatcttgaggggggcttcacgcttagatgctttcagcgtttatccctgccacacatagctacccagcgatgctcctggcggaacaactggtacaccagcggtgtgtccatcccggtcctctcgtactaaggacagctcctctcaaatttcctgcgcccgcgacggatagggaccgaactgtctcacgacgttctgaacccagctcgcgtgccgctttaatgggcgaacagcccaacccttgggaccgactacagccccaggatgcgacgagccgacatcgaggtgccaaacctccccgtcgatgtggactcttgggggagataagcctgttatccccggggtagcttttatccgttgagcgatggcccttccatgcggaaccaccggatcactaagcccgactttcgtccctgctcgacttgtcagtctcgcagtcaagctcccttgtgcctttacactctgcgaatgatttccatccattctgagggaacctttgggcgcctccgttactctttaggaggcgaccgccccagtcaaactgcccacctgacactgtctccccacgcgcttagcgtggcgggttagaatggtcatacagccagggtagtatcccaccattgcctcctcgtatgctagcgcacacgtctcttcggctcctacctatcctgtacaagcggtacaaacattccatatcaggttgcagtaaagctccacggggtctttccgtcctgtcgcgggtaacctgcatcttcacaggtactataatttcaccgagtctctcgttgagacagtgcccagatcgttgcgcctttcgtgcgggtcggaacttacccgacaaggaatttcgctaccttaggaccgttatagttacggccgccgtttactggggcttcaattcgtaccttcgccgaagctaagcactcctcttaaccttccagcaccgggcaggcgtcagcccctatacgtcaccttacggttttgcagagacctgtgtttttgctaaacagtcgcctgggcctattcactgcggctctctcgggcttgcaccctaatagagcaccccttctcccgaagttacggggtcattttgccgagttccttaacgagagttctctcgctcaccttaggattctctcctcatctacctgtgtcggtttgcggtacgggcagtactactcttcctagaggcttttcttgacagcgtgaaatcaggaacttccgtacttaatttccttccccatcacagctcatgcttcgcaagaagcggatttgcctacttctcacactcactgcttggacgcacatttccattcgtgcgattccctatccttctgtgtcaccccatcggttaaacaattagcactggtacaggaatctctacctgttgtccatcgcctacgcctatcggcctcggcttaggtcccgactaaccctgagcggacgagccttcctcaggaaaccttagatattcggtggaagggattctcacccttctttcgctactcataccggcattctcacttctaagcgctccaccagtccttccggtctgacttcaccgcccttagaacgctctcctaccacgaacctccgaagaggttcatccacagtttcggtaatatgtttagccccggtacattttcggcgcggggtcactcgaccagtgagctattacgcactctttcaatggtggctgcttctaagccaacatcctggttgtctaagcaaccccacatccttttccacttaacatatatttggggaccttaactggtggtctgggctgtttccctttcgactacggatcttatcactcgcagtctgactcccgagtataagtacatggcattcggagtttatctgaattcggtaacccgagaagggcccctagtccaaacagtgctctacctccatgactctttacctcgaggctagccctaaagctatttcggagagaaccagctatctccaagttcgattggaatttctccgctacccacacctcatccccgcacttttcaacgtgcgtgggttcggacctccagtaagtattaccttaccttcatcctggacatgggtagatcacctggtttcgggtctacgacctgttacttatgcgccctattcagactcgctttcgctacggctccgctttttccgcttaaccttgcaacaaatcgtaactcgccggttcattctacaaaaggcacgctatcacccattaacgggctctaactacttgtaggcacacggtttcaggaactgtttcactccccttccggggtgcttttcacctttccctcacggtactggttcactatcggtcactagggagtatttagccttgggagatggtcctcccggattccgacggaatttcacgtgttccgccgtactcaggatccactctggagggaaagccatttcaactaccgggctgttaccgtctttggcgggcctttccagaccgcttcatttataactttcttttgtaactccgtatagagtgtcctacaaccccaagaagcaagcttcttggtttgggctctttccgtttcgctcgccgctactcaggaaatcgatttttctttctcttcctccaggtacttagatgtttcagttccctgggtctgccttcctcacgctatgtattcacgtaaggatactatccgactaaagatagtgggttcccccattcggaaatctctggatcaacgcttacgtacagctccccaaagcatatcggtgttagtcccgtccttcttcggctcctagtgccaaggcatccaccgtgcgccctttctaacttaaccaatttacttctacgaagtaaaggttgtttttctgatgttccgtatcagcgatgatacttcctatcagatgaaagattcactttcagatgattctcggttacttgtgtcataaataataaattatctatgctaactttactaactttcttatctagttttcaaagaacaattttggtggagcctagcgggatcgaaccgctgacctcctgcgtgcaaagcaggcgctctcccagctgagctaaggcccctaaaaggaattaaattggatgttttcttcgtgtcagaaagaaaaagtgggcctaaatggactcgaaccatcgacctcacgcttatcaggcgtgcgctctaaccagctgagctataggcccgtcaaaaatgtagtggcgctatgctccatgcatgttgccttgcgtactttatctgacatacaagagagtgacctctcaaaactgaacaaatagagaagaacgaaaactcacaggtttccttttccttagaaaggaggtgatccagccgcaccttccgatacggctaccttgttacgacttcaccccaattatctgtcccaccttcggcggctggctccataaaggttaccctaccgacttcgggtgttacaaactctcgtggtgtgacgggcggtgtgtacaaggcccgggaacgtattcaccgtggcatgctgatccacgattactagcgattccggcttcatgtaggcgagttgcagcctacaatccgaactgagaatggttttatgggattggctccacctcgcggcttcgcgaccctttgtaccatccattgtagcacgtgtgtagcccaggtcataaggggcatgatgatttgacgtcatccccaccttcctccggcttgcaccggcagtcactttagagtgcccaactaaatgctggcaactaaaatcaagggttgcgctcgttgcgggacttaacccaacatctcacgacacgagctgacgacaaccatgcaccacctgtcactttgtccccgaagggaaagctctgtctccagagtggtcaaaggatgtcaagacctggtaaggttcttcgcgttgcttcgaattaaaccacatgctccaccgcttgtgcgggcccccgtcaattcctttgagtttcaaccttgcggtcgtactccccaggcggagtgcttaatgcgttagctgcagcactaaggggcggaaaccccctaacacttagcactcatcgtttacggcgtggactaccagggtatctaatcctgtttgctccccacgctttcgcgcctcagcgtcagttacagaccagagagtcgccttcgccactggtgttcctccacatatctacgcatttcaccgctacacgtggaattccactctcctcttctgcactccagtcttccagtttccaatgaccctccccggttaagccgggggctttcacatcagacttaaaagaccgcctgcgcgcgctttacgcccaataaatccggacaacgcttgccacctacgtattaccgcggctgctggcacgtagttagccgtggctttctggttagataccgtcaagggacaagcagttactcttatccttgttcttctctaacaacagtactttacgatccgaaaaccttcttcatacacgcggcgttgctccgtcagactttcgtccattgcggaagattccctactgctgcctcccgtaggagtctgggccgtgtctcagtcccagtgtggccgatcaccctctcaggtcggctatgcatcgttgccttggtaggccattaccctaccaactagctaatgcaccgcgggcccatctgtaagcgatagccgaaaccatctttcaagagcgtggcatgcgccacactctatcattcggtattagccccggtttcccggagttatccccaacttacaggcaggttgcccacgtgttactcacccgtccgccactaactttggaagagcaagctcttcctccgttcgttcgacttgcatgtattaggcacgccgccagcgttcgtcctgagccaggatcaaactctctttaaaatataaattgaatttgaatacttattcaacaccgtgaataagattccttgcgtcaaattgacttcgctagcaattaaattactagtttgtttttgttgaaaacagctttctgttttctgccctgcgattaccagtgagactttgcgtctcattgcttttcgtcttcttttttgttcagttttcaaaggtcagtttcttttgctgctaaagcgtttgtccgtatcagcaacgtttataaatataccaagatttttgcctttcgtcaatactttttacaaagtttttataataaatatggaattattttctctgctagagttttataggcttttcccgcttcactagactcgctatagatagctgatgtatagccatttccattgaaatctggttgttcgattggtaattgaattaaaagttgtgtttctaggtcagcagcaactttttctccgccaccttgtccaaatatttttaaggtttgtccatcttcaagttttaggtaggacatattttcaattacaccaataatgttatggttatttttcgaagccatatatcccgcacgtgatgcaactgatgccgctgcgaaatgtggcgttgtaacgataatttcattgcattttggaattaaggtgtgaatatctagagcgacatccccagttccaggtggcaagtcaattagcaagtaatctaattttccccatctcacttcttctaaaaacatctttatcatttttcctagcatcgggccacgccaaataactggttcgccagactctacaaagaaatccatcgagatcatttggataccgtttgtttctacagggataatttgtccattttctttacgcggggattctgttgttcctagtaatactgggatactgaaaccatatatatccgcatcaagtaagcctacttttttaccctgttgagctagggctatcgctaggtttgctgcgacagtcgattttccaacgcctcccttgccacttgctattgctaaaaatttagtttggctagtttctgaaaggatgttatctcttgcttgaaaaatgcggtcaattactgcagccggcaagtattcaagttcaatattgatttcatttacaccgaattgcgttagaagttcttctatattatgaacaaaatgatctgtttctatcgctggatccgctaaggcaattttaatatttgcgctttctccaaggacctgcacttctaaaataccttctgtttcttccaaactagcttccaaaacaggatcttgcagtcgatataataatctagtaatttgttgttcgtttaacatagttacaaacctccataaatgaatgcgctgacatactgaatattatagcatggctccttctttttttcacatattcaatatttatgtgcttcactctataaataatttcacaaattttacacattttggaaattgacgttaaagctatatataccagtcacttcagcattttgtctttgtttcgtcatcgaactgtaatagaactatttctttatttattgctaaaataagcgcagatatagtaaaaaggagtgcgttcgattttggagagaaagtttataaaaccagggattatcttgctcattgtggcatttttagtagtttctttaaatgttggagcagaaacgggaaattcaagagttgctcaaaattcattaacttcttcgcaacaagcatttatcgatgagattttacccgctgcagaagacggttaccgagatggcaaactgttgactagtgtaacacttgcccaagctattttagaatctaactggggtaaaagtggtttaagcaagaattctaataacttatttggaattaaaggtcagtatgaaggtaaatctatttctatggggacgatggaagcttccggggcaactacggctgatttccgcgtttatcctagctggaaagaatcaattgaagaccatacaaacttaattacgcaaaatgcacgctatcaaggtgctgtaggtgaaactgattatcgtaaagccttgcaagcgataaaagatggcggttacgctaccgcacccgattatgtttctaaattagtcgctattattgaacgttataatctggatcaatacgatgttgtttatgataaaattgaataccaaaataaaatcgctgctataggtacagtcaatgcaaataaagaacaagaaacgatttggtctgcaccatttaatactactaattctgaggaagtcggcacattagcgaactatacaaatcgcaatttagaaatttcttgggaagcgaaaacagaaaaaggtttgtggtattttttacgtgaaaacaataaagacattggttgggtaaatagctcggcgcttactttgagttatcatcaaaataacgacgaaaatgttgatacaacaaaatatgtagatgacttaaatgctcatatttatcgcttacctaatccggaacagcagtttgacaatggtacgattgcaaaatatgaccgaaaagcacttcacgctgataagaaaataacacgtgatggttatgcatggttccgtctttcagaaagtagtaaagtaatcggctgggttcgctcagacaaattgaacgaccgcttatatgatcgtatcacggaacaaaatagctttgatggctacgcgactgtaagtaagtcggcaacagataatgtctggagcgccccttttaatacaaaaaatgcggagaaacttgccccacttagtgactatgacactcaaaaactagaattagttacacgcgccaaagtcggaaacacgctatggtacgaatttaaaatagacggcgaagtagttggttgggttagtgaaaaagatgtaaatatcatttatactcctgaagctgaaaaaccaataactcaagtctcctatttaaaaaatcccgcagcaatgctttacaacaaaccagtcgaagcaacgagcgctgaaacaaaagcagtcggtttctattatggtaaattgctgatagtagataaagaagcgacgattcaagacgaacagtgggtgcatattaaagaaaataataactccctcggttggattaaagcaacagatattcaaagttaataacaaagagacccagataaatgctcgggtctcttttcttgtattaaatatttattttgcgactcgccatccatttaaccatttctggatctgcgtgagagaaaaattgactttcgccttgattaagggtcgcaatcgcactcttatcttcttcggacagttcaaaatcaaatacagctaaattttgcgccattcgttcaggttttacagacttagctaaaacaataatatcctgttctattaaccaacgtaaaataacttgtgctactgatttcccgtatttttcggcaattttagtcaaaatcggattggtgaaaatatcatttttcccttccgcaaacggcgcccatgcttcaacagccacgccttcttttcgtaaagcttcaatattctttgattgttgttggaaagggttgatttcgatttgattaacttgaggtgttatatcattgaaggcagctaagtcaactactcggtctacaccaaaattcgatacaccaatagctttaattttaccttgagcttgtaattcttccatcgccatccaagcgccgtacacatcattatatggttggtgaattagtaataagtcaatatagtctagcccaagacgttttaatgagcgatcaaacgaactcatgactcctttataactaacattttccacccaaatctttgttgtgataaataactctttgcgatccacaccagatgcggctatcccgcgtcctaccgcttcttcattcatataactttgcgcagtatcaatatgacgatacccagcagcaatcgcctctttgactgcttgttccgcttcaccagcatcggtaatttggtacgttccaaaaccaagaataggtacttctataccattatttaatttcactgttttcattttaaaatcctcctcttatctttaaaatttgtcccgttcccataatttttctacgttatctgcagttagttcccctgttttaaactgggcaatgtgactatcgtacgtatcgattttgtatacaagtaaatctctaacttgtttcatctcagctagtttttcgtctaattcttttagttggtcaattaaaacttgtttttgagcagcttcgacattctctgtttctcttagttgggcaagtgtcgcaaactcaattaaagattccactgacaaccccgcattccgcaaactcttcacaagataaacccagttcaagtcgcttgtcttatagtccctgtagccactttcattacgatggacaggcggaataaccccaactcgctcatagtaacgcaatgtatcgaccgtaagcccaaacatttcggccgcttgtttgatattcatcatcgatcacctcacttcgtctttacatattgaattataaaccctggagttcacaccaaggcaagggttataggtttatttttttgaggaaagaaaaaactctctgcgggtgagagagttttatttgtttagcaagatgattttttgaatgtatttggggtctatttgtcccggtgaggtttcttggattgggtaatccttggttaaaataattttgacattgtcgtttttgtttagttcggttagttttattttgtttccgtttttgtcgtaatatttgtctacgatgccaaagcgtatgacggattctggattatccttatcatttttctctttgaaattgttaattaaaattgcatttgtttctacttgctctattatacctgttgcttctgtatattctatttttgtttgtttttcggtggtggaacatgctgtcagtagtaaggttatacataaaataaaaatgattgaggtttttttcatgaggtttctcctttttattttaagtggtgtatgtaaatgtcttatttttaattattaatagttctctgtctcttaaaatcaaattttctggcgttaaattttctatagctaattctgttttattcgtcagagggaaattttcttcgccgttccatgaagtgtatagttcaagggtatcactttctttactagcttttttaatgtaatcgtgtagtatttttaaacttttagattcataatcattattttgctcttcaccttttaacggcaatttcccttcacttatagcgacttggaaattgcaggttgggttaaaatatttggagtaggaaaatttttcatttgtacgctcatcaatattttcttcaaaattcaagctcaggaaatctaagtcgttttgatatacaaaatctgtcttattttcgtgtgtcgtagttttcagtgctgcttttgaggcgaggtagtggtattgtgtcatgtgttgggacctctctttcataatggtttaactctttctagctggagtagattgagagatgtggtttttagtattcgaaatagcatagctctaaaactattgcatagatactaatgtttccacttgtgttttgttagcattcaaaataacatagctctaaaacaacatgaacagagattcagcatcgttgctagttttgttagcattcaaaataacatagctctaaaacttgtattattttggtgattgcctttctgtagttttgttagcattcaaaataacatagctctaaaacttttccgagcgctgcatcttttatactgttgttttgttagcattcaaaataacatagctctaaaaccttgcttctcttgttgttcctctatccattgttttgttagcattcaaaataacatagctctaaaacatttattatgagtttgggactggtgagaaagttttgttagcattcaaaataacatagctctaaaactataatgagttagatggcattatatgcgacgttttgttagcattcaaaataacatagctctaaaactcgacgatttaacagattttacagatgcttgttttgttagcattcaaaataacatagctctaaaacataatgcagtaaataaagaaatactttgcagttttgttagcattcaaaataacatagctctaaaactatcctaggcaaagttaccaaagcgctacggttttgttagcattcaaaataacatagctctaaaacctcgtagaattttttattctcctagatttcgtaatcgcgccattcatccatagcaagatttcaattttgaatgcttattttatggttcacataaaatctatttagttttcaaagatcatttgaactctacattcctttttcaacttgtaaaaaataatctgaatctagaataacctgcgaaaatccttctgtttttcgaggttcaacaaataaaacttttacttggtttaacgagacatagcgccttagctctagtaactcatcttctgttaaataggcacatacattaataaaaaccaacaattttttctttgataagtatttatagacttgtactatttcaattaatttttcaaaaacggtatcactttttgtctctatcttgatacccaaagctttgaataattcaatgactgtaatttcatcttcctctaaatccagttcatgctccagaagctcataaccaatcaactcgctaatcgtcgcagtcagcttatcaatcattgattttacttccggcttttcattaagttgctgttctaaatcagcataaattagttttaaagttgccagagaattaatatcgtgtcccaatacatctgtaatcaacattagttcgctactttttaaaggctgttgtttcgcaccaaaaatcgttaattcttctgtttcgtcgtattgatacaaccacttagtaacattggcaaaaacacgcacatcttctattgcaaatatggtcgaatcttcgataattgcaaactactgtcatgtcgtccataaaaaggaagtacctttccaataggcaatcgcttatcatcacaaaagagaatcaaaatattttcagctactaagcagttaattaacatcgtagtcaaagtaatatctgttgtttctaatataagtacatcaatttctgatagatgaatcatttcctgttgataggcagatttaaaaacaagatgctggtttttgtacgatagtttcgaatgagaatttacaacaactgtccgccatcccatttagtcatccagcctttttcgtgattcatatagtcctgtgattgattggtaaattatagtggaatttaatagttctttgagattgttatatcttttacgctcaatagtggtttcaaaaaatttaaaactcgccggcgcgcccatcgcattgaatgccattaaatcaacaaaagattgtgcaattgccttaatgtcgccttctttattttgctcaaaaagctgattaattttgtttagattagcttcagctaacgtatatcttttggcaaattctgatacgtgcgctagtagttcagcaaacatttctctattactttcaatataatcaaggcttttcccatcacttacctcacaatttgccgcatggtgtagtaatgttaccaggtggtttggcaatacctgctgatttcctttctgagcttcattagcactagccagcattctccggcgtccttcctcacattcatataacgtatatttcggtaatttcgcgaggactttaggctgacgataaccttgttcttctaaaaaggctttctcatctttttcaaatgctttacgttccatgatagtaacacggataatttttttctcgaaaactaatttatttttcccttttgcatattcaataaccactgcatatgccatattagggctatcaagaccaccatatttcatcgggtcccaattagtttttctaggaattaatttactggaatttcctttgggcttaattgtagcttttgaaaattctcctttttgaatttctgttttcttaacaatattcatttgtcgataactcatgacttttttgacagtatccaaatattttttatcccaaagaatttcaccgttttcatctattattcgatctttttgcgcaaagaataacatgatgtttgtatagaattgttttttcgccgtggctttattcgctttaaaccaatcaaattgatggtaatctccgtaaacaaattctggctctaattgaggatatacttttaataacgtattcgcgactaccccatttaagtaagcatcatgggcgtggtgataatcattaacatcacgcaccttgtacaattgaaattgcttacggaattggctaaccagtgcagattttaatgttacaatccgaacttgcttcatagtattcccatgatcgtctttttcataattaaaacgttgatgtaaaatattagctacattcttcgttatttgacgagtttccactaattgccgatgaataaatctcgctttatccgcttctgtaagaccaccacgttcagctttagttaaataatcaaatttacgtttactcatcaaattcccttggtataacttctcccagaatacttttctctttcgaacgatctctagtggtggaacatcatcccctttttcccgattcccagctgaactcgttaacacaagattatcaatggagttatctgttataaaactctgtggcacaatatgatcaatatcatagttagaaagattatgaatatctaggtcttgtccagtatacatatccttgccattttgcaaataatataaatacaatctattatttcttaattcttgattatcagtcggatgctcttttagaatttgactaccaaattctttaatcgctttttctaatgatttataacgtggtctagaattatttttcccttttcctgttgtttgattttctcttgccatttccacaacaatagtttgaggtgggtagcccattacactaacaagttcatcgacaattttcaagctttgtagaatacctttttttatagccgggctaccagcaaggtctgccacaatactttgaatatctttatctgctgtagttacttgttctttttcaattattgatttaaatgataaattactgtcatttataagttgcatcagattacgattaagtccatcatcattcatcaaataatctaaaatagttaagtgagattgcttatcacgaattcccattaataacttagctgataaccttccccatcctgtataatgtcgtcgttctaattttttcaaaacaaccccatctaaaacatcagaaaattgctgtaactgctctttaatcatacgtttatcttcaaacacagttaaaattttgactatattttctagcatttccgtatttactgggttatcaaggatttcttgttttatccctaccttgagtaaatcatgataggtagaataacttgaattaaacgagtcttccaacccttcaatagtcggactttcaacatggctcatattgcgtaagaacagctctaaatccttctttttaactttacgcttttgcttaaataagtcattaaaaatctgttctttttcctgcccagaaaaatagctagtcttcccttggtcattaatatatctaactttggttaactcattataaaccaaatatttttgataacagagactgtgtttaggcaatacattttctttaggtaaatatgtatctttattggtcatcttttcaatgaaatcgaccgctgacttaccgaaatccactttctcttctatattccacggtctaatctcaccatcagcttttcttgttaaccatgcgaattcgctctgtccgttagctagtgggccaacaaaataaggaattctaaaagttactaaacttttgattttatcatagttttcttttaaaaaaggataatattttgcttgctggtgcaaaatggcttctaattcttctaaatgtaattgatgcggaatagccccattatcaaacgtccgttgttttcttaaaaagttttctttttctattttagcaataaaataatcggcaccctcgatgttctctaatgtcattttcatatatttatagaaatctgcttgctttgttttaccgtctatataacctgcgtaaccatgtttttcggtattgctaaatatttcttcatagtgtttaggaagatgaagcttgataaatgctttcaattcccctaaatcttcttcatgtgtatcaaaacgttcaatcatacttgcggataacttcgcgtttgtttcagtttcagccactgtgataatactagataacaccacagcactatatgcatttttcgccgcaacaaaaagttccgcatattcatctccaattagcgctaacaaagactctaaatcttcttcatagctatctttcgcacattcaatatccgatttctcaataagatcaaaaggcttttgaaaattccctttactgcctacaatcaagctgataaactgagcaaacattccggcagatttttcaccagggtataattttaaaattctctcaagtttttcttttcgcgtaactttttcaacgagaattttagctacgtccttattatcttccaatttttttagcgaaccatcttcaataccacttgcaaatacttgattatatgtttgtataaattgcttatatattccatcaacagaagtattttgggtatctaatgccccctcaattaaaaagttccctcgatattttataatatgagctaaagctaaataaactaatcttaaatcagctttttctgaagaattaacgagttcttctctcaagtgataaatggtcgggtagtttttgtggtattctacttcttcctctatagtcgcaaaaaaaggatgacgactatttcttttttcgttatcaacataaaagctatcacttaatcggcaaaagaaatttgcatcagtcttagacatttcttccgcaaatatcccttgtaaatacgaaatacgattgcgtcttctctctattctccttctagctgttctagccattcttctatcagctgccgtttgaccctcatcaaatagtctaactccccagaaatttttctttatctgttttttctcagagtctccagcaattttcattttcctcttcactaaatcatattgatctgttaacactgcccatccaaccgagtttgttcctatgtctagtccaatcgtgtacggttttttcatattcttcatcccttcaacctatttttagttgcattctttttataatttggtacaatgtatatattgttagtattcaaaataacatagcaagttaaaataaggctttgtccgttatcaacttttaattaagtagcgctgtttcggcgctttttttgtgcacttttttaagaactcaaaattgcaacaattccttatttctatgtatattaagatataccatttatactagtaatcacttcattcatctatttatctaactattatgaaccttaaattattatagcatatttcgataaatttgttataataatcacaataaaacattcaaaccaaattttttcggaatcgtgtttctgcatggttcctttttttacttttctcatatatttaagcaaacaaaaaagcaccagcaaaagctggtgctttgaaacgatttgattaacgttttgagaactgaggtgcacgacgcgcgcctttaagtccgtattttttacgttctttcatacgtgggtcacgagtaagtaggccagcagatttaagtgctgggcggtactcaggagccacttgtaatagtgcacgagctacaccatgacggatagcaccggcttgaccagtgtaaccaccaccgtgaacgtttactagtacatcatagttacctaaagtttctgtagctactaaaggttgtttgataacttcacgaagagctgcaaatgggatgtaatcttcccagtctctattgttaataacgattttgccgtcgcctggtactaaacgtacgcgagctacagagcttttacgacgaccagttccgtaatattgtacttgagccacttagtattcctcctttattaattaaccgcgtaattcgtatacttctggtttttgagctgcatgttcgtgctcagatccaccatatacgtgtaattttttgaataattgacgtccaagagaattttttggaagcatacctttgatagatagttctaataatttctcaggattgtttgtacgcatttcacctgcagtacgagatttcaaaccgcctggatattgagagtgacggtagtaaattttgtcagtagcttttttaccagtaagaccaatcttaccagcgttgatgatgattacaaagtctccagtgtcgatatgtggagtaaattgtggtttgttttttccgcgaagaattgaagcaacttcactggataaacgtcctaaagaaacaccagtagcgtcgataacgtaccatttacgttctacttcgccgggtttcgccatataagttgtacgcatgaattaccctcctaaataaattgaaacaaattagctcccgaaaactgttcctaattcccgaaatgctattctatatttttattgtttaaacacaacaaccttccggggcttattgtggggcaaacaataccatagtccataatacagtttttagagtgaaaagtcaatgcgttctgtaaaaaaacatccaatttttattcataatcaactcgccataaatacaacccttgtggcggcgcagttttactaattaatttttggcgatcatgcgctaataaggccttcgtaatatcatctggagaaatccgaccttgacctgcatcaagcaaagtccctgtcaaaatccgcaccatattatacaaaaagccattcccttgaaacgcaatcactaatgtctcggcatcctcttcataaaagtcgatactataaagcgtccgcactttagaatcccgctccgttctagccgaacaaaaactagtaaagtcatgttcgccaattaggcgttcgcttgcttgcttcatttttgcaatatctaattcatatggataatgtagcgcaaagtttcgactaaaaggatcaaaaattttcgtccgttttataacataacgatattcttttccaaccgtgccaaatctagcgtgaaaatcagccggggcttcctcaaccgttaaaaaactaatatcaaacggcgtcatcacttgcaaagctttttggaatttttctgctgtaatatccagttccgaatcaaaatggattacctgtcctttcgcatgaacgccggtatctgttcttcctgaagctgtaatccgaacgctcttacctttatgcattttttcaagcgctttttcaatttctgcttgaaccgtccgtgtattcggctgcacttggtatccgaaaaaaccacttccgtcataagaaattattgctttatatcgtgtcatccatttcaactccgcaaccaaaataataatccacttaacaccgctaaagaaattaacaagcatgtgtccgcgaatcgccagcgtaacaagcgaaatctcgttctccctttaccaccacgataaccacgagcttccattgcaatcgctaaatcttccgcacgtttaaacgcactaataaaaagtggcacgagtagcggaataatcgccttgatccggtcactccattttccactcgtaaattcaacgccacgagctttttgcgctttcaaaattttctccgtttcatccatcaatgttggaataaatcgtaaggaaatactaagcattaaagccagttcatgcactggtaaatgcaccaatcgaaacggcgccaaaattttctcaagaccatctgtcagctcaatcgggcttgttgttaatgttagtagcgttgtcataaatataatgagaacaaaacgacaaaacatcatcgccccgttcgccagtccgagggttgttatttgtaaaagtcctaaatcaactaaaactgtcccgccttttgtaaaaaagacttgcagcaataaagtaattaaaataagccaaaaaatcggttgtaaccctttaataaaaaataaaaatggcactttcgaggttaggactaaatacaaaacatacgcaaacataagcgcataggtcagccaattgttcgctaaaaaaacaatcgcgataaacgccataacagcagtgattttcgcgcgtgggtcaattcgatgtaaccaagagtttcccgggatataacgcccgagaatcattttttccatcataattaagccccgcccttcgctaagtaaggcgccatttcagctgttaattcagcaattgttaaacaagttttcgttaatttaacattaaacttgcgctcaaaaagcccttggaatctcaccacatccggaacagataagccaaggtccacaagttcatctggcttcgcaaaaatttctcgcggcgatccaattttcagaaccgttccagctttcattaaaacaatcttttcagcgtaacgtgcagcatcttccatactatgtgtgacaaggactgtcgttagtcctttttctttatgaaggttatagaacatctccataatttcttcgcggccatgagggtctagtcctgcagttggctcatctaacacaagtacctctggatccatcgctaaaactccagcaattgctacccggcgcatttgtccaccagaaagttcaaacggcgaacgagataaaatttcttctgtcagccctacttcataaattacttttttagcccgaagtttcgcatcttcctcagaaacgccaaaattcattggaccaaagcaaatatccttctccaccgtttcttcaaaaagttgtgcttccgggaattggaaaacaatcccaacttttttgcgtaaatcgcgtagtttcttttgtttaactcccgcgacaatttctctatcgccaaccgtgattttaccttcagttggcatcaaaagcgcgttaagatgttgtagcaatgttgatttcccagagccagtatgaccaataattgcagaatagctaccagaatcaaaggaaacatttacatcaagcaatgctctcttttcaaaagggctatttttttgataacaataacctagttgttcgagtttaatttccataattgatctagtaatgctccttccgatagcacggtactccctgtttcaaagccacctgcaactaatttttcttgtaattcaataataaatggaacgcctaagccaattgctcgcattgcatctgcttgctcgaaaatttcttttggcgtgccttcactgtgtatttctccattattcataacaatgacccggtccgcaaaaagcacttcatccaaatcatgcgtaatagaaataacggtaatatcctcttgttctcgcataatccgaatagtctccattacttcggcgcgccctcttggatcaagcatggaagttgcttcgtccaaaataatcacatctggttgaagcgctaaaacacccgcaatagcgacacgttgcttttgaccaccagaaagtctagcgggttcatgtagcgcgtagctttgcataccaacctcattaagcgccgattccactcgctccaccatcgtatcatgtgggactccgtgattctctagcccaaacgcaacatcatcctgtacagttgcaccgacaaattggttatctggattttgaaaaaccattcccacttgtcgtctaatttcccatatatttttttcagacaaaacaaagtgtccgattttaattaagccatcttccggaaaaagtaagccgtttagtaatttcgcaatagtggatttacctgaaccattatgaccaactagcgcgacccattcccctttttgagcagaaattgatacatctttgactgcatatttttccgtatcctcatatttataaaaaacgtgctctaatctcacaaaactttctgccacgcttaacacctcactttttgaccattcattgtttattatagtataaacatccatctggcgcaaaatttcctttttgattgttttgctttttagctaaggggaatatattaacgttaaggatgtgatagctatgttagcagattttattttacgccttgttgttgctggtctccttggagcagttattggacttgaccgagaaattcgggcaaaagaagccggtttccggacacattttctcgtttcacttggtagtgctttaattatgattgtttctcagtacggtttttccgaaatcgccactatgcaaactgtatcatttgaccctagtcgtgtcgctgcccaagtggtaagtggtattggctttattggcgctggtacgattattattcaaaagaaatttgttcgtggactaacgacagctgcaggactttgggctacagcagggattggtctcgctgttggtgctggtatgtattgggttggaattgccgcgacattactcacactcattggcttagaatttcttagtatcgtctttaaatccgtttcgctccatacaacgtcacttatttattccactgataaacaagaaaatttagtaaaaatcactgacaaaatccagcaaaataaacaacaaataatttcgtactctagtgaaaaagaattggtcggaaaaagtctatttatccgggtcaatatcgttgtaaaaaccaagaataagaacgacgaatatgaactatttcactttattcaaacgcttcccgatgtcacgattgaaaaaatggaataaattagatatttatagcacattttaattaatttgttcacagaatatccatttacttacatcttctcgttttgctataattcacccgtcaacactaacagaatagagagaagggatgagatgaaaaactttgtaacttcagaacgttcgattcataagatggatgaatcagcaaaacctgtgcttacagtcaaagatggctccgttgtgacaataaaaataaaagatcacttcaatggccaaatcaacaaagaacagcttcactacggggaaatagattggaagcagttttcgcccaccacaggcccaatctgtattgaagaagcgcgcccaggggacttactcgcagtaaccattgaaaaaatcaccctcacaagtaaagatgtcgttttattaaatggacctactatcggtgtaacagatgatttactaccaaataattgtatccgccgctataaaatcaaacagaataagattatttattccgatgaaatccacgtacaattacaaaaaacaattggtctattaaaaaccgaatccattcatcaaacaaaaccatttcatatgcctactaaacacggcgggacacttgactctcccgatataacagaaggcgctacaatatttttaccagtagaaaaattcggggcaatgctccatgtagctgatataagagcaactacaggtttcggaaaaacaacatcaaccagcgcggaagtccctgcagaagtaacattacggctacaattactcaaaaacaaaacagccccaacaccgattattattcataaaaacaacctaatctgcctcggctctgaactcactaccgaaaaagcaacaaaaaaagcattacaaaacatgttaaacgtactaatggaatcagataaaataacactagaagatgcaatatttttattatctttacaagctgattttgaagtttgcaggctgaataaagcaaacgtcacaacaagtatcaagcttccattaagtagcttcccagagatgcctttcctataaaaagaagcccgttcgcgatagcttttgcgaacgggcttcttttaaatttgttcaaaaaaacttccttggtattttttatgaagaaatttcgctaattttctcgcttccgtttcaacaaatttttggtttttcttcgtcatttttttagtaagaaaaaaggtgaacgttacgttatcccctgttatcttatatctccaagtcccgtaaaataagccatttataattagaacagcctcaatttgcccagctggacgccaaattaaacttgtttcagttgcatcagctaaccagtcttttttcccgtagctaacaaaaagtggatcgaattttcctaataaaagtggccgttgttgttctaagtcagtttgaatttctgttttgctatagtaaacctgaccatcctcacctaagtaactaaaataattttcaagagccgcctcaagtgtttgttggaattcaaacttccgcaggcctgtccaatgtttgaaatcccgaattgtagctggaccgtacgcgctaaagtaacggtcaatcattacctcaagtccaccttcattacgacccgtttctagccaattagtttgtttttctgcactaatccaatttctatggctataaaatcttgttttaggtgattccggtacacaaaagagcgtgccatcaagcgatccttgaataaaaacaccaccccatagcataagttctttagcgtgctgtcctaataattcagcaaatgcttctttcggtattttctcttcgcttaaaagaagttgctccatatcctccagcagtaagtctaaatcatgccctagagagtcagcgtgcttttttaaccaattattcttatccgaataaacatcatgcacaaaaaaccagtcagaaggcgtatacatatgcacagtcatcctttgaccccatattttaattaaatctttttgatcgtaatcatgttgaagtttttcttttgtgagatcaggcacccgattaaacaaactgatttcaccaaactgttgatactgtgattgaatgccaaataacgcacgagaagcatccggtgcgctagaaaatttattttgtaatagacctgaattgtataaccgattttgagctatttgcgagttagtgactgattgcatacctagttccccctcgaaacaaatctttgaggtttactatagatgctttcagaataaaaggcaagtgaaaaaatatagcttttcaagtttgacccacacacgaagcatgtccgtaaagcaggtcaaacaaaaaaagcctgccccctagcctacgattaaatagactaggaaacacagagctagacaaggaaacacgaagtctccatatcatgacactccacttgctttaaacgttttattattaaactaattcaataataaccattggtgcgccgtcaccgcgacgtggaccttttttcaagatacgagtgtaaccaccttgacgttccgcgtaacgtggagcaacatcatcaaatagtttttgtagagcgtatacaggacggtttttcttcacagtagaaccatctttacctttagcatctacttgtactacttctacaacttcatgacggatgaaagcagctgcttgacgacgagcgtgcaagtctccttttttcccagaagtgattagtttttcaacaactttacgaatctctttagcgcgagcttctgttgtttcaatacgttcatgtacgattaaatccgttgcaagatcacgtagtaacgctttacgttgtgagcttgtacgacctaattttctgtaacccatggaattgcctcctttatcagttttcgtttcttagagataagccaaggtcagccagttttactttaacttcctcaagcgatttacggcccaagttacggactttcatcatatcgtcttcggatttgtcagcaagttcctgtactgtgttgattccagcgcgtttcaaacaattatatgaacgaacagacaagtctaattcttcaatagtcatttcaagcactttctctttatggctttcttctttttcaatcataatttcagctttttgtgcttcatctgttaaattaacgaagatacttaagtgctcagaaagaattttagctccaagtgaaactgcttcttctgggctgatacttccgtcagttaacacatcaaacgtaagcttatcataattagttgattgtccaacacgtgtattttccacttgatagttcacacggataaccggtgaaaagattgaatcgactggaagtacaccaattggcatattttcgcgtttattttgatcagcaggtgtgtaaccacgaccacgagtcgcatttaaacgcacatgaaatttagcattatcacttaatgtagcaatgtgtaagtcgggatttaaaatctcaacgtcgctgtcataattaatgtcagctgcagttactacaccaggaccttgcatatcgatttctaatgttttttcttcatcagaatagatttttagcgcaagttttttaatatttaaaatcatggttgttacatcttctactacaccttcaattacagaaaactcatgtaaagctccatcaatttggatagaggttactgctgcacctggaagagaagataatagaatacgacgtaaggagttacccaaagttgtaccatatccacgctcaagtggctctacaacaaactttccatacttggcatcatcgctgatctcaatcgtctcgatttttggcttttcaatttcgatcattcaaatttaccctccttcaaaacgtctagaatatcagtctttatgtcaaactctctgccttgatagttaagacagtaaaaatctactattggcaaaagaaaacgaccacttatacgcgacgacgttttggaggacgacatccgttatgtggaactggagttacatctttaatagctgttacttcaagaccagctgcttgtagtgcacggatagccgcttcacgacctgaaccaggacctttaacagttacttctaatgtttttaaaccatgttcttgtgctgattttgctgcactttcagctgccatttgcgctgcgaaaggagtagatttacgagaacctttaaatcctagagaacctgcacttgaccaagctaaagcattaccatgtgtgtcagtaatcattacgatcgtattattaaatgtagaacgaatgtgtgcaataccagattcgatattctttttcacacgacgtttacgagtatttgttttacgagccattcactaactacctcctttactattatttctttttacctgctactgttttggacgggcctttacgagtacgggcattattttttgtattttgtccgcgaactggaagtccacgacggtgacgcatgccacggtaagaaccgatttcgattagacgtttaatgtttaagtttacttcacgacgaaggtcaccttcaactttaatgcggtctaagatttcacggattttacctagctcttcttcagttaaatcacgagtacgagtatcttcagaaacaccagcttcagcaagaacttctttagctgtttgtttaccgataccataaatgtaagtcagggaaataacaatacgtttttcacgtggaacgtccacacctgcaatacgtgccatttacttaagcacctcctcttatccttgtttttgtttatgttttggattttcacaaattaccattactttacctttacgacgaataactttacatttttcgcacataggtttcactgatggtcttactttcatatagatatacctccttgtttattagagaaaatgtctctataaaccgataatttctaagctggataaaccagaccggtatataaattcaatttcggagtgcaaattatttaaaacgataagtaattcttccgcgtgtcaggtcgtatggagaaagctctactgtcactttatctccaggtaaaatacgaatgtaatgcatgcggattttaccagaaacagttgccagtactttatgaccattttcgagttcaacattgaacatcgcgtttggtagagtttcttgcacaacgccttctacttcaataacatcttcctttgccatatgtttgctacctccttcttgtattcttggatttgttcctgatgcaggcctaatcctttcagtgtaactatttctcttacatgaaaaaaacgtaaaacatgcaaaaatggatgcacttcattaaaaggcaacacatttcgccagctttgcagacaacctgtaaaagtgaaatccgtaaaaaccagaagaactgtcactcgcaaaagtattgcggctgaacagatcagggtagaacatatacgtcattcggatgaacttcaaacggttctctcgttcatcatgatttgcttagatgcctttaattccactgccaattatccattatactacaaatcaaaccaatttgcacgcattgattttgacagtgatttcagcacagcttacccctcaaaaagaagcaagaattttttccacatctacaaaaacgtcattaatatcttgctcgccgtttatgctatgaagtttacctttttcagagtaaaaatcaagaagcggcttggtctgtttcatattgacatttagtcgattttcaacagtttcttttttgtcatcttcgcgttggtaaagttctccaccatctaaatcacatttcccaggaactttcggtgggttatagatttcatggtaagttttaccgcaagtccgacaaatccaacgacctgtaagacgtttcattaaaacatctttatcaacttcaatgttaatgacagcatcaagttctgtccctaaatcacttagaatattttctagctcttctgcttgttccactgtacgcggaaaaccatcaagcaagaaaccattcttagcatcatcttcggccaaacgttcacgaacgataccatttgttacttcatcaggaacaaggtcgccattgtccataaaggatttagctttctttcctaattccgtattatttttcatagctgctcggaacatatctccagtggaaatatgaggaatgttgtatttctcaacaatctgttccgcttgtgtgccttttccggcgccgggcagtcccattaatactaatttcaactgtttcgccccttattacgcgctagctcctgctaggaaatcctaacaagaaccgcgtgttatttgataaatccccgatagttcctttttacaagttgtccttcgagttgtttcgtagtatctaatgctaccccgataacaattagtaggcttgtaccaccaacggcaagtgactgcggtaaactaaacacagtagtaccgatagttggaagtatagcaaccgctgaaaggaaaattgcaccaacaaatgttaatcgataaagtaccgatgtaagataagcttgtgtttcccgaccaggacgtttactaggaatatacccaccttgctttttcaagttgtccgcaactttctcagggttcacttgaatgaaagcatagaaataagtgaaagcaacaattagtgcaacatataaaatcataccaattggttttgtgtaatcaaacacgtctttcaatacttttacaatgtcgttactttgatcaaagaaagtaagaattgtttgcggtgtaataataaatgcacttgcaaagataactgggataactccggcagagttaagttttaatggcaaatgagttgcttgcgcgcccgattgttttgctcctgccacacgtttagagtattgaattggaattttacgaagtgcttgttggaagaagataacagctacaacaatagctagaatcgcaactcccacacctgctaacgttaaaatgtgtaagaacagttgatcaccagcgttttcaatttgcgaaacatataattgacgcactccatcaggaatacgagcaacaatacctgcaaagataatgatggaaacaccattaccaacgcctttaacagtgatttgttcccctaaccacattaagaacattgtaccggtagttaatacgattgcaataatcacatatctaccgatggatggttcgataaccaaaccagcagatgacatgcggttaaacccgtatgccataccgaatgcttcgattaaaccaagtccaatcgtcatgtatctagtaagttgattgagttttttacgacccatttccccttgcttagaccattcagttaacttgggaacaacatccatttgaagtaactgaacaataatggaagatgtaatgtaaggcattacacccatggcaaaaattgagaagttttttaaagccccaccattaaatgtgtttaagaaccccaaaataccgccatccatactagattgtaaagcagctgcgttaactcccggtactggcacgaatgtaccaatacggaaaataactagcatagctaatgtaaatagtatttttttacggatgtctgctactttgaagaagttcgctaacgtttgaaacattagatcacctcagtttttccgccggctgcttcaatagcttcttttgcagctgcagagaatttgttcgctttcacagtaagttttttctcgatatttccatcagataaaatcttaatcccggatttttcgttacgaataattccagtttcgattaaaagttctggtgttacttctgtaccatcttcaaagcggtttaaaacatctaagttaacgatagcaaattctttacggttgatatttgtgaatccacgttttggaatacgacggaaaagtggaagttgtccaccttcaaaacctaggcgtacgccaccaccggaacgagctttttgtcctttatgaccgcgtccagaagttttgccgttaccagagcctgttccacgaccaacacgattacgttctttacgagaaccttctgaaggtttaagttcatgtagtttcatgtcaagcacctcctcctatttaacaaattctatcaattacatattattatattaagcttaaacttctttgacgtccactaaatgacttactttagtgatcatcccacgaattgcaggattatcttctttaaccactacagaatttgttttaccaagacctaatgcttgaacagttttgcgttgtggttgagggcgtccgattaagctacgttttagagtaatttctaacttcgccataatgataattccctccttatcctaacaattcttctactgttttgccacgaagtttcgcaacatcttcagcgtttttaagttgtttaattccgtcgattgtagcacgtaccatgttaattggtgtattagatccaagcgatttggaagatacatcagcaacaccagcaagttctaggaccgcacgaacgggaccaccagcagttacaccagaaccggcactagctggtttaagaagaatttctccgccaccaaaatgtccgactacagtgtgtggaatagttgtgtctacagttggtacaaacaccatgttctttttagcatcctcaacagctttgcggattgcatctggaacttcttgtgctttaccagtaccgaaaccaacatgaccatttttgtctccaacaacaacaagtgctgtgaaacggaaacgacgtccacctttaactactttagcaacacggttgattgtaacaacgcgttcttctaaatctaatttgtttccatcaatttgctcaggcatgtaatatgtccctccttcttattaaaattctagtccattttcgcgagctgcttcagcaagagcttttacgcggccatgatataagtatcctccacggtcaaaagtgacagaagtaatacctttttcggaagcacgtttagcaactagttcgccaactttgcttgctgcatcaactttggattcagcagaaccgaaatctttatctaaattagacgcacttgcaagtgtcacaccatttacatcatcaataacttgagcataaatgtttttgtttgaacggaatacgtttaaacgtggacgactttcagttccagaaatcttagaacgaacacgagcatgtctttttttacgtactttatttttgtcgattttggtaatcacacgactcacctcttctctcatttgcctaattaagcggcattatttaccagttttaccttctttacggcgtacatgttcgccttcgtaacgaatacctttacctttatatggctctggtggacgtacggcacgaatgtttgcagctaactcgccaacgtgttctttgttgtatcctttaacaatcacttgagtgtttgcaggaacttcaatttctacgcctttaggagcaacaaactctactggatgagagtaccctacgttaagaacaagtttgtctccttgtttttgcgcacggtaaccaacaccgataagttctaatttcttttcataaccctcggaaactccgacaaccatgttattaagaatagcacgagttgtaccatgaagtgcacggtggtttttattatcagtcgggcgagaaacgttaatttcgttgccttcaatattaatagtaatttctgggttgaactcttttacaagttcacctttaggacctttaactgttgctgttgatccattaagtgtaactgttacacctgcaggaatcacaatagtttttttacctatacgggacatttattgcacctccttatggtttactttttcttaccaaacgtatgctagtacttctccgccgacttgtttagcacgggcttctttgtcggttaaaacgccttgggaagtagacacgattgcgatacctagaccgttaagtactttaggcacctcagttgattttgcatatacacgtaaacctggcttactgatacgtttcaaaccagtgattacacgttcgccagtcgcaccatattttaagaaaacacggattgtcccagcattgtcatcttcaatatattcaacgtcacggataaaaccttcacgcttcaatatttcagcaatttcttttttgattttggatgcaggcagttctaatttatcatgtttaaccatgtttgcattacgaatgcgagttagaaaatctgcaattggatctgtcatcaccatgtataataccctccttccttaaactctttcttaccagcttgcttttttcacgccgggaatttgacctttataggcaagttcacggaaacaaatacggcataatttaaatttgcgaataacggaatgtggacgaccacaacgttcacaacgagtatatgcttgaacagcgtattttggtgtacgtttttgcttcgcgatcatggatttcttagccacgttttcgcctccctactaaattagttttgattacttttgaaatggcatccctagttgagtaagtaactcatgagattcttcatcacttttggcagttgtaacgattactacgtccataccgcgtacttttgatacttgatcgtaatcaatttcagggaaaataagttgctctctaacacccaacgtatagttaccacgaccatcgaaagcttttttcgatacgccacggaaatcacgaacacgtggaagtgaaacagtaactaatttatctaagaaatcatacatgcgttcaccacgcaatgttactttagcaccgattggcattccttcacgaagacggaaaccagcgatagaattttttgcttttgtgataacaggtttttgaccagtgataagagctaactcctccactgcactgtctaacactttcgcatttgctgtagcgtcaccaacaccagtgttgattacgattttatctatttttggaacctccattacggagtcataattgaatttgctcattaaagcaggaacaatttccttaagatattgatctttaaggcgattcatgtaatattccctccttcctacgactattatttatctattacttcaccggatttttttgctacgcgtacttttttatcacctttaacttcgtagcctacacgagtaggttcgccagttttagggtcaattagcattacgtttgaaacatggattggtgcttcaacattcaagattccgccttgcgggttgatgttggaaggtttagtatgttttttaaccatattgattccttcgataagtacgcggtcctttttcggaaatgctgcgagcactttgccggatttgcctttatctttaccagtaataacttttactttatcaccttttttgacatgcattggtatagcacctccttgatttcttggaacttaatttttaaagaacttctggagctaaagaaacgatcttcataaagttgttttcacgaagttcgcgagcaacaggtccaaaaatacgtgttccacgaggacttttatcgtcacggataatgacacatgcattttcatcaaacttgatgtaagaaccgtcttgacgacgtgctccactcttagtacgaacgattactgctttaacaacttcaccttttttgacaacgccgcctggtgttgcttgtttaacggtacacacgacaacatcaccaatgttagcagttttgcgtcctgatccacctagcactttaatagttaacacttcacgtgcgccagagttatcagccactttcatacgactttcttgttgaatcattaggacaccctccttccagaataacgggtcggaaaaattgcactcggcaacttttcacaatctatttttaacttttgatttagataattactgcttcttctacaacttctaataaacggaaatgtttagttgcagacaatggacgagtttcggaaatacgaactacatcgccagtttttgcaatgttattttcatcatgcgctttgaattttttagaatacttcacgcgtttaccgtacaaaccatgtttcttgtacgtttcaacaaccacggtaattgttttatccattttatcggatacaacacgaccagtataaactttacgttggttacggtcagccatgtattaaaacctccttacgattcttttttaagcaagttctctttctcgaacgattgttttcatacgggcaattgctttacgaacctcacgaatacgtgcggtgttttctaattgaccagtagctaattgaaagcgcaggttgaagagctcttctttcaaagctttttcttgatcttggatttcggtagtggataaatcacggatatcattagctttcatttgcttcaccaccaatttcttcacgtttaacgatcttagttttgaccggcagtttgtgtgctgctagacgtaatgcttcacgcgctacatcttcaggaacacctgcgatttcaaacataattttgccgcgtttgactgggcttacccaaccttccggagcacctttacctttacccatccgaaccccgattggtttagaagtgtaagatttatgagggaaaattttaatccaaactttaccgccacgtttcatgtaacgagtcattgcgatacgagctgcttcgatttgacggtttgtaatccaagaagcttcaactgcttgaagaccatattcaccaaatgcaacttcagttccgcctttcgcgcgtccacgcatgtttccgcggaattcacgacggtattttacacgtttaggaactaacattattattttcctccttccacattgtttttcttcgtaggaaggacttcaccacggtagatccagactttaacgcctagtttaccataagttgtgtcagcttcttcccatgcgtagtcgatgtcggcacgcaatgtatgaagaggtactgttccttcgctatagtgttcagcacgagcgatatccgctccgccaagacgaccagatacttgagttttgataccttttgctccagcacgcatagtacgttggatagcttgtttttgcgcacgacggaaagatacacgaccttccaattgacgagcgatgttttcagcaaccaattttgcgtctaggtcagcacgtttgatttctacgatattgatatgaacacgtttttgagtaagttcgtttaagtttttgcgtaatgcttcaacttcagaaccacctttaccgataaccataccaggtttagcagtatgaatagtgatattcacacggttagctgcacgttcgatttctacgcgagaaacagaagcgtcagataaacgttttgcaacataatcacggatgcgtaaatcttcatgtaagaagtccgcataatctttttccgcgtaccatttggagtcccaatcacggatgacaccgatacgcatacctattggatgtactttttgacccacgaattatccctccttcacttcagataccacaactgtaatgtggctagtacgtttgttgattgcacttgcacgaccttgtgcacgtggacggaaacgtttaagtgttggaccttcgtcaacaaatgcttcctctactacaaggttgttaatgtctaaatcatagttatgctctgcgttagcaatagcggattttaatactttttcaataattggggaagctgatcttggagtatacttcaagattgcaattgcttcgccaacttgcttgcctcgaattaaatcaatgacgattctagctttgcgaggagcaatacgaaccgttttggcaacggcttttgcgcttgtaacttcacttgccattaggatatcctcctctcaaattagcgtttagtttttttatcgtcgcccgcatgaccgcggtacgtacgagttggtgcgaattcgcccagtttgtgtcctaccatatcttcttgaacataaacaggaacgtgtttacgtccatcatatactgcgattgtttgtccaacaaaagttgggaaaatcgtggagcgacgagaccaagttttaattacttgtttcttttcgctttctgctgctgcttccactttcttcatcaagtggtcatcaacaaaaggtccttttttcaaactacgacccatgacggaacctcccttcgcatagtcaggaagctgagaacgcttgtcctcgctatcctgctaccaattttattcaatctattaatccgattattttttcttacgacgacgtacgataaatttatcggagttgttgtttttcttacgtgttttgtatccaagagttggtttaccccatggagacattggcgatttacgaccgattggagctttaccttcaccaccaccgtgtgggtgatcgttcgggttcattacagatccacgaacagttgggcgtttacccatccaacgtgaacgacctgctttaccgatgttgataagttcgtgttgttcgttaccaacttgaccgattgtagcacggcaagtagcaaggatcatgcgaacttcaccggagtttaagcggattaatacgtatttgccttctttaccaagtacttgagcacttgttccagcagaacgtactaattgtccacctttaccaggtttcatttcgatattgtggataacagtacccactggaatatcttttaattctagtgcattaccgactttaatgtcagcttctgctcctgaataaattgtttgacctacttcaaggcctttcgctgcgatgatgtagcgtttttctccatcagcatagttgattagagcaatattagcagaacggtttggatcgtactcgatcgttgcaacgcgtccaggaataccatctttgttacgtttgaaatcaatcacgcggtattggcgtttatggccaccgccgtgatgacgaacagttaacttaccttggttattgcgtccggctttctttttaagaggacgtagtaaagatttttctggagtacttgtagtaatctcagcgaaatctgaacttgtcatatgccggcgcccgttagtggtaggtttatactttttgatcgccattgtttcccctcctcgttagaattatttaaagttagtcgaattatacttcaaagaattgaatttctttgctgtcagctgtaacagtaacaatcgctttacgacgtttgttagtgtaacctgcataacggcccatacgtttaagtttgcctttgtaattcattacgtttactttagcaactttcacgtcgaaaatttcttcaattgcgtattttacttgcgttttagttgcgcgagtatctacttcaaatgtatatttcttatcgtcgagaatgcttgtagattcttcagttacaactgggcgcttaatgatgtcgcgtgcatccattatgcgagcacctcctctactttttcgacagctgctttagtgataattaacttatcatgtttagcaacttctagtactgagatactttcagctggaataactgtaatgccttgtaagttgcgtgcagataattctacattttcactttcaccagcaactacgattagtgccttagtatctacagagatatttttaagaaaagccgcaaattcttttgttttaggtgcatcgaaagtcaaaccttcaagtacaactaatttttcttcatttactttagaagaaagaatcgatttaatcgctaaacgacgaactttcttaggtaatttgtaagcatatgaacgaggtgttgggccgaatacgacaccaccgccgcgccattgtggggaacggattgaaccttgacgggcacgacctgtacctttttgacgccatggtttacgtccgccaccacgtacttctgaacgatttttcactttatgagtcccttgacgtagggatgcacgttggctcaaaattacgtcaacaacaactttttcatttggttcgataccgaaaacagtgtcgtttaaagtaatttcgccagcgtttgttccatcttgtttaagtaagcttaattttggcattcgttagtcctcctttccaaatgaattattttgctttagtagcagttttaatttgaactaatgcttttttagcgcctggaacgttaccttttactaaaagaacgttcttttcaacgtctactttaacgatttctaggttttggatagtgatttgttctccacccatacgacctggaagtagtttatttttgaaaacacggttaggtgctactggacccattgaacctgggcgacgatggtaacgggaaccgtgggccatagggccgcgtgattgtccgtggcgtttaataacaccttggaatcctttacctttcgatacgcctgtcgcgtcgatgatgtcaccttctgcgaatacgtctacttttacttctgcaccaatctcatactcgtctaagtttacatcgcggaattcgcgaatgaagcgcttaggagtagtatcggcttttgctacatgaccttgttcgggtttgtttgacaattttgctctcttatcttcgaaaccgatttgtacagcttcatagccgtcagtttcaacagttttcttttgaagtaccacgttttgtgctgcttcgattactgttactggaataagttcgccgttttcagtgaaaacttgtgtcatccctacttttctacctaagattcctttggtcatgagtcacacctcctgttaatttaatatattcttattatagtttgatttcgatgtccacaccgcttggcaagtctaaacgcatcaagctatcaactgtttgtggtgttggattaacgatgtcgattaaacgtttgtgtgtacgcatttcgaattgctcacgagaatctttatatttgtggaccgcacgcaagactgtgtagatagacttctctgttggaagtggaatcggaccagatacggaagcacctgagcgtttcgctgtttctacgatcttttctgctgattgatccaaaatacggtgatcatacgcttttaaacgaatacgaattttttgttttgccattactttccctccttttcgcctactttcaaagtagacattctccgtgaaaattacctgaacatccgccatggcaaagcggccgggtgtgtcagcaacctttcacttcatcacatgggcattcccggcaataccggggtgctcgttgtcaaaagggcagaccaatgcctgtccatttgcactttatctattatacacgggttaggggtagtaatcaaccgctttttgaaaaaagttttaagttattttcatagaagctattatatagaagaatctcggtttaatatctggcaagaaacgcttcatagcagcaatctatagtttttaaataaaataaaaaaacatccgatgattcgaatgtttttaagaagtacgaagcaatataagtccggctgttagaagcaacatgacacctagcgcaacaagatcgccaaagtgccagtgaagtatccggaaacgagttcgtccttccccgccctgataacctctagcttccattgcgtcggctagctcttcggcccggttaaaggaactaacgaaaagcggaataaaaatcggaacaaccactttcatttgttcgaataagtttccttcaccaaaatcaactccacgcgcgcgctgagctttcataattttatccgtttcacccataagtgtcggaataaaacgtagcgcaacggagatcattaaggcgatgtcgttaacaggtactttgagcactgcaaaaggacgaaggatatacgcaattgcatctgttaagttcatcggggtagttgttaaagtaatgactgtcgacataataataattaatacaaagcgtaaaaacacaaaaacaccattcaaaagaccgaaagacgaaattgtaaaaggaccccagtcaaaataaattgttccaccactcgcgaacaggatttgcatcacaacggtgaataagattaaccaaataagcggtttaactccctttatgaacactttcaactttatccccgtcatttgaacaatcattagtgtgaataagaccattaaagcgtatgtccaccaattattcgctaaaaataaaattccaatgtaataaaacccagctagcaatttcgttctcgcgtcaagcccgtgaattaaggactcccctggaacaaaacgacctaatatcagtttttctatcattcaaagaagcccccttcactcacgtcaattgttgaattacaacgctaaccgccattaagattgttaaagtcgcattaatcagcacaaaattacgtataccaataacaaatgtttttgatttcacttgctctttattaaatttaaccaaattacgatagaccggataaacagccagtaccgacactagcatgattgggtgcaagaaatgaataaacaccgaaacaaccactgctaaaaacgacgcatagtacagtgcattaaaaagaagaactcccatttttctacctatataataaggaagtgtataacgatgatttctaatatcctcatctaaatcgcacaaattattggctagcataatattcgctatcgtgaaaatacatggtaaggataccacacctatccggatgatttctattagattgaactggatggttaccatttctccttgccaaagtaaattcgcaattccggcatcgtacgcatttacataaacagctaagaagaaaatcccgaatcccatcgtaacccctgaaaaaatctctccaagcggcatacgcgaaagtggcacaggaccaaatgtatacaagataccaatacagaaacatacaaatccaattaatagcactagcaaatcagtgcggaaaacaagccaaacacctaaaccagttgcaatgaaaaacatcagaaaaatagtaataataactgttcgttctggaatttgttgttgcccgataacgttgcttgttgtcctgtagtcgtagtcatgattatctgtggctttacggtaatccatataattattaattgcggtagttgttaaatcaaaaattagcatagagccaaaaaatatcaacgtattaataggcttaaacatatcatattgatacacaacaaatagcacccctaacataaacggaaatacgctagctatcttcgtctggatttcaaccaacttcaggaatgatgatattgacataacccctttttaacccctctctaccttattatgagcagatctcggttagaagtctgctcactttcttctatatataatggtttattttttcaaagtgtccatttggaaatttttatctgttaattcaaattgcccttttaggccggatgtttcgtatacttttttctctttactaataaagatagcgtctacacctttaaactgctcaatgtaatccattccgcctttaattcctttgcagaaagtagctgttgacaagccatcgccatcaatagattttttagatacgatagacacgccagcaatatcattatcaaacgggtaccctgttttcgggtctaaaatgtgatgatatgtttttccgtccacttctaggtaacgttcataaatgcccgaagttacaatcgacatatcagattctggaagcttcccaatcacactaccacgcggagaaaacggatcttgtattccaacattccatttattgccattaggatttttcccttgaacataaatatttccgcccaaatcaattatggaagtagttactttgttatctttgaacacttttaatgtttcgtcagtgatgaacccttttgcaattgctcctaaatcaagctccatgccttctttttccaagtagacagtttggtcttcgtcgttcatttttacgtctttataattaattaatggtaaaactgcatcgatttctgcttgcgaaggtttgcgcgcatcagaaaaaccgatatgccataaagaagtaagtggtccaatggtaatgtcaaagctaccaccagagttttccgagtatttcagtccttcttggattaaatagtagacatctttagaaacttttactggtttttttccagcttgttcgtttattttgtcaacttccgatgttttttctgcatcgcttgtagtaattttagctgctaaatctttaatgcgatcgaaacctttgtctagaacgtcttctttgcctttgtcatagattttaagtgtgactactgttcccattaggaaatcagttttagagtaaggctgttccaaaagtgttttagaatcacttggttctttttttgaatcgttattagaatttccgcatgccgacacaacaagtgccaatacgataactgaaagtattattttccatttcttcattagctttttcacctttctaatccgtgatctttacttgaataactatagcgtaaaaaaaggaataaatctacagtaaaaaggcttaattcctctgttttgcgataaaaaaatcggctagccccagaattagggccagccgctttgtgcttttcattgtactaattattcagcttctactaggttgtacactttgatagtgtcagtgttcccattttgtgcagcattttgaagttgagctgcgtagattttgaattggttagaagagttagtagcaccagaaactgtgtctactgcagcaacatcttgtttctctactagagatttattaagtgctgggatgtattcttttggaccagtaccagatttagctttcatgtttttctcatagtcagcgtcgtctgatttaagtttaccgtctttgtcaacatagttgtaatcagatttagtgattttgccatctttaacgtccatgctgaatactacacggtaaccatgtgcgtagttttgttcttctaatttataagttccatcttccattttagctaggttgttgatggaaattgtagttgtatcagctttttgagctgcttgaattaattggtttgcgtagttgatgaaagcgtcagaggaatgagttgctcctgaaactacttctacagatgatgcagattgtcctttaacaagggaatcgcttaattgtttcaagtattcttgaggaccagttcctactttgtctttcattgctttttcgtagtctgcatcttcagatttaagtttgccgtctttgtttttgtaatcgtagttagctttagtgattttaccatctttaacttcgattgacatgaaacctttccagcctttgtcgtcgaaattcttttcttctaatttgtaagtaccatcagtcatagtaccatctgttttagctgttttctttgtttctgtttgttttgtgtctgtgctcttcttatctttgctgctgtcgtcgctactaccgcaacctactagtaataaacttgaagccattactacggtaatacccattgctacttttttcaatttcatatttgctcccaccttttgttttattaaaaccttgtttgtgataacgtgaacacaaacggatagtctgcgaaagcgatatcacttttacaatacaaatgataccatcagcgtgcgcttttgtctactgtaattctaaagacataattcatctaattttcaaaataatgactattgatacataaaacttgggtaaaaccatcattttctagcaaaatagcatacaaaaatgtctaacaacctagataaaacaaggacttttagcctgctcaaatatataaattttgtataaagtcctatttttcgggttttagattagaattgttctttactatctagacattagtaggaggtttctgttaaactatgataggttataataatactgtggggaattttggactcattttatttttgtgaataaacttacaaggagttgaggaagcatatgcctgaaaagaatatcgttttaattggggcaggatatgcaggtgtacacgctgctaagaaattagctaagaaatacaagaaagacaaagacgtcaacattacattaatcgatcgtcattcgtaccacacaatgatgactgaacttcatgaggttgctggtggtcgtgttgaaccaactgcaattcaatatgatttacgtcgtttgtttaatagaacaaaagttaatcttgtaactgacaacgtgacacatgtagatcacgataagaaagttgtaacaacagaacacggaagctatccgttcgattacctagtacttggtatgggcggcgaacctaatgatttcgggactcctggtgttggcgaaaacggctttacactttggtcttgggaagattctgttaaattacgcaatcatattgaagaaacagtaactaaagcatctcgcgaacaagacgttgaaaaacgtaaagcaatgttaacattcgttgtttgtggatctggatttactggtatcgaaatggttggggaacttttagaatggaaagatcgtctagctaaagataacaaaattgacgcatctgaaattaaactagttgtagtagaagctgctccaacaatcctaaacatgcttgaaagaagagacgctgacaaagcagaacgttacatggttaaaaaaggtattgaaatcatgaaaaacgctgcaattgttgaagttaaacctgaaagcatcgttcttaaatctggcgaagagcttccaacaagtacattaatttggactgctggtgttcgtgctaactctgatacaaaagattatggcatggaatctgctcgtgcaggacgtttgaaagtaaatcaatatatggaagcagaaggtcttaaagacgtttatgttgttggtgaccttgcttactttgaagatgaagatggcaagccaactccacaaatcgttgaaggtgctgaacaaactgcattaactgcagcgaaaagcatcatcgttgaaatgagtggtactggcgaaaaagaaccattccaaggtaaatatcatggtgtcatggtatctatcggggctaaatacggtgttgctcaccttggtggcatgcatctatctggttggttcgctattttaatgaaacatatggttaacctttattacttctttggtattcgcagtggttattacatgtggcaatatattatgcacgaattcttccacattaaagatcaccgtaatatcttccgtggttggacttctcgttacggtaacgtactttgggttcttcctttacgtgtatatctaggttggttctggattgacgaagctctttctaaaatctacggtgaaactacatgggataaagtaagtattactaacttaaaacctctatttaatggtattggttctgattcttggttaacagcaactagttcaaaaatgccttttgaatggttacaaactgctgcaacatctggcgctagtcaagctgccggtgatgctgctggtgccgctgcgacaaacgtaactacaccaattcttagccatatgcctggttggtttgaatggattatgaaacttcttatgccaaaccttgacgttgctctagtaatgcaaaaagttgtaccttttgttgaacttgcaattggtcttgctatggtagttggtctattcacttggcttgtaagtatcggaagtgctggattcctagtaatgttcactctaagcgctatgcttggttgggacaaattctgggcgttaccagcttctatcgcacttctaaatggcgctggacgtacatttggtcttgattattgggctgttccttggttccaaaaacatcttggtcactggtggtacggtaagccgaggtccgtttacagagacaagtaaattagctagttaaaattttaaattaaaaatcgggagtgcatccaaaagccagttttggcataggaggtgcttccgtttttattatttgtttatttttatgaactttttcctattatatttaggcgttatcctttaaaataggatttgtacatgacatttggaaaggaggcaatgcggtgaaaaagtacttttatatggtgaaacgctgggatattataattattttatctctttgcatactttcctttttgccgattgctattttttcatatgtaaaagcgaatgaacctgctccagctaatggaaaaaaagagcttgtcgcagttatttcggttgatagtaaggaatataaaaccgttacgcttactgggcataaagggactgaaagctttgatgtgaaacaacctgatggacatactaacacgattgaggtttcgggagaagaaattcgaatcagtaaagctaattgcaacgatcaggtttgcgttcgaactggggcaattgataaacaaggtgatacagtcgtttgtcttccacataagttagtgattgaagtaaaagcgagtgacgggagttcaggtgatgcagatgatccaattatctcttcctgaccttatcctctaatagataggaaagtgtttttatgacaaaaaacagacgattagtatatatagcgctactggctgcacaagctgttgttattagtttacttgagagagccattccgtttccatttgcgtttgctcctggagcgaaactcggtcttgctaatattattacttgtatttcgctttatacgttatcggcaaaagatacatttatgattatctgcattagattggtgttgtccactttgcttggtgggactatttcaacatttatgtatagtgcggcgggagctatcttgagttttcttgggatgtggcttgtacaacaacttggaccgaaacgcgtgagcatcattggcgttagtgttaccggtgggattttacataacgtcggacaactcgttattgcaagttggattgcggggacttggtcggttatgctctatttacctgtattatcttttatcggtattctttctggaatcgcggttgggattgcggcaaactacttgctgaaaaatgtccaaactttgcggatgttcgctgatgctaaacaaagtcaagcagcacaaaaataattttaaaaaaaggagttcaatatgcaacttcatgctatgtgggatgattatcctgcactttccaaagatttacaagaagtattacaaacaattgaaagcaacattcaaattcgcgataaacatgtagagaaaaacgtgaaagatttaattcatgctggtggaaaattactccgccctgcttttgcgctgttatctgctcaagctggacctgagtttgataaagaacgcgcggtttctatcgcagctgctcttgaagtgctccatatggcgacgttgattcatgatgatgtcgttgatgattcaccattacgtcgcggcatccctactatccattcaaaatatggtcgtaattatgccgtttatacaggggattatttattctgtatttgttttaagattctttccgcacatgcttcttccgttgaaaatatcgaatttaacagtaaaaatatcgaaaaaatcttaatgggtgaactggatcaaatgcgcacaagttataaaatggatgtaacagttcgcgaatatttatcgcgtatttctggcaaaacagctcaactatttgctcttagttgttactctggtgcaacgggcagtaaagcaccacgcatgactgtagcgaaatgttataatatcggccattatcttggtatggctttccaaattattgatgacgtcttggattatacaagtactgatgaaggtcttggtaaacctgttttaaatgatatgaaacaaggtatttattcgctaccgctaatttatgcaatgaaaggtcacttggctgaatttgagccgcttctttctcaaaaactagatatgactgatgatgcttctgaacaagttttagcacttatttctaaatataagggtgtcgaacaggcattcaaacttgcaagtaaatatacgaataaagcccttcgtgaaattaaaaaactaccagctggcgcgtatcgtgatgatatgtaccgcttaacgaaaagcatattagatagagatatttaatacatttagaacattgctctttgcttaccgagttttgttctaaattttacctcaatttgtgaaaatacaaacatgaaagcgtgatttaacgtgattcgattttttaaaatagtgacacctattcttttatctttttccttagttgcctgtagttctgcaagtgaagaaacaaaaaaaattactgctccgattgaaaaagaccgtgatttatcaataattgaaacgaccgatgttcattattttgccccatcactcactgatggcgggcaggcattccaaaaatatctagccgctggtgatggaaagcaattggcatatagcgatgaaataaccaatgctttcttagcagatgttgagactaaaaaggctgacgttttaattattagcggtgatttgactaataatggcgaaaaaactagccatgaagaattagctaaaaaactagcgcaagtagaaaaaacaggcacccaagtattcgttgttcccggtaatcacgatataaataatccatgggctcgaaaattcgagaaagacaaacaactaccgaccgatactgtatcaccagcagattttagcaaaatttataatcattttggttacgaagatgctatttctgaagatgatttttcgctaagctatttagcagcaccttcatccaaggtttggctcctcatgcttgatacagctatttataaaaccaatatgcagcaaggctccccaacgacagaaggcggtttaacagctggcacgttagattggattaaagaatgtagcgccttagcgaaaaaaaatggcgtgacgcttgttccagttatgcaccacaatttaactgatcataatgatgttattcaaaagggttacacaatcaattacaatcaacaagtaatcgatgctctgacagctggcaatatgaatttttctttgagtgggcatatccacacccaaaacattcgatctgccaaaagttcagacggcaaagaaattactgatattgtaacaaatgctctttccgtctatccacataaatacgggaaccttacctatagcgcaaaaaacaaaacattcacctaccaatctcaaaaattagatatagaagcttgggcaaaagaaactggaacatcagacaaaaatctgcttaactttgatgcatacgattatgagactttttataatagtggttatgataaagctatgatggacttaatgacgagtgaatcttataaaaactatagtcaaactgataaagaaaaaatggccgataccatggctttaaataacatggctttctttgcaggcatcgctccacctaaatctgctggaatggatttatgggatagtgctcctaattcatttttaaaagattatgttttaagtagttctgttcctccaaaacaaagtaatgattattatgttagtccttaaaataataaaaacctggaagcatacttattctgcttccaggtttttttattaacttgatgccgcggccgcacttgctgctgcggctgcactcattgcggctgcttgttccatcgcaattaaaatatgcacattaaccattaatccttctaattgttctttgctcatttgacccgattgtttttctgtataaagactgattgccagtgctgttacaaactcgcgaccaaaccgcagacccggttgattttgcaagtcatcaattaagttcaccaagccagagtcaattttgcgcccatccatcacaaatgctaaaattccgatacttgagtaatgtaatggcttgattttcacacctttttgacgtaattcttctaccacattatctactcttctaataaatttgctgtctttttcaccatataaaagtgttcctgttgtagctaaaaactgcaagctatcattttttcggaacccttttgcggcaaattcttggaaatagtattctgtgacttcagctaatttttctacattctcttctttaagattagctaagaaaacagctgttgttacgtcctcacttttggttaaaaatgggtggtcttttttgaaaagttggtgaatggttttggctttttttgctgttagtgttggattttctgattctagtaataggtaagcggcgaaataggtgtattctgtgcgtttaaagccggcttcgatgagtgtgttgtaattggaaatcacttgacctacactatcccgtttcccgttatcacttgccatcagtaagccgacaagcgatgcgcgaacattaccatttaacgctgtaaacatacctagttgtcgtttaaattctttatttatttcatagaatttttctggttgaacgatttcattatttcccgcaaaaaggcgagcaatcagaaatcgaatccgcttatcaataaaactaacgccacttgtttttactaactcgtagttcttcattaataatttcgttgcttgttcgctatcaaatacatatgctgaatccatcggccgcactccttcttgtttttgaattaatattcctctctgtacaaactcaaaataaactcttcaaaattatcagctagcttaagtattttataatcaccttcttgatcaatatgaacgactgcgggctcgcctgtttttccgcaatttcggtaatctaagaaaaccatgtcatgtccggctgatgggcaatcagcaatagctaaaccaacatcgggataaccccactcttctgtccaaaaatttgtgttgtgcataccattcaatgtagatactccacagtctcctattcccataatgccagtaatagctacacaattctccgaccatgaacttggctctgtcgtagggacagaacccgttgaaactatgcctccattttgtgtatgacgcattaaatagatataggatttaggtaacttatatcctagttctgcttcgattgcagccactctttgcggcgtagggtacacatctttatagtcattttcagagtcaaacttcaaccaaagctctgctaaactatgcccttggaaaaatgtcccgacctcactaaaatattcatctaactcggcgaaaatttgcttagctttttcacgttcgaaatcgactgcttctaaatcttgcatctcttctaaaatcgacatgagcttttgatagatttctggaaaacgttcaccgctttggtagagcacatcgctaagtaataccgttgctgtaaatatatctcttttattttcggctgtcactttttgattccaacaagtttcaagtaaatgaatcgcttcttttgtttttcctttatctaaataatataatgcttttcttgttgtaagcatattattcctccactaatcttattaactttattatactaaaaaatccctagggaaacaaaaaccctagggacgctatttttataaattcattccaagtaacggaattcgttcattgtatttatcaacaagtgcttggttgtgctcatcggcattttcgacattaccacttataaatactggtggtgtgaagttatcattcaccattttttcaatcgcttcggcaaaaatggactgcaagatgacagcgccagttaccgtggaagtcggcgcgaatgctatgtcaaagttagctgattttaatactgcatctcctttaacagcgccgttatcaattacaatgtcacctgtatcggataaacgtttaccagatgtgtggcgtgatttttggctagctgaatattgtaatgaagtaataacgatgacaaatgcgcctttttcacgggcaatttcagcaacatctattgggacaggattgcggccagatgtggataatacaatcatcacatcacccgagcgaatatcttcctctgccataaacgttttcgcataatcattttttcgctccagtacggatgacgccgcagcaccttcgtgaagcataagtggttcgtgtaaaatcggatgaatcgcagcaagcccaccagctcggtaaaatacttcttctgttaaaatatgcgagtgaccgcagccaaataaatggatcacaccgtcgttttcgatggactcggctaccttcgctcctgcttcttttacataatcagcttcattatcaagaatattttctaataagcgaatcgtaatatcgatatagttattaatcatttatttcccctccaaagctgcaaaaattttctcgatttcttctggtttagtgcgacctgtagctttatcaattgtttttccaaagatatgtggcatgaaaaacggaatgccggtcgtcttgatggcagttgttatttcaaggatattctcggcgccaatccctcctgctggctcaatgccgtatatccctttttccgctgcaacttttgttaaataaacaagttcgtctaaatactttgttccttcgatgctcataaatttgattgacggaatatttgcggatagacaataatcgacagcttcttcagcggtaatttcgtcgccggaagatagtttgacaataccgacttttccggttggtcgaacgagtgcattggtgtatgtttctggaagcaagtcatttgttaatcccgctgtttcgattggctgattaatatgactgtttggggcaaggcgagcaatatgaagcacatcacgccagttttgccagtctccaccgccaccaagaccaacactgatgactggggctgttgtttgtaattctttcaccacatttgcggcttcttctgctgtttcatagttcgttgcaacgattcctggtactgcaaaaccgcgcgatgcttccatgacttccaagctattttctttatctttcgctaaaaaattaaatagcgcaaaattattccatttcggtagattttcgaattttttcttgttcaagctttatcaactccacacatgtttttaacgttttttcgatcaagtattcgcctttttctgctgttgccaaagttgcttctcctaaaactgctgtcttggtgaaattttgccacggtgttggtgtgaaatccgcatcaattggtaaaatgggcgggtcatcaatagcacgactcatatccgcattttccggtgataagtagagcatgagggatgtttcgatttcacaagcatgaatataggtatgatggtttgcttttccttcgcgcacgtccattgcaagtttttggatatttgggtaaaaaatgtgcaagacgatcatatccggaaatttcgcatatagttcgcgcgctgcatcttttagcgccgccatatttccaagatgtccgctcactgggacaaacaggcgaaatccttgtttatatagactttcaccgatttctacaactactttcgttaccgtttcatttgatagcgttaaacttcccgggaaatcttgcaaactccaaacttggccatagggtaatacgggaagcacaaatccatctgtttccgccgctatttttgctgaatattctgacgctaaaatattgtctgtccctagcggcaaatgcggtccgtgggcttcaactgctcctattggcaaaaggactggttttgttttcgtgatttttgcgccaatatcaaaagaattttcatctgcatataacacagatttcgcctcctattttttaaaagtaaaacatcttgccgggttatccacgaagaattttttaactaatttttctccgtcaaagcctttttcgttagcttcgtcaataaagcgtggcacccattttttggcaatatattcaagtcctggtccgtggccgtaatgtttataataagttttgcgcgctgtatcaccactgactaaaatttgatcttcaaagccttccgaaactagatatagaatcgctgcaatccgagcgctttctggtgcatatttgatttttgcgatgccatcaaacgacatgaatgcgcctgttttggcaacttgcttgtgataatacgggtctaggttgcgatccatatgcccaatagagagatattctaacgggatattttcttgttttaaaatctcaatttgctctaaagccatcgttcccgcttctgtgtgagaatgtattggtgcttttgtctcgtgatgtgctcttgcaaccgcgcgtatcgtcttttcttctaaaggtgtaatcatattgtagccagttccaaatttcacctgaccggccttatacggcgttccttcaagcccattttcgacttcatttacaacgaattccgttagtttgtctatagaagtgttttcaatccattcataatatgtttcaaaatcgcctatgatcggcttcagttctggtttaatttttccgtcccataaaaaacttttgttaaagccagctgttccgacgatttgaatgcctgtttctttggaaatttgtgccacatctaagacgcgtctgccataatcaaccgcggttgcatcgacaattgtttttccgcctaaatccgcgaaatcttgtacatcaagttgtgatttttctttatcatccaaaagtaaatcgtcggcatctcgctcttgccagtaagccggtacacaaacgatgtgctcgtgagaataagtaaatcccagttgttcaggggcaatatctccataaaaagtacgaataaaactcattttttaaaacttcctttcaaaaaacctcttcctcttgaatgctagacaaggaagaggttttgatttttacttaaaagaataacttcgctagcatgctgacaattgggccgaggataaacatatctgagtcggctgcccacattgctgtatctggtacagtcgtattaataaagaacgtaaccatgatatattgaccccaggcgacaactgttgccgttaggaatccacctatcaatgctcctctcacaccaccagttgagttaccgaatacaccagcaactgccccgtggaagaagagaacgatcattgttggcacaaacacgtaaccaactgtatttccaagtactactaaccagataatcgctccaatgaacgcacccacgaaaccgataattacggagtttggcgcatatggataaacgattggcgcatccagtgcaggtttcgcacctggtacaagttttgttgcaataccattgaaggccggtacgatttcaccgataaacatccgcacacctacaagaacgatggcgataccagctgcaaacgtaaaggactgaacgatggagtatacgataaagctttgatttccagcttctgcgattaatttttctgctcctggtgttttcttcaccatcagaatcactgcaccaactacgaacagaatccccattgtaagagctgtaataacgttagaatcacgtaggaactctaattttttcggtaaattaatatgttctgcatcatttttcttatttccaaatacttttcctagtaaagccgatagaatcgctacactggaagaagtgtgccctaatgcaacgttatcatttccagtaattttacgtaggaatggttgtgtaatcgctggttgtaatgtccagtaaagacccatgattaccgctaagaagagtacaaggccccagaatggaatatctccaccgacagcttgaacagtaatcccagcaaaaatcgttgttgtccagaacatcatatgaccagttaaataaatatacttaaatggtgtaaatcttgctaataatacgttgactaaaaatccgagtgtcatcgcaagcgttaccgcactaccaaatttagcattaaaggcttcttgtcctaaaaaccctgcaagtggcggtgtttcaagtccgaatacttctttccacattggttcaaaaatcccaagggaaccagtaataacagccgcaccagcgttaataattaagaatccgataattgctttgaacgttccgctaataacttggcttaaatttttcttctgtaaaagtaacccgagaagtacgataaaacctaaaagtatggctggggttccaaaaaagttattggcaatccacgtaataatctccatttttttcccacctttttttgtcttatttaactattgattgcttcagataatgccgttttaatttctgcattgtcaaaatagttgttgacgataactactttggcgcttgtatctgttccaagtgtttctgctaattcttgacttgttacaataatatccacattcatcgagcgcgcagctgatacatcaatatgctctacgtctgcgtccactcccatgtcgcgtaaaactgtttctacattcattcttaaaattaggcttgttccttgaccaagtccacacactgctaaaattttcatcgttatccctccactaattctccaattgcttgataatcttctgaatgaatcattttttcaatgttatcgctgttactaagcaaggagacaattttttgaatgacttttaaatgtgcctcacttgaagttgctgcaagtccgaatactaatcgtacgggatcatttgcggcgtgtccgaaattcacgccatcttttagtacgacaagcgatactgcagagttttcaacaccatcagttggtcttgcatgaggaattgctatttgaggtgcaatgacaaagtacgcaccattttcgtgataagattccaccattttttctacgtactgttcgctcacataacctgcatttactaataattctcctgcttgcatgatagcttcatcagcatttttagctgatccgtgcagattcacaagctctttatccaaaaaagacatatctcttcatcccttctaactaattgatagcgctatcaataacttacactcttattatagctgtagcctctctgtttaaaaaagcccaattcctttcttttcgaaagtgcaaagaatagactgttacatttcgttgttagcgagcgtacaaaaaagccagcgcggcatcttactgcctcactggctttatcgcttattttattgttaacattgcggcaatttctgctgctgattcggcttgttcaatctgctcaagtaagtgatgtttcataattaaattagtaagctggcttagcgcattaatatgtgtataggagtcaatggaagcgagcacaataattaacttcacttgatccttcgctttacttgaaaatgatactggctgatttaagcgcagtaagctcattccgactcgatatgcgccgtcatccaccgacgcgtgtggcagtgctatccctggtgcaataacgatatatggtcctagcttttcaatgttttcaatcatagcttgttgatagtttcctgatatatagccttcttgttgtagtggttttgacgcaactcggatagcttcatgccaatccgccacactatctttaaaaataattcgttcttttggcaacagttcttcaagtgttggcgatttttctagttggctgtccgattgcacttggaacaataccgacttcagcttggccgccaatttttcgcggtcttccactttggcatattgatccactacatcaagcacagaagacaacatgcgcgcatccgaatccttttgcaaaacgtgcggggcaatcgccttcatcagttgttgcttctgcgcctcagtcaaaatcggactaacgatgaaaactggtgctttcggttccataattggcaaagtcgacacaataaagtctggcgcgtataaccctttttcaaattcacggatggaaattggttctaatatttcaacacgttcaccgagtaattgtgcaagttgccgctcaatcatccgcgacgttcctacccctttcgagcaaacaattaaaagtttcttccgttcaactaaagtattgtttttgcgagaaagataaccgccgaacaaaatcgttacgtacgctatctcatcttcggggattttttcaccgagtaaatcttctagtggttctaatgatttttttgtaatctcatacacgtcactataactttgcttaatatctgttcgcagcggattaatccattcaatttggaatttaagccgataatatgctggttgtaaatggagcaataaatctttttttaaactacgatggtcttcaaaattcacacaagcaaggcgctcaaattcggcaataattttctcaacaattatatccagctttccttcaacagctgcatcatcattcaagcgactagcgccaagtaaaagtttgcctaaataagtaatttccgcatgattgatcttaaaatgctctttttgctgtaattgctcgtaaatttcctgagcaatattaaaagattctacttcatgttcttcgtgctcatttaaataacaatcgcgtttcattcgttctttaaagaagaaaatcataattccgattcgttcaatgacctcgtctgtataacgaataccgatttttttctctgtcactgctaatatttcaaaaattgtatctaaatgtgggaaaagttctttatttttaatcattggatttattttcattaaatcgagtaactggtctgccgtggctatttcttcgttattcatacaataatgaatgaaaaactgacgaatactacgttcatcaccaagaaccatattcccatttttccggtcataagcgagctctaagttaaactgtttgagcgctaattttaactgtttaatatcctgtaaactagtgttacgactaacttcattgcacgcattaattgtatcaataattacacgcgcatctgttacaagcagaaaaaataaaatacggatacgacgctcacttgctgaaaagactttgtggctcgcttccctatttccaagaatttctttaattgtcgatttttcatcttctaataaataataaccttgtccacgaacggattgaataccatcaagccctatatcatctaattctttattaattttttcaacatcatattgtagtgttcgtttggaaatgcctagttcttcttgtaatttctcgggtgcaagatatacattcgccacgacgagcgattcgagcagcatcatatttctagcatcaaattgtaccacttggcctacctccttgatttcggtctagaaggtaaaaagatatgtctactttaaggttatgcgaaaatgtgatatttttcaagttaatttttatttcaggcacaaaaaaaccgacaaagccaaatgactttgtcggtttgaatcgtatcagatattatttgctgatgttagaaacaacgccagcgcctactgtacgtccgccttcacggatagagaatttagtaccgtcttcgatagcgattggtgcaattagttcaactgcaagctcaatgttatcaccaggcattaccatttcagtaccttctggaagtgtaacaataccagttacgtcagtagtacggaaatagaattgtgggcggtagttgttgaagaatggagtgtgacgtccaccttcttctttagttaaaacataagtttcagctttgaagttagtgtgtggagtaatcgaacctggtttagctaatacttgaccacgttggatatcttcacgagcaacaccacgtagaagtgcgccaatgttgtcgccagcttcagcgtagtctagtaatttacggaacatttctactccagttactactacttttttgctttcttcttcaataccgataacttctacttcgtcaccaactttaacttgtccacgttcaacacgtccagttgcaactgttccacgaccagtgattgagaatacatcctcaactggcatcatgaatggtttgtcagtatcacgttctggagttggaatgtaagaatctacagcttccattaactcgtcaattttagcttcccagtcagcttcaccttgaagtgctttaagagctgaacctttgattacaggaatgtcatcgccagggaattcatattcagttaatagatcacgaatttccatttcaactaattctagtaattcttcatcgtcaaccatgtcacatttgttcatgaatacaacgatgtatggaacaccaacttgacgtgaaagtaagatatgttcacgagtttgtggcattgggccatcagcagcagatactactaagatagctccgtccatttgtgcagcaccagtgatcatgtttttaacgtaatcggcatgtcctgggcagtcaacgtgtgcatagtgacggttgtcagtttggtactcaacgtgagcagtagagattgtgataccacgttctctttcttctggagcaccatcaatttgatcataagcttgtgcatcagcaaagccttttttagcaagtacagttgtaattgcagctgttaaagtagttttaccatggtcaacgtgtccaatagtaccaatgttaacatggggtttagagcggtcaaatttttcttttgccattttaaaatatcctcctcgataattcaataattattttttacttagcttaaatttaaactaagtaatacttctaactaaagttatacttgatgttgcgaaaaaaatcaattaatcttctttgttgtttccaccattagctttaatgatttcttcagcaatagatttaggaacttcttcatagtggtcaaattgcatagtgtatacaccacgaccttgcgtacctgaacgaaggtgagttgcataaccaaacatgtttgcaagtggtacaaatgcgcgaacaacttgagcgttaccgcgagcttccataccatctacacgaccacgacgggaagtaatgttacccatgatatcaccaaggtattcttctgggataacaacctctacagccatcataggctcaaggattacaggatcacatttcttagcagcattacgtaatgccattgaagcagccactttgaaggccatttcattggaatcgacgtcatggtaagatccgtcgtaaagttttgctttgatgtcaatcagtgggtagcctgcaagtacaccattatctagtgcgccttcaagacctgcttgtacagctgggatgtattcacgtggaacaaccccaccaacgattgcattttcaaattcaaatcctttaccttcttcgtttggtccgaattcaatccaaacgtgaccatattgtccacgtccaccggattgacgtacgaatttaccttcaacttgagcagatttacggaatgtttcacgataagaaacttgtggatcaccaacgttagcttcaacgcggaattcacgtttcatacggtcaacaaggatgtcaaggtgaagttcacccataccggagataagagtttggccagtttcttggtcagtttcagcacggaaagttggatcttcttccgctagtttcgcaagagcttgccccattttatcttggtcagctttcgatttaggttcgatagcgacttggataactggttctgggaattccatggattctaagataatttgttctttttcatcacataaagtgtccccagtagttgtatctttaagtcctacggcagcagcgatgtcaccagcgtatacgatcgaaatctcttcacggtgattagcgtgcatttgaaggatacgtccaacacgttcacgtttacctttagtcgagttttgtacatatgaaccggaattcaaagtaccagaataaacacggaagaaagttaagcgtccaacataagggtcagtcataactttgaatgctagggaagagaatggttctgaatcatcagcgtgacgagcagcttcttctccatcaggcaatacgccgttaatagctggaacatctgttggtgctggaaggtaatcaagtactgcatctaacattggttgaacacctttgtttttgaatgctgtaccacaaactacaggatagaactcaacgttaagtgttcctttacggataccagctttaagttcttcttttgtaatttcttcgccttctaggtatttcatcattagctcttcgtcaagttcagcaactgcttccactaatttaccgcggtattcgtctgctaagtctttcagatcagctggaatttctttaatatgagggtcatttcctaaatcatcttcgtaatacaacgcgttcatttcgattaagtcaatgataccttcaaatgtatcttcggccccgattgggagttggattgggtgcgcgttggcagccaaacgttcatgcaaagtacctacagaatataggaagtctgcgccgattttgtccattttgttgacgaatactacacgaggaaccccgtaagtagtagcttgacgccaaactgtttctgtttgtggttctacaccagattgtgcatctagaaccgcaacagcaccatcaagtacacgaagcgaacgttcaacttcaactgtgaagtctacgtgtcctggtgtatcgataatatttactcggtagcctttccattgagctgttgtcgcagcagaagtgatagtaataccacgttcttgctcttgctccatccagtccatttgagaagcaccttcatgggtttcaccaattttgtgaatacgccctgtatagaaaaggatacgttcagtagtggtagttttacccgcatcaatgtgggccatgataccaatattacgagtcttttctaaggagaactctctagccatgttgtatttctccttccataaaacaatttttcaggcaatacgcctggaatttgttagtgatttttttaccaacgatagtgagcgaacgctctgttagcatcagccattttgtgtgtatcttcgcgtttcttaacagaagcaccagtattattggcagcatccatgatttcgcgagcaacacgtacttccattgttttctctccacgaaggcgagcataatttactaaccaacgaagaccaagagtagaacgacggtcagcacgtacttcgataggtacttgatagttagcaccacctacacggcgagctttaacttcaagaagaggcataatgttcttcatagcttgttcaaatacttccatcggatctttaccagtttcttgtgcaatgatatcgaatgcggaatataggatagcttgagactttccacgttttccgtcaaccatcattttattaattaaacgagttactagtttcgaattataaatcggatctggtaacacgtcacgtttagcaacaggacctttacgaggcatcggatatcctcctttcatattttataagtattattttttaggttttttcgtaccgtatttagaacggctttgtcctctattttcaacaccagctgtatcaagcgctccacgaacgatatgataacgtacccctggtaaatcttttacacgtccaccacgaataagaacaacactatgttcttgtaagttgtgaccaataccaggaatgtaagctgttacttcaataccattactcaaacgtacacgggcatatttacgaagcgccgagttaggttttttaggagtcatggtaccaacacgagtacatacgccacgtttttgaggagagttaacgtctgttagttctcttttaaaactgtttaggcccttgttcaaagcaggtgatgtagattttttaattttagattgacgaggtttgcgtactaattggttaattgtaggcatgggataaattcctccttccttatttagtagttccacacatccaggtggttcattttttcggtaaaataaaatggctgtaagttcgacctacaacgctgttttattttcagacctctgtttatagtagaggcaccttgaatatagtaacaccttgaggtttagatgtcaaggtgttacttgaaatttagttaattagcttagtccattcaaacgttgatataaatctttcgcgtagctgtcggtcatgccgcaaatgaagtctgttacgagaagtaatcgcaggtaaagtttcattgtttcgctttcgccttctgcgtttttgcggtaacagcctaggtagttgtcggaaatcaaggttagtaggcgtttatctttggctgtttggcgttccggggtttcgctgtcgtagtaaatcacagctggaatgaacgtttcgagcaatttggagatgatttcgttgccggcgatttcggattcaacgatacctttgtcttggtaaatatacgtgaatgataggctttgtaaaatttgtacgagttgttcggcgctcgaagcatcaatgagcgaatcgttgaatgtgcctgccatgattgcgtcgtagttttcgtaaaacacttcgagtgagcgattgattaattggccgcggacgttcgatgctagccattgttgtacgatgaaactttcttcttgtccttcgtagcgctcgctttttttcttgagttcgttgtagcacgcggcagttactttattatgctcttctacttcttcaaaaccttttaagatttgcgtgatgttgacgatgccttttttcacgccgtcttctaggtcggcatttaggtacgcgatgtcgtctgctacttcaagtaagtaggttagcggatgacggttatcaagcgcttctgttgctgttgttatttcattaaaaagtgattcatccgcgtaaaaatagcctagttttttgcttttgatttgttttttatttacttttaaggaagaaactgggtatttgatgaccgcgtttaaagtggcaaatgttaggtttaagccgtattggtcgaaaagataatgcagtttggaaactacgcggagcacttgcgcattaccttcaaagtagtaaaagtcttctttcatttgcggtgttaagatttctgctaggcttttatttttgtaagtgatggttgctaaattgtcgcggaaccactcacggatactttcttcgccaaaatgaccgaacggcggattccccatatcgtgtaaaagtcctgcacaagcaaggatttctggaattttgtccgcatgatcttttgtaaaatcttggtctaatttttcttcttgaatcgtgtgtgtaaccatgtttcccattgattttgcgatcgtacttacttccattgaatgggttagtcgtgtacgaacaaaatcgcttttttctagtgggaatacttgggttttatcttgtaaacggcgaaatgatgcgctcatgacgatacgttgaaagtcattttcaaaagcgctacgtacgtcggtgtttttcgagcgagtgacaccggattcgcggcggcgtttgtcatttaatagtttatcccatttcatttaaatctcatcctttcatagattgcttagtttttccatttcggcttcggagagcctatgtacggtccattctgacattttttctgcaccaattttttcgtaaaaatccatgcctgatttgttttcatttaggcaccaccactcaaatctaccgcaatcacgtgctagggcaagtttggataaatagctgaaaaattgtgtcccaaagccttttccgcgcatttctggaatgatgtaaaggtcttctaagtataagccttttttgccaagtaatgtggaaaaattatggaaaaagagtgcgaaaccaactggctcaccttggtattcagcgataattacttcggctgacttttcttgaaaaagggctttgtgtaggccggattcggttgctactacatctttttcaatgccttcatgaattgcaagttcggtaataaaacgaagaattaacttcgtgtcctgttctgtcccgtttcgaaatgctagttgtgtcatatatctcttccttttcgttgtcgtatttatttaagtataagctagtgcgggggatgtatcaattaaaaaatagcttctatataatagaaaaaaactaggcgctttttaggcaacctagttttttcatgttttatttttttaatccttgaacgcatgctactttatcgtctgccccaaaaaagtatgaacctgctacaagaacgtctacgccggcttgtttacatttttctgcggtttcggcatttacgccaccgtctacttcgatcacatagctgccgttattttcttggcgccaattatcgaggtagcgcatgttttcaatcgttgaatcaatgaatgattgcccgccaaaacctggatttacggtcatttgtaaaactaaatctacatcgcccaaaatagcatccagcacgctcgccggagttcccggattaagcacgactcccgctttacatcccgctgctttaatttgttgaatgacgcggtggatgtgcggtgcggcttcgatatgcacggaaataatgtgcgccccagctgctgcaaatttttcaatgtagttttctgggtttgagagcattaagtggacatcaagtggaatagtcgccgttttgccaatttgttcgaccatatcaattccaaacgtcaggttcggcacaaaatgtccatccatgacatcgatatgaaggtagtcagctccggcctgttctgcttctttaatggagtttgccatgttcatataatcagctgcaagtaaagatggcgctacgaatgtcatacgcgcacaccggctttcgcaatcacagcttcgacacgatccgccacattttctggtgtaaatccataagcgttaaacaaatctttcgcaggggcagatgcgccgaagtgattgattcctaacatatcgccttctgacccaataaattctttccaaccgaatgttgctccagcttcaatcgcaaatctcgctgtgacttcttttggtaaaatgctttctttataagcatcggttgttttttcaaagcgttcccagctggacaaactaacaacggaaacgtcgatatcttttttcgcaagttcggctttcgcttcaattgcaagggacacttcggatcctgttgcgataatgatagcgtctggtttggaactatttgctggtgctacgatataagcacctttatctacacctgcatctacttcttcttgtgcattttcaagtactggtaagtcttggcgtgatagtacaagagcgattggaccatgcgtgttggttgcagcaatttcccaagcagcgcgagtttctttggcatcggctgggcggataactgttaggcctggcatggcacggagtgaggctagttgttcgattggttcatgtgtcgggccgtcttcacctacagcgatactgtcatgcgtgaatacatacgttactgggagttgcattaaagcagccatccgcattgctggacgcacatagtctgagaagacgaagaaagtggagccaaatactcgtaaaccgctatgaagcgccattccgtttaacattgctcccatcgcaaattcgcgcacaccgaaccagatatttttaccagctgggtcttgaatgctgtatgctgggctcgcatcaataaatgttttgttcgaacaacctaagtcagcagatcccccgaaaagttccggtaattcggctgcaattgcgttaatcatttttccagaagcagagcgtgttgcaatatttgtacctgcttcgaaagttggcaaattggcgttccaatcagctgctacttctcccgctaacactcggtctaattgccttgcaagttctgggaattcttttttgtaattagcgagcatcgtgttccaagcaccctctagtttttccccgcgagctttgtaatttcttaaataatcacgaacttcagctggtactgtgaaaggttcttctgcccattcataatgttctttcgcgccattcgcttctttttcaccaagcggagcaccgtgacttgcagagcttcctgcttttgttggcgcaccgtaaccgatgactgttttcacttcgattagcgttggttttgatgtttctaattttgcttgaacaattttctcttgaattgctgctaaattgttgccatcttctacgcgtaaaacttgccagccgtatgcacggaaacgatctgctgcattttcactgaacgttgcacttaaatcgccatctaaacaaatatcattggaatcgtacaatacgattaattttccaagtcctaaatgccctgcaagtgaggctgtttctgatgccacaccttccatcaagtccccgtcaccacaaatcgcatacgtataatggtcgacaattggataatttggttggttatactcagccgctaaatgagattctgccagcgccataccagcggccataccaatcccttgtccaagtgggccactcgttgcatcaactcccgcagtccatccaaattcagggtgtcctggtgtcaaactatctaattgacggaactgttttaagtcctccattttcacatcataaccaaatagatgaagcatgctataaagtagcgcggacccgtgccctgctgataagacaaatcggtcgcggttaaaccattctgggttggctgggttaaatactaaatgttttgcaaatagcatatacgccattggagcagctcccatcggcattcctgggtgccctgagtttgctttctcaatcatatcaatggataacgaacgaatcgtgtccacagcttgtctatctaatgtttttttcaaaactgtcatctcccttaaattgtttgtgctttattacacatgtttttctacatctgaccaaatgtgtactagtctttctgcataactcgttttatctcggtcatgaaataacgcggatgtgcctagtacataaatatctggtagacaatctcgcatcaagcctactgtctctttattaatattgccgtctacttcgataagtggtgcatgcacttttccttctagttttgcttttaaatcatgcagttttggtaatacatctgtttggaatttttgccctgcaaaacctggatttaccgtcatcattaacaccatttcgacctcatctaaatacggataaatggcttcaataggggtttccggatttatcgcgatcgatggtttaatattgtaagaacggattttctggattacttctgacacatcttctgctacttccacatgaaacgagatatattcaggtttcgcagtggcgtacatgtcaatatatttaagtggggtaatcgtagccaaatgtatgtctaaggggatttctgtgttatttcgtactatttccaaatattctggacctagtgctagattattcacatatataccgtccatcacatcgcagtgtagtagttccacaccagcagattcgaggcgccggagctcttcacctaaatgtagttggtctgcacacataattgaagcggctattttcctcatcttcatcctcactttctttcaagttcagtaattttatccaagcggcgtttatggcgatcacctgcaaaagacccctcaagccaagtatcgacaagtaaaagtgctaatccttcgccgatgacgcgttcgcctaggcagagaacattgctattattatgttcacgggtggcacgcgctgaaaaagtatcagaaacaactgctgcacggattccatcgactttattcgcagcaatactcataccaattccagttccacagcacaaaatcccaagatcagcttgtccgcttactacttgattcgcgacctcttccgcataagacggaaaatcgacactttcgtctgtatatgttccaatatcaacaacttcaatatctttttcacgtaaatgtttcacaatggcatcttttagtctacgtccgccgtggtcgcaaccaattgttaatttcatttaatttcaccttcattaatagatttttttcttttaacgttttataatgaaatggaaccgagaacatacgcgaatatgttctcggctcatttctaaggatgactactgtaaaacatctgagcccgagaagctttggattcgtttgcacggttatcctttttttgatgttttttcatacagcccatcctccattattaagatttcactaatactttaatttcatttcctgccataactgcctcgaaagcctcgcgccagtcatccaaaccgtatactttagtaatcattttatccgtattgattttgccatttgccagtaaatcgagcgctaaaatccaagaagatggtttttgcgaacggctgccgatataagcaatttcacgttggataatggattcttcgtcaatcgcatttttcttttctgcaaaaagtcctacttgaataaaatcgccttttttcttcgttagaggtaatccttggttcactgcgggtactgcgccggaacaatcaaatacgcgttccgctccgtaaccatctgtcatgccgagcacaacttcagccaagtcttcttttaaagtatcgacaatccggtccattccaagttcttttgctagacgtaagcggtcgctatctttggtaattcctgccataatcaccgttgccccttgcgctttcacaacttgagctagtaacaaaccaattggacctggtccgaaaacaagtactgtgtcatctggacaaatcgttgttttttcaagcgctgaatgaacacaacatgcaagcggttctgtcagtgctgctgcttcgagcgaaatacgttcatcaagcacgtgacaactttcctcgcgagataaaacaaattctgcaaaactaccatttgcttgcgtaccaatgccgcgacgattgctacataaattgtaatcacgttccttacaataaatacattctccacaagtttcaaaagttgtttcacttgtgacgcggtctcccactttgatactcgttacatctggcccaacttctacaacaacaccagaaaattcatgtcccagtgtaacgggagttgttggatttttgtattcacctttaaacgtatgaatatctgatccgcaaataccagtgaaagctactttgatttttactttgtcgccatagacttgtggttcttctacatctcttagctccatttgatcatatccggggtttgtttttactactgctttcaaattaatcgtcacctttctgcggcaatatcatcactttgttataatcatgctctctggaaagaatcatatcaaaagcttctttcgtttcctctagcttataacgatgcgaaattagtggtttcagcttaattcgaccttgttttacgaattcaatcgacgtacgccactcctcacctggaaatggtgctgagtaagaattccaaaaacctttaagcgtaagttcacgtctaaaaatattttcaaaagcttcttcgtgtaaaagtacatctgcgtaggcgattcctaagtaaccaactttaccttttttcttcgttacaagaaggcattgttcttgcgttatttttgaaccagcacactcgagcgcgatatcagctccaagaccatttgtataagcaaaaacgcgttcttttaagtcttcgtttttaggattaatggtatatttacaaccaaattcccgtgcatctgctaactttttatcactgatgtcgacggcgataatatctttcacgcctgcaagaagtaagcattgtacaaccaagattccgatggttccaatcccgaagacaatgaccgtatcgccaagtctcggttcaataccaagtaccccgtgcattgatacagcaagtggttcaatcattgcaccttcttcaaaatcaaggtcgccgatagaaatgacattgtctgctttcattacgacattttcagcaaatccgccgtggaaatgtgatcccaccatccggtagttgtcgcatagtgcgaagtcgcccgctttacaataattacattccatacaaggctcaagcggaatccctgcaacacggtcaccgatagctacgtttgttacttcgctaccaatttctgtaactacacctgcgaattcatgtcccattacagcaggcagtgggtatttccagcgagtctgcattttatgaatatccgatccacagatgccgactgcttttacttcaacacgaacttgatctttcccacaagtcgcttcatcaatttgttctgcttttattacattattctcgtataacacagctgctctcatgttactatcacctcttctatatcattaagacaaaacttagaaaatagctgcccaagcttgagagaatttaagaatagcccagttaaagaagttaccacccatatcaagtgtactaacttgtgttgctcctttagggaattcgtaaacacctttcatcatttctgtatgaacaagaccgaagtcagttgccataagaagcgctagtgcaataactacagttccagctaaaacagagtgaagaatgttacctttacgagatgctactacgaatgatacgtagaatggaatagttgccaagtcaccaaaaggaagtactttgttaccaggaatgataacagctaagaaaagagtgattggaacaaggattaaaccagtagaaatattcgctgggtgaccgattgaaagtgctgcatcaagcccgatataaagttcgcggcctttgaaacgagatttcatgaaatcacgagcggattctgaaattggaattaaaccttccattaaaattttaaccatacgaggcattaagaacattaccgcacccatggacataccaagttgtgcaactgccccaacgtcatagcctgcaagaataccgattgcaatacctagaataagacccatcatcattggttccccgaaaataccgaaacgtttttggatagtttctgggtcaacgtggatgtttttaataccagggattttagcgattagccaaccaaccggaataccgatgaaaccgaatgctgctgtagaacctgttggtaaggagatcccttttaagccgtaaaattcttctaccataggttgtgttctgtctgccatccaaagaacagcaacttcatagataatcgcacaaagaatcgcgaaccaccagttaccaccagttacgatataaccagtcgcacctgctgcgataaagtgccagtagttccaaatatcaatatcaagtgttttcgtaactttgaagaaaataagtgctaagttgactaccaaacagattggaattagaatcgctgcaactggagaagcccatgaagccgcggctgctgctggccaacctgcatcaataattgttaaattcagtccaaaacgctcaaccatttgttgcgctgccggacctaagttattagatagtaaactaataacaaggttaatacctacaaacccgataccaatcgtaatcgctgaacgaagcgctttctttgctggtactcggaaaattaatgcaataaagaaaatcataataggcaaaataactgtaggccccaagtttaaaacatactgtactcctgacagaagtgtatccatttaatatttcctccttttttctctgtttaatgataaatgttaaactcccttgcgcagccttttatttaaggtgcgcaagtatttcttcgtctaattcttccatacccatgccagtgatataagaagttgcaataatagctgggattttgtaagttgtcggtaaaatagttgttgatacgattaaatctgctccgtcttgcatggatgctgcttctgagattttaatttgttttacttctgcatccacattgttttcttttaccaaacgttctactctgtccgttactactgttgatgttgcaattcctgctccacaagctaccaaaattttaaattgtcccatgataaattcctcctaattaattgctgcgatttcccgcggctaattttcctgtttttttaaacggtaattgtttctaaaatttgttttacttcgtcttcatctttcgctctgagtaatgcggctacattgtctttatcctgaatcgtccccatcaattgctgaagtaccgcgagctggctgtgaggttcatttagtccgagtacgaaaatcaaattcgcttcaaccgtttgaccagcatcttccattaatttgaatggaatgccatctttcacagtgattacggcgataaattgttccgtaacgcattctggatccgtgtgcggtaatgccacgccgtatccatctaattttagccccgttggaaaggtttgttcacggtctgttagtcttgttaaaaagtcatccgttacatacccttcagactttccactttctgcgaccatttggaataggtcctcttgtttctcgatatccgattgaacccaaaccattccttttttcaaaaattgtactaaatccattacgaaatcctcctgtaattctttctgacttctctacattgtcttttttgtttccaagtccgtgaagtttttaattatttggtgcatttcttctgtgtttctggcatccgcaagttttttcagttcttttttgttctccgataattccatcaattgcagtaaagctgtgaagtgagcgtttttatccacggctgcaatgacaacgataaaatgtagctctttaccgccttcaagtggcaggccttcttctagataaagcaagctcattccgaggctatttactcctttttccgtttcagcatgagggatagctatcgtattatggagaatgatgttcataatcggtgccggatattgccgtttcatttcatccacgtaggctggctcaaccactcccgcggaaagtaacggtaaagccgcatgataaattgcttcatgccagtcttttactgatttcttgcgtgtgattcgcgttacttcaagcaaatctgcgagtgagcttttaccttcgtgtttggatgtgttttcttctggaactggcattaaatagtctgctagcactttttcaagacgggcagcatctttaatatcagcaaatttggaaatagttttcattaattgatcgacgctgatattcacctcatccactaagtaaaccgaccgcatcacccggcgcctaagctcgagtcgctcttttccatccatcaattgattaattaggaaaaatttcttatcggtcgaaagtggcactgcggaaaatacaatgtcatagcctaactttgtttgttcaaattctcgaatcgacatcgcttgatagaaaaatatttccgggaaaaggcttcgtaatgttttttccatcaatctcgaaatcgacaatccgttcggacaaaccacgactgcttttagtctcgtttgtaatttctccgtggattcgattaaatgtcctccaatgaaaagggtaataaatatactttcattttcaggaactttgctaccaataaaacgttctaatggtgctaacgactctttcacgatgtaatgcacggcttggaattcttgatcaatcttgtctaaaatgctgtaatctgttgtaagatgatacttaatccgataatacgcaggtttaatatgtgcaaataatttttcaagtaacgattctttgtctactagttgaatacaagcctttttctcaaattcacttagaacttgttccagtgccagccttaacttgtgcgtttcctccgattttaaatattgtttcggaagtacattggaagttaaaagttgtaatgtgatgtacattcgctctgcttctggcatattcggctcttcttcaataaaaatctctgctgctccgtattcccgagtatctgacaattcattgtagtcaatcaggaaagatgtcgtaattgtttgccccttcttcatccgccgaaaaacagcttctaaaatgtaaggcagtatttgcattttattgtcaataaaatgcaaattcagatgatgctcgacttgttccaatttttcccgaagctctttaattctcgcttcgtccacttgcataaaatcctgtaaatactcttcgccgccaaaactttctatgatgtgttctgccgcataaatgagtgccgtccgctggttccactcgtctccgtcaattaaatagccacgcatccgcgaatatttaacttcgaggttgaatttttcaagtgtcttttgtaccagcttcaagtctcgtaatacggtgttcttgctcacctccagctcgcttataaagtgattaagggataactcttcacttcctgttgttagcatgaggatgattagactggcgcgttccttttctgatggaatataccaatctgttttttcgccatcttcctcaccaatgatttgaaacaggtcaggttctacgataaatcgaccatttgcggcacgatgaatcttcgggtaagtctgttcttctagccagttgttaattttttggaaactatagtcgacttgtcttcgagttaaaccgaatttggcttgtaagtttgtactcgatgtgtcaggatgtcgtaaaagttcttttaaaagtgaattacttctctcatccaaatacatgtcgttccctcctgttcgttttaattataaatctaattctaataaaaatgtacacgctttcatcccaataacttgcggaaagaatgtacatcattgggctttacttgtgacttttttaacaagcccgctatttataaatgattaattattgccttcaaagcttgccctatcatctatttggcaaacttttttatgacgtgcgaaatctgctttgaaacaaaaatgagaatcaagtaatggagttttgcgaggagctctttcttcttaatcatacaaaagatggtctattctttctatacgtttcgtaaaaaatagcacaaaaaaagacgcaaatgataaattttaccatttgcgtcataatccatagctttattttcttttttgtttatcgactctgagaatacttttattgaagtttttaaatggtgctgcgcgtttcactttcattttagggaaagattttagcattcttcgctcattaaatttaagtttacgcatactagcagcaagttctttgtcttgttttctttttgcttccatttcagcaattttcatatcgacattttcttgttttttcaaaagtccttcttcaaattctttcgcccgttcttttacgcttgcttttagttcatttgcttgggcagttagtttttcattaaattcggcaagtactttttggaatgatagcatacttgtgacagatttaatcgtatcaataagcatcagaaccacgatgagcgcaggaataatccagcctccccagcttaaaacccagtccgcgaattcggtgacaagtggatgcaagaagcgtacaacgataatacaagcaaatccccaaaaaatcgaaatcggcaagcaaattcgaccttttacattgagcggccaattatgataatcccaccacgttgtatggaacaatgcttccaaaatcgttgcggtaacatattcaatcaccgtacaaataatcatcgaaaaaataaataaggcccataagttattttgaaacggtaaaatcatcattaaaacagtcgttaccccaaacccgtaaatgggacaatatggtccataaagaaaaccacgatacactaacttcttctctgaaatcgagcaaaaaacttcttcccaagcccacccaagaacagaataaataaaaaagtataggataaacatattaatatccatcttttcatcccctttttgttttctttttcacaatcaatttcattataacagaaataagaacttcttaactaaattagtcaaaaagttccgcttgtttatattttggcaacttattcttcgcttctgagtacgcatgctgaattaatgcgcgaatcaagtctttatctcgttcttcttccaataaaacagaaatccaaactcgtttattcatgtaataaccggaaacgatggctggattttctgcgcgaagttgctcacttttttcggcatcgcacttcaaggttaaaatgggctgtccttctttattcgttccacgcattgccattagctgatccaaaacatgatagcgctccgctccccattcttctttaaaagaatactggactcctttaagaccactgatttcctcccgtacccaagcaaattcattaaccattgtaagccctccatattgttattttaacaaagcatgttcgtttttcattgtatatatgcgacattttgttgcattacataaatcagggactactaaattatttcccgggaaatttctatcatctgcacactcggtagatattctttatagccgtcacgttttggtgtagctacaattggataaaaactcgcaagctttgccataaagaaacctccttttcctcatagtaccacaaatttttatcttcaatcatgcttctttcttttatttacgggtattaagtaaataagggaaaaacttttgagagggtgatacaaaatgtctgcttacaaacggattcttgttggtgttgatggatcaaacgaagcggaagccgcactaagacgagctgttcaatttgccaaaatggatggtgccacgcttggtattggttttgttgccgatgtacgccgaattgcaccactaattgattatgaacaaacctatgcaaaaaaagccaaagcatacggagaagaattagttgaaatgtacaagaaagaggccgaaaaagctggtgtcacgcatgtagaaacttttgttcactttggtacaccaaaaactacctttaataaaaaaataacgcgaaattttgaacctgatttaattttagttggtgcaactggactttcagcaacagagcaatttattcttggtagtgtttctgaatatacggccgctcatgcaccttgcgacgtaattattgttcatgcaaaaccatggcgtaacagaaagactgtcgaaaaactttaattcatgtataatgaaggtattgattatacggcaggaggagaaaaaatgacagttagtaaagttgccattgcttcagaccatggcggaattgagttacgcaaaagtattatttcttatcttgaaagcgttggaattagttatgaagaattcggacccgaagcaccagaatcagtggattacccggggctcgcaattacggtcagtgaaaaagtcgtgaataatgaagtcgaccgcgggattttagtttgtggcacaggtattggtatgagtatcgcagccaataaagtaaaaggcattcgttgcgcacttgttggcgatacatttagcgcccatgcaacgcgcgaacataatgatacaaatgtccttgcacttggagcgagagtcataggtccgggactagcagaagatattgtcaaaatttggttagaaacagcgtatgaaggcggcagacacgcaaatcgtgttgggcaaatcacagcatacgaagatagccacgcttaaaataataataacgaccaagtctaattttataggcttggtctttttttatgtccactttattaatagttcacaaatagtaatttattcccgttttgctagcataaatgaggatatttacacattgtaaacaagaacgtttgttcgtataatatatttaagtaacagctaattatttgaaaatattggaggtgtcatcatatgagctatcaagatcgcggcatgaagaaatggggcggttttttattaagcgagcatacagaagcaatgcaagacgctgaaccaactttagtatggaaagaagctatgactacagaatttatcgaaagcgtgctagctagcgcgatgacacatcagtctacgcttgttatccagaaaaagccattaaacccagaatctgctcctgaaaatgatattattggtcgtatttcaggcgtggagaacaacaccatttacattaaaaactctgagggcactgtcccgctttccttctctgctattcgaaacgtagaagaaaggagtgtcgacaaatggtacaagtagaagattatagccgtgcgccgcgccgtgatattttgtgcatcgatattaaatcgttttttcgcctcggttgagtgtgttaaacgtcggctgaatccacttgaagcttatttagtagtaatgagtaacgccgaccgggctggtggccttgttttagctgcaacgccaaaaatgaaacaagaacaccacattaaaactggctcaagaatgtatgaactcccgacttgggataagcgcattattatcgcaccaccgcgaatgaaactatatttaaaagtaaacgcaatgattcaagctattttcagacgttatgttcccgctgagtttattcatgtttatagtattgatgaatgttttttagacatcaccggatcgcacctgttattcggtagcacggaagaaattgttcgcaaaatccagcgtgatattttagaggaattgcggctgtatgttacggttggtattggcgacaaccctcttcttgccaaactcgcgctcgataatgtggccaaaaaccgggatgacggcatcgctgaatggcgctatgaagatgttcccgagaccatttggaaaatcagacatttggatgatgtatgcgggattggtcggaggactgccattcgactgcaaaaaatggggattttcaatatgtatcaactcagtcaaactccgccgcaagtattaaaaaacgcaatgggagttgttggtgaacagctttactatcacgcacacggaattgattacagccttttaaacgaaaaatatgttccagttagtaaaagctacgggaaaagccagattctcgaaaaagactaccatattcccgctgaagtggagatagttattcgtgaaatggttgaggaagtagcgatgcgcttacgacaaaaccatgtggatacggaggttattcatttaagtatcggctacagtaaatacagcataaaaaaaggattcagccatcaagctaaaatcccttctaccagtagtagtcatgctcttattccttatttcctgcaactattcagacgttacgatgaacgagaacccgtgcgctccattgcgatttcgtgtggtaaactcactttaaaaaccggactgcaactcaatctatttgaagatgccacccgcacattaaatcacgagcaattagaagtaactgtcgataaaattcgcactcgctatggttttaaatcacttatgcatgcgagcagtttactaaatggagcgactggattaaaacgttctgaaatggttggtggtcacaaaggttaacttattctggtttcacgcggaacaagaaatcctctaccattgttgtaaatatttttggttgttcaatttgtaaattatgtcccgcaaaatcaaggatagcaaaagaagcatgtggatatttttcaagcaatgtaagcccgtctgcgtatcccacgtgatcatcttgacgaccaaacaagaataatcccggtacatcgaattgcgctttttaatctggatcaaagctaagcgcataattcgcggataatcggtctaaaaattctccatctgcattaatcattcccgccatcacttccgccaagaaacgattccagtttcttgctgttaaaataacgccactttttgaaaaatacgctcggtcttctttggatagcgaccgtacaaacgtatcatcttgatacatgactttttgttcgggtaaagttcttctttccttttcaggataaatgactgggcaaataagcaagactccaagtactctatctggcattttcgctgcgattccgcgagctaaataaccaccatacgattctccggcgagtacaaattgctcgcccggaattacagcttcaataaattctagtaaaagagtgagtacatggtcagcattttgaattgagtcgtaattctcggtttttcccattcctggtaaatccaaataaatgcgcgagaatggactttccttatcaaagattggctccatacaaccaatcatcagctgcgaatcaggtgcaaagccatgaatcattattattggtattccttcaccatatttttcataataaacgtctacgctacggattgttttatgcatgttaattcctcctggcgtttatttttatcataacatattattattcttctgccatccggtacccaacccctacttctgtcaaaatataggcaggttcagccggattttgttcgattttacgcctgatattactcatattgacccgaagtgcttgattttcacttgaataaggtccccaaatttctcggataataaagtcatgcgtgaggacttttccagcgtgacgtgctaataggagcaaaattttatattcaatcggcgtaaagtgaatttccatgtcgcccattttgacaagtcggcggtcgtcatcaatatacaggtcttgaatgcgaataatatggtcatttggcgcttctttactgctcggttgaatgtgtctaagggcagttcgaatgcgtgccagtagttccgatgtgccgaatggtttcgtgatataatcatctgcgccaaggtcaagtgcagttactttttctcgttcatgatcgcgcgcggatacgacaataatcggcactttcgaccaaacgcgaatatcccgaagcacgtctagtccttccacatctggcaaacctaggtcaagcaacactacatccggcgaatggctagccgtctgttctagcgcttctttgccgttcactgctttaatcaccgcataatcgctcgccgtcaaaacagctgaaataaaattgctaatgccttcttcatcttccacaattagcacaagtcgtttgctgttcattttccatctcctccgtctagtggcaaagtgaaccagaatgtcgccccaccatgttcgttgtttttcgcttctaaagtcccgtcatgcgctcgaataatcgacatacaaatcgataaaccaagccctaatccgcgtgacatatccgaacgttctctcgcttccacagcaaaagtatcaaataaatctggcaagcgattttctggaatgccttttccgttatcacgcacactaaaaatcgcacttttcttcgttttcgtcacgttcacccaaacttccgcatcagatccaccatgtcgcaacgcattttccattaaattaataaggacttgctcaattaacgtgccatccatcggaaccataagaaggtcgcgcggtactttgacatgaattgttcggtctgcgaaacgttttttgattcgaccgacagcctcaccaacaatttcttctacggcttctggagctcgttccaaactcaccaatccttcactaattctcgtcacagaaagtaaattctcaaccatccgaatgagccagccagagtcatctttaatacctttaattaaattatgttccgtttctttatctaactcagtttctttttcaagtaaggcagaacttgctccaacaataccagttagcggtgttcttaaatcatgcgaaatcgcccgaagtaaattgcttctcattttttcttttgctgattcgatgacgatttggcgttgttcttcggataaatattgccgttctaaagctagtgccacttgagagctaatcattcgtaaaaagatccgattatcttgtgtaagtggaccatcttctggggagcaagaaacgccaatgacgccaagcacttttccttgtgacatcactggcatataataaccaaatgcccccattagcgtatccgtcccggcacccgcccgctttttatttttaaatacccaatgcgcgacagcttcttcatccgcactaagaagcgcactggcatcttcttttccttctgcttgtacgaaaatccctttattacttttagcaggatccgcagaataaaaaataacggagcggctaaataaatgcaaaatatattcgttggttaaatcgataattccttttaaattgcggataactaatagccgcttattgatttcataaagcacttcggttcgacgttctcgctcaacggccaggctagcttgcgttttaattcggacagtgagcgcactcgtaataagagcaactaaaagcataattccgaacgtcaccggatagcccgcttgaattgtattaaacgtataaagtggcgtcgtgaaaaagaaattaaataacataacgccaatgatagaacccataacgccataaacatagccacttgttacgcgagaaataattaacacggataaaatatataccataataacattttgatcaccaatgccgaattcacttaaaccgacacaaatcgccgttgccaatgctagcagtaaaatcattttcgccatatcatgccaggatagaaagcttttaaaacgtattttcattcgacgttttttagtttgcggttggcttgagggaataatatgcatatcgacgttatcaaggtgcgtaatgagacgatcctcaaaatcctcttcaaataaagaccttaaacccatgcggcgacgcgatttcccgacaacgatatttgtcacaccagtcaaccgggcgtactcagctactgtttctgcaatgtcgtgtccggcaagggtaacaatttccgcaccaagtcgttcagcgagttccatcgtttcccgcaaacattttttctccgctttagtcatgtaatcattttcttcattttcaatataaagggcagtccacggtgcgcggaaagcctcggcagtgcgcgctgtccagcgaatgagttttgcagacgaaggcgacgtcccaatacagactagccatttactactcgcccgtttttctggataaatccctgtttgatcgtattcatgactaattcggtcggccgcttttcgcatcgcaatttcgcgtaagagttttaaattttctctagtgaagaagttctgcatcgctgtttttgcgcgcgctggttggtaaattttgccttgttctagtcgttttagaagttcatcgggttcaatatcaattaacttaactcggtccgcctcatcaaaaacatagtcaggaatcgtttcgcgaacagctaccttggtgatgccttctacaatatcgtttaaactttcaatatgttgcacattgacagtcgtatatacatcaattcccgcttgaagcaattcttccacatcttggaaacgtttcttattgcgtacgcctgatgcattcgtatgtgcgagttcgtctaccaaaataagttccggttttcgtttcaacgcttcgtccaaatcgaattctttgagcgcgatatttttatgattgattgctttaggagggataatcggaattccttctaacattctcagcgtttcctcgcgggcatgaggttcaatataacccgccacgacatccacacctgctgctaattgatctttggcgtcacttaacatggcgtaagttttcccaacacctgctgcaaatccaaaatatatttttaatttacctactgatgaatctgcttcttcttgcaaattcacgagtagcgcatccggacttggacgattcgtctccatatgctcgcctccaactacttacattttcaaactatctaatgccacattcacttgtaatacgttcacggtcggctcaccccaaaaacctaacaatcgcttgcttgtgttttcagcaatgatttctttaaccactttggtagaaattccacgttccctagaaatccggtctacttggtaagccgcagccgcctctgaaatgtctggatctactccgcttgctgatgcagtcacaaggtccattggaataacacggttgttagctggatctagtttgtgccaccaagtaattcgtttttctactaattgtttttgttcttcgctagttgggtttaaattagtcgccgccccgtcactcgcagctcgcccgattaagtattcaggctgagtaaatgtttggccaatttcggtagaaccatattttcctgtttccccgtctgctaactttccttctattatactgccatttgctttgtcctgaaaagccgcacctgcaataattgtgacaacccctggataaatcacgccacataccaatgttaaaagtagaaatcccactactgccggcttccaaatttgcataaatcttttcatgttctctccccctcttaaacgattcctaaaacagttaatagcatatcaattaatttaatcgcaataaatggtgcaattaaaccaccaagaccgtaaatcaacatattgcgacttaataattttccagctggcatttcacgatatttcacgccttttaaagataacggaattaagaaaataataatcactgcgttataaataatcgcggacaaaatcgcactcgtaggacttgttaaatccatcaagttaagtgcttcaagttgtgggaaaatcccgtaaaatagcacaggaataatcgcaaagtatttcgccaaatcgttggcaacactaaatgtagtcaaagctccgcgagtcattaaaagttgttttccgatacgaacaatatcaattaatttagttgggctagaatcaaggtccaccatatttcccgcttctttggcagcttgcgtccctgtattcatcgccacagcaacatcggcttgcgcaagagctggtgcgtcgtttgtgccatctcctgtcattgcaaccaaatgcccttctcgttgatattcgcgaattaattccaattttgcttctggagttgcttcagctagaaaatcatccactccagcttctgccgcaattgccgccgcggtcattgggttatcaccagtaatcataatggttttaatacccatttttcgcaaatcaaggaaacgttctttcactccatttttcacgatgtcttttaaataaataacgcctagcactttattatttcggactactacaagcggcgttccaccagcgccagccactttacttacaatcgtatcgcattcttttgggtacgtaccgccatttgcagagacatacgcacgaactgcatccgccgcaccttttcgaattgtgtttccttgataatcgattccactcattcgtgtcgttgcagtgaaaggtacaaattctgcgtgcatttcagcaaaatctcgtccgcgaatgtcgaaacgttcttttgctaatacaacaatgcttcgaccttctgcagtttcatccgcaatagaggacagttgagccgcatctgctaactcttgttccgtcacaccatccaccggtaaaaattcactcgctttccgattcccaagtgtaatcgttccagttttatcaagcaaaagtacatccacatcaccagctgcctcaatcgcccggccgctcattgctaaaacattcgcttgatttaaacggctcattccagcaatcccaatggacgaaagcaatgcgccaatagtggttggtgctaaacaaacaagtaaagcaatcacatttgtaatcgaaattgccgatcccgcccctgcttgtttactcgcaaattcggtaaatggtaaaagtgtcgctgaaactgccaagaaaataattgacagtgtcacaagtaaaatttgtagcgcaatctcatttggtgtttttttccgtgaagcgccttctaccatcgcaatcattttatctaagaaactttccccagaaacagccgtcacacgaataacaagccagtcagaaacaagggtagttcctcctgtaacagcacttctatcgccaccagactcgcgaattaccggcgcggattccccagttattgcactttcatcaaccgaagccgcgccttcaataacttcaccgtccatcgggatttgttcattcgcaagcacatacacaatgtcgccttttttcaaatcattcgaagcaacttctatcacatcagatttatcttctaaattttttaatttccgagctaaaacgtcttttcgagccattttcaaactgtctgcttgagcgcgaccgcgaccttctgcaattgcctccgcaaaatttgcaaacaaaacagtaaaccataaaatcagcgcaattgcgagcgtataaccagctttctcatctgaaattccgaaaaaaccaagaaaataaagacttgttgctaaaatcgcgccaacatatacgagtagcatcactggatttttcacttgtagttttggagacaattttttcatcgactgaattaacgcatctttccaaataccattttccatcatttccattcacctcatttgaaagttgtaaagaagtccgcaatcggtcctagtgcaagcgccggcaagaaactaagtgcgccaacaagcaccactactccaattaaaagaccgataaacatgccatttttcgtcgataacgttccactacttgctgcaaccggactctttccagccatattttgagccaagtaaagtgccgcaatcagcgggataaatcgcgctagcaacatcattaccgcgccgaccatatttgtaaacgtcgtgtctgccgcaaatccagcaaaagcactaccattattatttcccatagaggtgaaagcatagagcacctcagaaaaaccatgcgccccactcgccgaaacggaagcctgcacactcggcatcattaccgcaaccgcagttccaaataaagttaataacggtggaactaaaatgagtaaacaaaccattttcatatcatatggttcaattttcttccctaaatattccggtgtccgcccaaccaaaagcccagcgataaacaccgtcaaaataataaagccaatcattccataaagcccactaccaacaccgccaaaaataacttcaccaagctgcataaagaacattggaactagcccaccgagcggagtcaagctatcgtgcatcgcgttcacagcgccatttgaagcagccgttgtagaagccgcaaaaagcgacgatccgccaacaccaaaacgcacctctttaccttccatacttccagaagtagtaacaccttgataacttggaccagcgaattgttctgaaatcgtaatcgcaaccactccaacaacaaacacaatcatcatcgctgtcataattgcacgtccttgtttactgtccttcaccgcacgtccaaacatcacaacaagcgccacaggaataagcaaaatcgcaagcatctctaataaattagtaaaactcgacggattttcaaaaggaaacgccgaatttgccccgaaaaagcccccaccattcgtccccagttgcttaatcgcaatttgacttgcagctggaccaagcggaatcagttgttttgctccattttcaagcgattcaaccaccgaataatcagcgaatgattgcaccacaccttgtgacaccaaaagaattgccaaaacaagcgaaagcggtagtaaaatataaagcgtcaccctaaataaatcttgccaaaaattgcccacggttttctgtttcttccatataaagccacgaatcaccgcaaataacactgcaatccccgtcgccgctgaaacaaaattctgtacagttaagccaattgactgcgaaaaatacgataaagccgcctcaccagagtaagcttgccagttcgtattcgacacaaagctcgctgccgtattaaacgcaagactaaagctaagccccttcataccttctggattaagcggtaaaaacccttgtaacatcagcaccgccatcacaaatataaaaccaaccgcactaaaagcaagaacagatccagcataacgcttcgctgacatcccagccgcattcacacccatcaaccgataaccaaagcgttcaacaggctctagcactcgtgacaaaaacaccttttccccaatcatcactttatacatataaatcccaagaggcaccgccaaaactaataacaatacaataaaaaacacatcttgcatcacgatatacttcataagttctcacctctaaataacacataaaataaatataccaataaccctaaaccgattattccagcaatcactagaacaacacccatttccgttcaccccttcaaagtactctttccacccccttatcctaacaacaaatgcataaagacagtgttaagattctaaagctccgcataaagattccgttaatatctctatgtgtgtaaaatttacacacaaaaaaagcctatgtgtaagcaaaaaacaaaatgaaaacccttttatagccacatttaaagttggcacggtacttgcatatataaataagtgttaagagaattatctagaggaggaaataatcatgaaaacaatcatgttagtatgttcagcaggtatgtctaccagcttactagttacaaaaatggaaaaagccgctgcagaaaaaggtcttgaagcaaaaatctttgcagttgccgaagcagaagcagctaaccatttagacgaaattgatgttttattacttggaccacaagtacgtttcttagaaggaaacatgaagaaaaaattggagccaaaaggtattccattagctgttattaacagtgttgattatggaatgatgaaaggcgacaaagttttagaacaagcattagatttaatgaagtaaaaaagagggtaattacagctagctagctgaaaattataaaaaactaaagaggtatagtaataacgccatgttttagaaattatgtattcgtcttaacccggctattactttatccctcaaaaaaggagaataaaaaatgaatggttttatcgcatttatggagaaatatttcattccctacgctgccaaaattggtggacaacgtcatttagtagcaatccgtgatggtttcattacaactatgccacttatgattctagggtctttcgccgttttaattaacaacttcccaattccagcttaccaaaaattcatgaataacttatttggtgaaggaacttggcaagcatttggcggaaacgtttggaacggtacttttgctatcttagcattacttatcgctttcacagtagcttacaacttagctaaatcttatgataaagatgctttatcttctggtgtagtttctgtagctacattcttcactattggcgcaatcgctccaggtgcagatggtgtcccaaatactggtggtcttggatcaactggtcttttcttagcacttattattgcaattctttcaactgaaatcttcactcgcttgagtggtagcccgaaactaattatcaacatgcctgatggtgttccaccggcagtttctcgttcattcgcagctttattccctgcaatgatcactgtttctatctttggtcttatcactgcgttcttccaagcagctggtgtgactaacttagtaatttctttctatgaattagttcaagaaccgttcatgggtcttgcaaactccttgccagcagcattactcttggcattcgtttctgctttcctttggttctttggtttacacggtgcgaacattatcgacccgttcatgcaaacaatcaacatcccagctatcgaagctaacgtaaaagcactagaagctggtaaagaacttccttacatcgttaacaaacctttctttgactctttcgttaacttaggcggaactggggcaactatcggtttaatcattgctatctttatcgtagctcgtaaacacaaagcgtacatgacagtttctaaattgtctgcagcgccaggtcttttcaacattaacgaaccaatgatgtttggtcttccaatcgtcttgaatccaattatgttcattccgtacatcttggcaccacttgtacttgtaactgtagcttactttgcaacagctattggttgggtaccagcttgtactatcgtaactccttggactacaccaccaattatcggtggagcacttgcaacacaaagtatcgctggtggcgtacttgcagctgtaaacttaggtctatctatcctaatcttccttccattcgcgaaaatcgctcaaatccaagagctacgtcgtgaaagagaagcacttgctgctgaaggcgttactgctgaataatttttaaaaaccaaaactttaaggacgtgtttacagatggatttagagcaaactattatgagcttgatcgtgttcggcggtaatgccaaaagtgacgctatgttagccattgattccgctaaaaaaggggatttcgctcaagcagacgaacaaatcgcccaagcagaacaagcactacttgaagcgcatcattctcaaacaaaacttatacaaggtgaagcacgtggcgaaaaaacagaagtttcccttctactcgttcacgcacaagatcatttaatgaatgcaatcactttcaaagatttagcgaaagaaattgtagacctttataaaaacaaataaaaacagggttgtcatatatgtagtgaccccctaaagttaaactattaatagagtggattttttccactctatttttatgtggctttttatttaataatatgaaaaaagatccctagaattagattttcagaactaactttaggggtcttttttattcatgttatttctttgataatccaaactttttataaagcttaaatcctataaaaacaataccaataactaaaacagcttctattataattggaacgtacggcgttatccaagacatacttctgcctcccattatttaatttccacttactgagtttgttttctatttcacaaggattataccatataattacagtattctctatccaagcaaaaaatccttcatcaacattgtctggactacccctaaaattaatgtttttttaggggatagttcaaacagctgtttttttattctactaaatcggcgtctgatcggataatcgctaatacaacacctattgcaatgaaattaccaagcaccgcgctcccaccataactaataaaaggaagcggaatccccgtaagcggcataagtccgactgtcataccaatgttctcaaaaatattaaatgcaaaacttacagcaaaacctgctaaaactagcgaagaaaaagtattcttcatcaaaagagctgccataattaattgatgaataagtagcataaataaaattaacaacaaactgacaccaacaaagccaaattgatgaccaatcgtactaaagatcatatccgtatgactttcaggaatataagcatttgtaccagaactaccagtcatcatccccgaaccaacagccttcatcgataaattaagttgatagaccgcatctggatcagtagtagggtcaagccacgtttggatccgcgcaaattgatacgcatgaaaaccaattttttccagtaaactaatatgataaacgactacatacattccaaccgtcactgtcgttaaaatgatagttataatgccaaccattaatttagttgattttatagcgagcaaaataatcgcaagtgccgtaactccgtaaacaattgtcgtaccaagatctggctgtttcataattaatagcaaaacaaccccagtaagcgccgctaaaatgcctatctgtttccatttctgcgcttgatattttacagcaaaatgtgccaatacaaaaataaaaatcgatttgacaacttcagatggttggaaggacaatccagcgaagcgataccaccgcgttgctccgtttatattttggactaaagggtttgggatgagtattccaagtagtgtaatcaccataatgacgtaaagccaaatcgcatgatgtcgcaaaaactctaccggaagtcgcgaaacaccaaaacaggtaagtgccccaattaccaaaaacaccaactgcattcctaaaaaattggtatcatactggtttgtcttctgagcaaaataaatcgctacacaactcactaaagacagtaagaacaccgataaaataattcgattatattgaatatcccgcttcataaatacacgacctctctagatttagctaataagttccgccttgcagcagctattacaaacccaactgcgcacgaaagcatgacaaccgaactacccccgtaactaataaacggtagcggaactccagtaagcggaataatcccgctcactcctccaagattcaaaaacatctgcaccgaaatccaagcggcaactccaatacaaaccatcgaatcgaaaataaaatgactacaaacagcaatataaagtgcggtaaaactaagtaacattaataaaaaaatcgtccaaataacaccaaaaacaccaagttcttccgcaataaccgtcataataaaatccgtatgcggctccggcaaatagcctaatttctggatgctacctcctaatccagtcccaaatatcccaccacttccaatcgcatagtagccatttctaagttgataagaagcatctaagttttcaaggttaaaaggatccaaaaaagcaaatctgcccaattttgctgcactaaaaaaatcaggatgaaagaagtaaatcagtgttgctataagaattatcaaaccaaaagcccagataaatacccggacaaggcgcgagaggccgactccgcttgttaaaaacaaagcgaccccaataacacctaaaattaaagccgtgccgagatccggctgtaagaagactaatgctatagtaagaaacaaaaagcctagcacccaatgttgtactcgcaccccgcaacctttccgtaagaaaacagtcgcaatcacaagtattaatagcaatttgacagtttcagtaggctggaatgtcactccgaaaatagacaaccatctttgagcattattagccgcattacccgttacaagcactaaaactaatagacctagaagacccaaagaaagaatacgcaacgtcacccgctgataaaataatttcacatttatacgcgagcaaataagcaagcccaaaagaccaagaccataaaagaggagctgcctattaaagaaataactaggatccactttgtaacgcatgattgcaaccccataactcgtgctataaacaagtagcaaactccatactgccagaagcaaatacgttacaaagagcaatcggcccgcacgcatttaaatccactcccggaatttccgaatgtaaagagttttcactagttgcatcgtagccatataaccaacaagaataaggattaaccatgggaaataactacctggtaagcttacaaaaccgatactgtgaccaaatccggtaaacggaatcacaatacctaatgccatcacgattagtgtcgcaatcattaccggagcagctgcccgactttgaataaaaggtattttctctgtccgaatcatatgcacaactaaagtttgagtgagtaagccgacaacaaaccaaccactatggaataaagcttgctctgctaccgtgttcgcactaaatacaaaccacataattagaaacgtcgcaatatcaaaaatcgaacttactggcccaatacatagaataaagcgcaacatgcctttttgttcccattgatgcggctttttcaaaaacgaccgatccattttatcccaagggagagttaattgtgagaaatcatacagcaagttttgtagcaaaagatgtaaagatagcattggtaaaaagggaataaatgcacttgccaccaaaacactaaacacattaccaaaattggaactagctgtcattttcaagtattttaaaatattaccaaatacgttacgcccttccataaccgcatcatttaataccgttaaacttttttccagtaaaattaccgagcttgcgtcttttgttatatctgccgctgtatcaacagaaataccaacatccgctttcctaagtgctggtgcgtcattaatcccgtctccaaggaagccaacagtatgtcctgcttttttcagcaaaccaatgatacgcgatttttgcattggggttaatttcgcaaaaatgtggtatttccgtaattcgcgcgtgagttcttcatcagataagtcttcaatatccccgccaagtaaaaatccattcgctggtatgcctacttcctcacaaatccgtttcgtaacgatttcgttatctcctgtcaaaaccttcacgttaatttggttcttaaatagctgtgtaattgcttctttcgtcgatgcttttactgggtcgcggaaacctaagaatcctgcaataatcatctgttcttcatcttttttagtgaatgattcgccggcttttccagttttatacgctactgcaattactcgaattcctgagcgattcatttctgcacacatttcttgaagctcattcttttctaattcagttagtgtagaaatagtgccgccaaattccttatgagtgcatactgtgagcatttcttctaccgcgccttttgtaatcatctttgtctctgtattattttccactaccacactcagacgacgccgatcaaaattaaacggaatttcgccaacttttgtccatcctgatgcagtactttcatccaatttggcaataacagcatgatctaaaacgtttttccagcccgtttggaagtagctgtttaaataagccatatttagaacactttcggaagtttcaccagcactatcaatgtattttacaagttctagtttatcttctgtgagcgtgcctgttttatccgtacataaaatatccatcgcgccgatattttgaattgcactcagctctttcataattacttttttcgacgacatattgatagcgccttttgccaagttcgtgctgacgatcatcggtagcatctcaggtgtgagcccaaccgcaatcgctaccgcataaagaaatgcttctaaccactcgcctttcataagaccgttaatcataaatacaatcggaaccattacaaccataaaataaaagagtaatttcgaaattgacttaacgcctttatcaaagctagtgtcgccgcgacgttctgtagctgcgattgacaatgagccgaaaaatgttgcgcttcctgttcgtaaaacaaccgccttaccgtgcccacttaacacatctgtccccataaataataagttttcccgttcaaaaagctccggattggcgcgtttgtcttccacaaatttttcagaaggaattgattcgcctgtaagtgctgactgattaattaataaatctgtcgccgaaataacgcgtgcatctgctggaataatatcccccgctgaaacttcgattaaatctccgggtacgatttcatcttgtgctactacaatcatttcatcgttccgaataacgttcactttatttttcaccatattttttaacgcgtagctagcccgctctgctctactcgtttgaacaaatccaagaattccactagctaagatcattaatgacataattattgtcgcttccatatcatctgttaaatacgaaatcaccattaacatgattaaaatatagataaaaggatcattaaacgcccgaataaataaccgtaaattcgatactttcttttcttccactgtttgattaggaccaaattcggctagtctttctgtaacctctacgttcgttagccctgtttccattacacctaatttttctaaaatcttatttctatccatttgtgattctttgagcaaattgttaccttgcatttttacgtgtgtttttttcattttccttgcctccaattctttctaggcaagctgagaataacgtttatgtgcgccagagatgaaggttagtcactcttgcagcttgaatactataatacgagtccggttcttctacttcatcttcctgatggtgggccattgccttcatctccttccgaattttacttaagcgtaattgtctgaaaaaaagattttcatttccagataattattttcataacaaacatgaaaaaagtccttaccaaaaccttggcaaggacttctgaattcatacgcatactaaaacagactcccctcgctaaagttttggcactatacaacgtaaagaattactcttagccacattatggaaagccttaatccgacaatccctgttctacccattggcgtctttggacatttttgggcagtggcctgtgtttgcataggagcctcacctaacaggcaaaactacatatttattatcgctctaatcgtctacgagtttaacatagaaaatctatgctcgcaagacaaaatgtaaaatgtttaacttttatttaacttttcgtgatttatttcaataattttaacaaaacatctgctaaggcatctgcagttgtcgtaatcgttggcgggcgtttataaatatcatctcgcactttctctaccatgattagcaaaataacactatttaaaattaaagaaattgcatctgcttcttgggatgagttcttacttggaaccatttcttgtactttttgattaacccgctcgtatagatattcgacaattgacggatcaataaattccatatctttactgcccatttcccgaacagaaattaccatgaaatcacgatatttttcataaatatccgaaataaactgacttgcttgacgtaaaaatactttggcactctcaaaatctttatcaaaaaattgattgatttcagctttcatactttcaaattgcacttcaagagtcatatgaattaaattatctttgttcttaaattttttaaaaattgttgcttcatttattccagcggcttctgctaattgtcttgttgtggagccttttatgccattttttgccatcatacaaagcgttgcatccatgatggattcgtttgtaatcattattttacccccgttcaactaagtaagcacttgcttatattaagtataacaaataccgacctttttgacaatttaattacaatttgtcgataacagtcataagatatgtgaagtgtgtaataatggaggtagaatatttaaaagaattggaagtgacttaccatgcaaaaaacgagaaaagaacgtattttagaagctttgaaagaagaaaagaagaataaaaaaagtaacaaattcaaaactggggcaacaattgctggagttacagccatagcgacctctgttactgttccaggaattgaagtaatggttagcgctgatgaaacagcacccgcagacgaatcttctaaaacagccaatccaactgcttcaacagaaactaacacaaatactgaaacagcaacacctgataaaacagtagaaaataaaaccgaaacaaaacaaactgaaacaaaagaacaagccactacgcctacagaaaaagcaccagttgcaaaacaagttgaaaaaacacccgctgaacccataacagtcagcaatccagatgacaaaacaagttctcctactccagcgacttataatttagtacaaaaaacagcgctacgttcaggagctacaatccaaagctttattaattctatccaagcatcctcttcccaaatcgcagcagctaatgacttatatgcatctgtcatgatcgcccaagcaattttagaaagtgcttatggaacaagtgaattaggctctgctcctaactataacctttttggaattaaaggagcttacaacggccaatcatacactaaacaaacattagaagatgacggtaaaggaaactactacacaatcacagctaagttcagaaaatacccttcttaccatcaatcacttgaagactatgccaaagttattcgtaacggcccaagctggaattcaaattactactccaaagtttggaaaagtaatactaactcctacaaagacgcaaccaaggctttaacaggaacttatgcaacggatacagcctatgcaacgaaattaaacgacctaattagccgatataatttaacgcaatacgatagcggcaaaacaactggcggaaattctggtaacacagggaatactggtaataccggaaacactggaaatacaaacacttccaacgctaaaatttatacagttgtaaaaggtgactcgctttggagaatcgcgaacaaccataaagtaacgattgctaaccttaaatcttggaacaacctgaaatccgatttcatttacccaggacaaaaacttaaagttagcgctggtacgactacaagcaacacgaacacatcaaaaccaagcacaaatactaacacatcgaaaccaagcactagcactaacgctaaagtttacacggttgctaaaggtgactcgctttggagaatcgcgactaaccataaagtaacaatcgccaacttaaaatcttggaacaacctgaaatccgatttcatttatccaggacaaaagcttaaagtaagtgccggaacgactacaagcaacacaaacacatcaaaaccgagcacaaataccaacacatctaaaccaagcactagcaccaacgctaaagtttacacggttgctaaaggtgactcactttggagaatcgcgactaaccataaagtaacaatcgccaacttaaaatcttggaacaacctgaaatccgatttcatttatccaggacaaaagcttaaagttagcgctggaacaactacaaacaacacaaacgctgctaaaccaagcacaaataaaccaagcaactctgcagtaaaaacatacactgtcaaaaaaggtgactcactttgggccatttcaagacaatataaaacaactgtagataatattaaagcttggaataaattaacaagcaacatgattcatgttggtcagaaattgacgattaagtgaatataaaaaacctaactcctgagcgaggtaggtctgaaactgcggataaagcgagaaattgctttgtctgcggtttttttattaaactaaacagttcctgaatagcagagcctattggttataattcatctatctcgcattgatagtttaaagcatccaattcccatttaatctttttcatcgttaactcggcttctgctaggcttgaatttaataagcaatatatataagtttcttcattagtgtgatagatgttgaaatccattaaatcgggccacttttcgataccagagggcacacaaaaaacattgaagtatgacctcacatcttttatccccgaatcaataatactcttttctataattttcaaaatttcttcataatcttcttttgattttattgaccattctaagcccagaataacaaccttctttcttaataatatttattttctcttactatctaaatttagttaatctgattgaaaatattatactcgcaattaagtccatcgtgcacgtcttatttctagtggaggcgtatatgccatattttatctagtttattgtatggctagattttatctctgctgtatgtcattaagaaaattttttaatacataacttttgtcaaagaattttgaatgctataatagtaaatgcagtagcaaagtgaatagacggtggctaatcctcagtaggggatgatgcctatggtttacaaaggttttactcctagaaaggaataaagcatgtctgtatttgaagcaatgactttaatgttggcttttgccacattggttgtgctgatactagactttaataaaccaaaaaaataatcgtctttacactttgacgggtgcgaaaagacgattatctatcaatttttaaaccttgtccaccgtctttttaacggtgctactgtttgggagtcatgttcacgcatggctctcttttcatttacatagtaacacatttcaaactggtttgccaaggcctgaaataaaagaaaaacaggtagcccttatcgcaaacctgctttcccactatctgtcctaaaaatgatggaaactctcaactggcattacaaacactgtcgcgccgccaacttgtacttcgattgggtaaggcacatacgtatctaccgtcacacctaaggaagcggatggtgtcatcatttgttcgcgtgctttacagttttccttgattatcgctagtgcatcatctacacgttcatcttctgttccgataataaatgtggtgtttcctgcttttaaaaatccacccgtagtagctaattttgtcgcaccgaaattgccttttgttagtgcgtcagacaaacggttgctatcttgatcttggactattgcaaatatgagtttcaaagaaatcaacccttcctaaaaatctatcttttttctattatagcaaacaaatccctttttaaagagcgatatgcacttatggattggtacttaaatcacatggaatgttaagttagttgctttaaaatatctgctaaaataatagtagtaatctcttctggcgtcttcgttgcgtccactcgcatgaaacgatctggaaacatttggataattttctcataaccattttgtactttttcgtggtaagtaatgtcctctttgtctagacgattaacttcgcggcctttgttagcagcaattctagctaagccgacttctgcgggtacatcaaggtagtaggtccgatcagggattgtatcttcaatcgcatataaattcacttgtaaaacttgttccatattcatgtcacgtcctgctccttggtaagcaagagagctatccataaagcggtcacaaagtactgttttccctgctgctaaagctgggcgaattgtttcaacaacatgctgacggcgtgcgcctgcaataagcagtacttctgtttttggatccatttcttcattgccaattccgaggacgatatttcttactttttctgaaatcgggctgccacctggttcacgggttttaatgaaatcaatacccgcttcttccattttttggtttaacagggtgccgacagttgtttttccagaaccatctggaccttcaagtgtaataaaaattgctttcatttcgtaatttcctttccctttcgcgtcgctttctgtttgattatagcataaattagcggaatatacggatgtaattctcggctagtttttcgccgccttggtagtgccgcgagcgaatactttttagttcgcggatatgtttttctgtgatactttctccgcggataatagctgggattcccggcggataaagcgagattgtttcagccgaaacgcgtgtcgtagcttcatctaatgacacaaattcggtcgcgcgggcgtgcatttcttcgtaagttaacgcaagacctgacgcaaaaggcgctgacatttcatatggttgtttcgcgatttcttttttcgatggagaatgaatccgactaattggcgtgaaatcaatcccttttttgattaatggtaaaatcagtaatacctgtgactcgtcggcaagctctggaaaataagaactttcttcaaaaatcgtttgcaattcgtagcccgtgtagcctgttttgcggacgatgattttaagtggatcatctggcaaaatgacttcaaatttattcttcgttagccatttaatccatctagcacgcattttccaaaaagcttcgacgtctgctgctgtgtaagttgccgcatatttccgcgccgcatccagtgacgccatgattaaataagatgggctactcgtttgaaatacttgcagataataagctagtttttcaaaaaccggtaaatcattcacgacatgtaaataggatcccatcgttagcgccggtagcgtcttatgcgccgactgaacaactacatccgcaccaagctccactgcactttttggaaactcagagctcgttaaaaaatgtgccccgtgcgcctcatcgacaaacacaaccgcgccatattgatgcgcaattcgaatacatttttctaaattaaaagtcgttccataatagctcggataagtgaaaatacatagttttatatctgggtgattatgtaaggtttcttccagaagttcggttgtcacgccactcgcgacgccgacttctttattggttgccggagttaagaaaatcggttttccaccggcgagttcgatgccatgcaagattgatttatgtgcatctcttggcactaaaactttctccccgcgctttaacgtcgccataataaccgccaagcttcctccgcttgtcccattgactagaaaatagctttttttacttccatagcattcagaaagtaactcctctgcttccaaaatcacgtcttctgggtgatgtaagtcgtccatcccggtgatttctgttacatcccattttaataaattttgccatacagctggataaatggctccacttttgtgtcctggaacatggagtgatattgggcaggatttagcatgagcatctaaccgttccactaaaggcattttagattgatctcgcataacaattccccttttcaaattctcttcttcattgtaccattttgctggatttatgacacattcttgcagttttaaagcgttttcattttataagttgtataataaagacagcaaccacgttttgactttctagtaaagggaaattgaggtaagaggacaattttaaaggaggttttttgtcagatgaagaagattcttaacggtacagatcaagtagtagaacagatggtggaaggtttagttaaatcgcacgcagatgttgttcaccgtgtcgaaggaactcgcgtcattgcaagaaatgataaacgtccaggaaaagtcgggctagtaagcggcggaggttctggtcacgagccggctcatgctggttatgtgggtcgcggaatgctctctgcggctgtatgtggcgatgttttcacttccccaaccccagaccaaatttatgaaggtattaaagccgcagatcaaggcgctggtgtgcttttaatcgtaaaaaattataccggtgatgtaatgaattttgaaatggcggcagatttagcggatgccgatgatattaaagtagaacaaattgtagtagatgatgatattgctgttgaagacagtacttttacaactggacgtcgtggtgttgctgggacggttctagtgcataaaattatcggggcagccgcagaagcaggcgcatcccttgaagaactaaaagcactcggcgaaaaagttattgcttctgttaaaacgcttggggttgctctttctccgtgtacagttcccgaggttggacatcctggttttgagcttggcgacgacgaaattgagcttggcattggtatccacggtgaacctggctttacgcgtgaaaaaattatgccatccgcaagacttgctaaacaactttatgaacgcattagtagtgaaagcaaactcctagctggtgataaagtggttgtccttgttaacggcatgggcgcaacaccactaatggaacaatatgttttcgcaaatgatgtccatgaacttctaaaaaatgccggtgttcaagttgaaaaaacactcgttggcgattatatgacttcacttgaaatggccggattatcccttaccattttgaaattagaagatgaaaaatgggtcgatatgttgaaacttccagtagacacaattgcttggtaaaaagatttggaggaatgaataatgacttatgataaagattgggcgttacgctggttaaatgatttcggcgaacgcgtacaagaaaataaacaattattaagtgatctcgaccaagcgattggcgacggagaccacggaatcaatatggctcgcggactaagcgaactcaaaaaagcttttaccgagaaagagccagcagatttaacagatgtatttaaaaccgctgggatgacaatggttagcaaggtcggcggcgcatctggaccactttatggaacagcctttttaaacatgagtaaagcggtcgattcagaaacaattgacgcagaaggcttaaccaaagtgattgaagcaggacttgaagggatcgaaaaacgcggtaaatcccatgctggcgagaaaacaatgattgatgtttgggaaccagttgtaaatgcccttcatcaggaagatttaacagatgatgttgttgaagcagctttacaaaaaacaaaagatttaaaagcaacaaaaggacgtgccagctatctaggtgaacggtctatcgggcatctcgatcccggcgcctactcttctgctctcctattccacgcaatgcttcaaacggaggtgagctgaattatggctaaaccatatggagttgtcattatttctcactccaaagatgttgcaaaaggtgtccatgatatcattaaagaaatcgcacctgacgtatctattacgcatgctggtggaacagaagatggtcgcattggcacaagtttcgacacagtaaacgaagcgattgaaagcaatgaagccgacaaagtctacactttttatgaccttggaagcgccaaaatgaacattgaaacagtagaagaaattagtgaaaaagaaattattctttttaatgcccccattttagagggagcttatgctactgctgctcaaattcaaatggacgaaaaaccggaagtaatcgcagcaaatcttaaaacaatcgaaattaaataactgaaaaaatccctttagatgcttttttgtctagagggacttttttatttaatggtataattacttaaaataaattcccattctaaaaagttaggatttgaaacgatgaatattttaattaaaatacgcgaactaactaatttaactaatagtgaaaaagaacttgccaactacattgtggtaaatcccaaaaaaacgcttcaattcaagccaaaagagctagctcaagctgctttcgtctctgctgcaacaatctatcgcttaattaataagctagggctgaacggcattggcgaactaaaaatcgaaatcgcctcgagccttcgcgaaacaaacgaagaaaaagaaataaactatgattatcctattttagaatcagatacgccttatcaaataatgaccaatctgaaccaaatctacaaaggaacgattgacgaaacattaaacaacgccgatccggaagaacttgtaaaaattggcgaaaaattaattaaggcaaaaacaattgatgtttacgccgcttccgctaatttatttttcgcgcaaaacttcaaatttcaaatgcaggaaatcggtgttttagtcaatgtccctgaggaagattatattcaaagtttgtccgccgcaaatagtgacaaagatcatattgctatcgttgtttcctacggcggacgaagccgaacccttcaaagagtagtcaaaatcctctccgaaaacgatgtcgatataatcttaattacttccatgcaagcaaaccctttagtcgaatttgccactcacaaaatctatatggcctccgccgaaaatcattacaacaaagtctcttccttctcaacacggcagtcattactaagtattttcgacacgctttattctgtttattttaatcacgattatgaaaaaaacatccaatataaaacaaccaattatcaaaaaatgaacagcgaattggaatgatttttcaaaaaaagcacctatttcctatccaaatgaaaaaaaaatctcaatatgcgatgctcctgcctttttcttgttttctaatgatacaataaagaaaaaaggagctaaactacatgacaactcaagcaattattttagatattgatggcactttattaaacgacggcaaaaaaatttcacccgaaacaaaaaaagccctcatcaccgcgcaacaaaatggcgtgaaacttatcctcgcatccggcagaccaacaactgggatgcacgcatatgctgagcaattagaaatggataaacaccacggcttgctcgtttcatacaacggagctaaagtagtggattgcgcgacaaatgaagaattattcaaccaagcgcttacggttgcagaaggaaaagccgttttggaacatatgaaacagtttgaagtgaaagtaatgattgataaagaggattatatgtatacaaatgatgtgtacgactgctacgtaccttaccgcggcgaagtaataaacataattcagtatgagtctcgcggaggaaattttaaactctgtgaaaaagatgatttagctgcatttttagattaccgtctcagtaaaatactaacggcaggcgatccggcctatatgcaagaaaattatcaagcaatgatggcgcctttcaaaaatacacttaattgtgtcttcacagctgatttctactttgaattcacagctcaaggcatcgataaagccaaagcactcgatacggttttaacaccaatgggaatacacgctgaaaatatcattgcttttggagatggccacaacgacatcaccatggtcgaatacgccggaacaggaattgctatgagtaacgccgtccccgaattaaaagcagctgccaactccatcaccttatccaacaatgaagacggaattgcgcacgtattaaatagtttaattacgaattaaaaaggctgagtttcagcctttttttattatctataaaaaatcctccaaatccaccccttcactctacagaaattatccattttctggtatgcttaagttagtaaactaaagtaggaggttaattaaatgacactttctttctcggatacatacagactgaacaacggaatcgaaatgcctagacatggttttggggtctacaaactaacggacgaacagcgtatgcgtactgcactagaaactgcggtagatgttggttatcgcttgtttgatacggcttcattttaccataacgaaaaagaactcggtgacttttttgcatcaagtggcttaaagcgggacgagttttttgtaacgacaaaaatgtggaatacggagcaaggttacgatgaaacgctccgtgcttttgaaaaatctcagaaaaaactacaattagaccaagttgatttatatttagtccactggccgaaacaagatacttttttcgaaacttggcgtgctgtggaaaaattatatgacgaagggcttgttcgcgcgattggcgtgagtaattttgaagcgcaccatttagaccggcttcgtacaagtgccaatgttcttccagtagttgaccaactagaaacacatccacactttccaaatcagctgttacatcgttatttagaggagttgcatatcgttcatcaagcttggagcccgcttggccgaggtggcgttttacaagagcaaattctgattgatttagcgaaaaaacatggtaaatctcctgcccaaattgttcttcgttggcatttgcaaaataatatttcaatcattccaaaatcagaaacgccttcaagaataagagaaaacgcagatatttatgattttgaattaacagaagcagatatgcgccaagtcgagcgtttaaataatggtgagcgagttagccatgctccagatgtaatgtatgtccgttctgaaatataataaaaaaaatctactattccaatatggactagtagattttttctttatttctttaattgacgtgcacgagcttctttaaagaggtaaaaatagcgagcttccgcctttttctcctcatattctaaattaggatcgtactcaaaactttttcgcattaaaactttctgcttatgccacttttcttgcgtgacttcaatcaattccatcagataagcatcataggatttgtgtagttttccgattttcttgtttttcttccgaccgaacttattacttctggactccattttatcacctctgtttatacttctcttcgtccttccatggctttagaaagcgtgacttcatccgcatattctaaatctccacctactggcagaccatgagctattcttgttacttttatgcctgaaggtcttaacaaccgcgaaatatacatcgcagtggcttccccttcaacattggggttggtcgctaaaataacttcttcaatggtgtcatcttgcaaacgtttaagcaaatcaggaatattaatatcttctgggccaattccgtccattggcgaaattgtgccgtgaagcacgtgatatagcccgtgaaaatcgcgcattttttccattgcgataacatctttagattcttgcaccacgcaaagaacactgcgatcgcgggatgtgtccgagcaaatatagcacggatctttatctgtaatgtgaccacaaacagagcaaaagcttaaattcctctttgcatccacaagtgcttttgcaaagtctaatacatcgtcttctttcatatctagcacgtaaaaagccagtcttgctgccgatttgggtccgattcccggtaatttcataaaactgtccattaatttcgttatcggctcaggataatgcatatctcgtcttcctctcaccttcaaaatacacaatgtttcacgtggaacattctattgaaaaatagttgagactcttgtaattaagccaagagtctcaaaccaaacaatattacattccagggagatttaatccttgtgtgaatttgcccattgtttgtgaagttgtatcttcaatttgttttaatacatcatttgttgctgcaagtactaaatcttgtagcatttcgatgtcttctggatcaactacttcttcgtttataacaacatcagtaatgacgcgtttaccaatagcttttactgtaaccattccgccaccagctgttccagtgaactcttgagcttctaaatcagcttgagctttcgccatttccttttgcattttttgcatttgtttcatcataccttgcatatttcccattccacgcatgaataatctcctctttcttctattgttttttaatctttaatttcaagcaaatcttcaccaacgagttttgcggcttctgcaacaaaaggatcttccgccggttttctagcttctggatttgtaccttcctccgcatcaccgtcgctaccatgactatgaaggaaattttctcttacttcagcccattgatcttctgggattccaataaaagtataatttacttgtgtaagtcgtgcaatactcgacgtaatcgtttcaacaaagttcggattatccatcgccatttgacagtgaatctcatgcttaaattttaacacaaaagtatcctgagatgcagctacaggttctgcatcatttaaaagtgctgcctgggatgccatcaacatggataaaagctcgccccaacaaccacggattaactgtaaattctctttcttagcctcacctaatacatggttaattttaccaataggtgctttaaattgtttgccgttgtttatggcttttttagatccaccacgattttgtgctggtttttcagcttgggtggcaactgctccactagcaatttgtttttttaatgtttgaagttcttgctgcatttgctccatttggcgttttaagtccccaaagtcacttccagaagctgcatccgctggtacattcccgccacttaccgctgattgcccagcctgcgttaactgaacaagcgccacttctacataaattcccggatgattcgagaaccgcatttgttgctgagctgtatttaaaattttaacaaactcataaacttttagtgaatcagctcgttttgccaaagcaacaaaatcttcatctatcaaagcccgttctaacgtttcttcaaggtttggcgctttttgatatagcaatacatctctgaagaaaacaagtaaatcttccactagacgaactgggtcttttccttctgcaagtaaggctgttaaagtcgaaatagcttccgccgcatcaccgtcaaacgctgcacttactagttttgtaaggagattttgagcaaccgaacccgttatttcgagcgcgtcttccacggtaacttcttctgatccgtaagaaataacttgatcgagcaagctaagcgcatcacgcatcccgccttcagccgcacgcgcaacaatcatcaacgctttttcgtcataagggattttttcttcttccaaaataaatttcaaacgaccaataatatcttgtgtcgtgattcgtttaaaatcaaaccgttgtacccgcgaaataatcgttagcggtaacttatgcggttctgttgttgccaaaataaaaatgacatgtttcggcggttcttccagcgtttttagtagcgcattaaacgctcccgtcgacaacatatgcacttcatcgataatatatactttatatttcgccacagttggcgcatattttactttttcccggatatctcgaatttcttcaaccccgttattactggcagcatcgatttcaagaacatctggtatagaaccgtccgtcgtacctttacaaatctcacattcattgcaaggctccccgtcatggccgtgttcacagttgatcgccttcgcaaaaatcttcgccgcactagtcttccccgtcccccgaggtccagaaaataaataagcatgcgaagttttattttgcacaatggcatttttaagcgttttcgtcacatgttcctgtccaacaacatcctgaaacgactgcggccgaaaaacccgatacaaagcctgatacgccatctgccactctccttcacctaaaaccattttagtagttttattataacgtattgttgaagaagtttcaaaacgtactttgttttgatttacttcttcaatataaatctgagcgcagcgatgatttaatccttcccagaactttcaaaacgtcctgagtcgggctagcttcaaaaaccaccaccaccaaaaactaaaaaacaaaacccctcaaaaaaagaaccagacccccgaaaaagcccgattccaaaccttactgttcacttttagcagccaatttctcctgcttcttcttactttcatttataaccgaaagctcaattgattttagcaaatttttcacacgttttttccggaagaagccaaacataaaaccaacaataatattattcattttattcattgctttttccgtttcaattaattcgttataagtcacttcgcaagttgtctcacttgttgactttatcgtataagtagtcgtatgtgtgtttactcgactgcttgtttcgaattgatataactcattaggagttactttcaaaatttttgtagtagcaagtgcgccgttagacattgttcgttggtatttatatccttctagtttgcgcatctgaagcgttttaccagtggcatttttcacatcataaatggctgagctaactagtgtatcaaagcattctttttgagaaatatataatttctgtgtgacattcacttttcaatcgactccttctaattcttttctttcttatctttacggatttttagcacgatgaatacacagccaattaaaacaaccgcaagtcctgtaactagaagaggtacactagccatcccatcttttccataagaaggactaaacataataataataagacctatactaataataaatagtgcattaacaattttcattttcaacccacactaacttggaaatagagtacagagcctatttcagttgcttttattgtttctttggcgatttttgctgctttttcttcgtcttcaatatttgtttcaaaagtaagtttcataccttgttcagcaatttttttaaaagttacaccgtctttatcgtatgtttcaagtaattcagtaatataatcacgtttcattggacaattaagaataatcatttaaaaaaacctccttttctatagtttaacgttatctttcgcttcttgcaatgaataaaaatggcgcaggatttcctacatgatatactggctaggcacaattagctgcacctagccagaaacttattattttctaagctttcatctcttcttccggtacaccaacgcgatttgcggtaataacaaatggtacccaaatcaagaacgcgacgaccatatttatgagtgaaattactggtgccatccaatctcccccggttgctaagaaggaattcagaagtggcggcattacccaaactactgcaattttaactgggccgacaatgccaagtgttgttgcaaagtaagcgattgttaccattaccattggtgcgataatgaaaggtattaagtaaattgtatttaatacgattggtaaaccaaacatgattggttcgttaatattaaatatacctggtgcaagagacaatttcgcaactgttcgtgcatccgctcgtttcgagaacattagtaaagcgataattagtacaagtgtaccgcctgatccacccatccatacgtacgcatcgaaagaaccacgtacccattcgaatggtaatttagcgccttcttgtgctgcactaatgttttgtagttgtgctgtaccccaaagtgactctagaaccggagcaagtacgtttggaccatgaatcccgaagaaccatagtagttgtactaagaaagtaactagtaaaacagctccgtacccttgcgaaagtgataataacggttcttgaattgttttggaaatccaagtaataacgtccatattagtgattttgaagaatgcccagtcaataataccaacaacataaagtgcaactaacgcaggaatgattgccgcgaaagctttacttacagccggtggaacagaatctggcattttgataataatatttctgcgcattaatttcgcataaataatagttgatataaaaccgaaaatcattgcagtaaacaatccggtaccatttacttgactaagattaaagaacccgtaaatcccagcaaattcttttggtaaagtattgacatcaaaattagcattagaagccgcaatagcagcttttactgcgtctaagcttacagtaacagttaagttcataacaaaagcagcaagagacactagccccccagctaatcgatctacttcatacgcttttgataaattgtaacctagtgaaaatgcaaaaataattgaaacaattgctaacgtcccattgtatacatatccattaatcccgataagtggttgcattgcttccacaaatcctgtccatccccagtcagttggaaaatccctaaaaaacgcatttaaaagtactgcaattgacccagccattgtaattggcattgtagaaataaaagcatcacgtagcgccactaaatgtttttgcgaaccaattttagcagctactggtacaaaatatttctctaaaaatgctgtcaaaccattcatattttatcctcccattaaccttttttatttactgctcatctctttaaacaaaatataatttctatgtatcttcccctttaggtttatcaactatatctgtttacgttgttttagcaatctctactgctaaaacaaaccagatggaatctttgcaggacctcgtgaaattttgggagtcctcctctccgcttcatgataaggcttacatttagattcactttaatctattgcaatttccgtgccaagtatctaagagtaagaaaatatacgattatcgcttgtaatcgttatcatttataccgatgaagcactattacacacatacctaaaaaactgtgtaagtaagcgctaacattacacagtttcacttaattcatagattcttctttctgtgttataatgagcataagctaagtaataccaacaattcgaggtgataaatatggcagtaaaacgtgatatgccggaagagtcgaaaaatagcaaagttgtgaaaaaagagcatttttcgattgtatttccagatgatataaaagaaccaaaaactgtggaagaacaaaagaaaaagccagccgaacgtgaaacagacgacgattaatccacttcaaacaaaaaagagcccccgctaccggggctctttttttagttaatagaaaagatgaccatttctttatcctcatcaattcgaacttttacattcataccaagtttgtctttaaacaagcttgtaatatctaagtaatcatcataactaccaatgtcgcttttttcgtaaccttgtaaaatggtaggtttaatccggacgatataatcatcgtttgaggtttcttcaggattataagaatagattttcttgccatttttatcaaaaaagtcatatgttgcataagattcattgtttgtgatatacacatctttttgtgtaacgtaagcattatcggccacgctgtagtcaatcaaacctgagtaatatttatttgtcgaaggttcatttatttcatattgtttatacgctagacggaataaataatcgatattgtaataactatttacacggaagtagaggtgcttgtctttagattttttatctaccccgatatcggttgcactaattggaaaaacctcatataacttgccgtctatttcgtaagcaacgtcgtatttatcgaatacttcttggcgctgaaaaaagccaaacataattgctaagattacaaggattcctattaaaactgcaatgattaaagcgggcagccatttctttttagattttagttgttgcattattttcatcctttgtcatgaattgctttactaaattatattgtaccagtttatggaggattatacattacttttataagtttagtagctgctttgtagaaaaaagactatttcgcgataagcaaaatagtccttaatatatttaaaattagtgtcgcgcacctcacctcgacatgcaatcacctgcgttaccttgatagttagctcgggccaggcaacctcgcggcacatgagaagcactgattaatgctgcttccttccggacctgacatggttcacaggttcccattgcgcaagacccaaccttcaacaccacttgtcaagggcagaccaaacaattacgatgcctcaaatgaggaattcaaccccgctagagcggattgcgggttacagggcgccgctacctccccgtctagcacgacaaatttgctaccaataattaagtgccaaataaaaaattatttagcgcaaactctgaaaagagctcaattactagtgtacctttttagtgtaaaaagtgcaagtagaaaacggggaaatattttttaacgtaagtaaacactcatgattgctgcaataattgttccaactacgcaaatacctactaatgttaaagctatccatactattttcttattcatagtcttctcccccttacttcacattatcgcttttcttttagtgattatatcatgaaacacaaaaattagctgttataatcaaacttcttttgccagctatttagcatgctgtagctagccattaattgtgttgttacttgtttgaaaattgggcgtaattctgcatatttcttcgtgttttcactaggatgatagactgctttaattggaagcgtttgttccagattcaacgtttttaaaattcccagcgagcgcattccgataattgcagcgcctaaactagaaccttcaattgtatgtggcacgcgaacttcccggtctaaaatatcagccagcaatctacaccaagcatcatgcccagaaataccacccgtcacataaataatatcatccggagccgaaactgcttcatagacttccgcgagattaaacgcaattccttctaaaatcgcgcgaataaaatgtgctttggaatgattaatcgtgagcccaacaaagcccccgcgaatatcgttagtccaaaacggagccctctcgccaagtaaataaggttgaaagagcaatccagatgcgccaggagctacttcatctatatgagcaatgaaacttgcaaaatcgcgattcataatctcaccttcagatccgaattgctgtaatccccattccactacttttccgccattattgacggctccaccagcgataaaatagccatccccggcaccataacaaaatgtccgaccacgcgagtccacctgaaattcatttgttaatttccgaactgccccgctcgtacctacagtaatcgtcacatcatttcgccctgttgcttgaataccaatattagcaagcgctccatcacttccacctacaataaatggcaagttttccggaatacccattaattccgcgtattcttttttcacgccatgtaattggtaggtttctggaactacttttggcaaataatctggggttaatttgatgatttccattgcttcaaattcccagtcatgctctaaaatgttataaagtccggttcctgatgctaacgattcatccatcacccagacgccaaacaaacgattcagaatgtaagatttaatatcgacaaatttctccgcgcgatggaataattgtggttcatcttcttttagccaacaaattttagcaaaggggctcattggatgtattggcgtccctgtcgcttcatatagttgaaacaagtaattatccctttttatattttcaagcgcctcactgcttcgtccgtccgcccaagtgatacattcagttaaaagctctccgtctgctcctaccataattaaactatgcatcgccgaactaaatgatatgcctcttagttctgttttatctatatccttcattacgccttggatagatgttatgactgcttcaaaaatttcagtaggactctcttccgctttccccgtttcatccgttactaattcataatgcgtagcttcccggcaaatgacctcaccacgttcattgaaaagtactgcttttgtacttgaagtcccaatatctacgcccattatgtaagatttgctcgtcaaaacatttcacctcatatctttgtatcttttcattatacgtcaaatagtataaattttggggctaggctacttggatttttgcaaaagaaaaagctagagaatttctctagcttagtttatcgtattaaatgttttaattcggctttcttcgcctagcactattaatgtgtttttatcggcgaatttaagtacttcttttgtgtttgctgcgctttgtgctacacaacctaaagtataattatatttcggggagtctacgtgataaaacacagcagaaccctttccctttatacgtttagcattgtatttaacttccatcccgtaaatgtattgtgggattttcattttttcgtcggcagaactagaagaagaacgttcctgccaggtattataagctttatctttagaattagaaatccaataactacgattagtaattgctttaaaagttaatttcgtacctggatttcctttttgaccaaaagcaatgcctgtgcggtaaacgccaactggtgtccctgagcttttttcagagaactttggatcaaaaccccattttccaatatgactcgtaaaatggcgaacttcataccaattgccggcactatttttctggaaaaagtaagtcgttgctgtagtgctttttggttttgttgtaataattgcttttttactattccaaagtgctggaacggtgtcagcgatagttggtttgccgatattcgtgaaagctcgggcgtcaatccaaccaatattcgtatttccgagcttgcaataataccattttgctctagctgtttttccttcgcgagtaataatgagtgtctttttatcatacttttttgccgaaccgagatattttacactactacttgtcttgtatattttgttagtaataccatcgtttcgcttcgactgattgactaccccttttaaattaactgctttgtcgtaaatgattttttcatacgttgctgcttcggcgttaaaggagtgaccaaggaggctaaccattagaacaataattaaaccgcttaataacttcttcattattcgctccttttttcgagttattccctatgacaattagcttatttttttcgtttgcgtaatagtaatattgctataaggataactataacacctgctacaacgaaaatccattccacgccttgatcccctgttgcaggtaagtcttctttggatgctttaggtgtgcttggtttagctgtcgcactttttactgcgttagttgtttcgatttttttcacgtttgccggagctttaacaaccacgtcattttcttttttcgttggaacttcataggttacttcttcgctgaaattacccgcttcatcgaaagcataagcgaagatttttttcggcactgtagcccactgcgcgtaaaaattgccatctttatctgcttttgttactccctcgccaaaattttcatctacgggagaagtaatgtagacacttgcgaatggtttcgtttttccagtaaaaatctttgtttctaaatcaaaattcatatctgtgacagttaattgggctgttttttcttttactaaataatttaatttgactgctgtagttttgccttcttcattttccccaagtaaggtgataacatggatacctggttctgctgtattcagtttagaattctctgctaagcgataatttactaatttagtacctgtatgtgttgttaatgtgtctgtaaaatcttttagcgcaattttatcgttttgttcataggaataaacttcagctgaatcggtaatgtcgatagttgttggtgtagtattcttctgtggttcagtagccttttgtggttcagtagttttagtctttggtgcttcttttggcggttcaggtgtttttgaaggatcttcagtgattgtatttttagtagtatctgttattttatcttctgttggagttacattgttaccattttcatttgtttcagcgcttgctgccaatgaaaatggaatgataagactagttaacaaagctataagtacaagcccgtggaattttttcataataaattcccctttcgttttttcatatattaatcataagcagaaatgagtcaaaagtcaattttaaattacaatattgttacaaatgttaaggaagtactacaaaaaagcttgctaagttttttcttagcaagcttttttctataattcaataggtctatctaattgataaagccgtttatatcttggttcctctgccattaatttggcgtggcggccttccatcaatgtttttccttcttctaaaaataatactcggtccattttctctgctccgactaaatgatgcgttacccaaatgagtgatttatcggctaatgtttcgaaaatagttgctagcaaatctcgttctgtaatgggatcaagtcctactgtcggttcatctaaaataacaatcggcgtattttgaagtaaaatccgagctagtgcaatccgaccacgttccccgccagaaaaacgctcgcccatctcactcatttgtgtatggtagccatctggcatactcataataaaatcatgtaactgaactttttttgccgccgcataaacttcctcatcggtggcatcttgatttcctaagcgaatattatttaaaaccgttgtactgaaaagatgtgctttttgatttaacattgatgtaatttcagggatttgcggtcttaaattctccacctcaatgccgttcatcgttacttttccagctgttggcagtaaagctccttgaactaatttaagaaaagtcgacttccctgttccacttcgaccgataatcgccactttttcaccttgttcaagggtaaagtcaaaaccgtttaagattttaggcgacttattatcgtaagcgaaagataaattttctgcttttaaaactacattttcggtattaatgcgggcaatttctttcgtttcttcttcaaaggttggaagcgcagggtcttctattttgtctaggcgggctagcgaatcttggtagagcgatttatcactaatagcgcttgaaactggtacaaacgcttctgcaagagccattatagctaaaacgaaagcagcaatcattgttccagaaaacgcgccatcacgagactcagctgtgctccaatagaccatcacgataaccataaaaccaacaactaactggctaaagaaatcacgccaattaacaaaatgaaactgtttattttcagttcgaagcatatccgcctcgtctttttcataattcgtaataaatgttttttcacgaccgctaaatttccaatcgctaataccaaaaacagcgtcagtaaatttttgatacaaactgtttcgaccttgttttaaataagcattcttgccgcgagcatataaaagggagacccatggcagcaccagcacgagtagtccaattaaaagtacgaaaagcgccgcaaatggaattgaaaatgctccaagtaaaataacgacaattgcgtaaagtacaagactaacaattgccggtagcatcgtagtcaaatagaagttttgcaaatgttcaatatcaccagcaagcaaacctagaatatcgccagttttatagcgtgattttagtagtaaagcttgtggttcaagtaaacgatacagtcgaacacgcattttttctaaaattcgaaggacaagcgaatggctcgaaaggcgttctacatagcgtgaaaccgagcgcataataccaaatgcgcgcactccaacggttgaaatatagacagccataattgactctggcatcagggacgattttgaaatcaaatgacccgatgtaaacataagcgctccagctgacgcaaaagttagcgttccaaggaaaatgacaagtaaaaacaagccgcgattttctttaatatatgggataatccagctacttttccgcatcatacttcctccaattgggctttgactaaattgtaatagaaccctttacgcgccagtagttcctcatgcgttcctgtttcgaccacagccccgtgatctaaaacgataattctgtccatttcaagcatccagtgcaagcgatgcgtcgcgaaaaagacaagtcgattttcaaataagtctagcattggtttttttagttcgtattctgtttcaatatctaagtgtgctgttggctcatccattagtacaactggacgatccgttaagaaagcccgagcaagcgcaacacgttgttcttgcccaccactaagcatccgccctgattccccaacaagcgtttcatagccatcttcaagcccggctacaagtttgtttaaaccagctgattcggctgcttttttcatttcctcttcggtagaattaggatgataaaagcgaatatttccagcgattgtatcatggaaaaggtacggatgttgcggaatataagttacttgggtttgccaatcagttgaagcaagcgccgcaccagtttttccattccagcgaaaatctccggaagttggtgtcaaaaagccacttaaaacatcaattaacgtcgatttcccagcaccagtcgcaccgataatcccaattttttcaaaacctttcacagtaaaacttgcttcatgtagcgatacagcatcatccgcgccgtgcttcacagtaattttttcaaaggagaactcggtattttcagcaaatggagttagcggtaaagcgtccgtttctggcttgtccgctttagcttggtcaataatcccttgaataactcgacccgcttcctgcccgtcaagtgtggcatggtaatccgagccaacttcacgcactggtaaaaagtattctggcgcaaggattaaaacacttagcgcaatcggcaagttcatattaccgtcaataaggccaagacctaagaataaggcaacaagcgcaatcgaaagcattgtaaagaaatccagcgcaaatgaagacataaatgccacacgtaacgttttcatcgtagctttccggtagcgcgaactaaccgaagcaatttttccttcatggtcatgacttaatcctagatatttcaaagtctctaaaccttttaacgaatctacaaagtgattggacagcacacgatatgtttcaaattgcgaatcagcttgttttttcgcagctaatcctagaataatcataaatacaattaaaatcggcaaagtaatcatcaaaataaaagcggaagtccagtcttgaaaagcaatataaacccaaatcatcgccggaataatagccatattcatcattttaggtagaaacagttctaaataattccggaagtcagctacaccttccattaccatcgttacaactttcccagttccttccgctcgtgcaaaacgcggtccaagcgcgaacaaactatctagtaattcttctcgcattgtcttcgcaagttttgcagcatagcgataaacgatttgttttttccatacgttcaaaaagtgacgcaagaaataggcccccgcgaagagacctatttgtattgtgactgattgaaatggatgctcgtgaaataagtcagtaatcgcacgagctaaagttatcgccatcacgataatcgcagcaccttgaacaagcgtgaaaactgcgagaatcgccattatttttttaattcctttgtagttccttaaatcttttcccattaatacgtcattttctccttactagaaacgcgcttacggaaaacatagtagctccaaatttggtaaccaagaacaaacggcaatagcgtaacggcaactatcgtcatcacactaagcgaatattgtccggaagctgcattttctatagttaaatcaaacgcactgttgatagagctgatcattacacgtgggaatagtgacacgaaaatcgtcgcaatcgtgaagacaattccaagtccgccgaatgtaaatgccaaaatatcacgatctttccaaataaacagggcagatagcacgtacataacgactacaattccaatcatcagtggtacaagtacaggtctaacttggaacatatctgtattgaagtaagcaagtacaacgaaaattactaaagctggtacagtaataaaccaaacacgtttcgccatacgacgagcacgatcttgaatatcttcttctgtacgtaaagtaataaatagtaacccgtgaagtaggcacataagcgtaatcgtcacgccaccccatacggagaatacagtaatgtaatcaaagaaaccagcatacatatccatatcactattaatcggcataccttgaatcaaactagcaaataatacaccaaataggaatggcggtaaaatactaccgaagaaaataacccaatcccacgtttttatccaaagcggtgaatctttttgaccgcggaattcaaaagaaaccccacgaccaattaaagcaagtaataagaatactagcggaatataataaccactaaacattgttgcataccagttagggaaagcggcgaaaatcgcgccccctgcagttaatagccatacttcatttgcatcccagaacggtccaatcgtattaacgagtacgcggcgttccagtgcatttctagccataaatcgtgtagacatcccaacaccaaagtcaaaaccttcaaggaagaagaatccaatgaataagatggcgattaatagaaaccataactcatttagtgacaaagctttcatcccccttatcaaatggatctacggaaatctctgctttttctggtttgtgtccgtctggtccttttttaatttcacgtataaacaagtaaaccaatagaatggctaaaatcgtataaatagtcgagaacgcaattatcgagaacaaaatttgtcctgatgaaacgtttggcgatacggcatcagcggttttcatgtaaccgaaaactacccatggttgtcgccctatttctgtcataatccaacccatggagttcgctaggaacgggaagccaatcattggaatcatgaaacgtaaataccattttgcattaacgagttttttcttccaagcaagcacgataccgattaatgcgaatagaatcattaacatacctgcgccaaccatgatacggaagctccaaaatgctgttttaactggtgggatgtagtcaccttcaccatatttttcttcatattgtttttgcagcgtgttcataccttccacgctaccagttaatgttccgtaagataagaaacttagcgcgtatgggacattgacttcccattcgtttttcttctcttctgggttgatcttggcaatcatcgtccacggagctgggtcggctgtatcttcccatatcccttccgttgctgccattttcataggttgagttttaactaagtattgtgcttgcgagtgaccactgaaagccacaccaaatccacctattaccgccatgaccattgcaatttggaatgatcgtttaaagaaggcgacatcttgttttttgagcatcttatacgcactgacaccagcaatgaaaaaggccccagtggcaaatgccccgaatataacgtgcgggaactccacaagtagttgtccattagtaataagttgcaagaagtcattcatttctgcgcggccgttcttaaattcaaaaccaaccggatgttgcataaatgagtttgcagctaaaatccagaaactagacatgattgttccgattgaaacaagccaaatacaagctaaatgaagctttttgccaagtttgtcccaaccaaaaatccaaagtccgataaacgtagattccataaagaatgctagtaacgcttcgatagcaagtggtgctccgaatacgtccccaacaaatctagagtaatccgaccagttcatcccaaactggaattcttgaataataccggttacgacaccgactgcgaagttaattaggaatatgtgtccccaaaacttcgacatttttttgtaaatttctttccccttcacgacatacaacgtctccataagagcaaccataaatacaagtccaattgaaagtggtacaaataaaaaatggaaaatcgttgttgatgcgaattgaaaacgggctaaaaatagtttatccacccttttctcctcctttttatgcttaaaattgctgtttagtcccttgcttttttgcttctttcttaaaaaccttgtgaaaaaccgcccaaagtgatgcgcccagttgctctgtaattcacaaagcataatgaaataatatgtaatccttattttccacgggtttaggaactagttaagaaagatttttactttataatgagttctatctggagtatattttatcctattttaaggtaaatttatttagtactttagatgttattttatttttgagagattgtgataaatttcgcaattattaagtggctgtaaatgttgataagacttattgctttttatttcacaatagaaatcgtaaaagcatgatttagtataatgagtattaagacctattctttttttttacgttttcgcaattcccggaagaaactttttaacatcgcgctactttcggcttctaataatccagcttctactttacacgtatggttaaatcgatcatcctgcaataaattcattaatgaacctgctgttccggcttttggatcttttgctccgtaataaactttgtcaattcgcgaaagtaaaattgctccactgcacatcggacatggttctagcgtgacatatagttctgcgccgctaagacgccaagaattttggtgtttacaagcatcttcaattgcaagtaactccgcatgagtcacagcattctgggtagtttcgcgtaaattatgtgcgcgaccaataatttctccatctaaaacaacaactgcaccaattggaacctctccaatttcccgtgccttcttcgcctcctcaagcgcttgttgcataaagaaatcttgttccatctatgcacctcatttctcaaaaatcactcattgtcattttatcatagcttgtattagatgtaagaacaatctgctcaaattttcacaggaatacttttagttgctttcataaagtatttatattaccatatattaatactaggtactaaaacaaaattatcaaaatatacaatctacttgcaaaggagaatcattatgaattcagagaaattaattgctccagaactttataatatcaccgacgagattgctaaatttagttctgaaaaaactgctttaatttggaaaaacgaacacgatgaaacaaaaacttggagttaccgtcacttgctggaacaagcgaacaaatttgctaacgttgtaaaagatgcgggcgtgaaaaaaggcgaccatgtcattgttatgacgcctagactactagaaacttatgccatatacatgggcttgtggaaagctggtgccattattatcccggcatctgagcttcttaaagcacatgacttagaataccgcatccgccatgctaacgtaaaagcaatcgtttcttacaatggaatgaccgctgaatttgataaaatcgaaaatattccttctgtatcgaaaaaaattattgttggcgaaaaattatccgggtgggatcactacgaaacactaatggaaactgcatcgactgaatttgaacgcgtagaaacgtctcgagatgacgcttgtctgcttgcatttactagtggaactactggtaatcctaaaggtgttgtacatattcacggttggggttacgcgcacattcgtatcgcagctgatcattggttagacattcatgaggacgatattgtttgggcaacagcaggtcctggttggcaaaaatgggtttggtctccgttcctttctgtacttggaaaaggtgcgactggcttcatttacaacggtcgcttcattccagaaaaacaactacatttactggaagaagaaaaaatcaatgtgctctgctgtacaccaacagaatatcgcttaatggctaaagtaaataatttacgcgaacatgatttaagtgcccttcgtagcgccgtatcagcaggagaacctttaaaccgcgaagttattcaagttttccaagacaattttgatattaaagtgcgtgatggttatggtcaaacggaaagtacattattgattgggacactggttgatacgccaatccgccctggttcgatgggtaaaccgattatgccagaatacatggcaattattgatgctgaaggaactccagtcggtgtcggtgaaattggggacatcgcaatgcgcagagacttcccagcacttttcaaagagtattataaagaaccagaacgtttgcaaaaagcgattcgcggtgattatttcgtgtctggtgaccgtgctatccgcgatgaagacaattattactggttccaaggacgaaatgacgatattattattagctctggttacacgattggaccgttcgaagtagaggacgcgctcacacatcacccagccgtaaaagaagtcgctgttgtcgcaagtcctgacgaaatccgcggtacagtcgtaaaagctttcatcgtcttaaaagatggatacgagggcacggaagaccttgtgcatgaattacaaacatttacgaaagaacaaacggctccgtataagtatccgcgccggattgaatttgttgaagcgttaccgaaaactgattctggtaaaattcgccgcgttgagttacgtgatgcggagtttgctagtgtgcacggataatcaaaaacccagccttcctaaatagaaggttgggttttcttttaaatattcaactcactcgccgcttcctcgtccagcaccactgtaaaattagggtgtaactggaaaatcgagcttggaatgtcttctgttactgggccttgtagtgcttttttgataattgctgcttttttcttgccgtttgcgaataggatgacttcttttgcgtgcatgacgctttttggtcccattgttacgtaatattctgggactttttctgcgtcgccgccaacttctccgagcaaaatatcgaacatatctgggcgtgattgaacggaaacaagtcgcgtttcatcgccgaatttggttacgccaggtaagttcccgcagaagtgaccatcttcaccaatcccgattaaaatcgcgtccaaaccgccaactgctttcaaatgcgcttcatggtctgtatagtttttcgtatctagcatgtgaatttgttcttctggaattcccgccggatcaaagtacatcgcttttaaattggcaatagtcacgccgtatttttcgtctccaattggaatttcgtcaaaattataatagcttacatttgtcagtggcgctttatccttcaattcttctaccatcagttcatacattcgcttcggtgtggagcctgctgtgattgccaaatgaacctttttgtcttgatacattttccctagaagcagttgcatcgttgttttactcatattttcgtaatctttttccacaataattttcatttttttcacctctcgctttgaattacctttatgataaagtgtatagtaactatagagtcaagacgaaagggtgataaatgtggaaccgtttttttccattggggaaatggcaaagaaaagccaactctccattcaacgactgcgctattatgataaaattgggcttttggtccccgcttttaccgatccgacttctgggtatcgctactacaaaacggctcaagaagaacaactcaacctcattcaagcgttgcaatatatggggttttccttgcaagaactcaaacaatatctcgacaaaaacacatcggaaagcttacccgatttgcttattaaatatcaacaaaaattaaaggatgaagaagctcgcattgcccgtaaaaagtggcttattgaccgttatcaaggtttattaaaacgggaaactgaaacaacacaacctctaacaacggcccgacttttgcttacagagccacttctaacacctgttcatgcggatattttaaacgacccagatttccatcaagaagttcagaaaactgtgagtcgcctcggtctttcgaaaagctatcagcagtttcctggtttttttatgttagacgggcaggcttatcttttcattgaactagatcattctattggcgcacttggtgaacggcgtttattatcaagtgagcggcaagcttttgtcacgccgcaaaacttagaaacgcctccagaaaatgaaaattaccttttacaagaaacggtggcttggattaatcaagagctggttcacggttattcatatgaaacaaaattaacttttgaatagatattttagaaagattggttataatagaaagaaataacgtggaggtgggcgccgtggaaatcaagcaaatcaaagcaaaagacacgcaagatattaggcaccgggttcttcgcccagaacagcctgaagaaaacgcaatttaccctaatgatgatatggatggtacttttcatttaggcgcttttgaaaaggatgttttacttggagttgcgagtttttatccggaaaaatcagccattattaataatcctgctcagtaccgaattcgcggtgtggcaacagaacgacggatgcgcttgaaaggcctcggcacagcattacttgcagaaggtgaagcggaaatttggaagcacggcgcagatattatttggtgcaatgcgcgaattgtcgctgttggtttttatgaaaaacatggctaccgcaaagttggtaaatcgtttgtcattcctggcatcggcgaacattacttaatgaaaaaagtgaatccaaataaaaaagtggaccaagataactaatatctggtccacttgttttttataatttagaataaggttgtgtatgaatcatccaggagatgccgtactcgtcgacgaattgtcccattttcccgccccaaaattgctcttcgaaaggtaacgttacagttactcttcccgatgagctcactttttcaaagaaagcatcggcgtcggctactgccgctgggtcttcactgttagaatcgagcataatcgagatttggttggatggttttacttctttgccgaatgaatctgaacaaaataaatttgccccaaggacggtaaagccaccgtgaactgttgtgttctctaggttttcttttgctagaccaaacatttcgctttgttcctcacttactggaagccttgaaatattcgttgctccgaacacttcttcataatatcctaaagcctcttttgcattttcaaaagctaaatacgggtacatttttgccatataaatcgctcctttatttttaagacgctagttagaaaatacccaattcattttaccttaaactatctcgggatttttaaaaattcggcgccatgttttgctcataatcacaagacagacggtgaacgcgcctaaatctgcaagtggaaaggcgtaccaaataccatctaaaccgaagaactgcggcaaaataagtaaaagtggtactaaacagatgatttggcgcattaaggaaatgataaaggaaatccgtgctcgaccaagcgcttgatatagccctccgcagacaatttggaaaccaattgttggggcagctagaagcataaatctaacagcatttgttccttgtgcaatcaattctgggtcattagagaaaattcgtacgagcattcctgggaaaatttctaccaagccccaagcaattagtgacatgacagttgctgctatcattgatactttgacagctttcattacacgttcgaattgtctcgatccgtagttgaagccaacgattggttgcatcccttgtgttacaccattgatcggcataattacgaaagaagcaattcggttggcaattccgtaaaccgcaatcgccattgttccgccataaatattaagcatccagtttaccgcaaccgttacgatactccctgctgacatcataataaatgacgggaacccgattgccataatccggcgaatcagtgggaaatccattcggaatgagaacccttttaaagataaagtactttttcctgataaaaagtaaatcaagagccaaatcgcgccaacagcctgcgcaataacggttgcaagcgctgaaccacgaacgcccataccgaatcccataatgaaaaccgggtttaaaatcatatttaaaatagcggaaataatcatggttaacatcgctgttttcgcattaccttccgaacgcacgatattattcatcgccatcgcaaaggtttggaacactgcgcctagtaaaataagcgataagaaatcactcgcaatatcatgaatatccgccggtgctccgaaaagcgtaataagtggatccaaaaatataaaggttacaattgcaataaaaatactggaaataagtactaaccagataacttgatggaatactttatccgcatgtttttgttcaccggcaccgagcgagcgggaaataattgaagcaccaccaataccaaacatcgccgccatcgccatcagtatcatttgaacgggaaaagcaatcgaaagtgctgcaacccctgacggaccaacgccatatgacacgaaaatcgtatcaacaatattatacattcccataacaaacataccgataaatgccggaatcgacaaacgcgccatgagtgatggaatgctatcttcacctaatcgtttactctgttctttcattcgacctctcctccttcaactgccataatcgcattatcagaaagtcgtcctatcaaatgcattaagtcatctttttcttcttcgctaaatcccgccgttaaaagtgcagaccattcagctgtaacttcttcaattaattctcgcattttaaatcctgtttcagtcacgaaaatccgttgaatacgtctatctcttgtatccatttctcggcgaatcatcccaagatcttcaaggcgctttatatggcgcgtcacactggctttatccaccataaacctttttgccattgattcttgagaaataccatcttctttataaagcgtccataaataccgcaattgacctatattaagaccagtttcaagtaactttttatttttaaaagtgctttctgaacgatgaataattgcgatggctttcgctaagctttcatgtctatctgccatttatccgactcctcataaaaaaatccgccccataattagttgcggcgtcaaccattatagtatagcagtaatttggttgactgcgcaacctttttatttcccgggcaataatttgacttcctatctttcttttgtaaaaataaagaatagagaaggggtgctatccactgtgcatattaaaatattaaaaaatagatatcccaatatagtcgtttcaaaaaacccaataaaatccactacagatacgttttcttttttcgaggaaccgtattattttactatccccaaaagtgacctttcagaagaagaagcagcgttactacatacgttatttccaaaaccattaccaacatttacaaaagaatctactcagttttggttcgatttgttatttggaaatgaagccgtcacgattacgagtgaaaaagaaacttaccggataacacagtttcatattaaaaccgcaaccaccaaaagcatgttgcaagaatggcaaaaagcgctactcagcttctttagtccagatgctgaactaattatgttttcggcgagttatggtgtgattattgaaaaatccaccggttctctgctcggggaagaagaacttattgccgttgccggtacccttgaaaatgatttttatattcaatctactttctttatggggctctttcacccgttaaatgctaaattacgcggtttatttgcagaggaacgtaccatttttgaccataataatcgtgaagttgtccaaaccgtcgcttccgaaagtttaaaagtcatcgcactaagaatgaaagaaagtttaattacgagtgaactcaacaaccttttccatcaagatgatacttggattcctttaattcatacgttatttaaaaaccaaggaaacatcagccttactgccaaagaactttttatgcaccgaaatacaattcaatatcgtttggacaaattctatgaacaaacaaacttatcactccgcaaaatggatgggttgctcttagcttatctgtctacacttcaaacaaatagtagcaatcatgaataaatgatcatggttgctttttcgcttgacttaaagttaactccaaggaatacaatcattatagaaaatcagtaaaggagaatggctatgaccaaaaataaaattagcttttatgtggtggatgcttcggaagacttaacaatgaatatcaaagaagcgagtgaaaaaagtggcgtttctgctgatacaattcgctactacgaacgcattggtttaattccacctatatatcgtaatgaaaatgggattcgtaaatttggcgcagaagacatacgctggattttgtttagtcgtcaaatgcgccgcgctggtttatctattgaagcattaattgattacttggcacttttccgagaaggcgaacacacgctggaagctcgcgccgaattgctgaaagaacaacgcatggagttgaaaaatcgcattgatgttatgcaagaagcgcttgatagacttgactttaaaatagataattacgatacccacctcattccggctcaaaaagaactaaaagattttaatgtcgaaaggggtaatttataatgagtacactagaaaacagcgttatttttgataaaggtgaactgattactaatgactactttaccggtaatgcttatttaaaaatgcttgtcccagaagatactgtttacaattgtccgattgggaacgttacgtttgaaccaggagccagaaacaactggcataaacacgacggcgggcaaatcctacttgtaacaggcggaactggttactatcaagaagaaggaaaacccgctcagttacttaaagagggtgacgtgataactatcccgaaagacgtgaaacattggcacggagctacgaaagatagttggtttgtccatttagccatttcaacaaatgtggatatagggggaactacttggttagagcccgtatccgatgaacattacactaatttataacgaaaaaacccgctagccttcattcaaggttggcgggttttacttatttacttacatacgctaaaatatcttctggtttttcgaagacaagttcagccttttcaaagccatcagttgtctttgcaccccaaagcgctaagccaaaatgagctccggccgcatgggcacatttcatatcataagaagaatcaccgacataaagcacctcatgtggctctcttccaagaatttctaaccctttcagcagcgggtccggatgaggtttatggttttcggtatcacttgcgcaaacaatcgcttgaaaatgatcctgaatatcaaatggatagaaacctttctccatttctaacgcatttttcgaagtaactacgccgctttctggaatggcatgcagaactttatgaataccttcgaaaacctctacttcttcaataaaagttgcttcacgttcaatccatttgtccaatactttctctgaatccaaaatatttaactgttcaaccgcagctgccccagtaattccaagtacaaatcgtaattcatctagttcataacttaatccttcttcggctaaaaccgcttgaagagaatgcaaaacagctctctccgtgtctagaatcgttccatctacgtcaaaaattattgctttatacatataatttcctccttcaagatttagcgaagttgtgataatggtgagttgtgtatctcgcttttttcttattttcagctttttgaatatctgagctattagtgcctttattttgaagcaaatcccgaaattcgcgcaaattagcatgagaattcccatttatttcaaattcgatattatcgcagctaaaagtgagcaggatttcctcttcttctcgaactaaagcaatctgtcctaatttcgcaactggaaaagtttgccgttttttcatacctaagctgaagttttggtcaaaaacaagataatctctatcgatgtaaaactctccgaattgatattccattcctagggctgaactaattttgcatactccatctaatttcataccattcgcctccttcatcaccttatatattagttttaaatgatgaaatgggtttcatgtcaagcaatttcataaaaatattttaaaaatgaggcggcgactagcttttataccgttttccttctaattaattcatgttccactttaattcgttgtaattttccttgttcaaaaatcgaaaaagcattttctcctaatttttttaggttatgatcaagggttgtgatttcaagagccttaccaattgggagattttcttgccctaaaatagcgacgtcttctggcacgcgtaacccaagctccttcacatggtacataacacccgctgcaacctcatcaccattcgcataaatcgcatcaggccagtctttcccttcagcaaaaaagtattttcctgcttttacaccatcctctaatgtatagcactcacttaaaaaacgattttcaccaactggaccaaaaacctgctcatatgcgttaattttcccatatgtacttgtgctttcccgcgaggcccgtcctgctgtgaatgccacttttttataaccttcatcttgtaaaaattgaaaccccgcgcggtaggcctttactcggtcaatataggaacaagatacatctttggactccacgtattcacatgcaataatcggaccataagcaagatatggcaaaatcacatcccaattattggcacgcgaagtaataattagcccgtcaacttgctttgttttcaagcgcattagatatttttcttcttctttcggatcatatcctgttgggaaaagtgtcaccgaataacgatttttaaaagctgcttctaaaataccattcacaattttgtcaaaccacggatgatcattataaggtataatcacgccaaccgtatttgttttaccacgcgctaagtccatggcgctacggttaggagaatagtctaattcatcaataacagcttgcacgcgggctcttttttcctccgcaacatacggatggttattgagcacacgtgatactgtcgtcactgaaactcccgctaatttggctatgtctttaatatttggcattttaaaaacctcattcctaagaaaaaagcgcggacagatttctcctaccgcacttttatttttatcattaagccagctgttcgagttcgcttgtttgaatgtctttttcgacacgaaccgaaaccagtctagcatcattcatttcttctactgtaaatcgaagggtatcatattctactactactttatcatcttcttctggaattgtcccagttaaagtaagcacaaagccagctacagtatcaactccacgcgctggaagttccacgtgaaacattttgttgaaatcatctagtggcatgcggccttcaacgataaatgtattatcatcaatttttttgacttcatcagaaaacacatcattttcatcgtcaatttcgccaacaatttcttctaataaatcttctacagtgacaatacctgctacgccaccatattcatccattaaaattgccatttgatttctagttctttgcatattcttaagtaagtcatcaataaacatcgtctcttgggcaaaatacgcgtttttaacgagcgatttcacatcaatgttttcaaagcctgactttctcgcttccgcaaaaaaatctttcatatgcagaatacctagcaccgagtcctggtcgcctgtatagacgggaactcttgaaaaattctcacttaataatgcgtcacaaagttcttccgattctgtttcggcatcaatcataaacgcatctgtccgtggtaccattacttcacgcgcatatttattatccatttcaaatacaccacgaagcatttgtaattcttctacctcgataatgccgtcacgtcgaccggtttcaatcagtagctgcatttcctctcgcgtcattttttcattatccgtatttttctccattctcgttaatttcacaagaatatctgttgaaaaagataggaattttacgaacggacgaagcacaacaccaactgccataattggtcgtacagaaacacgggcaattttttctgatttttggagtgctaaacgttttggataaagctcaccgaaaactaacgtgatataagatagcacaatagttacgacgataatggataactctttcgcaaaactgcttccgccaaaaaccgattcaagcctagtcgcaatactagtcgcggctgacgcactggagaagaatccagcaagcgtaataccaacttgaatagtagctaaaaatttacttggatcatctacgagtttagcaagcattacggcttttttgtcaccggtttctgcttggtttttcacccgatttttgttcagtgatacaagggccatctctgctgaggcaaagaacgcgttgagcattgtcaacaccacaataagaattaactgcaagataatctgctgactctcggggtcagggttcatatggaactctccactccttattttctcaaaatattccggacaatttcccggttaagaaaattttatcacgccacccccattactgcaaggtttcaaatctccgcaaaaactttcacagcatcattttctatcatttcaaaaggatatggaagcgaaattcgttctttattcacagcaaaaattcgcgcttttttattccgataatccgttaaattacaaaacggactcacgcggaaagaagtgccaacaataacgattaaatcagcttcccgaatagctgcaagtgactggtctatcgcgctttctgaaatcgcttcttcataaagcaccacatctggccgaacgaccccaccacaatctgcatggatgtctgactgtaaatagtcgcttgctgaaacacttcttccgcatttttggcaatagcagtgatacaaactaccatgaaaattaactaccttcttagagccagctttttcatgaaggccatcaatattttgcgtaataacagtgacgtttttatccgcttcgatttcagccattttgcgatgaatagtgtttgggacagcatctggatagtacatattttctgtgacaaattgataaaacttctcgggttcccgcacaagacacgtatggctaagcatatattcagggctactcatccccgcatacaaaccatttttcgaacgataatccggaattcctgaaggcactgaaacgcccgctcccgttagaaaaacaatatgttctgcttgtttaatcgcttctttcaaattattcatcttttaaattcctttcatttatatgctgtttatctttccagttccaccattttcgtaaatctgcatgttgctcgttttcatcggtttctgcgacatatactgcgcagcgatacgtatataatacacaaggatccattctttcgcctcgtttatcgcaagtgttttcgtataaatcaagcggattctttcctcttaagtcagcaactttttcaatcccaatttcatttagcattaataccattttcttgcctattcctggtaattttattagatcagttggcatgatttcccttctctctatgcatttttcggttaaaataaaaactgattagtacattgataaaaataaaaccagcaactacaaggaagacatctccgtagccaaaatgcgccgccacgcttgatccgacaagcggaccgatgacattgccgatatattgaaaagattgattataaccaaaaattcgaccggaaatttcgcgaggtgtatttttagttagtagtgattggactgccggaagtaacgcaccatctgtgagacctaataagaaacgcaaaataccaagttgcatcggattttgagcgaaagccattggtatttgcagcaacatggacccgatgagcgcgcctagcagtattcgctctgaaccaattcggtcgccccaccttccaagtcgtggcgcagcgattaaggccgcaacccctggtactgaagcaatcatcccactaataaaggcaatgttttgcgcatttcccgctaaatcccgcacatataatgtcaaaatagggttcacggaattggatgcaatttggatcatcattgtcgtaataaacagcgagataattaagccaggattttttaatgataagaaaacttcctttcctgaccgcatttcctttttttctactggtgtaaatttctctttaacaaagaaaagtgttaagaaaaaactacctaataaaagagcgcctgtaatgtaaaacactggtctaacgccaaatgagtcagatagcgctccaccaattaatggaccgattaatacgcctgatactgctgctgttgataaagcaccgagcgcccatccactgcggtgacgaggaacttgtgtggcgattagcgcattagccgtggaaatgtatcctgaaaatatccccatcaataaacgtaaacctacaaattggtaaacgttgctgacaagtcccatcaaaatcattgctatcgccattccaagtgcagcacgtaaaagcataatgcgccgtcctttttgatccgctaatttgccccaaaccggcgacataattgctgatactaaaaatgttgagctcagtgccacacctgaccataaacttacttggtcgggattatgtacgccgagttcttcaatatataatggtaaaaatggcatgattaaatttaatccagtcccggtaagaaaacaccccacccaaacaacatacaaattcttcttccaattttccataagttcacctagattcttctatcgttatccttaattattccacaaaaaaagcgaaagtaaaactaaacccttcgcttttttgctatatttacttaaaatgttccacgtgaaacaatttaggattcaagattttctcgtggtacccagccagcttcattatcttccgttacgcaccaaacccagccattaagctctcgattgctttctaatttatccccaggttttacatttaattcgcgcgccgaataatcttctgtcacggtcccactctttccgtcactgcctaactgaataatttgttttggaacccagccttctttatccgatgacttcactttgcaaaaaatccagccagggtattctgtatcttcatcaaacacccaaatagactcatttttattaacaaaaagtggatttggatacttgctaatgtgttctttttttacgataaatgtttgattcatagttagaaaccttcctcgttattttttagcagcttcccaatctgcaagaaacttatcaattccgctgtcggtcaaaggatgttttaacatttgttcaaatactttataaggcactgtagcaatatctgcacctgccttggcacattcaatgacatgaatcggatggcgcacgcttgctgaaataatctctgttgggataccatgtgtttcaaaaatttctgctatatcacgaatgagcaccagtccgtcgtcaccaatatcatctaaacgacctaaaaacggggatacgtatgtcgctcctgcccgcgctgccagtaatgcttgtgtagcagaaaagactaacgtgacattagttttaatcccttcttccgtcaaaacttttactgctgccaaaccttcacctgtcataggtattttaacaaccatatttggatggattttagcaataactcgaccttcctcaatcatctcttccgcgttcaaacttactacttcaccgctaatcggtccgtcaacaatggatgtgatttcttgaataacctcattaaaatcgcggccttctttggcaactagtgatgggttcgttgtgacaccagcaataaaacccattctattcgcctttttaatctcttctacgttcgctgtatcgataaaaaatctcattgaaacatcctccttttctatcaagcgctttcaattacagagccattataacgcaaaagataaaataatgctttcgaagtgcttttttccacaaaaaaaagaatgcaattgaagcattctaaaaaagtttcacgtgaaacaaagttataaacgagttttgtccatcactagtagaggcttaggtctatttctaattatatcctctttaattaaatgcatgactgtgtgagccacatattcacgtgatgtattggtgtatcttgcaagaacttcttgcgtgacttcttttggtagcaatatcccgttatcagaaaacgttcctagagtttgagcgcatttgagaatggctttgcgaattcgttcttctttctttaaaaagcttagttttgcaaaagtatgtgcttcccgtagttcttctgccattactttaatcatgaaaaagttgttctcatcttccttatcaaacacggaaaataagaaattactatctacttccataacctctccatgacctagactttgcatcgaaacatgggggctccattcatcataaaacaaatggtaaagtccaaaactatctcctttttgcaagaaacgaacaatgcattctttacagttttcttcttccaattctgcatctttttctacaatcatcccgtatatgccacttagaacaaaatatacttttgtcccagtcggacttaaactttctagaacctcacccttcttcgtgctgataaccgagcagtagtctttgtaatttggatgttcaaagcacagctccattaatttgctaaccgttagattggattcaagctcttttaagaatagcatactctctcctttgctatataatattgaaaaaactactcgtaattatatcataaacactatattggaaatctcattcataggctttcaaaaaatgctgaaaactcaatttaagataactatattacattgtttattataattcttaatttttatcacttataaatgtgagcttttgacataaattcgaattttttgttacttttctttaaatattcaaatcgagaaaataattccataactaccactttagactggtttattatttggtaaattgattatacttaaaaagtaagcattatatggatggggaaattaggaagggtgaaataaatggatcagaaaaaatatagttggcggaattttttccagttaattattagtgcaaaacctgcaaattggataatattctgcgctttaatcgccagtgtcgtaactactgttgctggccttgtagtcccactttttacaaaaaacttaattgatggcttttcgatagcttcgttagatgtaaaaatggtggctttgattgttcttgcatttattttgcaagctataacaaacggtttctcgattttcttgcttaattatatgggtcagaaagttgtagctaccatccgcgaacgtttatggcgaaaaatcgtgcacttgccagtttcctattttgataatacaaaaacgggtgaaatggtgagccgcatggtgaacgatacagtcgtagtcaaagaactaattgccgatcatttaccgcaatttgtaacagggattatttctgtggttggtgcgattattatcctattctttatggactggaaaatgacactaattatcttaatagctgttccgattacagcgctagtcgttgcgccgcttggtcagaaaatgtttaaaatctctaaaggtcttcaaaatgaaacagctgacttcactggttctattagtcaaaccctttctgaagcgagactcgtaaaggcatctaacgctgagacacgtgaaacggaagctggtcataaaggaatcaatcgtctattcggattcggtattcgtgaggcgaaagttgttgctgtacttggacctttaattttctttgttgtaatgggagttattgttggtatcattggttacggcgggattcgagtttcagccgggactatgactactggtacattaatcgcattcttgttatatctattccaaattatcgtcccagtaacctcttttgcaacgttcttcgcgcaacttcaaaaagcaaagggagcgacagaacgcattgcagatattttaaatgaagcagaagaagatttcgatgctggtaaaaaagtagatgtgagcggaaaaacgattcgcgccactgatatttccttctcttacaatgaaggtgaaccgattttaaaagatgtttcttttgatacaaaaccaggggaagttatcgcattcgctggtccaagtggtggcggtaaatctaccttgtttgcgattttagagcgtttctatcaaccgaaaacgggagaaattttagtgggtgatattcctctttctgagatttctattaactcatggcgctcacaaatcggttacgtttcacaggaaagtgctatgctttcaggcaccattcgcgataatctttgttacggactggaccgagaaattaacgaagaagagctttggaatgtagcaaaactggcttatgcagacggctttatttctgaacttcctgacaaaatggcaaccgaagtcggcgaacgtggtgtgaagctctcaggaggccaaagacaacggattgcaattgcacgagctttcttacgtaacccgaatattctcatgttagacgaagcgacagcaagcttagatagtcaatccgaacaaatagttcaacaagctttagccaacttgatggaggggcgcactacttttgttattgctcaccgtctttccactattgttaatgccgaccaaattctctttattgaacacggggaaataactggtcggggcacacatagcgaattagtggcttctcatccgctttacgcttcttttgcggaacaacaattaaaataactatttcccgggaaataaaaaaacgacgatgcgaatatgcatcgtcgtttttttataaggattgatgaaactttttgagttcgattttctttgcttcgtctaaatcatgccacctgatgccttgtacggctccttcaagcgcacatagttcacttaaacaaacagttgaatctttttcccaaatacgtaaaaaggctgctttgcttccaacatcttttagctcagctggagtttttatctcagcttttattaagtcctgctccagtactttgccaatgtttggtaattcgctaaggttcgccattacagttccttcttcctttttattttggtaattcgattttttcgataccgcccatataaccttgtagtactttcggaatgagtacagatccatctgcctcttggtagttttccaaaatagcagcgactgttcgacctagtgctaacccggaaccatttaatgtgtgcacgtattcgggtttgcttcctggttcacggcggaaacgaatgttggcgcgtcttgcttggaagctttcaaagttactgcaagaagaaatctcacggtaagaatcatagcttggaatccaaacttctaaatcatattttttagcagcagtgaagcctaaatcagcagtacacatgcttagtacgcgatatggtaattctaggcgacgcaatacttcttctgcgcatccagttaatttttcaagcgccgcgtaggaatcttccggtttaacaaattgaactaattccactttgttaaattgatgttggcgaattaagccacgcgtatcacgacccgcagatcccgcttcagaacggaaacatgcgctaaatgctgtatattttcttggtaaatcttctgcttttaaaatgtcttcgcggtggtagtttgttactggtacttccgctgttgggataaggaaataatcttctgcttcaattaaaaatgcatcttcttcaaattttggcaattgaccagttccagtcatgctcgcgcggtttaccatgtacggtggaagcatttcttcatagccatgttcattcgaatgcaagtccatcataaagttaattagcgctcgttccagtcttgcacctaattttttataaaaaacgaagcggctgccagttacttttgcagcattttcgaaatcaagaatgtctaggtcagttcctaaatcccaatgagcttttggttcaaaatcaaattcgcgaacttcaccccatttgcggatttctacgttatcgtcttccgattcaccgaccggagtagactcatgcggaatatttggaatcgacattaaaatcgtatctaacttctcgtcaatttctcttaattcgatgtctaatgttttaatacgatcaccaacgacacgcatttcttcaattttagcatcagcatcttgtttttcgcgttttaatttagcgatttcttgagatacttcattacgctggctttttagcgcttctgtttccacaatcagagtacgacgacgtttgtctaactcgccaaatttctcaaattcacccaagtcttccccgcgattttgcaacttctgctttacttcttcaaaattattacgtaacaacttaacatctaacatgctaactcctcctttatttttttccatataaaaaactcccgtactttcccgaattaacaggaaagggacgagagttaaccgcgttgccacccttattgggacttaaaaaaatccccagcttcatttaggtttaacggacccagccggaatgatttactcgcaaaactatgctttccaccactcactccaagatggattcataaggaaacttcaccagttcgcaccaaccactggctctctttagaaattctacctcattactacttcttgtcttcgcttttcgtattaatttaaagttattctatcgcatatctgcttaaattacaagcaaatctttaaccaattaaatcgagcgtgtctggaccatcatcatcagaattcagtattctaatttgttccggaacaatttttataacgacaaaggatggtgaatcttcgccttgaaaccagtctttagagatattttcccagatgcgttctttgatagattcatcttcttccagtgaagctaaaccattaatttctaaaaacgcagaaccagggctatcatagccaattaaaacgcatacgtgcgggtttctacggacttcctctgttttcggtagttcttttccagatggtgtgtaaagtgttaagccatcatgaagaaacgtcatatatctagcgtgcggaaaatcgccttgtacagaggttaataccccaacttgatgttgttctaaaatggcgagaattttatcttctagttcattttccatctaaaacaccttcctttggttatttagtgtacatttccacttgttttcaggcttcaaacatttcaggcttgttatctccgtagctatttgctataaaagagtataaccgttttgactagggggatttgaagtgattttattaatcgatcataatgactcatttacatataatttataccaatattttttagagcttaaggaagatgtgcgggtagtttctgctagagatttttcgcttcaagcattcgaccaattagcacctgaaatggttattctttcgcccggacctggttctccggatgattttccagaaagtttagctctcctagacaaaattcacgctcccattctcgggatttgccttggccatcaaatgattggtcattttttcggggcaaaagttgttcaggcggacgttcctgttcacggaaaaactagcataatctcgcatcacggtgaaggattatttgccggacttgattcgagattctcagttgcccgctaccattctttagtcattgacccaaatactgtgccagctgaattgaaagtgaccgctgtaacagatgatggggttttaatggggttagagcatctaacaaaagcgatttacagtgtccaatttcatcctgaagcaatcctttctgaaaacggacacgcaattctagaaaactttatacgactggggagagctgccaaatgagtttattacgttttgattttgaaggttcggtaaagatttttgaaaagccaattcgcgaactggtggcacgcgatttatcggaagtacttcctataatgaaagcggccgaagaagcccaaaaatcaggaaaatacgttgctggttttgttagttatgaggccgctcctgcttttcgtagcaatttaaaaaccaaacaacctgccgagaacatgccacttatctggtttggtgtatacgataacttcacgactgcacctaacgaaaactcagacactgcaccactttcttttaaaatggatacggattacccgaattatgcggaaaaaatagcacagattaaagcagaaattgctactggaaacacataccaaatcaactacactgttcggctccaaagtgaggtaccaagtgagttttctgcccaagcttcttttgaatcgctgcaacaagttggaaaagcaaactatacagcgctacttgaaacggatgaatttcagattatctccgcttcacccgagctattttttaaatggaaggaaaacatcttgacgacacgtccaatgaaaggcaccattcgccgcggaagtacggaacaagctgacttagaagcacatgattggttaaaaaatgattctaaaaatcgtgctgaaaatgtgatgattgttgatttactacgaaatgaccttggggtgattgcggtgcctggtagcgtaaaagtgcctaaattaatgactttagaaccttaccccacagtgtggcaaatgacgtctactgttaccgcagaaacacctcctgatactagtttaaccgcagttttcgaggcgcttttcccttgtggttcaataactggcgccccaaaagcccggacaatggaaattatttcagagctagaagattcacctcgaggcgtatactgtggcgcgattggattcctagaacctaatggaaatgcgatttttaatgtgccaattcgaacgatttccattgcagataataaagcaacttatggtgttggtggcggtattgtttgggattctgatgccgagagcgaattttccgagattcatgcaaaatcagccattttagaaaaagcaaccaagttttctttaattgaatgtttacgccttgaaaacggagcgctttcccggatagactttcatctaaaacggcttcaaacaagcgcaaattttttcggttttccttttaatggtgaaaaaattgtggagctatggcaggaaacagcgcgaaacaatccagctggaacatataaattaagatttttactccatccaaatggcacgcaccttttagaactagccgaaataagtacgcaaaatcagcaaataaccgcgcaactggcaaaaagtcccgtctcaactgatgatttattcctttatcataaaaccactaatagatctgtttatgaagacatgaaaagcactgaaaccgaggagacattgctttggaatgagcgaggcgagctaacagaatttactaccgggaatatagttctaggcataaaaggctgttttttcacaccaccagtgagttcagggcttctcccaggtaccatgagagcagatttattagcaaaaaacaaaatttccgaaaaaacactaatgaaaaaagaccttttcgaggctgactttgtgtggttaataaatagtgtaagaggatttgtagaagtagaaatcaaacaataatcaacaggttttttcacaattaaaaagtgattttcgacagtatatttgccatattttcgccatatttagaattagtgaaaaaattacttgcaaattttcacaaactatattagaatatgtgttcgcacgtctttatttccgttttccaagggaggaaaatcatgaaagtattgtttcatcatcttaaaaattacaagctacaagcaacattatctactttgtttgtagtagtcatggttatctcacaactatggcaaccaaaattacttcagcaagtcctagacgccatcatgaaggataatatggatgaaatttcttccataggcgcacttctaatcggtattgccgcagttggccttatcgctgggattctaaacacgattctttctgccaaagtcgctcaaggtgtcggcgcagatattcgtgaatctagtttccgtaaaatccaaacattttcatttagtaacattgaaaaactttcgacaggtaatctagttgttcgacaaacaaacgatattacccaagtacaaaatttagtgatgctttcactacagtcgctaacaagaattccgattatgtttatcggggcatttattttagcgatgtttactctacctgaattatggtgggtaattattgtgcttgttgtactcgtagtgctgattgttgtcttcacatttggctctatgggtaaacactttgcgattatccagaagttaattgaccgcgtaaattctatcgcaaaagaaaaccttgccggaatgcgcgttgttaaatcttttgttcaagaagataacgaaatcggacgtttcacaactgtcagtgacaaactaactcgtcacactatcattgtaggaactcttttttctgtcatgattcctgcatttatgctcgtttctaacttagcaattgttgtttctattttcttcgtaggtgacatggctgctgaaaacccagaagttatcggggctatcgcatcattcatgaactacttaatgcaaatcatgatggcaattattatcggcggtatgctaatgatgatggcctctcgtgcgcttatttccttgaaacgtattactgaagttctcgaaacagaaccagatattacatacaatgaaaatgcgcctgaacaagatttagaaggtactgttgagttccgtaacgttagtttcaaatatgatggtgacgatacacctgcacttgaagatatttcttttaaagcgaatgttggtgaaatggtcggtattgttggcgcaacaggttccggtaaatcgactcttgcccagctaattccacgcctttatgatccaactgaaggtgaagttattattggtggtactaacctaaaagacatcaataagaaaacacttcgtagcaccgtttccttcgtgctccaacgcgcaatccttttctcaggaacaatcgcagacaatttacgtcatggtaaaaaagacgcgacaatcgatgaaatggaacatgcaagtaaaatagcacaagcgaaagaatttattgataaacaagcaaaactttatgaagctcctgtttctgagcgcggtaataacttctctggtggacaaaaacaacgtctatccattacacgcggagttatcggttcgccgaaagtactaattcttgatgacagcacaagtgcccttgatgcaaaatccgagaaattagtcaaagaagcacttaataaagagctagacgacacaactactttcatcattgcacaaaaaatctcttctgttattcaagcagataaaattctcgtgctcgatcaaggtaaactcgttggcgttggttcccacaaagaacttctgaaagaaaatgaaacttaccgtgaaatttacgacactcaaaaaggcaaggaggtaaccgcataatgaaagagtttaaacaaattagccgctttttctggcactatctgcggggttataagcctcaactttttgtcattttaattgctgtagtttttgcgacataccttcaagtaaaagcaccacaatatattggtaatgctgttcaagagcttggtgattatgttgttcgtttaatgcgaacaggtgttgatgacaagagcgacttcatccatatcatttggatgctgattctctgctacgtactgctcgctgctgccacttttatccaaagtatcattatgacaggggtagctggtaaatcgacgaacagaatgcgtatagggcttttccgcaagatggaaaaactatcgattcgtttcttcgatagccgcaatgatggcgaaatgctgagtcgcttcactagtgacttggataacatttctaacacactcaaccaagcattgattcaagtgctatcaaacattgcattaatgattggtgtcatcatcatgatgttccagcaaaatgtggaactagcctttgttactttaatatctgctccatttgcgattattattgcgactataatcattcgaaaagcccgcaaattcgttgatattcaacaagatgaattaggtgttttgaacggctacattgacgaaaaaatttctggtcaaaaaattattatcacaaatggcttagaagaagaaactattgagggctttgttaaacaaaataatgttgttaaaaacgcaacttataaaggtcaagtttactctggtttactttttccaatgatgcaaggtatttcattattaaatacagctatcgttatcttcttcggtggatggttagctctaaacggcgaccttgaacgcacagccgctcttggtttaatcgttatgttcgttcaatattcacaacaattctatatgccactaacacaaatttcgtcccagtacagcttgctacaactagcaatcactggtgcgcgtcgtgttagtgaagtatttgcagaggaagaagaagttgaacgcgagaacttacaaacaattgatggtattaataaaggtgttaaactagatcatgttgatttcgcttatgaccctgaaaaaccagttctaaaagacgtttcaattgatgtaagtaaaggtaaaatggtggcgcttgttggaccaactggttctggtaagacaactgttatgaaccttcttaaccgcttctataatgtcgaccgtggtgcgattctctttgatgatatcgacatccgcgacattcgccttgattctcttcgtaaacaagttggtatcgtgttgcaagattccgttctatttacaggaaccattcgcgataacattgttttcggtaagccggaagcaagcgacgaggaagtgattaacgctgcgaaacaagctaacatccatgacttcattatgaacctagaaaaaggttatgaaacagaaatcagtgatgaaaacaatattttcagtgttggtcaaaagcagcttatgagtattgcgagaactattattacgaacccttctctactaattctagatgaagcgacaagtaatgtagataccgtaaccgaaagccgcatccaaaaagctatggacaacgttatctccggtagaactagtttcgtcattgcccatcgtttaaaaactatccttgatgccgaccatatcgtcgtgctacatcaaggtgaagtgattgaacaaggtaatcatgatgagctgatgaaggcggaaggattttattctgagctttatcataatcagtttgttattgagtagatagacgctttttatggtctgaaataaatagaaaaaaggaagttctcaaatgttaaacattgggaacttctttttttatttcatcagtttcttagttttgaatggttttttctagcatacaaagtcttcttttcattttcatctcagtaattttatgttaacgtaatttagaacagaaaaataaaaacagaggtgaacatacatatgaattttaatctttttgttagaagtggttttattggtcttattttactttttgtcatccaggtattaggggctgtaagagggttattgattcaatctggttttatggatgggagcgtcaatcagagtttactgggcacaaagcttattatagtgccaattatattttttactattagtattgtttttttcttattatggttttataaagactatcaaacaaataaaaaaaaagtcgatttcctagttaaggaaatcgacttttttatgttaattaaaccaaccttgcacaccattagaaacgtagcttccaatgcctttaaagaaagaacctactgcttgagcggaaagtgcaaaccagtttgccttttcgacatcgccagcagttagtactttaatattttctgtttgtgttccatcaagataacctaatttgtcgccatcttttaaggatacttccatttcgccaacttccgtattctttttaactggtgcttctaaggttttttctttcagtttaactttagtgcttaatttaggttcattgtcgttttttggtacaactagcttcacagcatcttttgtgataagtccaactgtgtcttccttacctttatctacagcgattgtagaaggaattttcactttcgagcctgctttttgtacttcttttactttgaaattgttaaatgcataatctagcattttgtttgtttcgtcaaaacgagcactcgtatgttcacctttaccaccgccgttagcatgaagtaccacggtaacaactcgcatgccgtcttgtacagctgttgcagtcaaacacattccagcgtaatcagtagttccggttttcaagccatcgacacctttacgaccgtaaattaatcctggtagtaaccagttccagttcgacatgtcaatttggtcagatgtgcctttacggaattcttttttcgttgtactagctgttttaagaacatcaggataatcatcaattaagtgtttcgcaagctttgccatcccgcgagccgtcatcttgttctcatctgttggaccgcccacttgctggccaccttttaaatcttcattgttaagtccagtcgagttaacaaattggtgatcgcctagttttaattcttctgcttttttgttcattaaatcaacaaattctttttcagaacccgctattttttcagaaatggcaattgcagccccattcgcggaataaatcgccatagcttcatataattcttgaacactatactcttcacctaatctaagtggaacgttcgataaggaagtgtcttgggaaactttgtaggcatattcagaaatagttactttatcgtcccatttcaattgtcctttatcaatagcttcaagtaataagtattcatccatcattttcgtcatggatgcaattcccattagcttatcagcatcttttgaatataaaattttaccagtactctcttcaatcgcgattgctgcgtttgcatttacatttggtgcttccgcggcttgtgctgctttcggacttactaaaaagccacttactgcaagggatgctgccatgattacgatccctgtttttttaattatgtttttcactgcaacttctccttcatttgagcaaattattgactcattttatctatattttaatcaagaaacctattttaaaattccctttttgaataagtttcatttttttgacggatactttcatattttaccatgatttagtagtgccgtatataaaacttttcgcccaaaaaccaaattttctagcgaacgattggcagaagaatatgtgacggaaattcaggactatgataaatcgtttggctcgcaatttggctttcggttgaattaataaaactaccgcccgtatttgggtttggatcgaatctagggaagttgcttgaagaaatttcaacgcgaatttggtgccctttttcaaaaagattacttgttgcccataaatcaattgtatattcattaattttgttttgcacattatcgccgtgttgtttgttagcccggataatgccgtctgctaggttaaaggctgtcccatccgggaaaacatcgactaatttagcggtgaaatcagtgtttggcgcatctgttttcgcccatagttttacttggattggtcctgtaatttctagcgactcttcaagtggagcagttgaataacaaagaatatcgttgcgcaactctaggtgttgctgatctctgggaccatccgcatgtagctctttgtgtaaagttcctccgccgtttgaaggcaccggattttccgggtcataactgaatttcgcttttgactctttggttggcggagtgaattctgcgcttactgtgcctgttttaaaataaagtggtgtcatagctgtattttcgggtggccaagtttcagctgttttccaatcgtttaagcccatgacaaaataattaactgctgccatttcaggtagtggctcttgtttcagccagtgattaaaccattctatatgtcttgcatgcatacttgcctcgccccatttagtagcagctatgccaaagtctctatctccaatcatttgtgcaaaattggcatgagtccatggtccgatgactaatttatctccaagcttacggctgtgaccattttggaaattagcgatcgttttatctaaaaagcagtcgtaccaaccggctacatgaagccctggaacattgattttatcgtaattgcttttcgcatcgattttttgccagtgattgtgggttggttcataattaagtaactctgaaaaataaggcatttcttcccgcccaattactggccagtctttgtatggtttaaatttatataatgattcgagattatctaagtttttcattaatgtatttgctgcttgttcttgttcttcacgtgtactgtatttgcgagtcagcatgtttggaagcattgattctaaattccacgtttcccacataccaagctcgagcgcaccgtcatggtcgttaaacacgtcagtcatactattttgcgccataattggagcaatagtttttagatgcttattaccgcttatcgcagccaatatttgcgtataaccatagtacgacaacccgaacattccgacatccccattagaataaggcaaagttgctgcccattcaattgtgtcatatccatcatctacttctgctatgtaaggtacaaattcgccttctgatgtgtatctaccacgaacatcttgaactatcacaatataaccttgcgccgccaaaatattaggacggagaaaatggagcccatatgatttgctataaggtaatcttgtaagcaaaactgggtactttccttcatcggctggacgatatatatctgcgtagagagtcaccccatctcgcattttggctggaatatctgtttctattattaattgattatgtttcacgtgaaacatctcctttttaatattgattgccattttattgtttcgtatacagcagactatgtcaaacaaagcgacccactcgatatgagtgggtcgctttgtttgcgcttatttatctagctttaattttgctaatgcttcggccattgggttgttaaaaggttcatcatcttgcttgttttgttttttcataaacttggctacatctgttttggatacatttttgtttttctgtttattacggcgctcttggaaggcggttagcttttcacgatgtccgcaaacacatacaaaaatttgtttatccccttcaccgcgcatttccatacgtttatggcagtttggacagcgcgcattagtcgttcttgaaactgattcacgatgaccacattcacggtcctgacaaacgagcatcgttccgcgcttgcctttcacttttagcattggcttgccgcaatccggacatttttgtgatgtaatgttatcatgacggaattttttatcgttttgctttatttctgttactgcttttttagcataatcccgcatttccgcagtaaatttacgataatctagttctccttttgcgattttggatagcttttgctcccatcgcgcagttagttcaggggattttaaatcttctggaactaattcgagtaattgccgtcctttagatgtaatgtgaatttccttgccttgtttttctaaggcaaaactattgaaaagtttttcaatgatgtctgctcgtgtagcaactgttccaagaccacctgtttcaccaagagtcttggccagtgctttactcgttgtttccatatattttgacggattttccattgctgacagtaaagttgcttcattaaatcttgctggcggctttgtttttcctgtttctaaatttacacgcttaacaggaattttgtcgccttttttcattttagtcagttgatcgggttcacgcgcctcgccgtatatgcttttccagcctagggacttaacaaccttaccttttaaagtaaagtcttcttgaccgatttttgcttttacagaggtttcttcataaatataagggtccgaaagtactgctaagaaacgtttaactaccaaatcataaattttccgttctttatcgcttaaatctccgagtgaaacgggttgctcggtcgggataatggcatgatggtcacttactttgctgttatctacaaacgatttatttgctttaattggtttaccactgatttggcgggcagctttggcattttcgcccacaccacaagcttctaaacgctcttttagagtagggacaatatcagttgaaataaagcgtgaatcagttcgcggataagttaataccttatgccgttcgtacaaggcttgcataatgttaagcgtttctttcgctgaaaaatcatatctattattggcatcacgttgcaattcggttaaatcatatagcccgggtgaaaaagttttcttttctttcatagcaacgtctgtaattaacgccgtttcgccttgtaaagattttactagtttttcagctaaatccttatcaaaagtttgtccattgttccacgtgaaactttcttgctctgttaacgcggtaattctgtagtattctcgcggtttaaagttacgtatttcttcttcacgatgctgaatcattgcaagcgtgggtgtttgcacgcgaccacaggatagttgtgcattgtatttggttgttaacgcgcgtgtagcattaatccccactacccagtcagcctcagagcgcgccacagcagaatgatacaggttttcgtaagcatttcctggttttaaatgttcaaatccttctcgtatcgccttatctgttacagaggaaatccataatctttttaaaggttttttgattttcgcataatcaataatccagcgagctactagttctccttctcgccctgcatctgttgcaataacaatggtagttatatcagtacggttcatcaattttttaactgtttcatattgctttcttgtttgtttaattggttctagtttcattttttctggaagcattggtaagtcttccatgttccaattcttgtattttgggtcgtagcgttctggatcggccagtgttactaagtgtcctaacgcccatgttactacgtattttccgccttctaaatagccattttttccttgcttagccccgagcacgcggcctatatctttaccgacagacggtttctctgccagcactagtgtttttgtcatctgtcaaaccctctcttctatcttattttgctgcctcttgttgcaatactgccaagaattcagcaccatatttatcacgtttcatcgcaccaatccctttaacttcaagcagcgcatcttccgtttgtggcatatacgcacacatttcacgtaaggtttcgtctgaaaaaatgatataaggcggtactttgtgtttcgctgctagttcgcgtctgacctctcgtaatttttcgaaaagatcactacttacatccattttaactttttcggcacgttttgcttgtttacgctctacctttagctcgcctcgtagtacagatattgctcgatcagtaagtttaagcgaaggaaattgactatctgtaggctgtaaatatttttctgctgtaaggtaatcgattagttgcaatacatctttttgcgatgcatctttcattaatccataggtgctaagttcttcaaatcgccagtctttcactttttggtcagcagaacccgttagaaccttggcaattaatacttttccgaaacgttcgcccattctttttatacatgaaaaaacttgttgcgctaaaattgtaatgtctgtcgtctctcgcgtatccagacaattgctacacttcccgcagttttcctcgtcgtcaccaaaatactgaacgatatacttctgcaaacaaatttctgtataaccataacccgtcatttggcgtaacttagcgaattcattttgtttacgttcatcatccatttcggattgctcaattaaaaactgttgaatacgactatcttgtggagaaaagagcagaatacaatcgcttggaacgccgtctcgaccagccctgcctgcttcttgataatacgcctcgatattgcggggaatattataatgaatgacaaagcgcacattggatttgttaatgcccattccaaaagcattcgttgctacaattacacgaatatcatcatatagaaacttctcctgccaatcttttcgagctatatcagtcattccgccgtgatacataccagattccacgccttttttaagcaagaaactgtgtatccgctctacttctttacgtgtagacgcataaataatacctgattccgtcgaatttttcgttaaataatcaattaaatacttgtctttatcctgaccttttactacttgaaatgctaaattatctctggaaaatccagttttgataacagaatttggttttatttttaaaagacggcaaatatcgtctgaaacagcttgagttgctgtagcagtaagcgcgataacaagcggacgccgagtcattttgtctaaactatcgcaaagactcagataacttggtctaaagtcatgaccccactgagagatacagtgcgcttcatcaattgcaaataacgaaataggcacttgctcgattaatcgctgaaaacctggcgtttcaattcgttctggagcaatataaagcatctttagctctccagaaaatgcagcatctaaccgaatatctatttctctattagtaagtgtactattaataaaagtagctgcaatgccatctgagactagcgcatctacttgatccttcataagtgaaattagcggagaaacgacaatggttaaaccgtcaaaaagaagtgctggtatttggtaacaaagtgacttcccgccgccagttggcatgattgcgagcgtatcttcaccagctgaaagtttcgatataacatctatctgtccatctcgaaagtcttgataaccaaaattttgctgtaaaatagctcttgcttgttctatcattatcttttttcacgcctcctctatagaaacagtatagcggttttaagaacttaattgaagctttttaaggaaattcgttttttctgggcgttttcttattttatagaagaaattaaaaagcagaaacctcttttggaagagatttctgctttttcgaccttaagaaatgctatagttcggtgcttcttttgtaatttgaatatcatgtgggtgactctcgcgtagtccggcaccagtcatacgaacgaacgccgcctcttcacgaagatgtcttaaatcaggtgagccagtgtagcccatgcctgaacgaataccgccaactaattggaagataatatctgccacggaacctttgtaaggaacacgcccttcgataccttcaggaacaagtttttttgcatcagcttggaaataacgatctttagaaccgtgctccatagctgccaaactacccataccacgataagttttgaattgacgaccttggaaaatttctgtttcaccagggctttcatctgttccagcgagcatacttcctagcataactgcatttcctccagcagccaacgcttttacgatgtcgccagagtatttaataccgccatcagcgataatcgttttaccaaattcgcgtgcaacagtcgcgcaatcataaatagctgtgatttgtggtaccccaacacctgcaacaacacgtgtcgtacagatcgaaccaggaccaataccaactttaacaatatccacgccaacttcaaatagagcacgtgctccttcagctgttgcaacgtttccggcaacaattactacatctttaaaagtttgacggatttcagatattttattaataacgcctgctgaatgtccgtgcgcagtatcaattacaatcgcatctacaccagcttcgattaatttttcaacacgaacaaaagtatcatttgtaatcccaacagcagctgctgcaagtagtctaccatgtttgtctttggcagagttcgggaattcaattactttttcaatatctttaatagtgatgagaccttttaggatgcccgcctcgtcaacaagtggtaatttctcgatgcggtgtttttgcaaaatctgctcagcttgttttaaagtagtgccaactggtgctgtcactaggttttctttggtcataacatctttaataactgtagagtagtctgaaataaaacgtaaatcacggttggttaaaatcccaactagtttgcgctccttctcgttattgacgattggaacacctgagatacgatatttacccatcaaatgctctgcagcaaaaacttggtggtctggagtcagataaaatggatcaataataacgccgctttcggagcgtttaactttctcgatttcttctgcttgttgttcaatactcatatttttatgaacaacaccgattccgccttggcgcgcaattgcaatcgccattttagcttccgtaatcgtgtccattccggcactccaaattggtacatttaatttgagtgatggagccatttctacacttaaatctacatcatttggtaatacgtccgatttcgctggaacaagtaaaacatcatcaaatgttaagccttcttttgcaaattttgtttcccacatgggtcgcaaacactccttttttattggtactagctttttttatatagaaaaaacgcatcatcttctctttatttgtataaagaaaaaatggtggaaaatatccacatcatgcgacttgtcttctataatcatgctgaaatagccaatgtatatttttagttattgaatatgatgttacaagaagctaggggctatgtcaagaaggttttccgttgttgttttattcagaaaatatagtaaaaaatgtttcacgtgaaacattttaaaaagccgtctaagaatgttatcttaaacgacttcactgtttattaatttgttgtataatgttagattttcttcgtcaaaacaaacaaagcgtacttcttttatacttgagtcatactcttcttccgcccatttgcgaacggtataaagcgctacttctgccgctagttttttaggaaaaccatatacacctgtagaaatattaggaaaagcaatcgaagttaagtcttttccagccgctaaatctaaagctttccagtaacaagatgctaatttgttagcttcttggtgctcaccgtctttccaaatcggtcccactgcatgaatgataaaatgcgcttttaaatcacctgcagaagtgattactgcttcacccgctggacaagaaccaatgcgattaataacctcttggcattcttttaataaatcaggaccagctgcttgatggatagcaccatccactccgcctccacctaggagtcctggattagcagcgttcacaatgacgtccacattttgttctgtaatatcgccttttacaactgttatatccataccatcacctcttttcttcattctaatttatttggagagcgatttccagcaaggcgattatcctcgtttactaatggcatagctgtagtgaccttcatacactgttaattgcttattttcgagccaaattactttagaacagagctgatcaataaaataacgatcatgtgacacagtaatgattgtcccggtaaaagtccggattgcttcttccaacacttcacgagacgcaatatccaagtggttggtcggttcatcaagaataagtgtattcacaggcatattaataaattgggctaatctaagtcgcattcgctcgccgccgctaatattcgccacttttcggaaaaccatctccccgtaaaacatgaagccagctagcatttgccttgcttctccctctgtcactgccaccttatctcgaaacgcttcaagcactgtcatttcttcattcaactcttccatttgttgtgacagcgaggcgattttcacacttgctccgaccttcaccattccgttatccggctccacttttccttctattatttttaataaagtggattttccggcaccattttcaccaataatcgccactcgctcgccttgtctaatttgtaaagaaacaccctgcacaatttctttttctccaaaagatttatttaaattctccatcacaactacatcttgtccacttctgctagcttcgtcaaattgtaattgcatttgtttttgtgttaatacagggcgcttcactttttccatccgttctaatgctcgttccatattttttgcccggcggaacatggcgtcgttcggcggattggcttgcatagcccactggcgcaatctttttatggcttgctgcatttttttgattttcttttgttgatctttatagtcttggaattcgcgtaatagtcgttcttcccgttcttttaaatatccggaaaaattcgtatgataaacgattaactcgcggttctcgagctctaccattttctggactacttcatctaaaaagtagcgatcatgagaaactaccaacacagttccagcataatgttgtaaaaaagtcgtcaaccattccactgccattaaatccaaatggtttgttggctcatccaaaagtaacaagtccgttttctgtaataataaatgggctaatgctgcttttgttttctcaccgccacttaaatcgccccatttttgaggcagtaatgctccaataccaagtccgttgaccaccttgctcaagttagcgtccatttcatatccaccgagctcaccaaacaaagccattttatctccgtagcggttcattaatttttcgcttgaatttgttgccatttcttcttctaatgctcgtaattctttttccaaatcctctaactcgccaaaactagttcgtaaatattgttctactattatattaggatccaccgtggataattgctctaacagcccgattttcgcaccctttttgctggttacaatcccgctatcaacgccctcagttccttttaaaatcttcaaaatagtacttttcccttcgccattacgaccaattaaaccgacacgctcgccttcctctaattgaagagatactttctctaaaataatatctccggtaaaacttttaactacatcattcattgcaactattgtcattttatcctccatttatccaaggaagcatggcaaaatgtttcacgtgaaacattttttcagacaacaaaaaagcgtcagacaagcgcccgacgccaattataagtataatactaatttagcactatacaaaccgattgcgtgactccatgcttctctcattttttctagttatacagttttttgggcagacttcaccaatgtaactgcaataccggaaaaaattgcacggacaatatacaaaaatttagctatactagttcgcgcattcaaaagaaacatgtcatctcacctcttttcattaatacatatagaataagggatgctgcctcaaatgtcaattgttctcccaatcacatgcacgaaacacagcgtttcaactcagaaacttataccattgatatgaaacacgaacccaaagcatcaaaatctatttaccaattagtcgaaaccgtttacattaataaggcaagcaaaacaaaaaacagactaatcgcacataatttttggaggtgccataatggaacataataagttgaaacctttcccaaaagattttctatggggatcagcttctgcagcgtaccaagtagaaggtgcctgggatgaagatggcaaaggaccatctgtatgggatgaatttgttcgtattcctggaacaacattcaaagaaacaaacggagacgtagcggtggataattatcatcgttataaagaagatgtcgcgctaatggctgaacagggcctaaaagcatatcgtttctctgtcgcatggagtcgcgttatcccgcatggtaacggggaagttaatgaagctggactaaaattctatgataatttgattgatgaacttctttcttatggaattgagccagttgttacactttaccactgggatattccgcaagggctgcaagacgaatatggtggatgggagtcgcgccaagttattgaagatttcactaactactccgcccttctattcgaacgctttaacggccgagttaaatactgggtaacacttaatgaacaaaacgtatttatctcacacggttacaaattagcgtatcacccacctggcgtttctgacgacaagcgtatgtttgcggcaaatcacaatgcgaacttggcgaatgcttctgcaattgctaaattccgcgagctaggtatttctggaaaaattggaccaagttttgcttacggaccaagttactccatcgatgccaaccccgcgaacgtgttagcttctgaaaactccgaagaattcaatgcccatttctggatggatgtttacacatggggtgaatatcctaccgctacttggaactggctggaagagcacggtcttgcaccggaaatcttaccaggcgatacggagcttctgaaaaaaggaaaacctgatttcatgggagttaactattaccgctcaatgactcatgcgtttaatgggaaagacggcgttggttctgggaaaatgaatacaactggcgaaaaaggcacttccgaggaaactggtgtaccggggttatacaaaaacaccaataatccatacttagaaaaaacgaattgggactgggacattgatccaactggcttgcgcattggcttacgtagaattactaaccgctataaattaccaatcatgattacagaaaatggtcttggtgagtatgatagcttgacggaagaccacaaaatccatgatgagtaccggattgaatacattcgcgcccatgctctagcaatccaagaagcaattactgacggtgtagaaatgctaggttactgcacttggagcttcacagatttactaagctggctaaacggctaccaaaaacgttacggtttcgtatatgttgaccgcgacgaaaacgatgaaaaagaattaaaacgctataaaaaagacagtttttactggtataaaaagacaatcgaagcaaacggagctaatttagtagaagaacagggcaaataagccttgttctctctctgcttcaaccattttgggagggaaattttaatgaaaaaaatattacttgtatgtgcggccggaatgtcgacaagtttactcgtaactaaaatgaaagcgcacgcaacctctattggggaagaaattgaaattgaagcattgccagtatcagaagctagcagcgtggtagataaaatggatattgttatgcttggacctcaagtccgttaccaaaaaccgcaagtagacgaactcgtacagggacgtattccggttattgtaattgatatgaaagattatggtatgttaaatgggaaagccgttcttgaaaaagctttcgcggagattgggtaaggaattttcatttaaaaatagggaggttttaaaatgagtataatgtcaaaattcgaacacggcatggaacgtgttttagtaccagtagcgaataaattgaactcacaacgccatattgcagcaattcgtgatgcatttattttagttttcccattaattatggccggttcaattatcactttgattaacttcgcagtgttatcaccagatggctttattgcaaaaattttattcctagggaaaatcttccctaatttagccgatgcacaggctgtattttcgccggtaatgcaaggttctaccaatattatggcgattctgattgtattcttagtcgcacggaatctcgccatcttctttaaacaggatgatttgctctgtgggcttacctcgataggtgcattctttatcgtctatacgccttacacagttgttgataacgcatcttacatgacaatcaaattcttaggtgcacaagggcttttcgttgctattatcgtagcgattattactggggaagtatttagtcgtctagctagatcccctcgtttaatgattaaaatgcctgaccaagtaccaccagcagttgctcgttcttttaaagtattaattccagttattatcatcacgattcttttctctgtaattaactacttaatcacattaatcgctcctgaaggtttaaatgaccttgtttacacagttattcaagcgccacttaaagacatgggaactaacgtattctctgtaattatcattggacttgtttctaacttactttgggttcttggtattcacggacctaacacagttgcggctattcgtgacaccatcttcactgaaccaaacttagataacttatcttacgtagcacaacacggctctgcttggggagctccataccctgcaacatgggctggtttaaatgacggatttgcaaactatggtggatctggtatgactctaggtttactgattgctatctttatcgcttctcgtcgtgcagactaccgcgatattgcgaaactttctcttgcaccagggattttcaacatcaatgaacctgttattttcggtttaccaatcgtattaaacccaattatggttattcctttcatcattacaccagcaatcaatacattaattggttacttctttatctcaacaaaacttattccacctgtcgcctatcaagtgccttggacaactccaggaccactgattccattccttggtacaggaggaaactggctcgcgcttctggtcggcttactctgtctagccgtcgcaacagtcatttatctaccattcgtacttgtatctaacaaaattgccgcgagtgatgctgcaatggataaaaatgcaacagcctcaacggaacaataggatgtgacaaaatgaaaattgcagcatttgatattggtggaacggcccttaaaatgggggtcgttttgccgcatggtgaaattatattaacaaaatcagccgaaataatcgcgagtgatggcgaccagattttagcagaaatgaagctgtttcttgctgaaaatacggacgtgacagggattgccgttagcgcacccggctacgtcaacccaaaaaccggactcatcacaatgggcggcgctatccgcagatttgataactttaatttgaaagaatggctcgaagcagaaaccggtcttcctgttgccatcgaaaatgacgccaactgcgccctactcgccgaaaaatggcttggaaaaggacaagatttggatgattttctttgtttaactatcggaactgggattggtggcggcattttttctaatggcgcattagttcgtggtggtcgtttccgggctggtgaatttggttatatgtttagtgaacgcccaggtgctttccgtcctggaaaatatacattaaatgaaactactactatgctcgttcttcgcagacaatatgcccagctaaccggacgaccgttgaaagaaattactggagaagagatttttgcaaattatgatgcgcatgatcctatctcagaacgacttattaatgagttttataccggaatttgtacgggactttataatttaatttacctgttcgatccaacgcatatctttattggtggcggaattacaagtcgtcctacttttatcacggaactaaagcatcatatggcgagctttgggctgcgtgacacgattatcgaaacagcaacacataaaaaccaagctggcctactcggcgcagtgtatcactttttacaggaggaaaatagacatgaatgaaatggaaacagtaatttttggcatgattagtcaagttggttctgcgagaagcagttacttagaagggcttcgtgcggctcgtgaaggcaatttcgaggaagcggaagcaaaactacaagaaggcagcgaaactcttgcaaacggtcaccacgagcatcataagctaatccaaaaagaagcttccggtgaaaaagtggaaattcagttattgctaattcatgcagaagacttactcatcacaacagaaacattaagagaagttgtcactgagtttgttcacgtatacaagaaaataagctaataaaaaagcgtgtagacgacaaaatctacacgctttttattattctagctgttcttgattataatttttcttcgccatcgcttctagtaaaaacaacaccggaatttgcgtcgtaatattcgtcttatcaaccatttcttgcgtgacgtaatacgggatattgacatcagatagctcggcaagcgtattatggcttgtattggtgatactaataatccgactgccatattgctgcatattttgcgcctgttcaagaacctggtccgtctcaccagacacagataatataatcatcactgctttatttttaaattgctctcccgggttaggataaaatggatctttaatataaaaagttcgcttcttcatattggagaaaaaacgactgccatattctgctaaaattcctgaggttccgattccgaaaaaaacgactaaatcggcttcattaataatttccgccgccgcgtctagtacatgatcataatctcgattcattgtccgttcaaagaattcctctaaaacttccactgtatctgctgtttttttctttacctcgcgtgtcgcttcttgttttagcttcactttaaattccgagaagccctcacagcccaattttctagtaaaacgaacgatggaagctggcgaaacatgcgttacttccgaaagttcgcgcactctcataaacataactttgtcccgattgtccattatgtaacggtataaatggtgttctgtctctgtaaattgcctaatcacttcatacgaaaacataaatttattcacctcatctgtatcagtatttcccgggaaataaaaacaggtgaccacctcgcaatatgcaatttaggtcacctgtccgtgtccatcttcttataaggatggaatatttttctttttcttcacatagaaacgtagggcaataataattgcaccaccaactgtgttaacaatcggacttaacgctacattgatatttggaggaattgtcacttgaacaattgtcattacaaacatccataccgcaatgactccaactgctactagtaagtattttatcgttccacctttttggcctgcacgcatattagatgcgtatttacgtaagataagcattgcaaaaccaccgacaacagcagtgattactaagacaataattcctaaagtttgtgcatttttttggaaataagcactaattccagaaatcagcatcatcgctccaagtacaaggagcccgccgtcaagtacaagccaccatttgtctgtattttgctcaactggtgcagcttttacatctaaagaaacaacatattctgttggtgttaaattaaataattttcgcgctgttatgccttttttctgttcggctaaaatcttttcacacatttcgtaaataatgatttcttgttgctcttcatcgtaatgagttcctcgcaaatgcttttcaacttccattacgtattgcaaattccgctttgttaaactagcctttaaatcagctactggcggtttattcatttctgtggtcaatgctaaatcctccctcacttattctaccctctattataccggacttacctactataaaaaagctatttttttaattcgttttagacatttggaaaagtccgcgcattttgttcaaaatgtaaagtgctaaagcaaaactagcaatcgtcgccccgattccccacgaaagataaccaataaaacttaattctgtatcagccaccgctagattagctgttgccataccaataaacagtgagaacaagataagaaacggccatttcacccaagaaaaagcaaataaataaccattacgctcgatatgttgttttttgtatagaactaaaatagcaaggaccatacaaacgcttaacaccccgctaaaaataaccgctccgagcgaggccgattcaaaagaaaatggagaaaagacgttcacatagtcctcaaatctaaggagattagtcataccagcttctcctccgtgtggccaaatatatttatatagattatccaaagttggattcaacacatttggtagtaacattacaccaaacgccaccacagcagctgcaataggcgatccaattagtagtccaattaaaatagcgactaaaaagataagaatataagtaaataaaccacccacaatatctgtccaaaatttcgccatttctaactgtatatactctgttggtatatgcctgaaaaagtaagttaaaccaattccaatagacacaagataactaagcgtaatcgtagctatccccataatcattttaacgccaataatatgtgtccgcttatatggcaaagatgccgtaaatcgatttgcccgagtatatcgctcaaagataaccgctaacactccaagaataaatacacttgctttaattaaagtgaaaaacatctctacttgaaaataaaacataaaaggcatgtactcaacatattcttcttgcacaaaatttgtatacatcggaatagctaaataagccactgttaaactcgttttcatttcttcatcagaagttttaaattccgggttttctttttgttgttttataaagtcactagattcgtaataatccttttgactttgccaccgttctgcatctgaaacgagccctaaagcaatccccagaaaaaacaatatcgctacgcctagaagcatccatctcatattacgccactctcgataccataaccctcgattaaacattattcgcttcatcctcatttatatgtctttaaatctcgtaataatcaatcttgtcattcgctaaatgaaccgtaaaaatatcctctatagaaatagccatttcttcaaataaaactggttcctctaatcgcaatttccgaacaaattcactggcattttttgtaactaaaagcgtgtaaattctcccatttcgatataataattgcgcattgttttttacgaaatcaggtattttctttgttttaaaagctacttggattttcactgcatcatttcgcatgtcatctaaataataatcaagctccaaatgagccccttttaaaacaatgacccgattggcaatagcttctagttcatccaaacggtgagaagcaattaccacgctcatttcgcgctttttcaccgtgtcttttataatcgctaaaatttgctttttaataataatatctagcccatccataggttcatctagtaataaataacgaacatctaaagaaaaagctaaaataatgaaaaataaagcttttcgtcctttcgaaaaagacattaatttcgccttcattggtaattcgaattgtcgcattaaatcattgaaaaaagtttcatcaaaagtcggataaattttccgataaatcttgacgacggtttgtacactatatgtattaaagtgattcatattgtcttccaagaaaaacaactgctgcttgacttcaggatgttcaaaaatacttttcccgtctaaaaaaacatctccctcatcaggcaaataaattcccgtcattgtggaaaaaagcgtcgttttcccaacaccatttcttcctataagtgctgttatctctcctgctttcaaaccaaatgaaatatccttcaaaaccaagttgtcttccatctttttagttaagttccgaatctccattttttcacctcttgcactcattatataagttcagtagtattttttctacattttttaaaattttctgcactattgtaaatcacaaatcaattattatactaatttcacatattgcggtaaaatatctctatatgaacttatttaaaacccctgaggtgaaaacatgataaaacttgatatgacgatgctcgattcttttaaagaaaacgaagctctccggaaatacttattttctggtcattttggtttggaaaaagagaatatacgcgtaacttctgatggaaaattggctcttacgcctcatccagcaatttttggcccaaaagaagataacccatatattaaaaccgatttttcggaaagccaaattgaaatgattacgccagtgaccgactcgattgacgctgtatatgaatggcttgaaaatcttcataatatcgtttcactacgcgcagaaaacgaactgctttggccttctagcaatccgccaattttaccagcagaagaagatattcccattgcagaatacaaaacgcccgacagccctgatagaaaatatcgcgagcacttggctaaaggctacggtaagaaaatccaattattatccggaattcactataatttctcttttcctgaagcgctaattgacgggctttatgccgaaatcagccatcctaacgaatctaaacgcgactttaaaaatcgcttatatttaaaagtagctaaatatttcatgaaaaatcgttggttgcttatttatttaactggcgcgagtccagtttatctcgctgattttacaaaaacaaacagcgaagaagtactgaacgatggtagcaaagcgcttcatcgcgggatttcccttcgcaatagtaatgccggctataaaaacaaagaatcgcttttcgtcgattacaattcatttgacgcttatatttcgagtatttccaactacattgaagctggtaaaatcgaaagtatgcgcgaattttataatccaatccgtttaaaaaatgcccatactgatcaaactgttgaaagtttagctaagcatggtgtggaatatctagaaattcgctcgattgacttaaatccacttgaaccaaacggaatttccaaagatgaacttatttttatccacctatttttaattaaaggtttgctttcggaagatcgtgagctatgcgcgaacaaccaacaactagccgacgaaaacgaaaataatatcgcgttaaacggccttgcacagcccgcaattaaaaactgtgataacgaggaaatgtcccttgctgatgcaggacttttagaattagacaaaatgagcgacttcatccaaagtctaattcctaacgacaaccatttccaagcaatcattgaaaaacaaaaagaacgcctgctacaccctgaaaaaacgattgctgcacaagtacaagcacaatcagctaaagaaggttacgtcgaattccatttaaaccaagcaaaaacttatatggaagaaacagaggcgctggcttataaactcgttggcgcagaagacatggaactttccacacaaatcatttggaaagacgccatcgcgcgcggtatcaaagttgacgtattagaccgggccgaaaacttccttcgcttccaaaaaggcgaccatgtggagtatgtgaaacaagccagcaaaacttctaaagacaactatgtatctgtgttaatgatggaaaataaagttgtcaccaagcttgtactagcagagcacggcattcgcgtaccatttggcgatagttttagcgatcaagcgcttgcacttgaagctttctctttatttgaagataagcaaatcgtcgttaaaccaaaatctaccaactatggttggggtatcagcattttcaaaaacaaatttacgctagaagattaccaagaagctttaaatatcgcattcagttacgatagctccgtcattatcgaggagttcattcctggcgacgagttccgtttcttagtcattaacgacaaagttgaggctgttttaaaacgcgtaccagctaacgtaactggcgacggaatccatacagtgcgccaactggttgaagaaaaaaacaccgatccattgcgcggaacggaccatttaaaaccacttgaaaaaatccgtactggtcctgaagaaactctcatgctatccatgcaaaatctttcttgggatagtattcctaaagcagaagaaatcatctaccttcgcgaaaactccaatgtcagcacaggtggcgacagcattgactataccgaagaaatggatgactacttcaaagaaatagctattcgcgccacccaagtccttgatgccaaaatttgcggcgtagacataattgttccacgtgaaacaattgaccgcgataagcacgctatcatcgagctaaacttcaatccagcgatgcacatgcactgcttcccttatcaaggtgagaagaaaaaaattggtgataagattttagatttcttgtttgaataaaaaaatcccagctactagtttagtagctgggatttttgttatttaagccctagataacagcagcctattcgtaattaaattcaaaataaaataaattaatacaaaggagccccaatagataaacaagttttcatatccaagcaataaaactctaaagaaaactttatgaataagtaccactaagagtattaaaaggctatttactaaagaaataccgataattttcatcttatttctcccttctcaatataaatgacccgatctgcttttcctgatatttccgggtcatgcgtgacacaaacgatagtcttaccttgctttttcaaggctagaaataattcaatgattttttgtttgtttttatcatctaaattgccagttggttcgtccgcaagtaaaagttgaaatggtttgagtaaaatgcgcacaatagcaatccgttgtttttctccaccacttaattggtatactttttttgctaaatagctctcatccattcctacttcttccaaatgctctatcatcagcttgcgattttccccacctgtaatggataagttttctaacactgtttcattttccatcaatagataattttggaatataaaacctaacacctctttttttagagtcataacctcttttttcgtctgatattccatctcgttaataataacttgcccactatcttttgaatctaggtgtccgataacatttagcagcgttgtcttcccactaccactctcgccgacgactgcaataaattcgccagctccaatagaaagagagactttttccaaaatcaatttatcttgtatctttttactgacattaactaattcaatcatatttttcaccttttagtatggctttaaaatctttattaattactttttcctttaaaaagtaaataacacatagctctatgaggagaataactacactaaaatataaagcaattggttctttagtaataatgaaagtaacgactcccgaaaaagcacacacggccaaattacttataataaaccatttactacttttccaaaacgaatatccaaatacatggtaaataagttgtttatataagttctcccggtaatatgataatacaagcaatatcataaaagaataggagcttatcgctaaaataatcgtacctatcgattgctgataaatttgccattttaaagcagttaattcgcttgatacttcttgataaacactcgttacattggtaatttctcttgcatttgaattattaataagtggcaaaatagcattaaacgcatcacccttcgttttatcaacaaaatatacagaagaagttacacgagcgccaatactagatgaatcaatgttccctgtatagataatcgctattggatctgtgatgttccccgttcgtaaatcccccgcactactatcataggaaaaatagtcttggttattttgagcataaataatattgatacttaagtcgtccttacttagctctaaaacaggacgattcaaagcctcattatacatattagccacctctaccttttgaaaatagaagtgatcaagataagctttttttatgtctttctcgaattccttcttgctcgtaggaactataatattcaaaactttatcattgattattgcttcattttctacgttctgcccttgtgcacttttaatcgggtttaattttaagtaattaaaatcaacctctacgctattcccttcaggcgaatttatttcagagatcttattcaaataggtttcatataaaaaagtatcattttcaacccgcgtaaaatttttcgaatacattaaaaacatctcttttttagctgttccttctttataaaaagcatttaacttatcgtttaattttctatcagcttttaaatcgtcttcaatattctcgggtaaaactcctacatttactttaaaaatgttctttgcatcattccacacgtccatattagctagtcttgtatttaacatctgcagcgattgataggaagctataatcgtaccaataaatacacaaagcagagcaaatttaataactaaattgatagccaaatgttgttttgccgactgcatatgttggtcagactttggttgatcgattttctgtattctaagtaatccaaagaaatacgtcggaaacagaataaaaatcaacaaaagcacattaaacaaaagcaacttcgatactatttctactgagtatgcggatagccctcttactaaaactatgccaacaaaaaccaccaaaatcactaactcactaaacaatgtaaatttaatagttttattgaacaaagactttaatgtaactaacttagaatttccccatatacgattaacaaataaccgctgtttggagtatcttaaatagtaatatgtaaaaataaataaaatgacaaaacacaaaagcaaagtcataagtaacgggatattaatatatttccaccagctcacgtcaacacttttcgtagttatttctccgtactgttcaaattcctttaaaaaagcctgataagtatcctggttatctaaaccacttacataaaaagtatcacttagacccacatttttaatttgtccaaagtcataaacctttaaagcccaatacttagaaggatgataaatcacacccgattgtttttcatcgccactttcccgattcgccaaaaagcggtttttatcgggataatctccttttttaagctttatatttggcgaatattgggaattagaggcatagatattcaaatcacgttcatctaaaaatgtatactgagctatgttgatattgtttgcttctgaaaattgctttatagaattattaactgctaaaacctgaacatcctctttatatttaatctgcacttctgcctgccctttaaaaagaaaatcatgcgacaaagtattagtaataaaatttaaaaacattacattaccaatgacaagtgttactaaaataatagtggaaagaaactttttcatcacatcatccttatcttaattctattcttttaatgtatcatgaatggacaatgtataaccaaaatggtaatgaaatgccttattatcatcattaatagcttaaatcaaaacaatttattattattcctgctcagattgtgtaaaaaagcagtagaaatttaatagatttttttcgaattagctcattattcatttttctaatcatcgtaaaaccaattagtcacaaaagattcgatttaagcgcattttcataagaatttaatttaaatttttaacataaacactcaaatttcggtaatttcaatgcatatttatccaaactatcaactacccctttatctttccgcctatatatactacaataaactttaacgaaaaaacggaaccatctccgtttaaaatagaaaggggtgactgcatgcttttttatgagcgaataaaaatcatggtcccaccatttccctgtgaaggatgtttttttcccagataaataaattattcaggagagttttttatggaaaaaaacatcgaaacaaagaaaatcaatttggcattacttgtttgtcttgtagggtttccacaaattagtgaaactatttatacaccttctttaaccgaaattgctaagggctacgggatatcgttaaacctggctcagatgactttaagcatttactttcttgcttttgcagttggcgtgttcttttggggtgttagttcggattatttaggacgacgcaaagcaatgaattatgggatattcatctatattcttggttgcttagtttgccttctttcaaataatattactatgctttttatcggtcgatttgttcaagcatttggggcaagtacgggttctgttacaacacagacgattttgcgcgacaactaccacggcaatgatcgccaccacttatttgcaaaaatctcggccgctttggcattttcaccggcaatcgggccattaattggtgggtttatcggacaatattacggctttcgcgtggtatttttatttttagtagttatgggaatggtattgctgttctggagcttaaaacgattaccagaaacaaagacagcgaacgctacctcctttagtgtgcagaaaatggtagtaattggtaaaaaaatgatatttgaccgctatacaattgcttttggggtgctaattggcatttttaatgggatattgtttagttactactctgaagctcccactatttttattgagaggtttcattttaatcagagtcagtatggctttatgggttgcgcagtggccgtttcaactatattaggtgctgggctatcgaactggcgcctaaagcaaaactcgcctcataaaatcatcaaagaaggaattttattagcccttatcggcacacttgctcttagtatggtcgcgattttcccgctaacgagccaagttgtattttatattctattcatctctattatcttggcaggaatcggcatggctttaccaaattgtttaagcttagcgctagtgaaattccaagaagttgcaggtacggctggtgcctttttaagcttaggttattatgtaattgtcagtatttgtactttcttcattggcgttttgcattcgggatcaatgcttgtatttcccgcattttgcctagtactacttctaattgccttgttttgtataaaaattgctactagaaatactcgctaacaaaaaaccggcaccgtttctatcttgaagcggtgccggttttattttaaatgtcatcccaatttaaaaatactatatatttcccggggaatcaaagaagtattaaactcctaaaagtctaatacttctttgattatgctaattctccatccatgctttccatttgagcaaggaaggctttttgccatttcttttcgttaagaaattcaattggaaactgcggatcgattgtatttaggattttagcccatgcatctgtacgtaatgatgatgtttggcggatcgctattacaaacattattattgttccggcaattagaaacagaactaaaaaaatacctacaatgattgtagctgggaaattttgatttattgcaaaaaagtacgttagatagcctaaaataaatgctactacaaagaaactaccgataaaagcaaaagtctttttacggctacctctatatgtagaaatacctagagctttttccagcaaagccatttgacgaactggattatttttcttcgcaacttgaataccatatctatcaattagtaaatgcgctgctgttctttcctctttgttattctttggcataatgacaagaagaacaattaaaaatgctataaccattaattgtatcaaaataacactcctataataaaaatttatagttaattatagcattattaagctcttggcaaattgtatattttgtgaattaattatcgcgaggagctctatagaagtaaataaactcttgacaaagcaactttatactgtaattgtttcacatgaaacatttagttcttaattttagcatcactaaagtaacctaccgtttcattcgcaaattgacactcttaccccaaatcagttaaagatagttctatttcttccagtaaaaattcgccaaaactattagcaacaactttcttttctgtattgtctttgaatgataagttagtttcaactattacaggctcgccctcactcccaataattgaagtgtctatcgagaaaatcgaaccatatcctgaattttttatcataatcatctctttatttatatccccaaatgtacgcgcctgctctgttgcaaatttgacgtctggtatggaagctgcactcaagcctcgtttagagataccataaaaagatacaccattaaaagttaacgtcccatatttttctaaaaaaagcttatatgtctctggaaattcgttccctaaagcatcttggtaaattttaattaattcaggtgttccagtaccactagcatgaaaggttattccacttaaagttattaaccgatctacttcctcaagaaaactactagccatcatatacactcctaaacgaacttttattgttttaagatacttttattatatcactctaggtgtttataaagcttgtagaattcgcgaaaaatattacaagaatcgcactatttctataaaaaaacaatcttttgacgcatctgctcatcaaaagattgtttcacgtgaaacatattaaacgttaaagcggaaatgaacgacatctccatctttcatttcgtattctttaccttctaagcgtactttaccagcttcttttgctgcctgttctgaaccatattcaagtaatgcatcataggcaacaacttcagcacgaatgaatccacgttcgaaatcagtatggatgattccggcacattgtggagctttcattcctttgatgaaagtccaagcacgaacttcttgaacacctgctgtgaagtaagtcgctaagccaagtaaagtatacgcggaacgaatcaattggtctaagcctgattcttcaattccaagcgcttctaaaaactcaagcttgtcttcatcttctaactcagcaatttcttcttcagcacgagcacaaacaacgataacttcggagttttcactcgcagcgaattcacgcacttgttggacatatttgttatcgtccgggctagaaacgtcttcttcacttacgttagctacatataaaacaggctttcttgtaagcaagaaaaggttacgaacgattttttcttcttcttcgttaaattcaattgcacgagctggcttgtcattttcgaaagcctcgcgtaatttaactaaaacattatattcagcaactgcatctttatctttttgtttagaaagcttctcaacacgcccaatacgcttctctactgtttctaaatccgctaagataagttctaagttaatagtagaaatatcatctagagggtctactcggccttctacgtgggtgatgttttcgtcatcaaaacaacgagttacgtggcaaattgcatccacttggcgaatatgagataagaatttgtttccaagtccttcgcctttactagcaccttttacaattccagctatgtctgtaaattcaaaagtagttggaacggtttttttcggttttacaagttccgttagtttgtttaatctgtggtcaggaacttcaacaattcctacgttcgggtcaatcgttgcaaacggataattcgcagcctctgctcctgcttttgtgattgcattaaaaagtgtcgatttcccaacattaggaagcccgacaataccagctgtaagtgccattatatataaactccttttcattaacttcattttgaaaatgcccgtcaaatagacattttttcactaacgtatattataaaggtttttcaaataaaaagccacccaccaaaaaacgaaaaccctaaaaggattttcgttttaagcttacttattttaaatctgctacatgttcctcaagattaataccagtcccatcagccactcgattagcgaattctggttctatttggtagaagtttcgcaaattgcggattttaatatcatcgcgaacgccagaccaatcatcaacaatatttttcacaagcgccgcacgttcagcatcggaatagcgatcccatacttcttttgcatgaccaaagttatttggtttttcagcaataagtcggccagaaatatccccacgaatttcttgttcttgttcaataaaagctggattttcttttggttcagtctcgtaactatttggctcgtaattaattgaactcgtttgttgtttaaacggcatatagccatcacgttggttgttggcaacaggtgctttcgggctgttaattggcagttgcaagtagttaggacctacgcggtgtctttgagtatcggaataagagaacaatctcccttgaagtaaacggtcctcagaaggaagcattccgcgtacaagtacacctggattaaacccaacagattcagtctctgcaaaaatattatccggatttcgattaagtgtcattgtccctacatgttcatatgggaaaacgtcttcgaaccaatcttttgttgcatctaatgggttaaaatcaaagctgtctaagtctttcggatctagcacttgcacatataaatcccattcagggtagtccccattttcaattgcttcatacaaatcacggctcgcatggttaaattcttttgcttgaatttgcgcagcctgctcggtggaaaggttcacaattcctgcttttggtacccagcgtagttttacgtaaacagttttcccctcttcattaatccatttaaacgcatgaacactagagccacggatttcgcgataagaagccggagttccttcatcactaaataaatacataatcatagttgtagcttcaggactcaagctaaagaaatcccagtagcggttaccatcttgaatattcgtgcgtggatcaggtttcagagaatgaataacatccggaaacttaatcgcatcacgaatgaagaataccggcaagttatttccgacaaagtcataatttccttcttcagtataaaacttaacagagaatccacgcggatcacgcaaagtttctggtgaatgctgaccatgaattaccgttgaaaaacgagcaaaaacctctgtttctgtcccttcttcttgtaaaaaattagcgatagtatattttttcatgctttttttagtaacaaatttcccgtgcgcaccagcacctcgagcatgcacaactcgctccggtacacgttctctatcaaaatgcgctaatttctcaattagaacataatcttctaataaagttggtcctttaagtcccgcagtcatcgaattttggttatcgccaactggcgtgccttggttcgttgttaaattttttctctctgtcatatgtaaatacctccaataaaatactatatcattttaattataataattattaaatgatactatttatattttaaagaagaaaatactaaacttcaactaaaaggctttaaaaaaagagcagacgactgtataaatcgtctgctctctattactcttcagccttaactaaaattttctttacttttcgttcaaattcacgtcgaggaatcatgacgctatgtccgcaaccttcgcacttaatccgaatatccatacccatacgaataatcttaaatcgattggtaccacaaggatgaggctttttcatttctactatatcatttaaatcgaaatgctttttttccataaacatcacaacctattcatcatcaaactgaatatctaaaatctctaaaatacgatccaaatcatcatctgataaaaattcaatttcaattttaccttttttatcacgacgtttaatcgagacagccgtaccaaatttatcacgtaattgactttcactttcacgaataaaaataggcactctggcaggcttaattgtttcacgtgaaacattttcgttcaagttgttcacaacatcttccagttggcgaactgttaaaccttgagtcgcagcctttttagctgttgggataatatttttcttaagtttcaaacctagcaacactcggccatgtccggctgacaatgagccgtcgcgtaacattacttgaacttcttcaggcaaggtcaaaagacgtacaaagttagcaatatatggtctacttttcccaacgcgttctgctaatttggcttgcgttaagcccaattttttcataaggaactgatatgattcagcttcttcaagtggagataaatcttcacgttgtaagttttcaatgacggaaagctccatcatctcttcttctgttaaatcacgtacaactgctgggatttcttttagtttagcttcttttgctgcacggaatctacgttcacctacaacaatttcatatcctttttcagcatttcttaaaataattggctgtaaaacaccgtggattttaatggaatcacgtaattcattgattgctttcgtatcaaaaattttacgtggttgatatggatttggcttaatttctttgatagcgatattttgtactgtttcttcattcgtatcgacattgttaaatagcgcattaattcctttacctagacctttagccatgtgcaaccacttcctttgctaattctaaataaacttctgccccttttgattttgcatcgtacaacaaaatcggttttccgtggctaggtgcttcacttaaacgaacattacgtggaatgattgtattaaacactttgttttggaaatattttttcacttcttctattacttgaatacctagatttgttctagcatcaagcattgttagtaaaacaccttcaatttgtaaatcttcattaagatgcttttggacgattcttattgtatttagtaactggcttaaaccttctaacgcgtaatactcacattgaacaggaattaaaacagaatctgcggctgttaaagcatttaaagtcaaaagcccaagtgatggcggacaatcaataattacatagtcataatcatcacgaattgagtcgattgcttttttcaatctaatttcacgtgagatagctggaactagctctacttcagcccctgcaagttgaattgtagctgggataacatttagattatctaaatctgttttttgtaacacatcttgaatcgccacatcatcaaccaatacatcataaatgcagtgttcgatttcacctttatttacaccaacaccacttgacgcatttccttgtgggtcaatatctactagtaatacttttttacctaaaaaagctaggctagagcttaaattaacggatgatgtcgttttaccaaccccacctttttggtttgctagtgcaatcactttgctcaatctttttcaccaacccttattttgtaccgagatttccggttcttttatcttctattctaccaaaagattttcatttagtcttacaaaaagtaaaaataaattgaaattcgtattttgaaagcttaaaaatggtgaaaatgatatttttaaaacctagaaatgtttcacgtgaaacattttaaaataaaaaaagcaaccaacctaagctgattacttttctatcttcaatctacagagaatgttgtcttaacacctagaaccgtgcagactttttgatacattctaagagttaaatctgggtcccctgcttctaaacgaccaataataacaggagataaatctgatttaagcgccaaatctagttgcgaccatttcttctccattcgcttagagaaaatatatttacctaggcttgctgaaaaactatctaagtaatgagcaatgccttcatttgctaaagcttgattttttagtgtttcgaattgatagtctgggtgaccaatacttgtttctgcttcgatacgacgtaagaatacgcgtttgacttcttcgcggtaagcgctcatttgatcagtgaacgggtttttatctttaaaatagcctttaacgaagcaataatatgtttcatctccactaaatgcagtgaagtaaattaatcgacaatttttatctttaaaatgtgctttcatttcttgaatcggttggtctacagttgtttccactcgagttgtttgcagtgagtaagcttgacttttaccgataattaaatggacatcggggagaatttgcttaccagtgctaagttttcttgtttctgctgtttctagttgtaacaggccttgaaatactaaagtggccattagtggttcttccacaattaaattttgtaagaaatcatacgcttggaactcattttgttcgtctttcacaaaaatgatctttgccattcgtttcgtgattccacccagagttgagtgaatcactccctcctttacaactttacctaattctattgtacttttttctgctcaaaattgcacttattttctctaatttttgtaaaaccgtaagaaagtttatattccactcaaatcgagttgttttaaatttaaaaagaaaaaccctgctttagtaagcaaggttcgtaactattttttcgcttctttcgcgatttggtaccaactgtaaatcttcactatcgcaaagaaagtatagccaaacgcgatgaggtatgccccgtaattaattaatagaatgttgaagccacttccccaaccagactcttctgctacggctactgctcggacataggggctggtgaaaaagtaggtaatatatagtggattaaaacttaaaatagcacttgtaatcgctattacgaaagatggaagtaccatcaaacaactaatgacaccaactgcatgtccaattatcttcaaaaacctcactgctacacctcttatttctttttaggaatttgaatggtaatttgataaaaatcatctgtctcttcttcggtgaaatctaggtccattccgttatctttaaccattgtgaccgactgtttaatcgtattcatcgcgatacgtacgtcacgactaatagcttggcgttttggtttggtttttttagtagctactgattttttcacgcctaaaatctcttgaattcttgcttcggtttgtttgacgttccagtgattttcttctatttcttgtaaaaggctcacttgctgttcttccgtttctaatgcgagtaaagaacgagcatggcgctctgaaatttgtttgttaagaacggcttcttggacagtttctggtagttttagaagacgcattttgtttgcgatggcagactgacttttcccgacacgttgcgcaagagcttcttgtgtcacgtcctgcatgtctagcaagctccgatatgcttttgcttcctcaatgggcgttaattcttcacgttgcaagttttcaattaacgctatcgcagctacttcttcatcatctaaattttgaataattgctgggattttttccaatttcaaagaaagtacagcacgaaaacggcgctctcctgcaataatttcataataatccggctccatttctctaaccactatcggctgaataacaccatgaattcggatagtgcgagcaagctcatcaattttatcttgatcaaatactgtccgtggttggaattggttcgggaatattttatccataggaagttctagtacgcgttgtactccttcttctactatatcatccatttgattcttatctttttttccaaataaacgtgaaaaaggcatctgggtccttcctttccggaaaatcttgggcgcttctttaaatatgttacttatccgcaagtctcttaaactattttagcagaaatgtcagagaaaaacacgcttattctacagtttaaatgcgaaaaaatagacagagctgctaaaattccccagttccatctattttcctaatttatcttaatgaaattcgtcagttacggtgttgatagttttttccatattttcgcggtaagattcattttgtagtagcatcatcgaaataatgtccatcacatacataatcgaaaactggctgttggcaaaatatcttttacttacgaataaagtattgtaaaccgggatggttacgtcactgatttcggtcatttcactattttcaaaactggtaaatgtggctactttacttttgtttttcttagcgatttttagcgcggtgactagctctggagtattacctgaattggaaataccaataacgaaatcttcttttgttgtgattgagctggtgataatcatcatatgcggatcgttgacactaataacatttaaccccatccgaataagtcgctgtgacatctcaacagctgtgagccccgaacttccgacgccgcaaatatagactcgtttggcttcttgaatatactgcaccacttcacgaatcttcgctggttcaatcagcttcaccgtattatcaatcactttatggtaaaacgaataaacctcttcaaaaaggtcatcataaccaagcgacggaaccatagttgctgcagtattaacccgcattttcaaatccacaaaactatcacaacgcacgtggcgacaaaacctcgttatcgtcgaaatggatgtgccggtttcttcagctagctctttaatattaatattcttgagttcatcacttttttctaaaatatattttgcgatttgcttttctttattcggtaatcgattgtaattttgctgaatttcatttaaaatcgtcatcttttttggcctctttctggtttaagaaatgataaagcgcaccaatcatccctgcttcatttcccagctttgcaaaagtaagatctgctgtatcgaacattggtgagattaatttagctgaaatagctttttttaggcgaggtttgaagaatgactcttcttccattaatcccccaccaagcacaatcacttctgggttgaaaatatagattaagtttactacaccttcgactaaattctcaatccattgctctatttcggtcagcacaaccgcatctccgctataagcccattccatgatttgacgaccatttaacgcattttcctcgatattttttcgcgaggcaacttgtttaattaatgcttttgttgaagccacatcttggaattttccttgcgaaagctgcatatagcccacttcacacgctgtaaaagagtagccatttattagttcatcatttaaaagcattgctccaccgataccagtaccaattgtcaaacagagcacgctcgttcgtccccgtgctccgcctaaccaaaactcgccaagacaggccgcatttacgtcattttctactgcgcacggaaggttaaatcggtgctctaattctgcttttatttctgttcctgtgtattcgggaattgtatagccagcgtaaatgatattgccgttcagaggatctacaacacccgctgaagcaacacagacgcccgctatgcccgttttttcctgttcgacaatctgaataagcgccggcatgatttgattcgctccgtcgcttataggggtcgcacaagacataagctcacctatccgcttgcctgcttggttaaacttggcatatttaatactagttccgccaatatcaacacaaagataattttccatttcttcacctctttagtgaaattattatccttcttttgttaactcctcgtaaaatgcctgctccgagttcgctgcaatcaaatgagctactttttcctcgtccatgagtacttcagcaagctccgacaatacttctaaatggctttctgaatctgttgccgcgagcgtaataattagtttcactgggtcgaacatttcactcccaaaatccacgccgtcagcaagtgttgcgaaggttaaaccgccgcgaatgacgccaaattctggtcgcgtatgtgctagggcgatatgtttggcaatcactatatatggtccattattttctacactttgaatcattccgtcgatataactttctttgatggcacctcgctctagtagaagtctcgcagatgtttggatggcttcacgccaatcttttgcctttaaatttacctcaatatcttccaaagttactcggtctaataacatgctcgtgcccccttatttattatacttagctattatttctgttaaatctacatccgccagcgactctcgttccatataattcggtgttaaatcgctatgtttcgttacttcatttgggatgacaagaacatttacacccgcactattcccagccaaaaggccattgcgcgagtcttccacaataagcgcctccgagggttttacattaagcgctcttaacgcttctaaaaataaatctggttccggcttaattcgcgtaacatcctccgccgtaataatcgcatcaaaatattcgagtaaacctagtcgttccaaatgatagagcggttttggtcgctgcgatgatgtcgcaagcgctaactttaagccgcgctcttttaattcacgaataaaactttccacgccttctttggctggtaagcttttactattttcaatgaaagttgcttgtgtttctgcttcgaatgcttggcgattaatatccatttgctgtgtctcatttaattcacggaataaatcgtccacattagatccgacgcactgtaaaaattcctcaatagaaagatcataatgttgttttgttttaaaccaatctttaaaaatttcgtaccaaactacttctgtatcaataacaattccatcaaaatccatcacaactgcttttaacatcatcttcctcctacccactttactattcaaagcgctcctaaaaagaagcgcttacaaataagttaattcttttgttctcggtctgcaactattttatctattagttcttggtattctggcgcgccgaggtaatccgttatttccacataatacgcatctggttgtttttctttggctcggtcgataagggatttatgcgtcacgaccacatcgcattcggtcggcaattcgtggatggcgatatggaacactttaatatcgtctaagccagcgtttttgatttttttctgcagcacggtcgcgcccatcgcacttgatccaagcccagcatcacaagcataggcgattcttttaacatttttaaaattaaaatcatctactggagcttcgaaaacagaggaaatgctactttttttgcctttaagaccttccattttcttcgccgcgtcttgtagttctgaatctttgttccccatgcgtttaataaatggtatggcggtaatgaatgtaacaagcgccgcacataacaccgcgataatgattttaatatgatcgccgggtgctgccatcatcatgattgtgataatactaccaggagaggccacaccaacaagtcccgcatttgtcattgttaaaataaatgttcctgtcataccaccaagaattagcggtaagataagaattgggttcattaaaacgaacgggaagtaaatttcgtgaataccaccaaataggtgaataacacttgccccgtaggaagatgcttttgagtttccttttccaaagaacatataaccgagtaaaattccaagacctggtccaggatttgattctagtaagtaaagcaccgattttcctgtttcggcgagttgcaatgttgctagcggactaagaataccttgaccgatcgcattgtttaagaataagactttagctggctcaataattaaagccgttagtgggagcaaatgattgttaattaacacatccacgccacttgctaatacttttgttacagtttcaaccatcggagcaatcgccacataagaaaatagcgctaatcccgctccaataatcccaatcgaaaagttattaactaatagttcaaagccagctggaatttttccatcaatacgttcatcaaattttttaagtacccaagcagcaagcggacccattatcattgcgccgataaacatggttatatccgaactaataattgctcccattgttgcaacggtaccaataactcctcctcggtaaccgtgaaccgctcgacctccagcaaaggcaataagcagtggtaacaagtaattaagcattggtgcaataaagccttttaacatttcagagcccgttgcgaccccaatcgccgttaaaatcccccaagccataaaagctcccaaattcggaatgaccataccacttagcttactcccaaacttctgtacatgtacccgaatagacatatttccccctccaatcatatgtgtggcgctattttatagtgatacttcttttccttcagcaatggaacgttcaatcgcatctactactcgtaaggaatcatacgcttcttttggtgtaatgattgattttgtgttattcgcaacgttattaataaatgccattacctcctcagctaaatcgccggaaacttctccatttgtgtaataccagtgtcttgaatccggataagatacccctttttcactaacaaagcgaacgccgtgatcacaagagtctacatatgccacacctttcgttccgactaattcaagtttgtcgtcaatgatggttggcgaattttctggcaacacccagcaagcttcaagacaagcaattgcgccattttcgtacgtaacaatggcataaatcacgtcattcatgccgtattctttaagtaaaacactgcggcttttggcgataactttgactggctcgctatccatgtaccagttaatataatcaatatcgtgaatcattacgtgcatacttaaatcagaagcacctatgtaacgctttggcccagtaattgggctgttacgacgacaataaagatgaataatatcgcctaattcgccgttatcgaggcgctgtttaatcatattgaaacgaggatcaaatctgagtaaaaatccaactgtaaatactttatcgtagtcttttgtcagttcatacattgctttgccgtcttctagttcttttgcaagtggtttttcaagtaaaatatgttttttgtgttttacagcttcctccacacaatcacggtgcatattatcaggtaaaacaatgatcacagcttcaatctcagtatttgctaggagttcgtggtagtctttatatgctttacactgaaatttttctgccatttctgcgcgtctttcatcgttaaactcacaaattgccactaactcaacttgcggaagtttttgataaatttctgcatgatactgccccatttgtccaacaccaattacgccaactttgatttgctttgtcatgtcacttacctctttcttcttagatttttttaatttcatttgtaaagcgggtggttatttcctgtggccgagttactgcgccgccaacaacaacggcataacaacctaacgtaagaacttgtcgtgctttactaggcgaatcgattttcccttctgcaattactgggcgcttcgtacttttcaaaacttctttcatatgggaaaaatcgtggtcgctgatatttttattcgccgtttcctcggtatagccgtaaagtgtcgtgccaattaagtcaaagccaagggaatcagcgtaataaacgtcttcaatactgcctgtgtctgccatgaaaagcgtgtttggaaactcttttcgaatggcgcttagtatgtctttgaggtcttcgttatgtggtctttttctcgttgttgcatccatcgcaacaatttctactcccgtttcacatatttctctgacttcttttaaggttggtgtgataaatacgtcggaatcatcgtaatcttttttgtaaataccgataattgggacgtccacctcgctttgaattgcccgaatatcttttgcggtatttgctcggataccaacagcaccaccttgaactgcggccagagccattttcgacataataaatgcactatgaagtggttcgtcttctaaagcttggcaggaaaccactaacccacctttgattttttccataacagaattgcccactgatactcctcctctatactgtgtttcagtgtaaagtatgcgttttcaaacagactatatcataagaaaatgattttatcaatatcgattaaatgaaaattattttcatatttgggtgtggttgcttatggaaactagctttaaaaaatgacgttgctgttaaaaataaaaagtcctttcgtttgaaaggactttgttagtttattcgattggtaatttgttgggtgttccgggtttgcgcggatatttattaggggtttcttttgttttagtgatgacgtagatgtttcgttcgctttcttctactggtaatgcgaaagcgaaatgttcctcgacttttccgccgaatagtttgatggctttttcggctgtttgcagctcttgttcggcttgggctgctttcattactaggaatgaaccgcctttttttacaagtggcatgcacagttcggataatacgctcattcttgctacggcacgtgcggttacaaggtcgtatttttcgcggtgcgctttgttttggccaaatgtttcggcgcggtcatggtagaaatgcacatcggttaggcctaatttttctgctaacgcgtcaaggaaagtcatgcgttttttcaaggagtctacgatgcttacttttagatgcgggaagcagattttaattgggagacttggaaaaccagcgccagccccgacatcacaaatagtatcgaatttagtaaagtctacataaaacgcggcagaaatagaatcgtaaaagtgctttaaatatacttctttttcgtcggtaatagctgttaaattcattttttcattccattctactaacattttgaagtaatcatggaattgtttcatttggtcgtcgcttagttctattcctttttcagcgagcgccatttggaattgctctggattcatgttttttcctcactttattatcgcgatttttgccgtgtttaggatggtagacgggtttggtttatacttttaaacaggcttgtaccgttgattttctatatttttagctcattattttcaagtataaatattttcgtgctatttagcaagctcgtattacgtttaacaattatcaaacttgttggcattctctttaaaactttttttggcttgatttacccattttccttttgctgtggtagaaagtccatctatgtaaccctgacaattgcttttgatatcggctattttgtcctgcttgatcatttttaacattcgtttgcgattttctgatgttgcatgagtttgactcgccacaaacatcccaataagatttttttctagatttctgcgtgactctaataattctgcttttagtttatctatcatgttatagatcacgatccttttttagctgatgtagttcttcttcataagaattcgcttgtttcttataaagtgcttgatgctcttcgtgttcattttctagttttgttagtgtgttttttactgtccaatcgccttcttcttggatagaattgattaaatggtaggctttttgcaagtcttcagatgtttcgcaatctcttttttgatggatgtaccttatttgttcagaaaggttttctagttcttggtgaaaccgccatttttcttgggatgcatcatccatcgcttcgtccaattgacgtctttttctattaaactcatcgtccaaattttctagttttagcagtagttgtctttgtttatccatacatgctccctatctgtttggctaattcttggtcggtttttagctggctttttatcgcttcgttgatttgttctagtaatttatcatattcttgctctatcttggttgcttcgactaaggatttttcgcaatcttgcactgtgtctatcacaattttcggctcagtcgccctgccccaagcaagtgcggcgagtatttctgactcagatagattggagccgatatcccttgcatctgaaagcgtatcgcgccacaactcttcagcattctcgatttctttatcaaaaacatcttttaaagctctaatttcgccttgaatcgtttgtttcatcccttgcgtaattgctagtgcttccgctgcatccaagaatatttcttcggatgaggataggccaccaccgctttttgtaaaactggttcgcatgatgttgattgctgctaattgttgagctgttgcgtatttggctagttgaaggctgccttctttatttgttagaatgtttccttctttgtcaaactgataaccaccccacatatgctgctcaaccaaaccagcttttttcgactcaacctctattaaatgaccaattgtcgggtctccagtaccataaccaattgccacataatccttcctatcaataaaattaaataatctatctaaagcgtttattgcttttacggtatcttgttgttttggcgttaggttggagtagatattcggaccttggtagaagaaaccgccgctgatgcgtttgatgtcttttttatctaagtctgcgatagcgtactgggcgttcatggatcctagagaatggccgtatacatagatttgggcgtttgggtagagtttcatggtttgttttaaggtttctgcggaggtttttagttggggtgttactgtggatcctccgccatttgtgatttggattgcagttggaatatcatttacgccccaatccgtccacacatcaagactatccttatgaaacggcgtaagaccacttgccagagtgggcgcagtggaacctctgtaaagaattgttaactcttttactttgcttctctcagtatgggaagctgtgggtggcgtgtatttttctgtgatgatataggtttgctgtccggctgctttgttgttgattgtttgggatacgattcctatctttttttctcgattggatattgaaatattcacctccttcttaagttctagcttactgtactctttttttgccaattctactctttcttgatcagtatttacatgccccgtcatcactactcctcccaacgacctaatagtttagaaagcttttcagatacaactgaagcaccaccacttaattctccattattcttgctcaaggtatatgatacatttagttctgaatcattattaattattaattcgacttctataccccccattgggttgtgctctacgcttccttcttcaattttataagaatgaattatacctttttctgtaaaagcatttggatctaaatttgttaacctttttttgaatacttgtttcgcttcatcactataaaccactttcttcatttctttgtttaatttctcttcatccatatagaatttcacccctaaactaaaaatggttattactgtaattgctagtgctattatccatctttttttcaactcttcacctctgctgtatgctttttatttgtaggtctattttatcacatgttagaaattttcactttcttttttttcagtcttttaatcgtctcttagctctataaaaactcatttatatccattcaaaagtcccaatttttttgtaagctccttagatatgcttgctccaccgctctttaattctttattatttttcttcagtgtgtatgttaatttcaaagcaggatccttattaataactaatgtaactattattccacccattggattaggctctatactttcctcctcaacttcatatgactgaattatcccttcttttgtgaaagctttcgtatcaataagttttatatcatcattgaatacttgtttcgcttcatcactataaaccagctttctcatttcttcgtttaatttctcttcatccatatagaattttacccctaaaccaaaaatggttatcactgtaattcctagtactattacccatctctttttcaactcttcacctctgttgtatgactttttatctatgggttaattttattatatgttagaaatttccgccttcttttttcagtctttttaacatctatgattagtattggcgtaattcattagctctcttctagtccataagaagtttatcaagatttcccgatgtaactgaagctccaccgctcagttctccattaaaattgttcatagtatattttatatataattcagaatttccgtttataattaatgtgacattgattcctcccattggatttttctttatacttttctgatctatttcatacgattgaattatgcctttttctgtaaaagcatctgcatccgcggctttcaatctgacttcaaatacctttttcgcttcatcactataaatcacattcatcatttctttatttaatttctcttcatccatatagaatttcacccctaaaccaaaaataatcattattacaattccaaatagtattatccatttctttttcacacattcacctctgttctatgtcttatatgtaatcccattttaccttataggtagataagaaaaaaccacattgttcagcggaaatttcagacttgggtggtaagtttgaagtttccgtgaacaagtggttttggttgtagtagtaatccaattttcacttacgtactttcgcaatttgatattactcaatacagtctaaatattgaattccaatcacttataatatcatgtcaattaaattcagaaaaagaacctaaaaatccgcatttttttattttcagtttaaactcattatgttgttgtctgtcataactatggagataccatatcatatttttagaatttaaatgtttaaatatttccttaagataaatcaaatcgacttctccaaaagaaaaaccgtatgaataaatagaatcaatttctccctctaagttcttaaaaaaatacgatttttcttcaataattctatctgttggtttctttaaagtttcattcatagtatttatataggtatcttgatgataactttgttcctctattcgtgaggtattattgtgacctaacacaggggaagtttgatttccatgtatgtgcgtaacattctctgcctcatatagattttccagagtctctgtataattaaaagttagaaaaacatcatgttctttgtcaattaattctaaaatagaataatagttatctaaattgaacacagaaaagcaattttccagaatagggatattatttatccattcagagaaaagctcaggtaattttaacattacattacttaaatcattatatgcatcttcataattatttcccgtatgaaaaggatttatatccccttccttatcatattgaatttctatatcctcttctagcaaagaataatcaaaacgcccaatagctctttcaaaatcactccagttctctccttcgtcttcagaaccaatccttaaacaactatcacaaatcataaaatcaattatttgtgcacaatcttcaattttataacatatctcaccatcgtaatctgtagaagcaggtaaccacagactaggatatacatcgtgttcatataaatatgtacatctaagatactctttaaaatgattaaaagtagatggaactccatgcgctaaatcaaacccgttccctataataaacaacttatttatactgctcactccctatctctcgttaaggatcagttcctcgtttattttaataatatatactactaagacgattagtaaataaaaataatcatcctcgttttcgtctacaatagatccatgtgaatatttgtttcttatacccaatgcattgtcaaattcagaattattaaggatgtagtttagatagtctacctcaggtttggcaaaaaaagtattctcataaattaataattcctcttcaatcatttcatctatctcttgttgttgatatgtcaactctttattaatatccagttttttattcgaatggtaataatgaataaccccatatttataaatattagaaaaaatacggattcgtaataactgcttttcagttatgaatatatctccttttttatcaatcgaaataatataattatcaagtaaaaattcaatatctaatcgttgataattatgaaaatcatcttttttaattttattattaactattagttctacaaaattatctccatttgtctctttagttatatacgttatatgtgattgatctgaaaaaagtaaatacataactctgagaatggctttattattctgatttatatatatatatttcctgtctaatctactctttaacgacttaagcgttggcgtttcttctagttcgaataattctttatctatttcattttcctcaatatatagtttccattgttttcttaattgttcctctatagtaactaagtttttagtctgaatatgaattttttctgacttgttcgtaaaatctattggtagccagtttacaagaaagtattccttactatattctgaaaaaaagtaaactatcagttcttctattcttatatcaaaaatctcttgtagtttatcctgatatattttaaagcttattaacatcaagatatttttaccattgaaataaaaacttgtttcataattttttttagtatgaatccccaataactttttcattaaagttgaactttcgatgttaggaaaactacataaatttaaaatccaatttcctgtgaaaaaaccattaaaatacatcatatactctaataaattttctttggatttttctttttttaaatagtcaatgtcaattaagtttttaaaatcttctttcgccatatcatacttttctttgtctgaataaataactattgattgctctattccattatttgcattgccattttcatcactaaaaattttcttctctatttgcgcacatcttttcctagactttaattttaatttagcatcaatttgaagttccttaacaccttgaattccttgcccaaccaaataaagataatttaaatcagctgcctcaccctttatatatagtttgcaaagattatacatttcatctttcgtaatgttgttaggaataaaatacctagtttcactaggagtatagttatctaaaactaattcgaaatttcttgctttcgcaagaaatatatcctttattacagtaggataatgtttcacaaaataattagttttcaaaaaatattcaacagggatttcgtgttctttaaaaaagcctctcatgtcatttccactaattttcgcatctaatttatacttttcaaagcattctaaaaagtcttctttataaagagtgtcactatacttgtccatatcagtatattttactacatttccacctaaatccggattattttgagcaaaaaaataatcaaaaaattctaaaatatcttgttttgataactctcggaaaaattgattaagttttctgttaagtatactcttagtctctttaatctgcttatctgataaattgacaggataagtttctttactcatgaatttcaaaatattatatacttctagcatatccaaaagattgtttgtttctatgtcttcactagactcgataagttctttcagcctcttaaaatgataaccgctagatatatctgatgaactataaaatttaatccgttccatactatactcacctctttttaaatttattttaacaaatcgttaaatattataagaaataagtttcttctcttactcttataataatatcagttcttgaattatcttcaatagctttttcacgcacttactgtagattatatttcttcatctatattggatgtcattctctaagaaaataattactctcaacgctttaaccgatttctttttcatctctagtatgccttcttctatgtaatcccattctaccttaattaaaaacaagaaaaaaccacattattcagcggaaactttcaacttagatggtaagtttgaagttttcgtgaacatgtggtttcagttattatagtaatccgtgttcttatttacttactttcgctatcttcccttgctcgatgtaaactagcaatatagatatatcggctgggtttaccccgctgatacggctcgcttgggcgatggaaaggggttcgattttctttagtttttctagggcttctgttgcgaggccgctgattgcatcataatcgatgttttctgggatttttttgtcttccatgcgtttcattttttctacttgaaggtttgatttttggatgtagccttcgtatttaatttgaatttctacttgttcagcgatttcgtcggtcacaaatgtttcacgtgaaacaatttgggcgattttgtcgtaagttatttctgggcgacgaagtaaatctgctgctagaattccgtcttttagttcacctgagccgatttcttttaacattgcttgaacttcagcagttggtttaatgcgtgttttttgtagtctttctttttctgcttcaatcgctctttgttttgctaaaaagcgttcataacgttcgtcgctaattaagccgatttcgtgaccgatttctgttaaacgtaaatctgcattatcatgacgtaatagtaaacggtattcggcgcgagatgtaagtaaacgatatggttcttcggttccttttgttactaaatcgtcaattaaaacgccgatataagcttgatcgcgaccgaggataactggttctttttcaaaaactttgcgtgctgcgttgattcctgccattaagccttggccggctgcttcttcgtaaccacttgtaccgttaatttggccggctgtgaaaagtccttcaactaatttagtttcaagtgatggccacagttggtctggcataactgcatcatattcgatagcgtagccaacacgcatcatttctacattttcaagtcccggaatagttcttagcatttcgcgttgcacttcttctggcaaactggtggaaagaccttggacatatacttcttcggtgtttttgccttctggttcaaggaagatttggtgtcttggtttgtcgctgaaacgaacaattttatcttcaatggatgggcaatatcttgcgccagtgccttttttcgttgctgtaaacattggtgaacggtgtaagttcgcttggattatttcgtgagttgtttcgtttgtataagttaaccaacacggtaattgttctagcatcatttctactgtatcaaaactaaatgcgcgcggatgatcgtcacccggttgttcttctgtttttgaatagtcaatcgtacttgattttacacgcggtggtgttcctgttttaaagcggcgcagttcaaaacctagttcttccaagtgctctgaaagtttcacagatggttgttggttgttcggaccgctggaatagcgcagttcaccgacaataatttcgccacgtgagaaagttccggtagtaataacgactgttttcgcgtagtaaattgcaccactgtttgtaataacgcctttacacacgccatcttcaatcactaaacggtcaacaagaccttggcgcaaagtgatattttcttctttttcaatcgtgtgtttcatttcgtgttggtaatcccatttgtctgcttgggcacgtaatgcgcgaacagcgggacctttacctgtatttagcatccgcatttgaatgtaagttttgtctgtattacggcccatttctccgccaagtgcatcaatttcgcgcacaactactccttttgctgggcctccaacagaaggattacatggcataaaagcgaccatatctaaatttatcgttaacatcagcgttttggcgcccattcgaccactggcaagacctgcttctactcccgcatggcctgcaccaacaacgatgacgtcaaaagttcctgcatcataggtttgcattttataaaaacatctcctaaaaaatcattttccaaggcaaaattgattgaacaactgatcgagtaattcatcctggacagaatcaccagtaatttcacctagtaaatcccatgcacgagtcatatcaatctggacaatatccactggcatgccgagctgaatccctgttgtaacgccatttaaagcttcaagtgcttgatgaaggagcgcaatatgtcgaacgtttgaaacatacgtggcatcaccggcatcaatgtccccagcaaaaaatagtgctttaatcgcttcttccaaagcctctaaaccttcatcgtttactagagaagtggaaacaatcgggttttctcccgcaagttcacgcactctatttatatcaagctttgtttccaaatctgttttatttaaaacgaccacataattatgacccgcagctgcttcaaataacgcttcatcttccactgtcagctcttcgttttgatttaatactaacaggataaaatcggcatccgccaaggcttttcttgaacgttctacaccaattttttctacaatgtcttctgtttcgcgaattccagctgtatcaattaaacgcagcggtacgccgcgaacattgacgtattcttctataatatctcgcgtcgtcccagcaatatctgtgacaattgctttttcttcttgaattagttggttaagcaaggatgatttcccgacatttggtcgaccgataatggctgttgcaaggccttcacgtagaattttcccttggcttgctgtttgtaaaagttgctcgacggaagcgcgaactagctctgttttctccagtagcattcgctgggtcatttcctctacatcatcgtactccggatagtcgatatttacttcgacttgggctaatgcatccaaaatttcttggcgcaaattgcgaatcaaccgtgaaagatttccgtccatttgtctaattgcaacgcccatcgcccggtctgttttagcgcgaattaaatccatcacagcctccgcttgcgacaaatcaattcttccatttaaaaatgcccgctttgtgaattcacctggttcagctaaattggcaccatttcttagtaatagttgcaagacgcgattgaccgaaacgattccgccatgtgcatttatttccacaacatcttcccgtgtaaaagtacgcggagcacgcataaccgtgaccattacttcctcaattacttcgccgtcttcttttatatgaccgtagtgaattgtgtgactttctgcttcacttaagctatttttggcataaaaaatacgatccgctatctgaatcgcctctggaccgcttaatctaataatagcaatggccccttctcccggcggtgttgagattgcagcaatagtatcaaattccattctttactcatcctttctcattagaagttcagctcaaataagccttatcctattttgaataaattttggcacgtgattttgtgcattttcaacaacttacgctccgctttgaccaaagcaattaaattgttagtattttgaaggttatccatagatttattaacatatccacagaaaaaccattaataaaaattcatccctaccattttaacttatccacatgtgaataacaatagttttatctctactagttaagaaaacttaaattttctcgttaaagctttaacatatccttccacttccttggatttaactcaactcttttactctatactaaagtcaaaaggaggagaaataatgaaactacataagctaacatggatactactaatggggctattactactctcatcgtgttccacaaagcaaccgaatgtatacttatcagcaaatgccgctgcggtttattcgaccgaaaatggtaaggcgttttacgaaaaaaatgccgataaagtcatgccaatcgcgagtttaacaaaattaatgacggcatttttagtacttgaggctgtggataacaaaaaattatcttgggatgaggagttagatctcattcgtctggatgatccttccgcggtttcactttacgcaattacacaaaaaagaacatggtcagtccgggacttatatagcgctatgctcgttatgtcagcaaatgatgctgcagagacactaggcaaccgtttagatgatgctaatttcccccaaaaaatgaataatgaagctaaaaaattaggattatcgaataaaaccaaatttgtcagtgccagcggactcgatgttgatggtaaaatggctgtttctaccacaaaggatttatttttgctatcatctaaattaatttccactcatcccgaagtgttagagacaacttccaaatctagcatcataaccgaagaaggagcaacccttgaatcaaccaatgactctatcggttcaatacaaggtttagatggactgaaaactggttttacagatgaagccggctattgctttatcggaacagcaaagcgcgatggaaagcgtgttatttcaattgttttggatgcggatactgcggagaaacgttttaaggatacggaaaaattgatggggattgggtttaaaggactttagtcacacaaaaaagggattcggctttttagcaaaatcccttttttgatggcttattttttttgaaaaagttgcattcgcgtcattgaatccgctaattcttcgtcatgatctatacagaaaaatttaaaatccgctgttttattgattttttggaaggtttttgtctccgaaaattgaattatactttctgtaaaagcatctagcagctcatttacaaatgctttccatgcttgataatcatcatcgacttcattagggtatattttattaaatatggcgctcagttcttcttcactaaaaacataaaatgtatcaaaacattggtatttccagtcgcctgtattgtatttcaagacttgaatattttcttccgtttgatagttttcaccatacttgccactttgataatatgccagtatttcagcaaaagcttcttccgtatttacgcataaattgatttccgcatattcagcattacaatcgaacgcaaaagcataatatgttaactcagggttttcttgcaggaattttcccaccccttcaatcgcgaaattaacgattttttgtgtatcaatcttcatgttgctctcgtcctctctgtttgttgttagatttttaaagcacaaagatacttctccatgtacgtatctttatttttagaattatattgcataataaaacgtggatgttctaaaggtataatcgtctcaaaaaaatgatgttcttcatttattcttgataaaaatttaaaattctctccgctaccaatgcagtaacaaaccgaagtatccattccaaagtctatctgactacgaatcgactctataataaacggcattagcgcttctcgtaattgcttgttctcgtaatagttacaattgacttcattaccttttgcatttatacgaacgatccctagcggacagacaaaattcatataaaaatcactataaaattgctcacaacccccgtattcattcataacatcatataaaaaatctgatgaagactgatttatataaaatgtatcaataaaaatgcctgtttcactttggagatgtttggcatcttcaaaaggaacgcctgtcacagcagaacctcggcgagcaggtgaacttccgaatattatccggcgtggttttgtatcattgtagtatttctgataaaacctagtcgttatatttcgcactagttctttttgatcgccctcatatgggttaattacgcgatacccggccggcaaatccattgagttactcgaaagtgtttcgttaaaatgtaatatttgtttagccaaagttgctttttctgtcatgtagcactctcctctcttactatctcacaacctgccaaacacgctcgaataattccacgtatcccgctttttcccagcggctcgcaaaataagggttgtgaaaataaataaatgccgtaataatcgcgtcaccttggttcacccggccgctaacttcctctgctttttgcgcgagatgttcgatatgatttttcactaattcttccttttgttcaatataatcggtgtaaagtaaaaacattttccggtcggttttatacagggttttcttggtgtcagctaagagccataaccagtcatggagcgcatcgtccggggaagcatctttctctttcgtccaagcaaaaatctcccgcgaggtctcctctagccaccgtaacgccagcttttgaaataaatcttccttgtttcgataatgcttataaagcgccgcatgcgtgacgttcaaatttcccgcaatatcataaagtgtcgttttttccatccctttttcataaataatttgttcagccatatctaaaataatttcttgggataatctcgccattgtaatacctcgattccactcattctttgtttctaattatacaggaaaattaaaaagttacaaatccttgacaaagtaaccaaaaggagtatacttccaactataaagttacttaacatgaaaaaagtaactaatgaaggagagaatagattatgactaataaacgtgtcgcatttattttagggggatctggcggtattgggaaagccattgccgaaaagttagtcgagcaaaactttgcggttgctgtccattattcaggtaacaaagtaaaagccgaaacacttgtcgaggaaatagtaaaagctggtggtgaagcgattagcgttggtggtgacgtggctgacgaagcgcaaatgattgacgcatttgatttaattacagcccattttggtggcgtagatgttgtaataaatacggcaggtattatgaaattaagtcccattgctactttagatatggaagatttcgatcagattcaacgtaccaatgtgcgaggaactttcgtcgtttccaaacaagctgccctaagcgttcgaaaaggtggcgcgattattaatttctccacttcggtaacgcgcaccagttttctggcatatggggcttacgttgctagtaaagccgcagtcgagtcgctcactttaattttagcgcgcgagcttcgtgggaaagatattaccgttaacaccgtcgcacccggaccaaccgcaaccccgctatttttaaccggaaaagatgatgaaacaattgaaaacttagcaaaagcaaccccgttagaacgtctaggacaacctgatgatattgctgaaacagtagcttttttagctggaccggcacgctgggtaaatggccaaacaattttcaccaatggcggattagcttaataaaaatgggaggaaaacctagtctatctggtcttcctcccattttttattcactgattaccgaacgtttttttatcgctagaacaataattcctgatactaagaaagtgagcgccaagaagagaaaagctgattgataagagttcgtcgcatttactaaatccccaataatcatcggtgcgaaaaagccacctaaaactccgcccgagttaatagcagcgtattttgtcgcaatatggctctgtttaaataatttatgcggcaatcccattaaagtcgtaaaggccataattagaaaaatattacataaacataaacaaataatcgaaagcatcaactgatcaaacaaatacaccccgtaaaccgtaaacgctccgagcacactaaatgtaaaaatgacgattggctctttccctttgaagaaacgactaataaaatagccaccaataacacccgcaattaaaatacaaagtccggctaaagaactaatatagctcacttcgctaatagaaattcccctcgcctcattcaaataagaagcaagccaacttgttaaaccgtagttcgctgcatttataaagagtgccgataataaaagaatccacagctgtttatcctttaaaagctctgagaaaggtactttaattttttctttttgcgtacttttatctatttttggcgcttttggaactactaataaaattaataatccaatgaaaatcaccacaataccaatccaataataagtattacgccagccaactgatagcaatagttgcgcaatcaaaagcggaccaataaatgccgcaaaaccagaggaagcgagcattgctgactgcgcaaaacctcgcttgtttaatggaatatgaagagaaatatagttgctaacagatggcggataacccgcatgcccgaacgctccagacaagaaacgaatcacaaccaaaaacagcaaggaataaccaaaaccaaaaataataagaaacagcccaacgataattatcgatatagcaagaacaggacgtgcaccaatccgattatttaaataccccattggaatttgaaaaagcgtgtaaccaagaaagaaggcacttaaaatcaaccccttttgacttggatcaaatcctaaatcctgagaaacagtcacaagtgaaattccgatagtatatttatccacgtatacactggtatagcctataaatagaacaagtaataccattaacgaatgcttttctccttttacctgattcatttgacctcactccactcttctatagtcccactactaaaaaaagagcatacccagattcattttctgactatgctcttttcaaagctattatccattcaatttaaaataatctaaaacgacgtcggcaactgatttagcagcaactaacaacgcatcttcatcaatatcaaatttcggatgatgattaaaataagcgtgcggggtgtttttcggtttcgcaccaatatagaaaaagacacccgggattttttgtagataatatgcaaaatcttctgaccctgaaagcatatcatacatggagatgtctgttaagtactctcctagacctttttgcaaactagcgacaacttgttctgtcactgctggatcattgtatagcggcgggtaatcgttcgtataagtgagttccacgctcacgccaaacatcgcctcaataccagaaacaatacggtgaatttctgcgtctattttatcacgattttccgtgttcatataacgcacatcgccttctaactcaaccgcatccttaataacgttaaaactacctttaccgtcaaaagaaccaatcgttataacgccagtatcaaatgggttcaaacggcggctcactactgtttgaatggctgtcacaaaataagcacccgcgacaatcgcatcatttgccatatgtggagacgaaccatgcccgccaacgccttgaattttaagtttaaaataagtgcgaccagccatcgcgtagccactatggtaataaacttgtccgctttcaccaaatggaaatacgtgaataccaaaaatttgatccacatcatctaaaataccagattcaacaacgcttttcgctccgccgggtggtgtttcttcagcatgttgatgaacaatttttatcgttcccgggatattttcttttagttgaattaaacaatctgccaaaacaagtaaataagcagtatgcccatcatgaccacatgcatgcattacgccagggtttttagatttaaatggtaaatcagtttgttcttcgatgggaagagcatcaaaatcggcacgtaacgcaattgtttttcccggttttccgcctttaatcgttacaacaaccgcatggccatttcccacttcagttgcaacttctacgtcttttcctttgtaaaaatcttggatgaattttgcggtttctgcttcatggaacgataattcaggatgttcgtgcaaatgacgtctaatctgagtgatttcatcttttcgttcctgaagcatattcattaacttggtacgcatgataaatccaacctcctattcttttgcggcttttaattcgagcgcttttttcgcagacggtgttgttacagcgacggaaataagtgaaacgacacaaaaaccgacgttagttaaaagccccaccattgcagctaaatcaatatttccagatagtgcaatcacaccataaatcgtagcggaaattgccacaccgaatgagccacctagcgaacttgccattttgtaaataccagaagctactccgactttatcttctggagcattagagatagctgtatctgttgaaggagttgcatacataccaagtccgataccaaataaagcaaatccaacaaacacaagcaccgtatacaatgttcctggaataaaagtgagcgccattaaagcaataccaacagccgtaataccagatcctagaatcattggtttacgcgcgccaactcgttgaagaattttttcaccaatacgaatcattccaagcacacagacaaggtaaccgatagaaagtaaaccggattggaatgctgtaaaaccgcgaccaatttgcacataagtatttgcaacaacaagcgttccagcagctgcatttaacaagaagttggaaagtgtcgcgcctgtataagctttatttttaaataacgagaaatcaataaatccatttgcttgtcgtagttccactcggaaaaataatcccgcagaaataaggaaaacaacgagcatcgcgatagtaattgggcttgtccaaccaaatgtagccccacgagtgatgataaggtttaagcaaaccattgcgataacaaaaagaacaagaccaaatgaatcaaattttgcttttgtattttgaacgactttactttctggagtacctttaattagtagcattccaagtagtgcgaatacgatggaaataatgaaaatccagcgccagcccatgtatgttgcgattgcgccacctgcgaacgaacaaatacctgatccgccccatgaaccaatcgaccagtaactaagtgctctttgtctatctgccccgtcaaaataagttttcattaaggcaagagttgctggcataatacaagcagctgaaagaccttgaataatccggccgataataagtagcgtcgacccttgagtaacaacaagtagcagtgaaccgatgatactaagaataagtccgatataagttaatttcacgcgaccaaatttgtcagccataccacctgctacaacaataaaaatacctgaaaatagcgcggttaagctgatggcaatactaagtaaatcagaggaaattccaaggtcagattgcacggccggaacgatattcaccattgattgagcaaaaagccaaaacgtgataaccccaaaaacaatcccaacgattagtttatttgtacctttatacgctgttgaagtcattagttattctctccttttaagtaatctacaacacaagctcccattgcttttgatgcaattaataatgaatcttcattgatgtcgaattttggatgatgatgcggataaaaatgaccatctgccggcattgctcccacatagaaaaatgagcttgggcgttcttttgcataataagcaaagtcttctgaaggtggttgcggttcacaacgcacaacatccgtgatttcagggattttcgcccctttaatagatttaacaacgaaatcagtcaaagcttcgtcattatttaaaaccggataatcatttttgtaatcaagttcacaagtaacgccaaacattgcttctatgccgctaacgatacgggtaatttctttttgaataatgttgcgtgcctcttcagacatcgagcgcacatcgccttcaatctcaaccgcatcctttataacattaaaactaccttttccgtcaaaagaaccaatcgtaatcgagccaacatcaaatgggtttaaacggcgactaataacagtttgaacagctactacaaattcacttgccgcaacaatagcatcattcgctaaatgcggagatgagccgtgtccaccttgaccttgtaccttaagtttaaaataagaacgaccagtttgaatcgcaccctcacggtagaaaacttcgcctgttttcatcgtagacatcacatgaattccaagcacattatccacaccatccagcgccccgtcttgaatcatttgaatcgcgccaccaggaggagtttcttccgcatgctgatgtaaaataacaagttttcctgttaattcttctttcatttcaataagtgtttcgcctaaaataagcatataagcagtatgaccgtcgtgaccacaagcgtgcattacaccagggtttttagatgcaaaagctaagccagtttcttcttggataggaagtgcatcaaaatcagcgcgaattgccagtgtcttgcccggcttgcctgtatcaatcgttactacaacgccattcccgccaacatgcgtccgcacatcgcagtccatttctttataaaaatccgcaatatacttcgccgtattctcctcttgaaaagaaagttcagggtgttcgtgtaagtaacgacgaatttctatcattcgatctcgtttttcgtctagtttttgaaataacttctctttcattatccaaacctccatttttaatacatctgctggccagaacatccgtatttttaactacacctttattataaaaaaaaacaaactaaaagaagtttgcttttttgcttagttttagcttgaaattttcttcttttctaaaccgcgtcaaccaatgtcaaaaattcggtgttaagggcataaaaaaagctcaactgcaagagttgaactttttaaatcgtacttctaaactcataaaagtgaatcgcattaatatccaaatacgcataaaacgaccaatcttccgtaatcgtctcatcgctcaccgtcagtgtcggctgagaggcatcaacaatataatccaaaatctctttatccagtccatacttactattaagctgccaatacttcgaataaagcgccccattatcgcggtcgaattgccatttacacacttgatattccccagcttgaagccccgttattcgaatatgcagttctttctgctcttccttagtaaatctctcttccacagaatatctcgggttgatattcgcacagttcatcagaataagttggtatccgtctgtatgcttcgtcataataaaatccgcaccctcagcaacaacaacacccttaagcctcctcaaaaacttcaccgcataaaacgccggtctttttccgtcaaaaaagtggaacatttcaatcccatctaaactaatatttaactggctgtcatcaccttcatgcagttctgtattaatccaaaaccctaacgcatccacttctggcgccaaatctagcattgtttttaaaaccaacgcacctcggaaaaacgtaccattcgtataccgcgtatttcccgtgagcgtattccagttcaccagcataagaggtttattaatatgatgatgtttcaaaaaagccttcaacttccgcgttttagataaacaataatcttcggaaatcataaacgacttcatatcttctttcgaaaaatccaccgcttcattttgattcgcattataggccacaaagtcaatttcatcagccacatctaaaaaccacgtatgccgttctggaacttcatttttagaaagtgaaaacggaacaaaatttccgacttggatagctggaaaacgcgattttataatatgatatattttcaaataaatttttttcagctcgtctttatcagcatatgtatttttcggttcaaaaaacataaaatgccacttagaaacaaattcccgcccaaaaacttgcatacaatgctttaaaaaatgatccaagcgctcaaaaacagcggcttcctcacctacaatatcttgatactctatgcgaatgaacaactgtaaattttgctgttttaaaaacgtgagcgccaaatctgcattagcgtacggtgaagatgtcggcactagctcgtccgtttccgtttcaggcaagaatgtcgaacctctaaacaaatgacgaatgccaatataattaatcccaatttcatcgcgtgtcgtaataatctgcttttgcacgttagctttaagcacttctttaagctcaccaatggttaaaatattcatattttcgctaaggcaacgagccgccttttccgtaatatcaattttctttttctcaaatggcgctttatttaattccttacccggctccacatcatgataaagccgcgacaaattcactaaaatttccggagatggcacaatttgctctatactagcgcccagctcggatgtcttattgtctagtaacaaattcgtttccgcatgatgttccgctcggtactcacttggcgttagctcaaaatgaaacttaaacacttccgaaaaatgcttttgactcgaaaaaccgttttttaacgcgatttccgtaatactttccgccgaatgtagtaaatcttgaatcgcatgcttcaatcgaacttccgtcaaatactgcaagaatccaagccccgtcgtctttttaaaataacgtgataaatacgcctcacttaaaaactctttttgtgcaaactcacgaagcgacaaggcttcatcaaaccgctcctccacttctcgaataatgcgcgaaatccgtttatcattgacttctttcctagcagaagatggaatcccttttttcaaaaaacgcgtaagtaataataagatttggaacaacgccgattgcgcttctaatttattcgctcgtttcttcgtcgccgaagcaatcaaaagctcactcaccgacttcctcaacgacccaacaacccgctctctcccagggtcactctccttcgagaaaaatttaaaagaatgctgaaaataatcctcataataatgcgcaaaaaatgtatctgaaatcgttaaatcaataattaagttagcttcatttccttcaattgtataaaaagtgttgcgatcaaggactaaaatatcgccttcctgcaagtaaaatttttgctcagaaatcttaattgttatttgtccagaaatagcaaataccaatttagttccaagtgaaatttccgacgtcagctgctttatgtgttgaataccaatcgtataatcttttaaatgagacactcgattcactccttcgtttaacttaatcggacacttttatattatcataaatagcggaaattgattggtttgttttaatttactcatgcaaaaagccagccgaaactaactccgactggctcctgatctcaatcttcttccacttgaatagaaacacccacatccagtaattcctcaaccgcttcaatcacagaaaactccccataattgtatattgcttcatctacaactaaaatcggcaaagcttccattccattcttatcaattagggcttgaacccgctctggcaagtccactttcccgacctctcctagctgaatatcaaacacaatacctgtatgatcaaaatggatttttcgctcagcttcactttgattcataaacattttccatatctctaggttaatctcagactcattttccgcagaataaaagtaactaattcgcttcatcttaaaactacttactttctaaatcgtggacaaacagcccacttaataatttcggttcaaaccaagtcgattttggcggcatgatttctgcggcatctgccacaccaagtaaatcgtccattgtcggcgggtacatcgcaaatgccaccgaatgactgccattatccaccaaacgagttagctcttctaagccacgtattccgccgacaaaatcaatgcggttgtcgcgacgaatatcttcaattccaaaaatcggcgttaaaacttgcgattgtaatatcgaaacatccaactgaccgataacatcacttggaatcacatcgcttttcgccgtaagtttgtaccaatttccatctaaatacatcccaacttgttttggcttctcaggtttaaatgcttccttcccaaccttctccacgtcaaaactagcctcaactttactaaggaaatctgcttcaataggcacattcacaacccgattataatcaagaatttctaattgctcttctggaaaaacaaccgataagaagaaattaaattctgcttctggtccagcctctggaaactcttcgcgccgtttcaaaccaacttttacagcagattccgttctatggtggccgtctgcgatatatagtgctgggacttccgagaacgccgctgacaggtcttctagaatatgagcgtctgtaattgcccaagccttatgagtgaccccgtggaagctctcaaagtcgtattcaggttcattttcattcacccaagactcaataagggtattaatcgcttcttttccacgataagtaaggaaaattggacttgtatttgcatcacaaacatccacatggcgaatccggtctaactccttctcttcccgagtcaactcatgttttttaatctttccgttcaaataatcatcaatcgacgtacaaacaaccagtcccgtttgcggacgaccatccatcgtcagttgataaatataaaatgccgggtttgcttctcttccaagccaaccatccagctcaaattgctccaaattatcagccgctttttgataaacagctgggtcataaggggagattgccggatctaaatcaatttccgccttatcaatatgtaaaaaagaatacttatttgcatcgccaagttcgcgcgcctcttccgaattaagtacatcatatggcaacgaagccactttttccgctagatttttaattggacgtaatgctttaaatggacgtatatttaccattgttatcctcctttttagtaaaagagcatgaacccgtctggcaataaccataaagtttcatgctctcattatttcccgggtaataattttaaactgtcacacctaatggttcaataactcgaacacgcaaaaccccttggacagccaataaatcacttttcagttgttccaaattagcttgcgtttccttatcaatatcaattaatgtgtaggcatattcatttttactacggttgatcatatctaaaatatttagggaatatttcccaagctctgtcgtgatttgcccgaccatgttcggaatgtttttgtggcaaataccaattcgcggatgcccgttataaggcatttccacatttggatagttaacagagtttttaatgctaccagtttcaaggtaatattgtaattcttttgcagccattttagcacagttggtttcggcttcttccgttgatgcgcctaaatgaggaaatacatgcacttttttatggtttaataattcttttgtcgcaaaatctgtaatatataaacgtaaaagtccatcatctaaagcttctttcacagaggctgaatccactagctcaccgcgtgaaaagtttagtaagaccgcattatccttcactaattgtaacgtttctgcattgaacatgccacgagttttatccgttaatggcacatgaaccgttaaataatcgcatgttgccaaaacttcttcaatcgtcatcgcgcgttccacttctttagaaattctccaagcagtgtctacggaaacgaatggatcataaccgaccacatccatcccaagcgatagtgcatcatttgccactaaagctccaattgcacctaggccaataattccaagttttttgccagcaagttctgttcccgcgaaagctttcttcccagcttcaactttttgttccacatcatcttcggccggtagttctttcacccattccgtaccttccaaaattggacgcgccgaaacgaatagacttgcaagaaccagttcctttacagcattggcattcgccccaggcgtattgaatacaacaatacctttttcagaacaattttctactgggatattattaactcccgcaccagctctagcaactgccttcactgtttctggaaagtcaaaatcgtgtaagttataactccgtagtaaaatcccgtctgctggctggttcgcatcgatcacatatttctcaagatcaaatgtctttaagccttctttagcgatagcattaaacgtttggatattaaacacgtacttctcccccttttcttgcattggcaaatttttccataaaggcgattagtgcttctaccccttcaattggaaatgcgttgtaaagacttgctcgcataccgcccacggagcgatgtcctttcaagtttttaaaaccatttgcttcagcttctttaacaaaagctttatcaaactctgcagaattcgtcacaaaaggaatattcgtgagcgatcttgcagaaggctcgaccggtgaagaaaagaaatccgattgttcaatataatcatataataatgccgcttttttgcgatttaacgcttcaattccagcaacgccaccttgttctttaatccattcgaatactaattttgctacgtaaacagcaaaagttggtggtgtgttgtacatggaaccattttcggcctgtactttaaaatctaacatagaaggaagtccctctacttgcccgattaaatcttcacgcacgatgacaagcgttaacccagcaggaccaatgttcttttgcgctcctgcataaatcaaaccgaattttttcacatcataaacgcttgataaaatattagaggacatatctgcaacgaccgggacagctgagtctggcacatcaaacattgctgttccttcgattgtattatttgttgttacatgtaagtaagcagcatcagttgaaactgtaggaatttcaggaatatagctgaaattacggtcttccgatgaggcaattacttccacctcaacaccctgaatttttttagcttcagaaattgctttcttcgcccaagatccagtgtttacatagactgcttttttaccatttgcaagattcatcggcaccatatcaaactgcaaactcgcgccaccttgcaaaaatagtactttgtaattttctggaatccccatcaattctcgaattaaactctccgcatcgtctatgatgttttgaaataattctgacctatgactcagctccattactgacattcctgaaccattataagagagtagctccctttgaaccttttcaagtaccggtactggtaaaactgccggacctgccgaaaaattataaacacgttccactcaacatctctcctgtcatcaaatttccccaattacttacaaaaatttttcaccagtaattcataactactggccggatatgagccttcctcgttacacttatgcttttcgaagttctgttcttaagaaataaaaaagccgaacctgtgatattctacacaatattcggatttttcagcgcttaaaagtaaacactgccttttgtacttttgtatattatagcagaaatagagctgtttttcagaaaatttatactaaatctccaaataaatgtgatgtttaaacattctgacattaaaaaagcgcgagaatccgctatttaaagcgattctcgcacatacaaaatttgaaaacagcttcacaagagatgtcagctatttttcacttttcgccctaaagttaaccaataaaccacaaaaaatatgacaagcgcaataattgctgtgcggtacataatagcataattgtagtaagtcgccacaatacttaaaccaaaactaccaacagccatcccaatgtccattcctgaaagaaaagtaccgttcgcagttcctttgttatgtggcgcagctcggtcaacagcaagtgcttggagtgccggttgtgccatcccatatcctagtccaaaaaacaatgatgcaacaaataagctgattgccccggttgcaaaagaaagaattaatattccaataatcatggatagcgcacccggaataataacaaaacgatgtccttttgtatcataaagacgcccagcaaacaaccgactaataagcaccataatggcttgcccgataaaataaacccaagttgtcgaaatcccaatttccgtcccgtataccatcataaacgtctgaataccaccaagcggaatagccattagcaagcatagccctgccggaagtagcgctgttttctcgaacaatttcattttttgatggacgatcttttctgattttggaatcttcacttgtgtcattaaaagtaaaataaataccatcaaaacaagcgaaaaagtcactaaaacatcaaaagaaaaataattcatgattaaaatagcaataattggcgctagtgacattccaagcgcagtcgtaagcccataaaagccaattccttctcccgttctgctcggcggtactaatttagatacccctgtcgcaattgacgtcgtgccgatacccccagccagccccgtgaaaaagccgtaatataagcaaagccgcaaccgccgtcgaccaataaaagttcacagtcgttaaaattaaaatcaaaaaacctgcaataattaatactttaggtccaaatttatcgttccaacttccagcaatcgcccgcataagtaaggcgacaattgaaaatagccctaccgctaaactagcttccatttgtgttccgccaagttcaataattcgagctggtaacgtcggcataaacaccataaacccaatatataaaagcacactgcctaataataaaaatacgtagtccttcgtccaaagtcttgtcttattttccaaaatttacccctctttactctatattagtagaaatgttctttaaaatagccgtgaattgctccaaatccgtgcgagtaaccccagcaaacattttttcacaactcgcctccacaatatcccgaagttctgtcgtttcttttcgccctttatccgttaatgacaaaagcgaaattcgtctatcttctgtgctaatttccctcacaataagctcttttcgaagcaaaacgtcgacaatccggttcactgtgggcgtgtctttttttgtccaaagcgcaatttctttttgagaaatcggttcgttggcctcaatcccctccaaaactgaccactgctcaggcgttacatcatagcttgcaatagaacgcatcaaaaacaagtgcattttcttggcagtcgtatttacatcgaatgagatttcatcataatatccgcgcatttccaacctcttttctattgtcgtaacaataattgtcataacaaccattatacatatggattccttttttgacaagaaaaaacagccgaataaacgactgcttctataataattcaacatctataatatctctaaattcaattacatattcatgtccaacaatatctgtaaaaataacttcttccgttaacatgtcgatttcaagtggcaccaaatcttgtttttcaatttctcctagcccaagaaaggcggaaggatattcaaatgatgctagacgtaaagaagaaacatctgcttcttgaaaaaactttagtcgaacgacccattctcgcttcatggcgtcttttaatgtgataaagaagctctcgcgttctaaataatccacttctggccgactcgttaaaaaagcagcattcttctctgtccgcacttgctctttctgaattgccgtaaccataattatcacctcttaatttcattatacgaacaaacgttcttaaaagcaagttttttacttaaaaagtttttttataagagccgtaatcggtttagcgcttacataatctttttccgacaaaaacacttgcaaattaataaatagttgctatacttatgtaagtaaataacattaacaaaggagttttattattatgactaatacatttttagattctattaaagttcgtcgttccatttatgcactagataaaaacgtttccgtagaggattccaaaattgaagaaatcattaaagacgcagttaaatacagcccatcttctttcaactctcaaagttctcgcgctgttattcttttaggagaaaaccatgataaactttggaatatcgtagaagacacattgcgcgctatcgtacctgctgaaaactttgcagctactgaagaaaaagttggttctttccgcgctggatacggaacagttcttttctttgaagatactgctgttattgaaggtctacaagaaaactttgcactatatgcagataatttccctgtatggtctgaacaatcttcaggtattgcacaacattcagtatgggttgctcttgcaaacgctggaattggcgcatctctacaacattacaacccactaattgacgatgctgttaaagctgaatggaatattcctgcaagctggaacttacgcgctcaaatgccgtttggtaacatcgttcaagaagctggcgaaaaagaattcatcgatgacgctgaccgtttccgcgttttcaaataataaatgtttcacgtgaaacaaaaaattccgcgaccattaaattggatcgcggaatttttattttgctagactattaaacctacttctaagttcatcacaactgacaataccagcaattgcgcctttaatttctccatcaacaagaacaagcgaatttggtattccttttacatcaaacttttgagctaatgcacgttgtttatctacattaattttcacaacttggacattaccttcttccacctcagagaattgctcaagcgttggccagaaacagcgacacggagcacaccattctgcccaaaaattaagtaatattttaggatggctactaataatctcttccaagttctcttcttttgcaaaaataatcgccatacatatccacctcacattcagaatattccaaagttgtatcgtggtcaagcaaagggttttagaatagcaatatatcttgctttttgttcactttttgacacttttgtttcacgtgaaacattttatttgctatgtaatatctctaaaatacgtaaatctagcaaaccagtatttttcactgtcatatccgcatcacgaagtccagaaccaacacccacgcttataattccagctgcgttaattgcttcaattccagcttgggcatcttcaattccaactacttctgatggttctaagcctaaaccgcgacatgcttccacaaaaatttctggatcaggctttgatttagtaattttagcagcatcaacaatgtaatcaaattcttgttccatttcaagcgcactcaataccgtacgagcattttttgaaacagatgcaatcgcgcatttaagattttgctttttaagagctactataagttctttaattcctggtaaaacatctgccggcgtaatttcttcgagcaagctcacatagaattcatttttatctgctgcaagtgcttcgatttgttcttgtgtgaagtcattttcgcggccgtctttctttaaaataagaagtagggagtcaattctactcactccttttaaattctcattaaatgcttcatcgaattcaattccaatgctctctgctgtttttttccaagctaagtaatggtaatgcgctgtatctgtgatgacaccatctaaatcgaatactactccttttaatgctgttgtcattctactcgtcctttccaaactgccgcaacgtttcgtgcggttcttcttagattatttggggtttctttaagtattttttctaaagttgttggactcgcaattgagggaaataccgcgtggattccggccgtatagacagcttcaagaccctctcctacgcttccacaaattgcaaaaacgggtgttccatcaggtacttctttcgccacgccgactggtgcttttccttgagcagtttgtccgtccatttttccttcaccaacgatgactaaatcggcatctttgcaaactgctttaatttgaagcgcctcgattacaaaatcaatgccagacagcaaattcgcctctgcaaatgttgcaagtccagcgccaattcctcccccagcaccagctcgtgccattgttatcatcgctggattggccagctgataaaaatgacgcattgcctcgtctgcgctcgcgagatcagtggcagctaatcctttttgtgggccgaatacataggatgcgccttcttttccacaaagcggattttcaacgtcggttactatatttatcgtgatgtttttgagctcagtaggaacattttcagagcggatggttgcgatgctagctaaattggcgccgattggatttacgacattgttttctaaatctaaaaattcatagccaagcgcgctagccatgcctattccgccatcatttgaagcgcttccacctatgccaatgataacctcggtcgcaccttttttcattacgtgcaaaattagttcgcccaccccttttgtgctcacttgaagtggatcacgtttagttgctggaactagatgcaaaccgcaaacctcagccatttcgatcagcgcttttttattgccctctgtaaaggcaacttttgctgaaacaggctcgccaaacggaccagaaacattgattttcgtcgttttcgcatccacggctctacttaaaacatcaagcgtaccctcgcccccatctccaactggaagtaactggtagtctgcatgcggataaacttcttgaaagccctctttaatatactctgccacctcgtgcgccgtcaaactttctttaaatgaatccggtgcaatgacaattttcataaagacacatccttttgttccatcttaatcgttaatgtatccgttaattgctgtttttctccgtagataactaattctagcatgctttttgtgttttttgaaagttgtaacgtgtttggcgctatttccactagaattgtttcacctttccacatgaattcaaatttcacaaatcgccaagcatctggcaaatctggcgctatttctaataattctccgctagtatcaatgcctgcaaacccaaaaaccactgccagccaaattgcccccagtgaagccgcatgaagcccgtcatctgatgaatgtggttcgtccccaagatcaattaaacacgcttcttggaaaaattgataggcttgctcgcggtttcccgtacgattttccacaatggcatgaatcgctttacttaaagatgaatcgtgaatggttcgtttttcataataatctaggtttttcttcacagtttctggcggaaacatctgaggaaacaaataaaataacatcactaaatcagcttgctttaaaatctgtaattcattcacttcttgtcgcgaataatctagtaaaatcccttgtgttccttgcgcagccttatatttatctaaatttatccaatctttttgtaaaaaagtatcatcttgcggaattaaacctttttcatttgcgaccggtaaatataagtttttaagaaacgctttcgcacgtgactgaaaagcttcattatcgcggttccattccagcgccattttcacattatagtgcgccatgtagttggtgtaagtattattatcgatgtgctctgtatattcatccggcccaatcacatcgagaatttccagtcgaccgttgcggttagttgctcgacttatccaaaactctgctgtttcgaggagcagttcagcaccacagtcactcataaactgagcatcacctgtggcagcttcatattcacaaacggcataagcaatatccgccactaaatgatgctctgagatggcagaagctactttttgccgtgttccagtccgaatgttaatcgctgcaaattccggcgtttcttcctcaccagagaaggcactttcccacgggtaaagcgccccattatatccatttttcaatgctttttctttcgcttctttcaaatgaagataacgatattctagcagttgtttggcaatttccggcttattataaaggaaaaatggcataatgaaaatttccgtatcccaaaaaacgtgtcctttgtaaccttccccggtcagccctttcgcaccaacactacaacgaaaatcatctttcggcgtcataatttctaaatgatagcacgcaaaatctagcgcaaactgatcaaaatcattcgtgctctcaacgcgaacacccgcatgctcccaaaaatctgcccaagctttttccgaatttgctttcagttcagcataagtctcgtttggaaactccacgtccacctcatcaagagatgttttaaccaggcttattttctccaaagcgaatgtttggttggctgcgatttcttgctcaacttcagtcattaattggcgatttttagcagtgaaaacccctttttgactgacttttgttgccactgtaattcgctgtttgctttcaatcgtttcatattcaccaaccatcagctcttcatcaaaaatccgtaaactagattctgccaactgttgcgttccaaaattggtttgttgtgcatcaatacctgtttttattttcactttcgcacatccatttaaaggcgttatctccactcttgccgcaataacatgtttcacaacctttgaagcaaatcgataaaaatttagttggtacttgtcgccggcgctgttttcccaaataattttcctaactaattctcctgtattcatatctaaaaatcgttcatacccatggactttccctgcttgcatcgaaaaaacttccccgtcaagcgtcacttggaaccgtgtcacatccggcaaattcactagttccgaactcactgaaccgctcggacgattgtaaattcctgccacatacataccacgaacttgctccggatattcttcttcaagagcaccgcgcacacccaaatagccgtttccgacagtcatttggctcccatatttatttagataatttaatgcaaattccttctcgattattttcctcataaaaaaacactctcacctttttctgccgattcgtataaactttcaacgattttttgtattctgtaaccttgttcagcgccagcaagttctaaatccccctcgccaagaacgctatcaacaaatgctttcatgctgttatcgtgtttattttcctccagttgacctaagctttccaacaactgaaattcccctgcgttatccgtataaatttcagccggatataaacttccaccagctaaatccccaaaaaagtcgacatttaatacgctctcgggtttaatatgtaacgcaaaagaagtatccagctcaattaatccgccattttccagttcaataaaaccaaataaagcatcctcgactgtatatttttctggatcccatgacccgaatgttcccgcgcttttctttgttccgattttttgaaaactttttgccgtaactttcttcacttttggaaagccaaggacaaacatcgccgcgtcgagcatatgaattcccatatcaatcaacggaccgccgccttgcatttctttattcgtaaaagttccccaacctggcacaccagaacgacgaagcgcagttgctttcacacaataaatctctcctaaaagcgccgaatttttctttaaaaactgtgcttcactagaaaaacgatgatgaaaatcatacgctaaaatagcttctttttccttagcaagatcccacatcgccttcgcttctgctgcactcattgcgggtggtttttcacacataaccgcagccccgtgcctaagagacaacatcacattatcaaaatgaaaccgattaggcgtgcaaatactaactatatcaattttttctgtagcaaacatttcctccgccgtggcataatgcttcaaaaaaccattgtttgaacgaaactcttcgcctcgttccatactaggatcacatactgccacaagttcgagctcatttcttgtcttataatatgccgcatgaaccttctcagcgacttgtcctgctcctatgattgcaactcttttcttcatatccgaaactccttttagaaaaatccgtccgctttgattgggacggattttctattttaaattaaacagctttttaaatgtgccaacgcatctctataagcttgttctggattctcactacgaacacgacattcaaaagttaaaaatccgttgtaaccattctttttcagttgatcaaaacttgttttaaaatcaaggctaccgcttcctggttgatagcgatgattgtcagcaacatgaatatgaccgatggaatctttatgctcttcaagcgcagttggaatgctatcttcttcaatattcatatgatagaagtcagcgataatttctacatttttaagttcattttcatcaatatatttctgcgcatcacttagcaaattaatcatgtgatcttggtatctgttaagtggctcaagataaaccttcgtcccagtttcaccagcaattttatccaaataaattaacgactcgctcactgctttgaaatctccggcttggctacgcggcgaaaccattggtggaagacgataagtgaacattccccacgccgctggaacaacaatcccttgcccgccaacttctgctaaagcttctaaaattgccttaatttcttctaaaccattcagtctgcgctcttcaatgaagtcaccaatccaaccgtcataaccgccacatgcagtactaacaggtagccccgttttcttgatagcactcttcacttcatccaaattctcaacaagcaatttaccatcaatttcaaaaccttcaaagcccatttcttttacataagcaaatttttcttctatattttccgggaaaaatgcttggttttgtgtgcctaatttcattattatcgctccttaaagggtaatccccattttaatacttaaatcaggttgttggtcgacatatttcatataactttcagcagaatcagcgaatggaacaactggatcaatgatgtccgtacaatccaagtaaccgttcatcagtagttcccaacacgtttcctcgatacgcttacgatcccagcgcggataatccggatttggttcactagccgcacgtgaaaagacgattttcgcattgttgaaatgagcttcccgaccaaggttaaatccttctgggaaaggtttcgcgaaggctacataagaaattgttccaccgtaagctattccgcgaagtgctgcttgaagtgccgccgcattcccgcttgtttcaataatcgaatccgcacccagcttaccagtcagacgttttacttctaaaccaacatctgtcgtaatcggatcaaaagtagcatctgctccgtgtttttcagcaatttcacgacgatgactaagaggatccaccccgataacaacactagcaccagcttttttcgccagttgaatcgcaatttggccaatcgcgccaagtccgacaacgacaacgtaatcccccgcacgaacatgtgcatctcgcacgccactcatcgcaaattgagccggatcatagcaaaccgcatttttccaattagcaccttttggcaatttacgtagtttataattatcgacagctttcacaataacagtttccataatcggtccataagaacaaacaatgtctccaagtgcatattccgtcactttgcttccacattcgactacttcaccaacgaccatattgcctagctgaaactcgccaaacacaatgcctcgcgcactatttgtttcacgtgaaacaaataaattccattctggagaaaattcttcatcaataaaaggactaattcctctaaaatcaactacttctgttccatgttttggagaagcgaactgtactttaatttttacttcatcttctacaacttcacgatcatgatattctactaattccgccacacgaggggcagtcgcaactaattttttcattttaaaaaacttcctttcttatcctttaactccaccgtctgttaagtttcctttgataaatcgttctgaaattgcgtacataataacgaccggaagcgccgtaactagcgaggccgccatcattctaccccaaatataatctggtgtactaaatagtgtatttaaaccaattggtaacgtgaatttctctgagctagataggaaaatcgacgcaaacaaataatcattccaagctaccatgaagcaatatacaaacactgatacaatacctgaaatcgcaagcggaacaataattcgtaaaataatctggaagcgatttagcccatccatcattgcggcttcttcaatatcagttggaatcgtgtcgaaataactttttagcataaataccgcagttggtagtgtttgtacaaccatcgtgataattaaagctgtttctgtatcatataaccccaaactcgaaattattttaaacaacggaacaattaacaaaattccggagaacatataaaccgtgtaaaaactcgcgttaatcgtcattcgccctttaaaccgtaatttagacaacgcataagctcctaaaatccccaaaacgaccgcaattcctgccgcaaaaaccgaaacaaccaaactatttttaaaatacgttaaaaacggaaaaatatctggattaaaaatatcgatataatgctggaaagtgaaatctttcgggaaaaatgttggatgcgtagaaatggcttctttgctgctcttaaatgaagtcattaacataatcgcaaatgggaacaatgttatacataaaaatgcaaccatcgtcacataaaacgcgattttctttgttctttttgactttttactacttaccgccattcaaatccacccgctttcttgcaaaaataatcacaacaaaaataatgacaaataatatgacagaaatcgctgctgcttttcctaaatcattgaatgcgaatgctgttttatataaataaactccaaggatatttactttattcgtgagtaagtatacatcggtgaacatatagaacatccaaatcgcacgaagcgtaataactgttgcaagtaccggcataatcgctggcaaagtaacaattttgaatttatcccaaatgttcgctccgtccatatcagccgcctcataaagcgacttatcgaccgtttgcaaaatcgccaaaaacgaaataaatgcatacgggaaataacgccatatcgcaaaaaaggttactaaaaagaaactagaaactggattatcaaaccatagtggcgcttctttaaacatatgaagcacatctacagtcataaaattaatcacaccataaccattattaaacatatacttccatgcaaaaataagagaaatagatggtgttacgtacgacaaaataataagcgaccgagccgttcttctaaaacgaaattcgcggttaaagaaaatcgccacaagtagccccatccccgtactcccaattactacaagcgctgtataagccacggtaagacctagtgatttataaaactctggatccttcaaaatatctatatagttttgtaaaccgataaagaccgatttaatattcggatttagcggcatatccaaaaaactaatctggatatttgaaatcatcggatataacacaagtgctgccagtaaaacaaaacttggcgcaagtaaaatcattgctaacttaaagtcggaccttttatatacttttgttttcataatgcctccttaaatcaaaaagcgacgtgctaaactgtataaaaagacggggagactcacctccccgctatttgattatttaccttcttctgcctttttctgtgctgcttttaagtccgctgaaacatccccaccgccaacagttacgttgttaaccatttgtgcgataatacctgaactagttatatcacccatttttgttaggtttttaccatcaacaagtccgaaaacttggatgtcgttgaaagatgcagcgatttcgtttggaagatcaccaaatgatttaatcacttcattttctttgtatgctttttgttctactacttctttatttactggttgtgcgccacctggagacattaatacccacgttgccatattttctggttgagacaagtattcaacaaatttcttcgttgctttcttttggtcatcatccaaaccagcagagatagtcaatccggaaactgttccataaactgctttttctttttcttctggaatagcgaatccgatgttagatgggtcgccttcttcatatacagatggaagaatatacgtagagtacattgccattggaacagtaccattcataaacgcatctttaatttcagttacgtcatttgaaccaggcattgtgtacgctgaaagatctttgtagtactgaagagcctctttcatttctggtgtatcaatcgttacatttccttttgcatctaaaacattggctttgttagaaagtgcgaattgagagaaagcttgctcactcatcgtactttctgctgttggaattgcaataccgtattttttatcagctttattcgtgaattttttcgctactttttcaatatccgcccagttttttggttcttcaaaaccagcatcggctaaagcttttttgttgtaccaaataccttgaacccaaccgcttaatggtgctgcgatatagcttttaccatcttcagaacgcactaagtttgttgcaccttcatagtatttatcttctccaaccgagtcgataactgcttttactgcatcttggtcaattaactgatctttatccattactttggcaaaatcttggcttacttccataactgctggaagtttaccagaacgagcaagtgtgacaacttttgtattaaaagcatcttcttcaactggaatttgtttgattttgattgttggattttctttttcaaaatcagcaattaatttattaataacatctaaacgctctttttcaacggatgaatgcataaattcaattgttacttccttactaccagactctttccctccacatgcagctaataccgcacttagaaccaacacaacaacaagtaatacaagactttttttcttcatttttgttcctccctgtaatttttggtttttagccagcagaattcatagcctctaagctttatggaatcgctcccagttaccgtggagcccttataaagatttgtataaacaccgctgtctagtgaataactcacttctttttctgataaattatgaatcaatataatcgattccgcgtcggatgaacgtttaacaacaaacaattccgccgtagattctaaaacttccatcggtatttctggatggaaaagtgattccgcttttcgtgtgctaattaatttcgttagcgcatcataggtttcttttcgtaaggagtcagcctgattcaactctgctgtaatttccgccaagtcgtatttttttcgattaatagagcgattatgccccgttgtttctacgcctgaataatcattgcgacttcctaaaatactttgaacataaacagccggaacgcctgggatagacattaatactgcatgagcgacgagaaatctcgatagcctcaagtcatcagtatccgcttgtttacttaacgcatccatgtaagtcacattaatttcatacggacttttagtaccatctggattttgtttataagaaacgagtgctccttctttttccaaatcatctaccaatgctaaaatttccgcttctggaataattccgcgcactggatttaagccaattccatcatgtgaagcaaggaaattaaagaatgtacgcttgccttctgggagctctaaattcttcgcccaattgctcaaaaattccgcatttccgtgatgtatcgcatggagcacgagtggtggaagcgggaattgataaaccatatgcgcttccttttcaccatttccaaaataactaatattatcaacatgcggcacgttggtttcagttataataatcgtccccggagctgccatatctactaaatctctaaataatttcacgatttcatgcgtttcatctaagtgaatcgagctcgttcccggcactttccacataaagccaaccgcatcaagtcgcacatattccgcaccttcttctaaatagaacatcaaaacatcaatcatcttgtaaagcacttccggacaagcaaagtttaaatcaatctgatcctcactaaacgtcgtccaaatataaccctctttaccagaagcaaattgaaacggcgtgagcactggtgttgcacgtggtcttgtaaccgaactaaggtcagtatcgggatccatttccacgaaaaagttttgaaattccttatcgcccgctaaatatctcttaaaccactcacttttcgccgacatatgattacaaacaaaatcaaacatcaatcgcgccgactgttccatttccttaatatcttcccaatcgccaagctccggattaaccgctttgtaatcaataaccgaaaacccatcatccgaggaataaggatagaaaggtaggaaatgtactacctcaaaagtcgattttaaataacgatcatacattttcttaaaggttggtaaagtttttttggattcctctttaaattggtctccatatgtaattaaaacaatatctttctcgtcccatttgtcttttcgtactaactttctttgtttcgtttggtttacccgggcttcaattctcgttgctaaactctcaactacatcttcagaatataaccgcgaaagtcgttttcttaaattcgtcatcatttacctcctaaccgggagcgctcccacaaaaagaattatagtatggaaagcgctttctgtcaaacacaatttaaaaggaatttcctaacatgttgacagtattgagtttttatacctatataacatctagttggacatttagcgtaaaattgagtaatataaacatggatgataatgaccggaaccgataccggaaacaatagagaaaggaagattaccttggcagctaccatttatgacatagcaaaacacgcgggagtttcaaaatcaacggtatccagagtactaaacaatcaagctaatatttccaaagaatcaagacaaaaagtattagaagcgattgatgaactcaactaccagccaagcaaactagctcgcgcacttacttcttcaggctttgatgctatcatggttatctcaaatcgctccacaaccacaacaacaggaaatccatttttttccgaaataattcaatccatttccactcaagctgagttggaaaatttcgaccttattcttcagaccgccaaaaacagcgaagacgaactcaaaaaatgcctctcaaaaatccaagaaaaaatgattaaaggtataattatgctaagttctccggctgatgaagattttttccatcaattagacccgtataatatccccattgtcgttaccggaaaagtagaaggacattacaaaaatatttattccgttgacacagacaattttggtgatagttatgctctaactaaacatttaatcaagcaaggtcataagaaaattgcttgtatccacgcaccacttgattatcatgtttcgattgatcgccttgctggttttcgaagctgcctatttgaccaccaattagaccttcgcaatgactggattattgatagcggttatagcattgaagacagttacaaagccgcattacgcctaatggaaagcaccgataaaccaaccgcagttttcgcaaccgacgatttaaaagtacttagtatttataaaatggcagccgataaaaatttacaaatacctgcagatttttctgtcatcggctataatgataaagtagcatcatctttcttgtcaccgccacttacttctattgacataccaattaataaactaggaaaaaaagcgactaacttattattccgcttaatccaccaagataaaaacgtaccaaaaacgaccatcattaaaaccgaaatgattgaacgtgaatccattcagaaaataaacgattaagcttattttctgagtttacttggtcctgtagctcagttgggagagtatcaccttgacatggtgggggtcgctggttcgagaccagtcgggaccatttataaaaaagcaccccttatagaaagggatgctttttttacgtttatttaaatagcttacctaatttcttaaacagaccatcttcaatgatatcaataccaattccccagttactatctagaacttttttattagctttaatatattcttctaaatctttcccagaaatagtaaggttgtgatatggacgatactctaaataacacgaagcaccgtttttgtgaattttcttcgtcacacgatgatttaaatacttagacttgatgtcacattcttgacgtgtgtaggaatccgtctgatctatcgagtggtcagtcgttaaatgaatctccattttgatgatatttcgatcaacccaatacgggaaatctttatggaaatgtttttccgcgccatcatcaataaaattaccccaactccaaaaatgtaaaaagcgttttttgttttctacaatatatgggtcagttattgttgctttataaactagcgaaatctcattcatttccttattatcttccacaatttgaatggacgtgttattaaagtgcttatcaatctcattttcttcatattttttatataaagtcatattgctataaatcgcgaagttatagcgattaacaatatctttatttgattcatttttaaacatttcacgtgatccgtttgccattccaccgcgtaattttctttcaaaaacaacctcggcttcatttcctttaacatcacatcggaaaatttcttcaacagaaggcgttctatcttgaaaaggctcttgcttttgtaattctgttcctggtttaatttccaaataatacatgaaactatttctttggcggttagctaaaaaaccttggtcactactcattgtggcatcaataaaataaacttgattatcatctgttacttttaaaatcgcatggttaaaattaaatggtgacggcgtataaaccggtaaaaagacatcactgccataattaaccaaaatcagctctgaatcgacttctaaataatctaaaatcacttttaaaagaaccgttttcgccttgcaatcaccttgtttcgtctgataagttacttctgccgcttgaggctcatgtccatccatttccgtttcattatacaaatagtatatttctttttgaacaaaatcaatcgcatgcctaattttatgttttaaagaaggtaatgcatctaattcagaaaccaaatcaccagcaaaactggctaaatccacttgatagaatttctgataaacgtcactgattgctttggtaatttctggataggtcttttcagtaacaaaatcaataaatggcgtaagttcaaactcttttggatcatttccaatatagtcttctttttcgattgtataagattggctattttcaataataactttttctttatctaaaattgcccctgcttcatcgcggaaataatggaaattcgtttctaaattctgtcctgtctcgttcttcaattcaaaacgatactttccgtaagcccagtatgaatttggagccgaataaatccagcggaaaaattggttacgaatgctgctttcttcatatttacgttcaatagttgtttcaattaagaaaatatcatttaaatgtaaatcacgaattagaaccgttacttttttctcatcattaaaactagcttgattttcatcacgaacataatccaagactttcacattaatatcatttattttatcaatgactttgccgtcgcgaatgacggacagagtgtgtatatataacacttcatcttctgccaaaataaaattggtttttgcagcggagttgagcatattaggatcattcaaagtataagccatagaagtataactttcccgtgaattcgttttagccgtttctacaatatcacaccaaaaacaataatcccgttcttgggcaatttgagcattataaaaatctgtatcttgggtatctaaccaagaagaaatgttttcttgctttgtttcaggagagcttaattcaggttttataaaataatattcttttgtcattggataatctccttgagtttgtattttttatagctccttttattttagcaataactaaatataataaacaagaaataatcttatatgattactatctttccattttttagtaaaaaattcgacacatttatcattcttatgtacaaaaaaagagctctatacagcgctctttaaatgtagttatttacctgtatctaaccaagaaaataacttcaaactttgatattccgtgccaattttttcataatctctaagtaatccttcttctaaaaaaccaagcttctctagcaaagtaattgacgcctcatttctcgggtctacttttgcttcaatcctgtgtaatttaaaagattcttttccccactccatcaaggcttttacagcttctgtagcatatcctcgtttccagaatcgtgttcctaaatcataagcgatttctgctcggtgattttcatgatcaatatagttaaagccacatgtaccaataatttctcctgttgcttgcaaaataattacacatctaagtgcttttccttctatctctagttgccttagcatccgaatcatttcttctacaggctgtaaactttggaaaggctcaatgttcatatatctagtaactgaatcatctgaccagtatccaaataaaatttccgtatcagccaacgtcatttcacttaaaaaaagtcgttcggtttttatcatttgcttccgattttccatacgtttacccccgcattattaataaaaaaagcttatcaaatcttgccctcaaagtaaaatgtttcacgtgaaacattggctctttctttaatatagtaacgtttaggtttataatgaaaaatatctcaaaaagcttcaaaaaggagaatgattcatggaacaaacggataaacgtaaaactttagcacttatttcaataatgcttggagcttttatttcattattagatacgacaattgttaatgtggccttgcctgatattacgacagccctacatgcgacaagcgagacgattgaatgggttatttcaggttatgctcttgcatttggccttgtgcttattttagctggacgacttggggataaatttggtcggaaaaacatttatattatcgggattaccctatttctaattatgagtgttactgccggtttagcgggttcggaaaatagcctaattatttcccgggtaatacaaggtcttgctgccgggttatttttcccgcaaatcaatgcgacgattatggatatgtattccggaaaaagcctcgggaaaatcttcggcattcttggttcagttattggtgttggtactgccatcggacctcttacaggaggacttttaattgaactgttcggcgctacaaacggttggcgcgcagttttcttcgttaacgtaccttttgtgttagtaacacttgtcctagcaatgctttatcttcctaagagaaccgtctccacgaaaaaaatcagctttgatttgcctggagttggcttactgacaatcgcacttttactattacttttcccacttatttcaaatggtgcaaatgatttcaaaccaatagattaccttttaatggcgctttctattccgctcttcatcatcctttataaatggagtgtttaccaagaaaagaaaggcaatcaaccattaattgcgccaaacttacttaaaaacaatcaatttgtctcaggaatgctcttatcactcgtatattttgctgcatttactagtattttcttcgttctatcgctaacttggcaaactggtttcaatcgttcagctattttatctggacttgcaattagcccctttgcattaggtagcgtactggcagcatccaatagttaccgatttatcccgctactaggaagaaaactgttaatgcttggggtctcgctcgttattgtcggtcttggcacggtttctatagtttttcatctcaatgatggcgctttttctgcttggctcttattcctaccacttttcattgcagggcttggtagtggtttaactattgcaccattaaatagttttaccctttccaccgtgactgggctcgatcgtggcggagctagtggtatgtttaatacagcgcaacgaattggttcgtcctttgggattgccgttgtcggatcagtatttttccgcactctcggtaatactacagccacctcaaaagcaagtgccttttcagacagtttgcaaatgagtatgtacgttaatatttttctactcgtagtttgttttctactcatattccgcttaccaaaaagtatttagaaaaagagacatgactttgcgttaaagtcatgtctcttttcttatgctaaatagaaaacttcttttaaatcaaccgcgaccgggctattattaggatttgatttcatgattggagccatatatttccaccacttttgacaaatttctgtttctgctattttgtcataaatggctttatcctcgacttccacataagcaaataatgtatccgttttttcttctaaaaatatcgaataattagctgctccatgcgcttttaaggcctctttcatttctggccaaagttcgtcgtgtctttttttatattcttcttgattaccaggatataaatacataatagatgccactcgttccattattcttacctcctaattatttaaataacctgcctttgcttcaacgccaaatctttcacccagtgctttcaattgttcatctgtaatcgcttgtttaataccgccttgtgacatcacaatagtataaacttctgctgctttctcggcggtttcaattaatccaaatgtttcatccattgattgtcccgcaccataaatcccgtgatgaggccaaacgattaaacgattttccttcattttttctgatgtagcttttccaatgtcattcgtaccaggaaccagccaaggaataatcccaacaccttctggaaaaacgactaaacattctgtacacatttgccataaagttcttgtaaatgctcgttcagtcagctcatgtgtaaatgtcatcgcgagcaaatgagtagcgtgacaatgcataacaacgcggttttccggatcaacagaaagtcttgcaatgtgactcataaaatgcgctggaagttcgcttgttggtagtccgccgtctgtgtagccccacagcaaatgaactgctttcccatcttcacttacttgaattacacctaaattaacagctggagcttcttcaacatttttaaaatatttacccgaaccagtcaccaagaaatatttaccagcaagcttttcaccgtcaaagtccattggaattgtgcggataatttgttttacatctaaatattccacaacttctttttcatccaacaaataagtgatattgccaccgtttctttcatcccagcctaaccggtataaatttgaagtagtttttgccatttccttaataaaatcagcatcaagtatatcctttgtcatcgtcaatatctcctatctttttagtaatacatctttctcataagcttttacttccttcaaccagtcaagaccaactgggacaccattaatttcacagaagtagttccatacatcgccaaatgggaagtcttttaattcttctgtaattgccatacgagatgtaaagtcattttccagttccatttttttcaaatcagctgtaggttctaaaagggctttaagtaatgatttttgcgtatttctagtcccaacaacccatgcagcaattcggttgattgttgcgtcgaagaaatcaagaccaatatttgtaattccgagtaaatcattgcgcactaattcgcgaccaatttcaattaattcatcatccataatcaccacatggtcactatcccagcggactggacggctcacatgtaacattacacctttactgaaaagtgctaaagaagacaatttattagaaataacttcagttggatggaaatgtcccgcatccaagcaaatcaatttgtcccgcgtaattccgtaacccatataaaattcatgcgagccaactgtataagcctctgcgcctaagccaaacaacttactttctacagcttcttgggtatatttttcatctaatttttctgcaaaaacttcatctaaagcttccatcaaacgttttctcggggtgtagcgatcaatcgggcaatcttttataccatccggcacccagaaattattaatacttgtttgaccaagttctttcccaaagtactcagaaattttccgcgagcgtttcccgtgctctatccaaaaatcgcgaacttctttatctggtgaagctaaagtataattatctttaaacattggatgtgaaaagaaagttggattgaaatcgagccccaatccttgctctttcgcccattctacccatggagtgaaatgtttaggttcaatttcatttaaatctactttttcatctgtatctacgtaaattgcgtgtaagttaagtttatgttttccgggaataagtgaataagctttttccaaatcttggcgtaattgcttaggagtatgagcagcacccggataattcccagtcgccatgattccgcctgtaagttcgccgtctggatttaagaaacctttaacatcatcgccttgccagcagtgcatcgaaattttaatgtctttcagtgttttaagtgctttttccgtatcaactccaattgcttgataacgttctttcgccacttgatatcgtttactaatttctgtttcttgtcccattctaaaagcctcctaattaaattcaagtaccttagtaaatctttcttttatttcctcaaatctcacatcgccacaagaaaattcgccaatttcaaatgaatttcgaataatttttcttcctgcacgcatggattcgatttcaccctgattaatcatttgtacaactaaatttccaatcgccgttgcttctgaaggtcccgcaaacacttctatccctgcaagtttagctgttaattgatttagcatagctacattacttccaccaccgacaatataaagtttttcgattttcttaccagtaatttcagtcattttttccaattctagtgcataatagagtgctagacttccatacacacaatttgtcagttcgccaattgtctccggtacagtttgtccagtttcttggcaatacaatttaatctcatccaccatgttttccgggttattaaaccgcgcatcattgacattaataatttgcttgaaataaggataattactcgcttcctcagccatctcagcaaaactatgcttatagtcgtccatgcgcgcaatttcttgaacaatccaaagtcccataatgttttttaaaaagcgataagttccatatgcgccccattcgttcgtgtaattttctttaaaagctgcttcgttattaattggcgcgattagctccatccctattagcgaccatgtcccgctactcaagaatgcccagttttctccttctgccggagttcccaccactgccgaagctgtatcatgtgttgccactgtcactacatcacaattaggaatatcgtactcctctagccactccgcttttactttacctaaatacgtccctgcatccgtcagtggtgcaaatttttccacatcaatgttcaaatgcgaaagtaaatccttatcaaataattgttctcgcaaattaagcatttgagtagtcgatgaatttgttgtttctgccaccttaactcccgtgagcacataaccaatatagtcaggaatcaacaaaattttctccgctcgttctagtaaattccgctcttccacgtacagctggtatagagtatttaattccataaactgaatacctgtttttttataaatatattctcgtggatactcactcgttaaattctgcaccgcatttaaagttcgtttatcacggtaactaattgggtctgccaacttttctccggaagcacctatcaaaacatagtcaacgccccacgtatcaattccaagcacacattccgaaatccccagttgttttactttttccaagccaataaaaatttcctgcatcaattgatcaatttcccagcgttcgtgcccatctcggtacgtaaagccatttttaaaacggtggatttcttctaattgtaatttttcattcaccaattttcctagaattaatcgaccacttgatgcaccaatatctactgcaacataatgtttcactggtctagctccttttctttaatcaattgtatttccgtaacgttccttcgtaatatcatcaagtgatctgccacgtgttttcggcgcccaaattacaccaattaaaagcgacactgtaagtaaaccaatcatgattgtacccgccacagtaaagccaagattcgccaagatcactgggaacacaatcgaccagacacctgtactaccacgaactaagaaaaacatcacaccttgaaccccaccacgatattttgttggaaaaagttctgttgaccaaagtgcgtaaaaagcttgtgcaccaatccctgctgaaataccccataaaataacaaatgtccataagccaacccaagacattccaacaaaagtaagtacaacccaagaggcaactgccattaaagcccctacaaaaaacaacccacgatgacttactcgatcaccaaatttagcaaagccaaagtatgtagaagctgctgtgagtatccataatacagcttgcaataaattcgcttgtgtattagaaagaccacccaccgtttcatatacaaacggcataaagaatcccattgcacctgctactaaattccaaaacaagtacacacccactaagaaaagtactgattttacatttaccatactagaaaatgctgttttaaaaggatgttccaaacgattaccactttctttcattttcacttgctccgcttcccagtccttcgactcctctaatttacgttgcaactgccaagccacaaacgctacaatcaataaagataagaaaagtaagcggttacctaaaagtccaagtggagatacaataattcctaaagtaaagataattgctggcccacatgaccaagcaaattgagatataccaatatttctagctcttatactagggtccgccatttcagaaatatatgtccatgaagccggaactccagccccaacagaaagacctgtaactaaaaatccaattaatagcattgggaagttcatcgcaaacataatgattgtaaccccaagcatatataccaacatgttatacgtataaataaatttccgtccatatttatctgctaaatgaccaccaataagtgcgccaattgcagaaccaaacgcatttgcgctcaccgccccaagtaatcccactgcaaaactgctaagtccgaattgtgttgcccacaaagttagtccacttgctcccgctacaatacatccagaatctaaatagttcgtcaaagataccgctatcgttccttttttacttgtactcgatccagccattcttttaaccctcctacttattttagttaagcgcttactttatattaaacaattaatgattgcgctttacaatatcctgtgcttataattaaagtatcaaatttacagaaggagattgtgaaatggaagcgcttaataaaaaattatttcgtctaaattcaaaagaaaaaatccaaaaaagcactggcacttttgttcccgatttacccaatggatcctttttaaaagagaacggcagcatggaattattaaacgattatttcttcaaaaacaaagacatttatataagcaaacacaaccgatttgcggactacccttatcatacacatcaatttcttgaactaaattacatgtattcaggaagctccgaacaagttattgaaggaaataaagaaactttacatgaaggagaacttttacttttagacagcgcctgccatcattccatcaaagcaacaggcgaaaaagacattctcatcaatatcctttttcgtgaccaacaaatcagcctagaatggctaacgagtattaagaaaaaaaacagccttctattcgattttcttcttcattccagcgtaagcgagcaatctttaaagaaatatattatttttcaaagtgcgcaaattccgcatatccaacaatttttaaaccaaattatcacggaatattttttagaagaagaattttcatcgcgaattatcactctctatttaccaatcctattcactgaattagtccgtaaatgcgatacatacttagctgatgatcttaccagcgcacaatcaagcaccacttccaccatgctcgaagtcatcaagctgatagaatctaactatcggacaatcacactaacaagtgccgcggatacattaggttacaataaaaattatctcagtaactttattaaaaaaaataccaatttcacttttaccgaactagtcaataaacaaaaaatgctcgcagcaaatcttttaatcgaaaccacttccactccaatcgagttgattattgaaaaagttggctttagtaacaagacttacttttactccttatacaaaaaaacatttaatcttttacccaacgaagtgcgcaataaaaaataagagtactgcattagtcgcagtactcttataaatgtttcacgtgaaacattctatttataaacaacctcaaactcttcacaaaccaccaaagcatcttcttcaaatggaattccaagctcgtcgcattcattcgtgaaaaaggaagtatgtactttacgccaatattctagcgatctgtcaccttctccttccaaataagcaaatgtttcaggtacttcattaaaaggcataatcttgactcctattaacttaataatacccatcgcttcttcttcaccatctaaaagaacgacgtgcgaaccaactgaaggcattggttccaagccctgatcataccaataaaacaagctgctagtccctgttttaattccattcataacaagtttaccaagttcgtccgccatactaggagaatttccgaacgcccaagcttcaaacttattagagattgtcgggttttctgctcggtatttctgccacatttcattaactgaatccttataaatcgccatttaagtctcctcctaaaaaaaagactgagattcctaaaaacctcagtcttagttttattttttcactggcttaatcacaatataacgataaggatcgcgtccttcagaatgcgtttcaatttgttcattctcgcttaaaatagcatgaataatttttctttcaaatgaaggcattggttctaaatgaacagcgcgcttcgttttaagagctttatctgccattttatttgctaaaagcactaacgtttcatgacgtctttcacgatagtcccctacattaacaataatgtttttgtattggctcgttgttttattagcaattaattgtgttaagtattgaagtgcattaagagtttgtccatgtttgccaattagcattcctagactttcacctttaatttgcaacttcacgtctttacctacttcttctacatcaatcgtgattactgcacccatcttggtagcaacatctaaaagataatcaatcgctacttggataccatcttctttttcaattacttttaccatagctagtcttgaaccaattccgaaaataccttttttaccttcgtctagaacttctacttcgaccttgtcgcgtgttgtttctaaagtcgctaatgcattttggattgcctcttcaacatttgagccttgcgcagttatatctctcactttcttttcttacctccttttttggaagctttcatgttagctgcttttttcttcaaacgttcttcttcaagttgagcagccgccagcgcctcctgttcacgtttgtttttaaaaggattatttattaaaagtgtttggaatacggtgaaaatgttaccgataatccagtatagagcaagtgcagaaggtaatgtgatacccataaatagaatcattactggcatgatataaacaatcatcgccattgatttattttgctgtgtttgccccatcatagaaatttttgatgataagaatgttgttagtgctgctacgattggcaagatataatatggatccggatttcctagttgcatccataagaatgtatctgttttaatttcagcagttctactaatcgcttggtaaaatcctagtaaaataggcatttgtatcaataatggtaaacaacccatcattggatttacactattttcttgatataggcgcattgtttcttgttgtaatttttgttttgtttcattatctttagacgagtatttttcttgtagttctttgattttcggttgtaagctggtcatagctttttggcttttcagctgtttgatcattaaaggcataattagtagtcgaattaaaattgtaacgacaataattccgactgcataatttcccccgaataaatcggaaaaccatgtaataacccaagataacggaaacacgatgtagtgactccaaaatccagttgaatcttttgtaattggatcagttgaatagccacaacccgaaagtacagctactaatccgattacaagacttgcgatgagcaacttctgtttgaatcgctttttcttcttcaaattgatgtaacctccaatttcgcctttttcaaatttccactcattttgaattgtttggtttttgttttaaaacacgccctacttttaaaacatgaatcaaacttttcttaacttcatgaaaatccatattggccgccggttttctggcgatgataatatattcattttcaggattgatttggctttctagctcatggaaagattgtcttatgtatcgtttgattctatttcggcagacagcgtttccaatttttttactaacggataaaccaattcgaaaatgacttgcttcttcttgctttaaagtataaacaacaaattgacggttagcaaaagattttcctcttcggaatactttttggaaatcgtcattttttttaattctatatttttttttcatacattctccatcttcttacatatcttagtataaggccgtttgactcagagatttttcaaaaaaaaaaccactgagtcgttttcagtggtctacgcagataaaacttttcttcctttacgacgacgacttgctaaaactctacgtccgtttttagtactcatacgcgtacggaaaccatgcactttttttcttttacgtttacttggttgatatgttcttttcattaattacacctcccatgaaagggtccaatcgaatttatctattagacagtcttagatattgtacgtgaactggtcatttttgtcaatactatttagacgaatttctatttagactccgttcactatcatatcatatttttatagagagaaaaaccatttttctaaatttattgtgtcaaatagatatatttttctctagtagtatccggaatagctattttacgtccagaaacctctactaaatatcgcgcaaactcaccaattttctcaaattcagcaggatattcaaaaattagtttttcctctattaaataattatcgacataatggctcgtttcaggctgaaaagatagaagtccttctataaaacgaattactttggtaaatttcggaatttcctgctcttcttctaaatcagtaaagtgaaaaaacatcgtgtaaacatgattttttttaatatttacggaaaaagcttctttatttatattacttttcgcaaatactttaaaatcatcaatttctgctggttcccgtttgtcgtgaataagtaaataaccaaacacgtcttcaatgttcccgttttgtataactcggtaaaactctgtatctcttgttttcaaaagccgttgaaatatcatttttcacaacctcatcttttgtcttttttttggtattctgctaaatagtttaacacattgtcgcaatgaaatcctttcccagaaagtgtggataagtagttaataacggctttttattgtggataaccttttatttaagtttaaacttatacacaattagtggttatttacacacattgacttgtgga

SEQ ID NO: 2059 - DNA, 495 bp, Listeria innocua
atgcaggatttattaacattacgctttttagacacatatgacaatattctctttattggaaatagtggtgttggaaagacccatttagccgtttcaattggattagaatgtatcgatcgtggtttaagttgtttgttcattacgagcactgaattagtgaatcgtttgatccgcgctcacaagcgcggaactagcgaaacgatgctaaaaaaatattcgggttattcggtgttgattatcgacgaagtcggctatttacctttctccaaagaaggttccaacttactttttcagctgattaatatgcggtatgaaagaaaatctacgattgttacaaccaatatcccactatcccagtggtccgaaatatttggaaacaagaagcttaccaacgcgctactggaccggttggtccatcactctaaattgatccaaattacggggccctcttatagaatgaagagttatagcgaaaacaaagaggtgaaatcgtaa

SEQ ID NO: 2060 - DNA, 162 bp, Listeria innocua
atgtcccattaccatcaattgttaaatcaactaaacgaattgaatttatcttgcatgaaagaaaatctagctgcccatttagatgaggttgccaaaagtgataaatcgcttgtagactctttattcgagctcacccaacaagctcacccaacaagaaattag

SEQ ID NO: 2061 - DNA, 1227 bp, Listeria innocua; identical to SEQ ID NO: 603

SEQ ID NO: 2062 - DNA, 2271 bp, Listeria innocua
atgaacgaagaaactagaaaaaagaaaaaaagaccttcacttaccacactttacgaaggaacgatgaaggaaattacgagcaatgagaaccgttacatcgaatttttgaatttcgccagcagggtgcataaatatagctttgatgaacagctgcttttatatgcacaaaaacaagatgtccacatggtagcgacatttgatatttggaaaaagcttggtcggtttgtgaaacgcggatctactgcagcgcttctatttgattacacgacacaacaaagaaagtatgtctttgatatatccgaaacaggcggagaaccccttcaggtatttgattggcagttacttgataatgacaaaaatgatttacttcgatattggaacacatatgaaaaacagagtggtacgcttgtcaattgggaagatggcattcacgcaaaaatagcttcctatcaaaaaccaataggtgatcagattcatccgttttttgtaaaagatattgaagtggttgcagcgtatatcatctatcaacgaacaaatacactaataccagaggatttactactagatgtacagagcgttttacagattgggaaaagagataatacgttactggagatacaacattttgccaatttaaccgcaaaggaatttttacaagatgtggaacgcattttaaataatgaactgaaaaaagagagggtgctttaccatgacagaatcaaatttgaagatgagttatcgcgaagagaatggcaacctgcttccagagatagaaacgtcagaagaaatgatgccgattggaaagatcgggaagctgatccaattgaaatgggagaaagaaaaatcgcttcaagtgatgaaatggaagttaaacggaaattatcttcaggaagtgaaacgaatggaaattcaagtgcaagacaagatcaaccagtattacgagaaactcgtgacgaaagaaagcttaccgaccgagatggaaccattagcgagagcgaagcgtctgaaatcgcttcggatgcaagcagaggagatcattctgaaccaactatagtagaagaagtaaaagaatctgagcgatcaggttctttttttatgcctgtcagtgagcgaggagaacaagtcgatttatttgcagaagaaacaaactacatggaagatccagaaatttcttatttagaagataatgaggaagaatcggtagagaactttcgctttgcggatacattcacctttccaagtggtccaaaagctaaatttcaagcgaatattgcagccattcgcttgctgcatcgattagaaacggagaatcggttcgctaatagcgaagaacgcaatatattagcgcaatactcagggtggggtggtcttgcggatgcttttgatgaaaacaagctagcgtttcaaaaagaatatctcgaactgaaggagttactaacacctgaagaatatcaagcagcatttgaaggaactttaacgacctactatacagaacctgctttaatcgatcgcatgtaccaagttcttcaaggcctaaatgtagaacccgaaaaaattttggaaccatcgatggggataggtcacttctttggtcggttgcctaaggcctatcaaactgcttctttaactggtgtggaaattgataagttatccggtagaatagcaaaaaaattatacccgaaagcagctattcaattaaaaggctttgaagaaatgaatagccaatctaatacctttgatattgcgattgggaatattccttttaatgactttaatgtgaccgataaatccaaacgatatccgcataaattgatccatgattatttctttgagaaaagtttagatctcgtcaagccaggaggatatattctttttgttactagcaaaggaacaatggataagaaagatagtcgagcgcgccattatttagcgcaacgagctgatttaataagtgcggtaaggttaccaaatacagcattttccggattgggtgggacaaaagcaaccactgatatcctgcttcttcaaaagctagaaaaagaacgatttgtggtggaagatattccagaatgggtgcaaacaacaggatttcaagatagtcaaggaagaattaacacgtatttttacaatcatccagaaaaagtcttaggggaattgaagctatctggcatgtatggtggacaaaaggtcattgaatgtgtgccaaaagcgaaccaagattggttggtcgaattagataaatgggcagtaagctgtaaagggccatattaa

SEQ ID NO: 2063 - DNA, 399 bp, Listeria innocua
atgtctatcatacaaggatttttagatatatgtgatcggatcgcttacttctttggagaattagttagtatcattgttacaagcattttacttgtgattgaaaacgtatttactgctttatatcatgcgtatcaagcaagcggtcagatgaaatgggcatggtggacggttatgactatattagcttgtatgattgtcgtatttatcattcgctattttattattgtcgcagtagctacgctgtttttggtccctttaatggctttttttgtcaaagcctttttgacaatcgttgtagctacctttctacttacgattgtttttattatcatttataaaggcaaaacgagcatttcaaaatggatgagagcaagaaggagtcagcaagaaggagcataa

SEQ ID NO: 2064 - DNA, 336 bp, Listeria innocua
atgactattcaacaccaatttgctgaaaatctttcgagattaaaaaaagaacatggtctcaaaaatcatcaaattgctgaattattaaacgttcaaacacgaaccgtcgcttactacatgagtggtgaaacaaaaccagatattgaaaagctgatccgtcttgccacttacttccatctatcgatagatgaattagtcggttatgttcaggaagacaaagtatggaacgatttgtccctaaagcaatggttactatccctaaatttgagaagcgaagaagaaatcgcgaaaattaaaatattggttgataccgttgaaactttgtatccaaattaa

SEQ ID NO: 2065 - DNA, 531 bp, Listeria innocua
atgaaatatgaagaagaaaaacatccattatttaaccaagaagcattggatcaatatgtagaagacacttcccaacattatacaaatgatataaaagaagcgatgcatttatggccaaatggtcaaatgacgagttccacctatgagggagtaaggggagatgatcacaatgtaattacgaattattttaataacatcgatatgccagaacttgcacgtataagacgaagtgaagtaatggaagttgcggctgaaggtgtgggagttttgattgtagttccagagacagaaaaaatattgaaagcgaaaaatcaagtccttactgataaacaaattcaagttgtgtgtaaaaataacttcgagttggactacttcagtgaaggtatcgtgcttacaaaagaaaaaatggaggcttatggtgtgacggaagcacagatacaaaatcttgcagctaaaaatcaagcagctaaggagaataaagccttgcaattaggagaggtagaaaaaagtatagaggatctagaaagataa

SEQ ID NO: 2066 - DNA, 765 bp, Listeria innocua; identical to SEQ ID NO: 492

SEQ ID NO: 2067 - DNA, 1341 bp, Listeria innocua
atgagtaagattaccgccggtattgttttagcgacgaaatttattgtcccaaacagtccattaaataagtcgaagaaatactggtcaaactatatcaaatatattgatcgtgatgaagccgttcgaaacgagcattacaaagaatttagcatgattggtaatgaagaagagcgtacggaagaggaaaaagaacggaataaaaaatatatcgattatatgggaaatccgaaaaaaacatctggtttatttacagaaggaaaaccgaagttgacacaagctgaaaagaaaaaatataaagatgcgttccaaactgcagaaaaaaataacagcgttatgttccagcatgttatcagttttgataacgagtggttggctaaacaaggtatttatgatccgaagataggaatgcttgacgaaaaaagattgcaacaagtaactagtgcgtcgatgaaaagttttttgcggaaagaaggcatggaaggcagtgcgatttggttagcagcgatccataaaaacacaaaacattttcatgtgcatatctcggttactgaaccaaccccaacacgtaaattttattccaataaaagacggccggagttggaaaaaggaacggacgggaagccagtaagagatggacgtatggcaccagcaactagaagagccgtacgtagtaccgtttatagtgaaatagcacagcgaggaagcatttaccaacggatcgatgattatgcaaaagaacaacttcttacaccacttcatgcgtcgaaggaagtgattcgatcacatgaaaatgaggccttatttcttgagctacatcaaatgtataaaaaacattctggtcagtggaattatggaaatttaaacaaacatccagcaaaaaaagttgtagatcagatcacaacgaattatttaatgcagcatcatccagaagagatgcaagtatttcgtaaagcgtgggaacatgaaggtaacttacaacaagaagcctatggtaaaaaaacagaatttaatattcacacttacttagaaagtaaggatgaaaaattatacaagcagctaggaaatcaagtgctacaagaagttaaaaattatgataagcgtttcaatcattccaaatcagatcatcattatttagatcagcagggaaatttaaaaaaggaagggtctttaactccaaaagataaaattgcccgttatcgccggcgacgggggtcggtgatctatcagttgaaaaagatggattatgaattagataattcgtacaaaaaatggaaaaatgatcgcgcatttgaacaactagagcaggaaatggaaagagaaaaatcaatggacagagagtag

SEQ ID NO: 2068 - DNA, 441 bp, Listeria innocua
atggctagaaaagaatttgatatgaagagtgaatcgaaagaaattatgatgaaagcaaaaaaaagatatggacttagatctgattctgaaacaattaattttatcatccatatgttttcggaaaaagagagggaacaagcaatctttgaagtgatgagagatcaatatgcagattcaaaaaaattatttgatcgaattcgattaggtgtgaataatgctgagaaaggcacacaagttgtcaaagaaatgttaaacaactacttcttattcaatcacgaaccagaagaagctttcttcccaatcgaaaaagataaacattttattacagggaaagcagaagaagaagtgcaacgtcgatttaaaatcatgcgtgatcaaaagaaagaagcgagcagaaaaaaacaaaatgttccagtagtaccggagccgatccatgagtaa

SEQ ID NO: 2069 - DNA, 240 bp, Listeria innocua
ttggcagaaataaaaattcgtgatctggatgcagctgtcgtgaagcaattggatcaaatggctcgtgaaaaaaagatgtctcgcgaaagttttttgcgtcagtatttgacaagcatcgccgcattggaagaaaccaatcatcttattggaaaacaagaagaggctttccaaaaaatgtctatgggagtctttgagttaacaaaaaatgtacaacaactattaactgaaattcgtgaatag

SEQ ID NO: 2070 - DNA, 681 bp, Listeria innocua
atgaatcattttaaaggaaagcaatttcagcaggatgtgattattgtagccgtgggctactatcttcgttataaccttagctatcgtgaagttcaagaaatcttatatgatcgtggcattaacgtttctcatacgacgatttatcgttgggtgcaagaatatggcaaactactctatcaaatttggaaaaagaaaaataaaaaatccttttattcatggaaaatggatgaaacgtacatcaaaattaaaggaaaatggcattatttgtatcgagccatcgatgcagatggtttaaccttggatatttggttacgtaaaaaacgggatacacaagcagcctatgcttttcttaagcggttagtgaagcagtttgatgaaccgaaggttgtagtcacagataaagccccctctattacaagtgcctttaagaaactaaaagaatacggcttttatcaagggacagaacatcgtaccattaaatacctgaataatttgattgaacaagaccatcgtccagtaaagagacgcaataaattctatcgaagtttacgcactgcctcacccacgattaaaggcatggaagccatccgaggattatataagaaaacccgaaaagatggcactctcttcgggttttcggtctgtactgaaatcaaggtattattgggaatcccagcttaa

SEQ ID NO: 2071 - DNA, 522 bp, Listeria innocua
atgaaaatatttattgccggtccaagagctattaaagctttgaatggtaatgttaagaagcgtattgagaatattattaatcagaatttcaatataattgttggggatgcaaatggtgttgataagcaggtgcaacagttttgttttgagcatcaatatacttctgttacagtatttgcttcaaatggaaaagcgagaaataatgttggagaatgggaagttaataatgttgaagtggatccaacagtgaaaggttttgatttttatgcagcaaaagatttagcaatggtaaaatctgcagattatggatttatgatttggaatggtaaaagtaaaggaactcttaataatatatataatttagtaaagttgaataaaagagtgttagtgtatttaacaattactaaagaattttatgtcattaaatctttagaagaaattgagcttttgaaaagcgaaccgttatttttgaataaaagtgttaataaggaacctgattttgaacaaattaaactgttttga

SEQ ID NO: 2072 - DNA, 576 bp, Listeria innocua; identical to SEQ ID NO: 415

SEQ ID NO: 2073 - DNA, 984 bp, Listeria innocua
atgtgtgttcataatagcatgatttcagatgaaaagacaatactttgcgataaaaaagcgaacggaaaagtgcaaccttggcgtgagaaaaaaacagcgaatgtgaattattttgagctactgcaaattttgaaatttaagaaagcagaacgagtatcgcaatgtggcgaaattttagaatttgatgtgacacaagaaggacgtatgaagttagcaaaaacatggttctgtaaatcaccgttatgtccaatgtgtaactggaggaaaacgatgaaacgaagtgtacaaacaacgaaaattgtagaagaagttattcgacaaaaaccgagggcaagatggctctttttaacactttctgtaaagaacgtttttgatggtgatcaattagataaaagtttgaaagaaatggcgattggttttaatcgtttgatgaagtacaaaaaggtagcaaaaaatatgattgggtttatgcgttcaacggaaataacagtgaatgaaaaagatggttcatataatcaacatatgcacgttttattatgtgtagaatcaacttattttaagaatgatgataactatttatcacaagaagattggacaaaactttggcaaaaagcaatgaaattagattacacaccagttgttcatattgaagctgtaaaaaacaaaaagcgaaataaaaaaagtgagtacacagcgattcaagcagcagtacaagaaactgcgaaatattccgtaaaagattccgattatttaacaggaaatgtagtgaatgatttggaagttgtgaaagacttggaaaaaggtttatttcgtaaacgaatgattgcgtatggtggtttgttaaaacaagttcataaagagttgaatttagacgatatagaagatggcgatttagtgcgagttgatgaagattcggatacagaagaaaaagcctattcgattgtggcacagtggaactggaatttgaaaaattattatatatga

SEQ ID NO: 2074 - DNA, 231 bp, Listeria innocua
tatcaagggacagaacatcgtaccattaaatacctgaataatttgattgaacaagaccatcgtccagtaaagagacgcaataaattctatcgaagtttacgcactgcctcacccacgattaaaggcatggaagccatccgaggattatataagaaaacccgaaaagatggcactctcttcgggttttcggtctgtactgaaatcaaggtattattgggaatcccagcttaa

SEQ ID NO: 2075 - DNA, 339 bp, Listeria innocua
gtgaagtttttaaattttttgaactataaatatttaaactgggtattatatggtattacattattttttattgtttattacttttttaccgatgatgatatttttttaattttagcaatactttttctcgtttcatctaattttagtgataacttaattgaagttcttacagaaccagaaattcggtctatgacggatgaagaacaacagattattaaagctatgattttggaaaataagaaagacgtagtagttatcaaaaagattagagagtatacaaatttagatgttttacaagccaaaaaagtatatgaaaaaataaaaagggtctataattag

SEQ ID NO: 2076 - DNA, 435 bp, Listeria innocua
aaaggaaaatggcattatttgtatcgagccatcgatgcagatggtttaaccttggatatttggttacgtaaaaaacgggatacacaagcagcctatgcttttcttaagcggttagtgaagcagtttgatgaaccgaaggttgtagtcacagataaagccccctctattacaagtgcctttaagaaactaaaagaatacggcttttatcaagggacagaacatcgtaccattaaatacctgaataatttgattgaacaagaccatcgtccagtaaagagacgcaataaattctatcgaagtttacgcactgcctcacccacgattaaaggcatggaagccatccgaggattatataagaaaacccgaaaagatggcactctcttcgggttttcggtctgtactgaaatcaaggtattattgggaatcccagcttaa

SEQ ID NO: 2077 - DNA, 258 bp, Listeria innocua
tatttaaaactttgcaacagaaccttattttctaacactgaacatcgaacgagtaaatatttgaataatatcattgaacaagatcataggcctatcaagaaaaggcacaaattatatcagtccataaggactgcctcatccacaatcaaaggaattgaaactatacatgctttatacaaaactagccaaagagacttttctctctttggcttttcagtgattcatgaaataaataatctaatgggtgttccagcttaa

SEQ ID NO: 2078 - DNA, 483 bp, Listeria innocua; identical to SEQ ID NO: 366

SEQ ID NO: 2079 - DNA, 4710 bp, Listeria innocua; identical to SEQ ID NO: 685

SEQ ID NO: 2080 - DNA, 546 bp, Listeria innocua
atgagtgaaaagttaaagacaatcaaagagcttgcggatgaaataggtgtttcaaagcaagctgtatggcaaaaaataaaaaaagaatcgtcaatagatttacgtcaacttacgtcaaaaaaaggaaataccgtttacgttgacgttgacggtcaaaaagttattaagagtgctttttttaacaaaacgtcaactaaaaaacgtcaacaaaaactttttgttgacgacaacgtgaataattcagttgatgacaatccagaggggaatgaagagattttatttttaaggaatctagtgtccgaactccaatcagaaaaaaaagaccttcataagctattagaccaacaacaacgtctagccttacaagataaaaaattacttgaagaatataaagaagaaatcaaggaattaaaatctttgatggtaccagtacgaaaagatgataaagatcctatggtacgaaaatctaaagacatagataatacaaaagaagaacttcatacaaaaaataaaaaatggtggcattttggaaggaatgtaaaatga

SEQ ID NO: 2081 - DNA, 1161 bp, Listeria innocua; identical to SEQ ID NO: 591

SEQ ID NO: 2082 - DNA, 681 bp, Listeria innocua; identical to SEQ ID NO: 464

SEQ ID NO: 2083 - DNA, 294 bp, Listeria innocua
atgacaaaagccagaaaacctactcgttcctttgatgaggactttaaaaaatccattgtcaaactgtatgaaagtgggaaatcccaaaatgcattggcgaaggagtacggtattgccctatcttcgatagcacgttgggtcaagcaattttcggaagtcaaaatcgatgatgataccattcttactgcgcaacaagtcaaaaagcttcaaaaacggaatgcacaacttgaggaggaaaatttaatcttaaaaaaagcgattgccatattcacgccacactccaacaacgattaa

SEQ ID NO: 2084 - DNA, 276 bp, Listeria innocua
gtgtctacttttttagtatatatccagataaagaattatgaaaaccaagcaaataatttaatcgaagtacagaagcaaacacaaaatcttttagaccaacaacaacgactagccttacaagataaaaagttgttagaagaatacaaagcagaaatcaaagagttaaaatcattaacaactcaatcaacacctgctactttatccaaggatgttaaccaacccaaagatatagagatagataagaaaaaacgacgttggtggccatttggtaagtaa

SEQ ID NO: 2085 - DNA, 3006 bp, Listeria innocua
atgaaaaattttaataatattgatgaacgtgtagtggatgatttaaaaaaagaactaaaagcacagagcaagttaaagattgctgcagcatcattttcaatctatgcgtacgaggaattaaaaaaagagttagaaaaagtcgatcaaattcagtttttatttactagtgatctatttacgaaagaaaaagcaccgaaagaaaaaagagagttctttattcctcgtctaaatcgtgaaagtcagctgtatgggaatgagtttgaattaagaatgcgcaatgaattatctcaaaaggctatcgctaaagaagctgcagaatggattcgtcaaaaagttacgtttaagtcaaatatttctgggcaacgttctgataatttcatggtcgtggaaaataaaggaaatataaatgtatatgcacctttcgatgaatttacaaccgctgaaattggaacaacaaaaggtgaaaagcttttttataatatttcaaaatttgaaaatgaaaatacacaacaattcttaaatgcgtttgagcaagtttggcataatcaggattatgtcgatgaggtcacgaatacagtattagataatattacggctgcatatcaagagaatgccccagagtttatctactatattgcgttatataatttgtttggtgaatttttgtctgatttagatcaggattatattcctgatgaacgtacagggtttaaagactcaaaaatctggtcattattgtatgattttcaaaaggatgctgtgttgggatccattagtaaattagagaaacacaatggtgttattttggcagattctgttggtttgggaaaaacgttctcggctataggagtcattaaatattatgaatcacgtaataaaaatgtcttagttttagtaccgaaaagattgaaagataattggaataattacaagaataactacaaaaacaaccccttagctgaagatcgtttacggtatgatgtcttatttcatacagatatggatcgcgaacgtggtgaaagtaatggaattgatttaggaaagataaactgggggaattatgatttagtcgtaattgatgaaagtcataactttagaaatggcgagggtactacacataaaaaagaagaaggtgtagaaaatcgttatcaaaagctaatgcgcaaaattattaaattaggagtaaagacaaaagttttaatgttatctgcaactcctgtgaataccgatttttctgatctacgtaatcaattgatgctagcatctgaaggtgatagtagtaatcttacgaaaactttgactactaaaaaaacagtaacagaaatttttggtcaagctcaacgagcttttaaagattggtcttctttggaaactgaaaatcgcacaacggagtatttacttgacatgttggattttgatttttttgagttattagatagtgtgactatttctcgtagtcgtaaacatatagaaaaatattatgaccaatcggatattgggaaattcccaaaaagatttgctccaattaacgaaagtccgaaattaacagacttagatataacctataatgatctatttcagtttatcgatttgctaaatctggaagtttatacgccgcttaaatatgtatatccctctaaaatagagaagtacacagagcaggcaacagctggagcttcaagttgggcaaatcgagaaaaaggacgcaatcagctgatgattacgaacttactcaaacgagctgaaagttctattcatgcatttaaattaacaagtgaacgaattttagagaatattagtttgaaattacaagttattgaagagtataaacaatcaaaaaatggcattgtaaaaagcgattcagatgattttgaagatgatgtgtttaccgttggacaggacttaaaaattgatatagcagatatggattatcaatcatgggaaaaacaattagtagcggataagtatgtgtttactgaactattggatgttgtaaatcgtattattccggaacacgatacaaagatggcaacacttcaagaaataattcttaaaaagatagagaatccgattaataaaggaaataaaaaggtcataatcttcacggccttttctgatacagcagactatttatataaatatttatctaatcaattaatccaaaaagatggggttcatacagctttgatatcgggaacacgaacagagtcaaccattccaggaagaaaaaacgattttaatgagttgcttactttatttagtcccaaatctaaaaatcgtgatgcattaggtttagatggtgaaattgatgtagtgattgcaacagatgtcattagcgaaggtcaaaatttgcaagatgcagattatctcatcaattacgatatccactggaatcccgttcgtattattcaacgttttggtcgtattgaccgaattggatctaccaatgataacattcaaatggtcaatttttggcctgatattagtcttgatgaatatattaatttaaaagcacgggttgagaaccgagcaaagttagtggctatatcctcaacaggggaggataccatcgataatacagatccagatatggagtatcggaaaaaacaactagaaacgttacagaatgaagtggttgatttagaggatatgtcaagtggagtcaatattatggatttaggtctgaacgagtttcaacttgacctgcaaaaattgagggaaaaatacggagattacgaagcaaaaccttatggaattcatgcgataacaaaggctgatagtaatcatccagcaggtgttatctttgttttaagaaatcggaataatgctatgaatatagacaaacaaaatcgattacatccgttttatttagtctatatcgctgaaaatggtaaaatcatttcgaatcattttaatcctaaaaaaattctagatgatatgaggtatctatccagcgaaaaatctgtaccgattgagaacctagttggttctgttgcaaagttttaa

SEQ ID NO: 2086 - DNA, 681 bp, Listeria innocua
atgaatcattttaaaggaaagcaatttcagcaggatgtgattattgtagccgtgggctactatcttcgttataaccttagctatcgtgaagttcaagaaatcttatatgatcgtggcattaacgtttctcatacgacgatttatcgttgggtgcaagaatatggcaaactactctatcaaatttggaaaaagaaaaataaaaaatccttttattcatggaaaatggatgaaacgtacatcaaaattaaaggaaaatggcattatttgtatcgagccatcgatgcagatggtttaaccttggatatttggttacgtaaaaaacgggacacacaagcagcctatgcttttcttaagcggttagtgaagcagtttgatgaaccgaaggttgtagtcacagataaagccccctctattacaagtgcctttaagaaactaaaagaatacggcttttatcaagggacagaacatcgtaccattaaatacctgaataatttgattgaacaagaccatcgtccagtaaagagacgcaataaattctatcgaagtttacgcactgcctctaccacgattaaaggcatggaagccattcgaggattatataagaaaacccgaaaagaaggcactctcttcgggttttcggtctgtactgaaatcaaggtattattgggaatcccagcttaa

SEQ ID NO: 2087 - DNA, 1068 bp, Listeria innocua
atgtctgatagaccagaaaaaattaatttatctgatgttcactcacgtcaagtagatactgacctgttgaatgaattacgtgatttatttgtcaaagcagaagaacaaaaagaacgttacgattttacgtggaatggcaaagcaaaagcctattttgaagctgcagctccaacgactaaaacactgcgtgcacaaccggaagaaagtgtgaactttgaaggatctgagaatctatttattacgggagataatctcgaagcattaaagcttttacaggaatcttatcttggaaaaatagacatgatttatatcgatcctccatataacacaggtaaggactttgtttatcaggataacttcaaaaaaacgaaaaaagagaatgacttatcagaaggaattctagatgaagaaggcgatcgattagtaaaaaatgaaaaatcaaatggtcgctaccattccgattggttaactatgatatatcctcgtcttaaattagcccgaaatctattatctgatagtggaattatttttgttagtattgatgaaaatgaaattgctaaccttgaactattattgacagaaatttttggtgagaataatcttgcaggaaccattgtctgggataagcgtaaccctaaaggagattcaaaaggagtgtctatgcaacatgaatatattgttgcagctgcaaaaaacataaatattttttctgaattcaaggaattcaaaaggcctaaaaaaaatgctgaaattattctgaataagtctaaagaaatttttaaaaaaattaatgataaattcactttaagtgatgccaatgaagaatatcgtaaatggataaattcaaaaaaagatttaagcggtggtgaaaaagcatattctaaacttgacgaaaaaggaaatgtatatcgagaagttagcatggcagcaccagataaacctgaaaaaaggtctcatcgtccgcttactcatccattaacaggaaaacagacatcagttccagcgaaaggatggagatacatagacaaaacggttctgttgcaaagttttaaatctactatcaaataa

SEQ ID NO: 2088 - DNA, 558 bp, Listeria innocua
atgatcatagagattccaaaacaagcagttgtgaatcgtattgttcctaaagatcgatttaactttgatgatgctacaaaaattgagcgtattcgttggttagggaaattaggacctactacgattaatttacctgcgaaaaaaatacaagaaattgaaatttttagtgttgatatgatcgactttgatttaagtgttattaaagagattgtttctaaaataccacaagagattctattcattatcaatgatgagattctcataatgtactatcaaggatactgtatttctaaaagagtagagaatcatcttcaaattaaaggattatctattgatgaagttcgtgataattttattcgtcaattgttagatcttaaggatatctctaaaccattaaagcaacaagttgctaacataaagataatcaatgaattggaatttgaaatagatcgaatcaatacacagattaaaagatctatccaaactaataaaaaacaagcgttggctagagaaagatatacaatagaacagaacttagccaaattaaggggagaataa

SEQ ID NO: 2089 - DNA, 174 bp, Listeria innocua
atgagtaagtattcgaatttacttaatcaagcaattgactccatgattagcgttaaggaggaaaaggatatcgatagtctctttactactggtggtacaacagctttggagaatgatataaatggattaaatgattttgaattaattgattttctagttgttaggggtgagtag

SEQ ID NO: 2090 - DNA, 681 bp, Listeria innocua; identical to SEQ ID NO: 2086

SEQ ID NO: 2091 - DNA, 228 bp, Listeria innocua
tcaattcgattaaaagatgacttggagagagcgggaatcgctcgtacttggtgggtagtgaacaatagcatgctttctagcggaacaacgaacccaatgcttttagcaagagcacaaaatgaagaagtttggattgataaggtagcagagctgtctaacaatcattacccagtgattgaatggaaagctgaggatatttcaggagatgctttaagagatattttataa

SEQ ID NO: 2092 - DNA, 294 bp, Listeria innocua; identical to SEQ ID NO: 167

SEQ ID NO: 2093 - DNA, 372 bp, Listeria innocua; identical to SEQ ID NO: 277

SEQ ID NO: 2094 - DNA, 366 bp, Listeria innocua; identical to SEQ ID NO: 268

SEQ ID NO: 2095 - DNA, 1743 bp, Listeria innocua; identical to SEQ ID NO: 651

SEQ ID NO: 2096 - DNA, 1059 bp, Listeria innocua
atggaaaaagaagaacaaaaaggattgggaatatttgaaaaatatttaacgctttgggtggctttgtgtatggttacgggtgttttaattgggaaatatttgccagctatcccagcaactttagggaaattcgagtattatcaagtatctattccaacagcaatcttaatttggttgatgatctatccgatgatgttgaaaatagattttactagtattgtcaatgcagctaaaaaacctaaaggtctgattgtaacctgtacagtgaattggttaattaagccatttacgatgtatgccatttcagcatttttctttttcgttgtatttaaagggattatcccaaatgatttagccaaagaatatgttgcaggagcagtattgttaggtgcggcaccctgtactgcaatggtctttgtttggagttacttaaccaaaggagatccagcttatacattagttcaagttgcgattaatgatttaattattttagtgttgtatgcgccaatcgttgctattttattaggtgttggaaatgtagctgttccaattaatacattgattttgtcgactgttttattcgtagtgattccacttcttttaggtgttgtcactcgaacagtcatcataaaaaataaaggacttcattattttgaaacagtatttctaaaaaaatttgataaggttacgattattgggctgctcttaacgctagtgattattttttcttttcaaggtgaaagaatcttgaataatccactgcacattcttttgattgcaattccgctaaccattcaaacactattgatttttgctattgcgtatacatgggcgcgcttttggaagttgcctcattcgattgctgctccggcaggcatggttggagctagtaatttctttgaattatctgtagcagtagccatctcactatttggtttacagtcaggggcaacattagcaacagtagtgggcgtattagttgaagtaccagtcatgttgctattagttaaagttgcgaatagtacagttggatggtttcaaaaaaatgagttatcttaa

SEQ ID NO: 2097 - DNA, 1047 bp, Listeria innocua
gtggcaggtgtaacaaaaaaattatcattattagatcgttatttaaccctctggatttttcttgcaatgggctttggtattggattaggttattttgtaccagaggttgtaacaggaataaataaactggaagttggaacaacttctatacctattgcgataggcttgatattaatgatgtatccaccgttagctaaggtgaaatatgaagagatgtggcgtgtctttaaagattggaaggttttattattatcacttttccaaaactggattgtcggtcccattttaatgtttattttagcggttgtctttttacatgattatcctgagtatatggtggggttaattatgattggtctggctcgttgtattgcaatggtgattgtgtggagtaacttagctcaagcggacaatgagtatacggcaggattagtggcgttcaattccatttttcaaattatcttttattcagtgtttgcctatatttttgtgacagttattccgggatggttaggcttagaaacgcatgctgtttcaattggaatgggtgagattgcaacaagtgttttcatttatttaggtattcctttcattgcaggctttttatctcgttggattctaataaagaaaaaaggaaagaaatggtatgaagaaaaattcattcctaaaattagtccaattacattggttgccttattatttacaattgttgtgatgttctccgttaaaggagaaaaagtcattgaacttccaatggatgtagtaaggattgccattccattactcatttattttgtccttatgttctttgtttcattctttatttctaaacgtatgggaaccagttatccaattgcagcttcattatcgtttaccgcagcgagcaataattttgaattagcaattgcggtagcagttggcgtatttggtattaattcaggggaagcctttgcagcagtaattggtccactagtggaagttccggttttgattggtttagtaaatgtagcattgaaatttaagcaaaaatattttaagcaaacttaa

SEQ ID NO: 2098 - DNA, 1674 bp, Listeria innocua; identical to SEQ ID NO: 646

SEQ ID NO: 2099 - DNA, 663 bp, Listeria innocua
ataagctatgcactagatttaaaaggcttaaaaaaagtatatgcgaccagtgttgaggcgctgcgtggtattgatttaactgtagaagaaggagatttttacgcactgctaggtccaaacggtgctggaaaatcaacaacaattggaattattacctcacttgttaataagactgctggtcaagtgaaggtttttgattatgatattgataatgatttagagcgagcaaagcaacagattggtcttgtgccgcaggaatttaattttaatccgtttgaaacggttcaacaaattgtagtaaatcaagcaggatattatggtgtctcaagaaaagaggcactgaaacgtagtgaaaagtatttgaagcagtccaatttatgggagaaaagaaacgttcgtgcccgtatgttatctggagggatgaaacgaagacttatgatagctcgagcattaatgcacgagccacgtctgctaattcttgatgaaccaactgctggagtggacattgagcttagaagagaaatgtgggcatttttaaaagagttaaatgaaagtggcacaacaatcattcttacaactcattatttagaagaagcagagatgctttgtcgtaacattggaattatggttctgttgcaaagttttaaatctactatcaaataa

SEQ ID NO: 2100 - DNA, 123 bp, Listeria innocua
atgaatccttttaaaggaaagcaatttcagcaggatgtgattattgtagccgtgggctactatcttcgttataaccttagctatcgtgaagttcaagaaatcggttctgttgcaaagttttaa

SEQ ID NO: 2101 - DNA, 681 bp, Listeria innocua; identical to SEQ ID NO: 2086

SEQ ID NO: 2102 - DNA, 1365 bp, Listeria innocua; identical to SEQ ID NO: 621

SEQ ID NO: 2103 - DNA, 870 bp, Listeria innocua
atgtttaagaaaatgagtttattagtagcaacagttatagggctattatttacctttggcagtgaagattcgtataaaacgactgtaggtgctgattctggtggccaaacagtgactctagcaactgtgaattgggagtctgaaatagcttcaacaaatgtcctggcacaggtgctaaaagaagcagggttcaacgtacaaattacaacagtagacccggccatcatgtttagttcggttgcagaagggcagttggatgctatggtcggcggttgggtgcctacaacgcaccaggcctatgcagagaaatatggtgactcgatggttgatttaggggctaacctagaaggtgctatttcagcattaactgttccaacatatatggaagatatcaattcgattaccgacctcacggatgaaaatgattcaactattacagcaattgaaccaggggcaggtgttaccaacagtgcccaaaatgctgttaaggagtatgacaatctatccgattgggaggtttctgtgagttcaacaggtgctatgattgctgaattagatcaggctatcaataatgaagaggatatagttgtggttggttggaagccgcattggatgttcatggattatgatcttaagatgcttgacgatccagaaaatgtctttggtggctacgaggaaattcattcatacgcaagagaagggctaaaggaagataatccagaagcctataagattattgataacttctactgggaagttgaagatatgtcttctgttatggaagaattagcgacagatgtagaaccagaagaagcagcagataattggattgaagccaatcgtgaaatagttgatggttggttagagtaa

SEQ ID NO: 2104 - DNA, 372 bp, Listeria innocua
gtggttagatattatacaacggatgatagtcgcgaaaatccttatgagttaatggagttttttgggaaaaaagatatatctgggaagatgattagtttcttttctagcgtaatgacaaacaataaaaacattcggcttggaattatttctggaataaagaaactatatgatgctgatttaattccttaccatagagagcaatttcgaacttcaataatgtattttaatttaatgggaggtgtcagaatcttagaaatactttcttttgaagaggttgaagagattacaattgagttgttaaaggaaaaaatagtgtcactgaccaagatatccaagttcttcaaaaagcataataaataccctctaaaatga

SEQ ID NO: 2105 - DNA, 765 bp, Listeria innocua
gtgaatagggagaaaaagcggcatacactgattaaccctatagttttttccagtgtagaatctagtcaggatgcctttaagcaagccgcgcattatttaaatcaggtatacaatttaaaagataccattgtggttacgaacagtgatggcggcagtggctatgaagcagataaatttgaatccatggatggttatagtaagcagcacgagcattttagagacttatttcatgtgcacaaaaagataaaagaacgtttatcctttgataagccaatggccaagcaggtggagaaagctatctatcaatatgattgggatagaattgaaacactttgtgccaccattgaaagtcgtctgattgatcttcccgaagtcattatagaagatcgattggaacagattagaaagctcaaaaattacttatctcggaactgggtttatatcaaaccgtttaagaagcgtgaattatcgattgatagaggcacaggggctggagagacgggtcatcgtctgtatacatatcgcatgaagagacaaggccgaagctggacaaaaaaaggagctagccacgttgtggcaattctcactgcagagaaaaatgggcttttacagacagctttaacagctgaaataacagataaagtcgaatcactaggtgaagagattaaaggagctgtccgtcaagcgttaaagaaaatagattctacggccaaacaatccaaacgggttctatcgtcaattatggtccgaaaagcagctttatag

SEQ ID NO: 2106 - DNA, 1884 bp, Listeria innocua
atgatcagttatttaataaagagtaggcagggccagtttttagctatcggtattttgtttgccgcagctggctttatatttggaacgatgaatagtgagtacagtcgctggcttttctatgctgctatatttttcttaggcttttatgcgtccaaaaatgcgatcgtagaaacagtgcgctacaagtcgcccaacgtggatctacttatgatcctcgctgcacttggtgctgtgatctttgattttgaatcagaaggagcagccttactactaatttttgccgcagctgaagtactagaagattatgcgaacaacaaatcgacctcagcgatctcggaattgatggctcaggtacctgaaacagctcaagtcttgaaagaaaatggtgaagtggtaaccgttcctactgaagacctgaatgtaggggaaagggtcgtcgtttctaaaggggaacagatcccgatcgacggaatcattgaccgcaaatcgatcgtcaatgaatcagctctcactggcgaatcggttcctgtcgtgaaagaggccgaagatgaagtgttcgcaggaacgatcaatgaaggcgacgttttttatatcgatgtaaccaaatccagcgatgaaacagtcttctccaatatcattcggatggtcgaagaagcgcagagccgtccttcacgcatctctaaattcattgaccggatagagagcaagtatgttatttctgtactagttatcgtgccgattttcatcgttgtgatgtatgcattgatggatctgccattcgaagaagccttttatcgcggtatggtctttctaacagtcgccagtccctgtgccttagtcgcttcggccacgccagcaacgttgagtgcgatcagtaatggagcaaaaaacgggattttattcaaagggggggctgcaatggaagctttgagcacgatggatatcttatacacagacaagacaggcacgctgacttatggtgaattcaaggtcgatgaatacagtgctcccgatgatgtattgaaagaagtgatctatatggaacagcagtcgagtcatccgatcgctcgagctatcgtgacggcgtttaaagagacggatctgagttcagtcgatcataatgaacctgttagtgaaatagccggttccggtatcaagaaaggcacagtaagggtgggaaaaccttcagccttcagtacattcaaaaactacgatcgcttcaagcagtacttccaaaaaggcaacacgatcattctcgcagcaaaagaagaggaggtcgttggttacttttcactcagtgaccagattcgcagacagtcggcagatgccgtggctaacttccagaaagaaggcattaaagtcacgttattaacgggtgataacgaagaagtgacagagacggtagcagaggtcgtcggtgtcgatgactataaagcgtccatgttgccggaagacaagatcgcctatgtcagggagagtcaggataaggaagaagtggtcggcatgatcggtgacgggatcaatgatgcgccagctctggcaaatgcagatatcgggatcgcgatgggcagcggttcctctgtggcgatggaatcatccgatgtcgttgtcgttaaaaatgacttgtcgaaactgttctacagttacaagttgagtaagaaactgaacaaaatcattttgcagaatgtgattttctcgatcagcgtgatcgtgaccttgatcgtcttgaacctctttggcgtattaggacttccactagcggtattattccatgaagggtcaacaatactcgttattcttaatggtctccgtctacttggatctaaaggtccgaagcaagaagagagagtctcggatccatctttaaagtctgtaaaggtttaa

SEQ ID NO: 2107 - DNA, 681 bp, Listeria innocua; identical to SEQ ID NO: 466

SEQ ID NO: 2108 - DNA, 2667 bp, Listeria innocua
atgcatataaatggtcacgaaaataacgatatttttaataaacgacgcggtaaacttagaatttactttggctatgcggcaggcgttggcaaaacgtttgctatgctaaacgatgcacaagagctagttaaaaccggagttgaccttgttgtcggctacgtagagcctcatgctcgtccagaaactatgaaacttttaaatggtctggaaaaaatccccactaaacctattttatataaaggtgtaaaactatacgaattcgatttagattcagcacttaagagaaatcctaagttaattattgtagatgagttagcgcacacaaatgcgtatgcttgtagacataaaaagagataccaggatattgaagaattactacaggcagggatagatgtttttactactgttaatgtacaacatatagaaagtctaaatgatattgtggaatcaataacaaacattcatgtacttgagcgtatacccgatgcagtttttgatggggcagatgaaatagaattagtagatattgaaccacaagatttactagatagattaaataaaggcaaaatttatagggaaaagcaggctagacaggcagtactcaatttctttaccaccgataaattaattgccttacgagaaatagcattacgaagaacagctgatcaagtgaagagaattgccgagagtaatatagttaaccctaaaaataattatggaaaagagcatattctagtttgcatttcaccatctcaaggtaatgagaaagtgataagaacagctgctcggatggctgaagccttaaaggggaaattaacagcagtttttgtggaaacacctgaatatgaggaatcttcaatcaaagagcaagaatctttgagaaaaaatttacgacttgcagagcagcttggtgcccaaatatcatcagtttatggagaggatatttctcaacaattggctgaatacgcaaatgttagtcaagcaactaagattattcttgggagatcctcgaaacgaaaaagttggctcaagcctaagttagtcgataaactttctgaacaaatagatagtacagatatttatattattcctgatacgcagcctagcaagacaaaaaaacatttcaaaataaaaaacgaaatgtctttttcggtttcggattctattagaacagtcatcattttattattttgtacaattatcggtattatattcgattacaatcattttagtgtcgtcaatattatcattgtatatatcctaggagttcaagtaaatgcggtaattacaaaggggagagtctatagtattgtatcggctcttttaagtgtgctgatttttaattatttcttcacggagccgcgatatacattgcatgcaattgatcctggatacccggttacttttgttatcatgctcgctgcagcaattattactagtacattaactaaaagaattaaagagcaggcaaggcaagcgtcccaacgagcatatcgaacagagatcttacttgaaacaagccaaaagttacagaaagctagtactgaatcagctcttttaagagaaatcgctatacagataaataagctactagaaaaacctataattatttacccagtaagagtaaataaattagataaacctctaatatttaatgaagataaacgtgataataacgaatcagagtggataagcaaagaggaacgtactgtggcagaatgggtattgaaaaaccaaaaacgagctggagttacaagtaatacctttactaatacaaaatgcttatacttagctgtaagaggaaatggggaagtattggccgtgatcggaattgtcatggacaaagaggcgcctatggataatttcgaaaaaagcatcttaattgctgtactagccgagagcgctctggcattggaaaaagaaaaatttcgggttcaagagcaaattatctcattaagaatgcagcaagagcaggtgcggacgaatttattacgagcaatatcacatgatttgaggacgccattgacaagtatttcaggcaacgcaggtgttctaaaagcaaatagtcatatcttagaagaaaagcaaaagcaaaacttatataacgatatttatgacgactcaatctggttaataaatttagttgaaaatttattgtctattactcgtcttgatgagggtagttcgaatatcaatatgcaaccagatttaatagatgaggtaatttcggaagcacttaggcatatagataggaaaagcatcgaatataatattagtatggagattcaagatgaggatcttattgtaaatattgattctcaattaattatgcaagtaattatcaatattgtggacaatgctatcaagtatacgccaccaggatcgaaaatttgtatcgtagcaaaacaagatatggattcagtttgcgttgaaattaaagataatggagagggtattccagataaagagaaagataaaatttttgatatgttttatacggctaataacattaatgcagatggacggagaggactaggtttgggactttatctttgtatgtctatcattcaagcacatcaaggtgaaatgtatgtcaaagataatattcccaaaggtgctatctttggattggttttaccgattgaggaggtggatttaaatgaataa

SEQ ID NO: 2109 - DNA, 723 bp, Listeria innocua; identical to SEQ ID NO: 485

SEQ ID NO: 2110 - DNA, 1722 bp, Listeria innocua; identical to SEQ ID NO: 650

SEQ ID NO: 2111 - DNA, 2061 bp, Listeria innocua; identical to SEQ ID NO: 665

SEQ ID NO: 2112 - DNA, 327 bp, Listeria innocua
ttggcaaatgttgggatgtttgttattgcactaagcactatccttggatataggatacttatattcttctatgatatagaataccgcattgttcgttttaataaaaaactttaccaagttgcagaagcttttgctgatggtatggattccgaagaagtcgaagcaaatttaattaataaagtaggaatagatcaagaaagtgctaaaagtattgttaagaagagtttaaaataccgaaaaaagaaacaagcttataaaaattttatcaaaataacaaacaaagtattaggtatacgtatctatgatccaaaatataaaagtgattaa

SEQ ID NO: 2113 - DNA, 639 bp, Listeria innocua; identical to SEQ ID NO: 446

SEQ ID NO: 2114 - DNA, 552 bp, Listeria innocua; identical to SEQ ID NO: 404

SEQ ID NO: 2115 - DNA, 858 bp, Listeria innocua
atgaatgaactcaactttattgaaactaaagaatacaagaaatttgccgaattttgtagagcatgcatgaaatataaatatattggcatatgttatggcaatccaggtgtcgggaagaccatttcagcaaagcattatgcaaactggcatagattagaaactattttaactagaaaaggtaatagactcaatccggaattagtcatagataagttaaaagggataaaaaccaatactctatttgtgacagcacctgccactaaacccagttcattgagttctcaattaagcagtcttgcaatagatatagcacacgtaaatgagataatttcaagtacagaaaataaagtaatccctaaaactgatagaatagattacatggcaactagtatagatcgaatcgtggaaaatatattttatgcggttgatttaataattattgatgaaatagatcgtttgaagatccaaacgttggatcttctaagagacatttatgatcaaaatgatgtcggtatggtctttataggaatgcaaggaattgaaaaaagactatctaaatatcctcaattatactctagaattggatttgcacatgagtttaaaaagttaagttcttcagaaataaagcatatattagaatatagatgccaagatataggtctagcaattgattatgaaaattttgaagattatgatgctattaatcgcattattaagctaactaatggcaatttccgattactccaacgcttatttactcaaattgatagaataatggaaatcaataatcttgagaagatatcttcagatgtagttcaagctgctagagagtccctaattattggatttactgaataa

SEQ ID NO: 2116 - DNA, 1437 bp, Listeria innocua; identical to SEQ ID NO: 626

SEQ ID NO: 2117 - DNA, 600 bp, Listeria innocua; identical to SEQ ID NO: 431

SEQ ID NO: 2118 - DNA, 360 bp, Listeria innocua; identical to SEQ ID NO: 255

SEQ ID NO: 2119 - DNA, 444 bp, Listeria innocua
atgaaattaaaaaaaacagatgtctttaatcttgatggaacagtcaaacaaactgcatttattcatgatcaaaaaacaggtaagaaaaatacgttatatttgaaacctgtccaacaagatttaatgctttatcatgcatggctcatccaacaaaatatgaattcagagtggttatttccttcaacttctcgtcctgatcgtcctattaccgagaaacagttttataagattatggcacgagttggtgatcttttaggaattaactatctaggaacgcataccatgcgtaaaacaggcgcttatcgggtctatacgcagtcaaactataatattggtttagtgatgcatttattaaaccattcaagtgaagctatgaccttaacgtatcttggattagatcaagccagtcgagagaatatgttagaccaaatagattttggataa

SEQ ID NO: 2120 - DNA, 681 bp, Listeria innocua; identical to SEQ ID NO: 465

SEQ ID NO: 2121 - DNA, 906 bp, Listeria innocua; identical to SEQ ID NO: 538

SEQ ID NO: 2122 - DNA, 453 bp, Listeria innocua
atgaaaaaaatcattattggggtgcttgtcgttatagtactaattatagctgtagttgaaggaaagtactatatcaatatgtactaccaaaagggacaagctaaaaaacctatagaagcttctatcaaggcttcaaaaattcctaaaaaggacatttatgtgataaaggaaaatgagtatgaatctgaatctataggtgatagtgttcaaaaggaaatcactacaaagaaagattacgaaaattggaagcaacttgtgagcaagagaaaaaaatacttagatggaagttcatggcataagaagaaggggtgggataaaatagataaatgtgaaatatcttatctatttgtctatgatactcatactaaaaaagtacgaaagtattatatccttgcaggaaattcagttgatgacaaaaagaataaacaatattttagttatcgtttaaattaa

SEQ ID NO: 2123 - DNA, 345 bp, Listeria innocua
atggcttatcgagatcgaggcatgcaaaagtggcaaggcatgattctatccgagcatacagaacaactagaacaagcaaaaagaaagttatcttggctaccgcagcaaagtgaagaatgcctggtagaaattttaagctacgctgttacaaagcagcatgctataacgatacaacgacttacagaagatgaaaatggttatcccctaccctttgtagtcggtagaatcgttggtgtggaagacgatcgtatttatatgagagatatggccggagagatcactgtgttgacatttgacgatatcaatcatatttcagaagggacaatcgaaaaatggtacaggtag

SEQ ID NO: 2124 - DNA, 1281 bp, Listeria innocua
atggtacaggtagaagattacacccacgtcccctctcgcgatattctttgtgtcgatgtgaagtcgttttttgccagtgtggagtgcgttaaacgtggattagatccactacaggcttttcttgtcgtcatgagtaatgcagatcgcgctggaggattggtgcttgcagcaagtcctcaaatgaaaaaagttttccgaattaagacaggatctagaaaatttgaagtgccagaggacgatcctcgcatcattattgctccacctagaatgcaactatacttaaaagtgaatgagctcatccagaaaatcttccttcgatatgtatccagggaagattttcatgtctattctatcgacgaagcctttttggatgtcacgcacagtaaaaagctttttggatccgctgaagtcatcgcaaaaaagatacaagcagatattttaaaggagttaaagctgtatgtcacggttggtattggagacaatccccttcttgcaaaattagcattggataacgaagccaaacatcaaaaatctggtattgcggaatggcgatataaagatgtaccggaaacagtgtggaagatccgaccgatcactgatttttggggaattggaaaaaggactgcttttcagctggagcgaatggggatctatagcatccatggattgagccagatgctcccctcctacttaaaaagacgtttaggtgtgattggggaacaattgtattatcatgcgcatgggatcgattatagccgtttatcagagaagtataagccaatcgaaaagtcttatggtaaaagccaaatcctcgaaaaagattatcatgatccgaatcagatcgcgatcattatccaagaaatggtggaagaagtagcaatgcgcctgcgtaatcatcacgtcgataccagtgtcattcatttaagctgcggttacagccgatattccactaaaaacggttttagccaccaaaaaaagataatgtccactagcagtagcaaggagcttgtcccctacttccttgaactcttttggaagtatcaggaaaatgatgcggtgcgatcagttgcggttagctgcgcaggcattaaaagaaaaacatcaatgcagctctcagtttttgaagactacacaaaaacgctccagcaagaacagctggagcgaacaattgataaaattagagagcgttatggttttaaggcgcttatgcatgcgaatagcttagtagccggggctacagggttgaaacgtgccacattggttggtggccacaaaggataa

SEQ ID NO: 2125 - DNA, 333 bp, Listeria innocua
atggataacaaaggaaaaggcagaggtttaatcaattcgaaaccaaaccgagttccaggaaatttcaaaccacaagaatcatacacggattcagatcttccttcctcgtcaagcaacattcaaacagaatctatatcaaagtccgctgctaagtttaaaaatcaagctggaacaataaaaacttctatgcaaaccaaagaagaattacaagctctaaaaaccataacaaaaactaaatttgattacgaaattattgatttgctaatcgatacctatgttaacaatgagttggctcctgaacaacgtcgtaaattcaaagctatgacagagtaa

SEQ ID NO: 2126 - DNA, 882 bp, Listeria innocua
atgtcgagtaataatattaattcaattatcagcaagatacagcaaaaaaatactgctactgttataactgttggaaattataaaggaggagcaggtaaaacaacaaacgttgtattacttgcatataagttggcaaagaaaggcttaaaagtatgtgtattagacttggaccctcaaagtaatgctaccaaaagtttattgctaacaaaatccagtttatatcaagatgaagttgtaactatagaaaagacattaatgacaggaatctctgaaaaaaatcttgatggccttgaagtgaaaattatggataacctttacctcttaccttcgtatattgattttgaagatttccccaaatatctatataaaaatacgagcaatcaaagagaagaagactattatttaaaaaatatctttacccctttacaaggtaagtacgatattgtactaatagatgttcctccaatgtctaaagcagtcacaagaaatgcagtcatatgttctgattatgttttaatttcattacagactcatgaaagatctttgagtggtgctgaaagttatgtagaagaattaaataaacttcataatgaatacgacttggatttagaggttgtgggcgttttacctgtgatccataagaataatggttcagtagatcaatatgtaatggaagtcgcaaaagaaacatttggtgaggacaatctctttgaaaacgttgttccccaaatggagagaattaaaaggtttgatgtcaacggtattacagataaagatcgtcatgatcaaaaagtactaaatttgtatgataaagtttcagatgaacttttagatagaattaattactttgaagaagaaaaagaaggtgctattaatggataa

SEQ ID NO: 2127 - DNA, 1650 bp, Listeria innocua
atgcttgtcagtgatgctatttatacatactctgcagtaatcaacacggtggtacatgaaggtttaactgcttatcgtaaaaaaaatagtcgcggtgtgatggccgtgcgtgatcatttcgctgcgatcgaagcagcaagtaccaatcggaagggtgttcagttcgtcgttcgggacaaaagtcatctacaaacgaagtgtggcgtgaaaggctttattgtcactagtcaagaagcgttgatcgcagaagtagatcagattacacattggacaccgaatacataccgagttggcacttactcggaccgaaatcggaaatacataaaaggacacgaagaaaagaacttacaacaaatcaatacgtttgtgatcgatatcgatacgcaaaaagtcgacgtggcaaaaatgatcacggcatcgatgcgtgtcttgaatcaaacacctacgttcatcttgaaaaccgatcacggctttcaaatgtacttcgtactagaaacacctagctttgttagtaatgcgaatcaatttaaatcgttaaaaatcgccaaaagaatttcgcaaaacgtcaaatatgcgtttgcggaagagttgccagctgtcgatattggctgcaatgactttggtttctttcgcgcgccaaatacgcagaatgtagcctttttaaacctagaaagtcaattcgatttccatgaaatgatggaatggtcgaaaagttacagtgatcaaaaacggcgttcggtgctttctttggtaccggaatcttcaactgcagtctttgatgcgaccaaacaagaatggttttccatcatggcgaatctaaaaaatgtacgtggacgcaaaggccaatacggccgaaataacgttgcatttaccctagcgttagcttgttatgcgtccggtaaaagtaagcaagaagcgacagatttgcttgatcagttcaatgacacgctggatgcaccattgcgatttagggaaatcgaaacatgtattcgtaatgcatactcgggaagataccagggcgcaaatgctgaaaaaatcagcgatatcttgcagacgtattggaaatctgaatacgaaatcaagggctacacgccatttatctttgatgaagtaggtaaggttaaacctcaattctttagaaagcacaggaagagtagggaagaacgtacgtattcgcattttagcgaatgggaaaaggacttagaatgttacatcgagtcacagctgttatccggacaaacttttttagaacgttcgcagcgctcggtcgctgaagcattaaaaatgccttatgcgacgctaaaaaaaatactgaagcaatcggatcgtattattagcagagtgaacgggaaggggagagctgcccaaacccttttttctacagtggccatcgttgtggagcaagcgatacgacacgccttgacaaagaaagtggcagaaaaagaagcctacctggaatttttagcgagttttacggacgcagcgaagcacattcttgtgacgttgcaaacaaaaggtgtccccgcatccggttttaatatacaccctgttgtccagggggatagaagtgtccagctgtccttgaatctcctcgacaagctctatcagcagcgtcccaacaacgataattgccaaagcaggtatggttaa

SEQ ID NO: 2128 - DNA, 681 bp, Listeria innocua; identical to SEQ ID NO: 464

SEQ ID NO: 2129 - DNA, 825 bp, Listeria innocua; identical to SEQ ID NO: 512

SEQ ID NO: 2130 - DNA, 990 bp, Listeria innocua
atgaggacagtagaagatatcttatatgataagcaatctgctattttcttattggccgaattgtatgagacgcacgaaaaagaacacgaagatcataaagaagggacgctgataacttgcgagatatgtcgacaaattgaaacgtgttcgatactgatccggaggttggaacaggagctgcttcaaaaaaaggatgagatacgggcagaagaaaagagacatgcgaaagatctcttaaaatggcattatatcaagtatccgttaaatgcgactaatttagaacgaatcttacattggcaaaagatgtttagtaaacggatgtttgatgagttgacgagaatgggttggtctgtagaggagatacagcgaaggtatgatatcccagactttttctttaagcgctggctgtttaagaaaggtctatatgccgtggtcccattaatacttaaggtaagaacaattgacgatcgaatattcatttataaagtttttcaagaagcagatctgaatttgcttttgacattggatgatattgtgatgaagtcttatgatcgaattgaaagagaagactggaaacatgtgtatttctggcaccatggcgcttaccatcacttagagcaaatcattgtccagagtgagtttggaaaggttggcgaaacggtttatcacgctgaagagcaattaggctgcaagaaaaaggcgacggatcaagttattttttatgatggatttaaccaggaagcagtcgcctatttttgtgaagaaaatgagatgaaacgcttagccaaggggaatcgactccttataaacacccgatatggtacaattacgctttttccaggggaatatgtagtgaaagaaattacaggtcgttttgtgaagtattcagctaaccaattttcgcagttgtatgagattgttgatacagttcggcctatggggcttgtgagtgaaacttctagttataatgaatatacaaataaaatataa

SEQ ID NO: 2131 - DNA, 261 bp, Listeria innocua
ttgcggttatatgaggaaccagatgtgcgtatcagaatcaatatcaaaggcatttgtgaaaaatataagctgacaatgggagaactttctaggcgaaccgatattgagccgtccaaaattagtgcgtatgccaatgatcgtcgacaacgtgtccaaattactcatttagaacgaatctgtcaatctttacatattcgggacatgaacgaattgtttattctagaagttctggaagatgaacaagtcgataataaggagtag

SEQ ID NO: 2132 - DNA, 546 bp, Listeria innocua
atgaacgataaaccatacaagtatcaagtagtacggttgaaaaaagaattttttcagtctaatccccatttcattaatatgcttgatccaggaaatccagaaaaacaaatgcggcgtacttatttatatctagatattcaaaaggaccactatcattacttaattcctttcagaagtcatttgaatcatcgaaatggtgtagcgacaccgtctaaagatcgacctaaagctggactagattatagtcatacactcattgtcaaagatagtacacatattcagacagctttcatctctaatgaccagtatcgggaagtgaaaaataaaattaggcctatttatacccggacatcgagatatatttcagattttatgaatgcctacaaaaaagggatcgtgctcgatcttccgaagtatcagaactctactttgataaactttgtcggttatttggaaaaagaatggaccaaacaagttccgctacaagacaggaaacaaacacagaaagtaaaagaaaataatagacctaaaaaatatcgtttttaa

SEQ ID NO: 2133 - DNA, 810 bp, Listeria innocua
ttgcgagtgaaccgcagtacctattacaaatttttatccaaaatcccttcggctcgttccgtggaaaaccaacaaatcaaacggattattttacaaatttataccgagacaaagtttagactcggcgcagccaagataaaaatagttttacagcgtgattatggtatttccattagtatcggaagagtgtatcgactaatgaaaaccatggatcttcctaaaatgtctaccgtaaaaccaagattccgttatcaaaaaccgacggtttcttctacttgtccaaatctgttgaaacagcaatttcattccaagcaacccaatcgtatttgggtcagcgacatttcgtatattcctgtaaaaaaaggatttgtttatctttgtgtaattcttgacatcttctctcgaaaagtgattgcttggaatgtctatgcctctatgactgcaaaattagtttgtgatacggtagagcgagccgttcattctagaaatcctgtgcagtcggttattcttcactctgatcgtggttcccaatatttgtctcaagaattacggcaggtccaagaaaaatacaaccttatcccttcctattctaaacttgcttacccgtgggataatgccgtcacagaatctttctttaaatacatgaagaaagaagaacttaatcgtcgaaatttttcctctttggaagaagtaaaattagcttgttttgagtatattgaaggattctataattcaaaaagaccacattctgcaaacaacttcttatcacctaatttaaaagaacttgcttttctaattgattcttcataa

SEQ ID NO: 2134 - DNA, 282 bp, Listeria innocua; identical to SEQ ID NO: 145

SEQ ID NO: 2135 - DNA, 1182 bp, Listeria innocua
ccaactgtagaagttgatgttcatttaacagatggaacgataggaagggcagctgttccttccggtgcttcaactggagatcgagaggcagtggaacttagggatgggggcgatcgtttacagggattaggcgtgaaaaccgcagttcagaatgtaaatttgacattaaatgatgccttagtagggataagtccatttaaccaaagagaaattgatcataaaatgattgaattagacggaacagcgaataaaagcaggctaggagctaatgctatcttaggtgtttcaatggctgtagctcgtgctgcagcaaagtctgaagcagtccccctatatcgctatctgggtggaatcgatttagaacttcctcgtccattttttaatgtcattaatggcggaaagcacgcagattcaggtatagatgtacaagaatttttaatcacacccattgcagcgctctcttttcgagaaggcttagaatccattgcggatgtttaccatacattgaaaaagcttttatcaaaaagaggattggcgacctctgtaggtgatgagggaggatttgccccacgactcgcttctacagaagaagctcttgaagtattggtagaggccataaaaaaagctggatataagcctggagaagatatcgcgattgcgatggatccggcagcaagtgaatttagtgaaaataacacttattactttgaggggaaacaactatcatctgaagaaatgatccactactacgagcatctcgtacaagagtttccgattatttcgattgaagatggattgtctgaacatgattgggagggctttaaattaatgacggagaaattaggaaataaagtccaattggttggggatgacatttttgttacaaatccaattatttttcagcaaggaatagataaagggattggaaatgcgatcctcataaagctaaatcaaatcgggacagtaacagaaaccattgatacgataaatttagctagaaaaaacaattatgcaacgatgatctcccaccgttcaggggagactggggacacctttatcgcggactttgcagttgctatgcatgcagggcaaattaaaacgggttcaattgcacggtcagaacgtgtagagaaatacaatcaatttttacggattgaagaagaacttgcaaaaataaagtaa

SEQ ID NO: 2136 - DNA, 1155 bp, Listeria innocua; identical to SEQ ID NO: 590

SEQ ID NO: 2137 - DNA, 294 bp, Listeria innocua
atggaaaaattatcaaaggaaattatgttgcaagtgttactaacttgcgaaagtgaaaatgcaacgacttgggaacttagtaaaatgattattgacgttgaaggcgccaatcgcttcacgaaatcagagttgttaaaagcggtttatacacttgaatatctaggatatgtaaaaagaataaagtatgggagcagtgtacgatatacgaaaaccaatgaaggagtaaggtttttggatgaattaaagacacagataaaagataatcataatgaagatgcaaatatcaaacaataa

SEQ ID NO: 2138 - DNA, 1734 bp, Listeria innocua
atgaaagaagtcaactaccgagaagacgactggcgtgaagccaaaagtgccctcgccccatttgccgcagcgaattgggtaggcggtttattcaataatttagaaaaagtatcgaaaaatatggaagaagcagaagaagatatccaagagttggactcagatcgcgcgatttcgtttcaacatactaactatcgcgggaagtacagcgccatcgaagacgatttgatggtgttatataagtttagttgtcatgcaggggaaaagatggaaaccctggtagaccaaccgttttatgagaagttggacgcgtttgtggatggcatgcaagatttgagtatttcgacgtattctaccaccaaccggattggtgcgaagtcgaaacaaacgtacatgtcttcttacggcaatcagccacaagtaattgaatccgtgaaagacaatgcgacgatcgaagacttactaaacggagacaacttctacgcaaaccaaatgcaactacaatatagggactggcaacgagcgaatccaaatcaagatgtgagtaagaaagactttcaaatggggatgttacatagccgggtatttgaatataaatcgattaaagatgaacaacaagagaaagagttttgggtcaacattgtggcaaccgtggtgattgtgggtgtcagtattttctgcccacctgccggccttgccttagccgtaggatacgggagtttagaagctggttcggcgataagtgggaaggactgggtatctggccgagaactaagtacggaagaacgggcgctccgtggcggtttagcgctgctagatatcgttccaggtgtgaaagcattgagcacaggagcgaaagctgccagtgccggctcgaaacttgtccgcgtaggcgataatattttagtaggtagcaagaacgtcggcaaaggaaccatcgacaatggcattcaagcagggaaacaagcgatggatctccggttggccaatgcgaaaaaagtcagcgaagccgtccaaaagaaactcaccaaagacctcgacgatattagcacgatggccaagaccatccaaaacaaaaccaaagaaaccttcacgcttccaccgcgtgagcaaatcgcctttgcgggaggaggcagtatcccggaacaaagtgccgctggagccgcctccatagctgcgaagaaaaagctgaaagatattatgcaaaacatggataatttgaatgtgaagggcggcggtaaagctggtataattgagggtgcagaaaatagtggaaaatatctagatgatattgaaattcctgataatatgaaaaagtgggattatcctccaagtaaagagttgtttaaaaaatatgaagaagtatataagaatccgaagtattataatcaggaaactggagcgattaattggcctccaaataacggttttataggagaaacgcatgaaagacttgcgaatgtgggagaattttttgatagatatggagagcctagtggggaatttttagcaaagtcaggcttttcgtttgaggaacgcgctctagctccacatagtgaaacctctatttactataaatatagagtagaaaaaccattcaaaattatagaaggagaaacagctccttggtttgatcaaaaaggaggagcaacacaactttatgggataactgaggatggtactgtattatctgtagagcaattaatagatgaagaatatttagaattagttaattag

SEQ ID NO: 2139 - DNA, 615 bp, Listeria innocua
atgataaaaaaactagtagattttttaggtgaagatagatacatcgttgattctgataaagatagaaaaaaaatagaagtaagagaacgagcaaatggtattgtaaatcaagatattatctttgttttagcctgcaatgaattaaaatacgagctattcaaattgtctagaggtactaaaacaaaaattatgacattacatgataaagaagtagccatcttttattttggaataatgattaaaatgagccgatttaaaacgatttgtcctagaccggaacttaagaacactatttccaacgagatagaggcaaagaactgtctgtcaagatttctggattctaacttgttcgaaatagaaaattataagaaagatgccatttgccttattaacgaaaaaaatacttatgtagtgggttattgtgatatagatatgatttttcatacaataagtaatgataactctagtttgacaatgggagctaaagttctagctaatttcacctggaaatatatgtattttaaacaaatgattaaagaatatgccatagagttagatcagaatcaagtggattataaggctattttacgtaatttgttgaatcttaaaaattag

SEQ ID NO: 2140 - DNA, 324 bp, Listeria innocua
atggattataatttaaaagaatataaaaaaattttagaagaagatatttatttacggggttatcaagaattaagatacgctatattcgaaggtgagaaaaataatcgacaagaatatcaagttagaattgagaagaatgaagctaaatttgaagtttatatgacagctgatagagctagtgtaatggggaaacatgagtttaataatgtttttgatgctatggataaatttttaaatattatgcaaagtaggattttatcgaatcgtcgaagagtgaaagacggggaaccaccagaatactcctgtccgttatgggataattaa

SEQ ID NO: 2141 - DNA, 633 bp, Listeria innocua
atgaacatttccagcatatacaataaaattgaaacagagttttctattataaatgatgcaaatagcctaatttctattgctgttcgaggaataaatcactatccagagaattttgttaaagtaatattgaacaagcggagtggttactttgacttaatgaatatggtaagaggaaaagaatatacggtggcttcgttttcagaagaggatagggcgataatagcagtatacatttatggaaagaataaactggagtttaaagactataattcgaatattaaagatgagattgataaggcgcagtcacttgaagaaattaaaacaatttttatgcttgtttttggagagcgatactactctttttttgataggagaaaaggtagaatcgtgttagaaaaagaaaataatgacaggtacaatgttttgtattacgggaaagataaatccgtaatatatattactaaatcaagaaaattaaacatcgcggctaaagttttatgtaactatagtttagatttaaaacatttttatgaaataattgaaaaacttgagctagaggaagattttaagtttgtagaagaattaaaaaagctgtatttatttggtcgcagtgactgtaattcaatagattag

SEQ ID NO: 2142 - DNA, 1626 bp, Listeria innocua
gccaaaagtgccctcgccccatttgccgcagcgaactggctgggcggcttatttaataatttagaaaaagtatcgaaaaatatggaagaaggtatccaagaactggactctgaccgcgcgatttcctttcaacacaccaactatcgtgggaagtacagcgccatcgaagacgatttgatggtattgtataagtttagttgtcatgcaggggaaaagatggaaaccctggtaaaccaaccgttttatgagaagttggatgcgtttgtggacagcatgcaagatttgagtatttcgacgtattctaccaccaaccggattggtgcgaagtcgaaacaaacctatacaactacatctggcggttcgcaagtcatcgagtccatcaaagaaggtgcgacgatcgaagatttgatgaacgacgataacttctacgcaaaccaaatgcaactacaatatagggactggcaacgagcgaatccaaatcaagaagtgagcgaaaaagactttcaaatggggatgttacatagtcgggcatttgaatataaatcgattaaagatgaacaacaagagaaagagttttgggtcagcattgtggcgaccgtggtgattgtgggtgtcagtattttctgcccacccgccggccttgccttagcggtaggatacgggagtttagaagctggttcggcaatcagcgggaaggactgggtatctggccgagaactaagtgcggaagaacgagcgctccgtggcggtttagcactgctagatatcgttccaggtgtgaaagcattgagcacaggagcgaaagctgccagtgccggctcgaaacttgtccgcgtaggcgataatgttttagcaggtagcaagaacgtcggcaaaggaaccatcgacaatgggattcaagcagggaaacaagcgatggatctccggttggccaatgcgaaaaaagtcagcgaagccgtccaaaagaaactcaccaaagacctcgacgatatcggcacgatgggcaaaactatccaaaacaaaaccaaagaaaccttcacacttccatcgagagagcaactcgcctttgcgggaggaggcagtatcccggaacaaagcgccaccggagccgccgcgatagccgcgaagaaaaagctgaaagatattatgcaaaacatggataatttgaatgtgaagggcggcggagagggtggtacaatagaaaaaatcggtaaaactaatgaactgaaaagcccatcgtcaattgcaaggagttggcaagggggcggtaaatatccaggagtggatgactatgaggacattgtattgaaagtgggggatgtcatttacagaggagagccaaatggatcagaatactttaccactaaggaagtcatagaaaatgctgatattagtgcgactaaaatttttgaaggattacaagtcgaaaaacatcctatttatggctatcggaaaagtatgacagggtataaagtgaatagtgaagttgatgcagcatctggatttacgaaagctaatccacaatttggtgagggtggagcacttcaagtttttgttccaaatgtaaatgaattaatagaaaaaggcattttaatacctattgatgagataaaattaattgattga

SEQ ID NO: 2143 - DNA, 390 bp, Listeria innocua; identical to SEQ ID NO: 290

SEQ ID NO: 2144 - DNA, 411 bp, Listeria innocua
atgagtacaaaatttgctaaatacaaagaagttatttataaagttagtaaaattggtgataatacagtaagacttgttagtagtaatgaacaagatatacaaaagggatttgtaaagaaagaatacccagataactatttaaataaagaaaaattgccagacttatatatatgtgaagttgacttttcttgtataaaagagctgtatgaaatatcagatatagtcgtgtataaagaaaaggaatttgaatctattactgaaaccaaagatttttttagaattggtactataaatacagaaatagctaaagaattaaattttgaaagaactgataaatattattatgaaaaatgggtaccgaaaaatgaagtaaagattgagaaggaacgaaaaaatatacctttaaattaa

SEQ ID NO: 2145 - DNA, 324 bp, Listeria innocua
atgagttatgatttaatggaatataaaaaaattttagaagaagatatttatttactgggttatcaagaattaagatacgctatattcgaaggtgagaaaaataatcgacaagaatatcaagttagaattgaaaagaatgaagctaaatttgaagtttacatgacagctgatagagctagtgtaatggggaaatatgaatttgaggatattttccaagcatttaaccaatttttaaatattatgcaacttacagtcttgtcaaatcgtcgaagagtaaaagacggggaaccgccagaatacccctgtccattatgggagaagtga

SEQ ID NO: 2146 - DNA, 1203 bp, Listeria innocua
atggtaaaaaaagtaaaaggtaggcgttatgagggttctattgaacaacgtagcaaaaattcatggcgtatgcgcgtgactgtaggctatgactacaaaggtacgccgattcgagctgacagaacgacgcgaacaaaaaatgagagggagcgagaaagagagttaagaaatttcatcacagaattagagcaaaatggatatacagctcctgcaagaatgacatttaaagcatttgttgagaatgagtatatgccgaaacatgcacaaaataacctagaagttaaaacctggacagaatactacaaatctatagtagcaagagcttacccagcctttggcggcgttcaaatggataaaataactacacttcatatagttaacttagtcgcaaaattacaaaagcccggcgcaagattagatgttaaacctacagattcagacgaaaagaaaaataagccgctttcgccgcgatctatcagaaatatttattttgcgataaattcagtatttgaaactgcggttgagtggaaagtaatcccaattaaccccgcagagggtgtaaggcttccaaaaacaactaaaagaccgcctactatttatactcctgctgaaattgaattgttaaatgcagctctagtgaaagagccacttagattgcaagtaatgatttatatagcgctgatttcaggttgtagagaagctgaattagcagcattagaagtaaaacacgtgaacttaatagaagatgagctaacattcgaacaaacgctagttgcaaaagcaggagaaggtttacttcttaaagaatcaactaagaatgatgtagctgggatagtttctatacccgcttggttaactaatttaatagaaacatatataagcaatgaagttttagacctaaaaactgaagggaaatgggccaatcacaaatttttattcgccgacatggaaggcaaaccgattaggcctgattcgatttatcagcgttggaaacgatttttagaaagacacaacttgccggtgattcgttttcatgatttgcgtcacacatctgctacacttttattgaacaaaggtagagatataaaaattatccaagagcggcttagacataaatctagtgtgaccacttcaaacatttatgcacatgttttgaaagatacgcacaaagatgcagctagcgattttgagaaccctttttaa

SEQ ID NO: 2147 - DNA, 651 bp, Listeria innocua
atgatagctttatttgtactagctggtttgtttatttttaccggtattattattttagctgtatcacaattacctggcatggcattaattgaatttgcatttgcagctcttttcatctggcttgctttaagaataaagagaaaaaaagccacccatgaaaaattcgatgtaaaagaaattccgagtaactcgcctcaaattaagttaaattttaatttagcacaacaggatttaaatttcgctataaagaaagcggttggaacaacttataacatggttcaactaattccatcaaatcagataatttttttatccaaagatggtcttgtgacaaatgatgagttttactttgttgattataagtggctaggtgcgacgtacaacactcacactaaaactaatagcaaagctgggaaaactattgctggaggagtagttgggggaatagtcggcggaggcgcaggaacagtagtaggtgcattggcaggaagtagcggtaaaacaaacagcacttctacgcaaattgaaaataaatcaaaagcaattttttacttttacaataaaacaaaagatattgatttagtaacagaattaaacattacatcaaaagatatagttaaactcgaaagatttgtcaaatatgtaaaataa

SEQ ID NO: 2148 - DNA, 477 bp, Listeria innocua
atgtttagtaaaagattatctgagttgcgaaagaaaaaaggtttttcacaatacaaattagccgacgaacttggattttctagaggtcaagtagctaattatgaacaaggaacaagagagcctgactatcaaacattactgaaaatagctgaattttttaatgtatctactgattatttattaggaagagacgataataatctcgctgacacaatcgcagctcacattgattcaaacgcatcagaagaagatatgaaagagatactcgcttatatagaagaaaaaagaaaagaacatgctaatgaagaggaaatagacatcacagatattgcagcgaaaaaagatgctgacgtggcaaagttcgtagaggaaaatccagattttaaagcagttgctgcacgtgtcatggacgatgaggaggctgttaaagcggtcaaaacatttattgaatattacgagcaacaaaaaaagaagtaa

SEQ ID NO: 2149 - DNA, 267 bp, Listeria innocua; identical to SEQ ID NO: 128

SEQ ID NO: 2150 - DNA, 231 bp, Listeria innocua; identical to SEQ ID NO: 70

SEQ ID NO: 2151 - DNA, 195 bp, Listeria innocua
atgaaaaaaattgcatttacaaactctttcctaactaagagaaatagaaaagagtcagtactcaccattgaattaagtataactggcgaagattttagcgatttaagtattttgccggaactttattcagaaattaattcattagttaatagattatcggaaaaaactaacggcgatttgggcaaaagaaaatag

SEQ ID NO: 2152 - DNA, 237 bp, Listeria innocua
atgagtaacgaagagttaactttgtcaatcaaaactagtcaaagagaagatgggtctgcatataatgccattcaacttggtgactggaaagtaggacgatttgtaacaggtgttcatttagaaatactaggcggtaaacgaccaaagttaattattgaatgctatccagaaagaatagatgtggatggtttagaagtagaggcttttttaaaacaaatagaggaggaagaaaaatga

SEQ ID NO: 2153 - DNA, 243 bp, Listeria innocua
gtgaaaaatcgcatggatataatgttcaaaggtatctctgatgaccagcccattgctctaatgggcgttataagcattacatcttttccagataacaaaagttttgatttaaatgatttttatttagaagccgataaaacttacaaaatcatttataagggtgcaagcgagttagaaaacgatttatcgaaagtttttctaatgaactcaaatgatgtcctttacattgagttcactatttaa

SEQ ID NO: 2154 - DNA, 774 bp, Listeria innocua; identical to SEQ ID NO: 498

SEQ ID NO: 2155 - DNA, 525 bp, Listeria innocua
atgtttcaaaaatcaacatcagcgccaaccgcgatgcaagttttagcagaaactcgcacgcaaaaagagctagcgattgatagttatgtaacaccagcactaataagcaaccagttgaaaggaaagcgtacagtttcacttgaacaagcagaacagttaattgatagctacaacgaaccagaaagcacatatttattcgcacatgaattttcaaacggaatgatacctccacttttcgacggcttagacagtcaccatgcggctttaacttgtcgctttgaactagaagtaacagaagcagtaaatgcgttaaaaagcggattagaaacgatgacattcaatttaagaaaaggcgacatgctacaacgagaagccgcaaaacaagcaatttcagaaataacagatgtaatcgcaacagcattaacgcttaacacaagtatagcgaaggcattcaacattaatttacaacaaattttagaaagtcgagataaattctatcaaaaaaatggtttggtgaaggagtga

SEQ ID NO: 2156 - DNA, 186 bp, Listeria innocua
atggaaacaatggaaaaggatattttgacagctgaggaagcggcggaaatgttaggaatgaaaaagaggactattcaatcttgggctagaaatgcgggattacccggcaaaaaaataaacggcaagacatggatttttagcaaaagagaacttgaagcgtgggtagcgcaaggtggagaaaaataa

SEQ ID NO: 2157 - DNA, 189 bp, Listeria innocua
atgacagaaagagttttcagaaagactacaaacttcggtgatagcgaaattcatacaaatagcagaacaaaaatgattgctaatccggcatttcagcagaaaatcccgttaaacgaaacaggttgcgacaacatgacggactatatcgaagagttgaagttaaaaggctatgaggaggtcacgcgctga

SEQ ID NO: 2158 - DNA, 960 bp, Listeria innocua; identical to SEQ ID NO: 551

SEQ ID NO: 2159 - DNA, 816 bp, Listeria innocua
atggcaactaacgatgaattaaaaaatcaattagcaaataaacaaaatggagggcaagtagcaagcgcacaatcattagacttaaaaggtttgctagaagcaccgacaatgcgcaagaaattcgaaaaggtactagataaaaaagcgcctcaatttttaacttcccttttaaatctttataatggcgacgactatttacaaaaaactgacccgatgacagttgttacttccgccatggttgctgcaacactagatttacctatcgacaaaaatttaggttatgcgtggattgttccttacaaaggcagagcacagtttcagcttggttataaaggatacatccagttagcactacgcacaggacaatataaaagcattaatgttatcgaagtgcgcgaaggtgagctactgaaatggaaccgacttactgaagaaatcgaactagatttagacaacaatacaagtgaaaaagttgttggctactgtggctatttccagttaattaatggctttgaaaaaacggtctattggactcgtaaagaaatagaagcgcataaacagaaatttagtaaatcggattttggatggaaaaaagactacgatgcaatggctaaaaaaactgttcttagaaacatgttaagcaagtgggggattttatccattgatatgcaaacagcggttacagaggacgaagcagagcctagagaacgaaaagacgttacagacgatgaatcaataccggacataatagatgcgcctgtaacgccgtctgacacgttagaagctggctcggtagttcaagggtcaatgatctaa

SEQ ID NO: 2160 - DNA, 912 bp, Listeria innocua; identical to SEQ ID NO: 540

SEQ ID NO: 2161 - DNA, 168 bp, Listeria innocua
gtgacagaatacgcactttataaagcagacgaactactaataatcggcacagtagacaaactagcggagtttcagaaagtgaagcgtgagacgattttgttttatgctacgcctacgtatcaaaagaggacgactgataaggggttaagagtaattagagtggtttag

SEQ ID NO: 2162 - DNA, 630 bp, Listeria innocua; identical to SEQ ID NO: 439

SEQ ID NO: 2163 - DNA, 522 bp, Listeria innocua
atgagagcgattggatttagaggtaaacgaatagacaacagagaatggatttacggtaatttaatgcaatttgaggatagcgctactttcatttttgcagatgaacgaaaaggcgctagcacattaacttatgcacattttattattaataacatgcacgcgatagacgaaaaaacacttggaagctgtataggtcgtgaagatgaagacgaaaaaactatttttgaaaatgacattgtgcaagtagttttagaacactggccaatgggatactaccaagaagtagaatacattggagtggttaaatatgacacggatatatgtgcgtattatcttgatttgattaagcctcctgctgttagtggcgaaacgataccggatgaaatcgacggaattaaaattacaagagaagactcggaagatttcgatacaagattctacttcgatgctagcgttgattcagcagctatgacagtgataggcaacatacacgaaaattcggaaatattggaggaacagtaa

SEQ ID NO: 2164 - DNA, 393 bp, Listeria innocua
atgagagagattgaatatagagcgtttgtaaaagaaactaagaaaatgcttccagtcacagatttgtgttttaacgaaacagagtctgtaggcgtaagtggttgcggcaacccatattgtacaatgtgcgtcgactggtacaactttgacgatgtcctgctgatgcaatacacagaaagagaagacatcaacaacaataaaatatttgaaaaggacattgcaacttgtcagtttttcgacaaaaaaatcactggtgttatcgagtttatcgaatttatgtgggcagtaattgatcacaagaatcaacgactatatcagttgaacgaagttagcaatattgaagttgttggaaatgtggaagaaaacccggaattgttggaggtgtcggaatga

SEQ ID NO: 2165 - DNA, 186 bp, Listeria innocua
atgaacgataaaaaaacagattataaagtatataaaataacatacaagcaacgtttcatgggggaagttattgttgattcatatgaaagaacggtaaaagatgataacgaattacggtctgcaattaacgctttatatgacgacccacatgtgttttcagttagtagtgaagaggtggcggaatga

SEQ ID NO: 2166 - DNA, 291 bp, Listeria innocua; identical to SEQ ID NO: 159

SEQ ID NO: 2167 - DNA, 207 bp, Listeria innocua; identical to SEQ ID NO: 24

SEQ ID NO: 2168 - DNA, 402 bp, Listeria innocua; identical to SEQ ID NO: 303

SEQ ID NO: 2169 - DNA, 501 bp, Listeria innocua; identical to SEQ ID NO: 375

SEQ ID NO: 2170 - DNA, 177 bp, Listeria innocua
atgaatgaaaaagaaaaaattgattttgcaaggaagtatattgatgaaaaaggctaccatgaaatctataaagtaacagatggaggaattttggttaggttagataaagttgataaatttctttcattaccaggcaacgaagaaggtattataaataacatagaaaataataagtag

SEQ ID NO: 2171 - DNA, 264 bp, Listeria innocua
atgaataatcaagaatttatagacaaatgtaaaggcgttgttttaaattacgctaacagtcatttagacaaaagcgataaaaaagaaattggcttagatgatgtttttgtagtatggagttgtaaaacattacaaaacagcaaagcgctactaagcacaacgttgtacgatggcatgtattatgaatgtactttcaatggcgacaaatcagaattgtattttgacgcatacaaaaaatgggaaaataaaaaaattagtatttga

SEQ ID NO: 2172 - DNA, 543 bp, Listeria innocua; identical to SEQ ID NO: 400

SEQ ID NO: 2173 - DNA, 900 bp, Listeria innocua; identical to SEQ ID NO: 535

SEQ ID NO: 2174 - DNA, 159 bp, Listeria innocua
atggcggcgcggtcgggtaaaactgatagcgcgccgattaaagacttttcagctatgacagtagcagaattgaaagaagagcttgtgaatagaaatatcgaatttgcaagtaatgcgaaaaaagcggagttggtagctctgttggaaggtagtgattga

SEQ ID NO: 2175 - DNA, 273 bp, Listeria innocua
caaaaccctgaggagagcccgtccagcgtcgaagtggacaaggcgactattacgctaaaagttggtgaaacatccactgttactgcctcagtattacctgtcggagcaagtcaagaagtaacttttacttcttcaaatccaccaaaagcaaaagtaaatgctagtggcgtggttgaaggcgtagcagaaggaacagcaaacataactgtcgcatctaaagaaagtccttctatcaacaaagtagtgcaagtaacagtagaagcagcagactaa

SEQ ID NO: 2176 - DNA, 828 bp, Listeria innocua; identical to SEQ ID NO: 515

SEQ ID NO: 2177 - DNA, 1038 bp, Listeria innocua
atggtgggtgagaatatggacatatttgtaagtgactatgaaaagcaatacaaagagattttaacaggctttgaccctactacattttcagaaacgtgggtcgaaaatcagcaatggcaactagatttttatgtagagaaaacaagaaataatcaagatgttttcgacttattaaatcatgaaagctctgtttatctggatggccaagaatttgttgttaagcagctaaaacgcggcgcagttgggaaaatagtttattcagaagtcacagcaacgcatatttatttcacgatgcaagatgactatcagtacaacgctatttcgggttctaagagtgcaaaagattgtttgacacatattttcgcagctgataaacaaggttttagctttgaactcattgacaaaaacaaggttttagaaaatattacacaagaaaattttgggaatggcaatttactaaagctagttcaagaagtgttggaagattataagcttgttatgctagcagacaataaacgattaacatttattccctctgaagattacggagagcatacagaaaacgaaattcgctacaataagcacacaaacgaagtcgattttgatattgatacgttatccttaagaactcaaattaagggctatggaaaagtcgacagcaacggaaataactactttccgccagttacttttaccagcccggaatcggctaaatggggcgtgcgaattcaagaaccgttatcagacgagcgttatacaacttctagcagcatgctaagacgtttgaagcttgaactacaagactatccagcgacgactggaaatatctctttaaagcttaaatacgaatgcggaaaaggcgattatgtaatgtttgtttatgaaccgctgggccttttatacgaagttcaaatagtcgcttataagaaatacatttttacaaacaaaccgccagaattgacgttatctaataacaaaaaaacaatggtttctatcatggttcaactagcaaaagcaattaagagaggagcgaaatag

SEQ ID NO: 2178 - DNA, 1026 bp, Listeria innocua; identical to SEQ ID NO: 567

SEQ ID NO: 2179 - DNA, 1068 bp, Listeria innocua; identical to SEQ ID NO: 577

SEQ ID NO: 2180 - DNA, 342 bp, Listeria innocua; identical to SEQ ID NO: 229

SEQ ID NO: 2181 - DNA, 147 bp, Listeria innocua
atgattaactggtatgaaaaagtaaaagattattttttaggtggctactatactgaagcagatgttaataaattcgttactttaaaaaagataacgagatcacaagcagatgtaataatcgctatgaaagaagcaaaagccgagtag

SEQ ID NO: 2182 - DNA, 870 bp, Listeria innocua; identical to SEQ ID NO: 527

SEQ ID NO: 2183 - DNA, 417 bp, Listeria innocua
atggtacaaaaaaatatcgtagtagaatcaggagtaaaagtttataaggataaaacgttcaaaaaagtagttgcagagctacctaaaggcgctatttttaaatatgaaagcggattttgcgaattcaaaacaatcaaaggctacacaaatcgcgcaaattggacctgtcctgcgatttctggtagctacgttatcgcactagcaaaagtaacgcaaaagcttgccgaaaaagttggtggcaaaggtgtcattcaaatcacgaaaggcgaaatagttcgcattgatccatctagcttgaaaaacggctatgtgaattgtgctgttttcaacgatgtgtgggagtggggattcaagattaaacttgcagatgttaaacgatgcgaaactttatcctataactcaatagcaaaattataa

SEQ ID NO: 2184 - DNA, 561 bp, Listeria innocua
atgataagcggattttttgatacactgctacaaattattgctcttctgtccgcgttttttcttattgttttgctccttcttactggtattcgatattttctatcaaaagatgaagttccattagaaaaaattcaacgttaccaattgtggcataaccgctaccaatttgatgcagaggtgacagcctttcttgtcgttattacggcgacacttctagtatgtttatctgcagtacaaataaccgccattccgttccaatttacattattaatgttttggagtagctggctgtttcatccattttcttattggaaaaaaacgcgtacgccacaaaaactcaaaaaagaaattatgcagctactgggcttagttttaattacagctttgtacttcgctggatactttgcacttaagtcaatgtatttagtacttgtgcaagtagcagaagccccttggcatatccaactcggcgtaagaagttatttaattatatgtagtttacttgtagccagtggagcactaattgtatggcaacgaatttacgctaatttactgaaatag

SEQ ID NO: 2185 - DNA, 5982 bp, Listeria innocua
atgatgaaacttaaaagcttgaggcgtccattattattagtcatggcagctttactgattatcggtcaattgaatctttcgtccttccgagtattcgcggaagaaaaaggtaacgaatcagtttcttatgagatacaaaatgaactttcaagcgacaagaaaaaagctaaattgaagattaaaacaacccctaaaaacgaggaagttaaaatcttaacgatacaaacaccagatggtaaaaaagtagaaggtcaagaagcagaatatacagccacgaaaaatggtactgtggattttgtaattaactatcaagaccaagataaaacagaaaaaacttatactgcttcttatgaagtaaatgatatttctgaagaagtacaaaatacaccgaaaccgactgtcacggaaggaaatactcctaaaaaaggatctaacttgcttaaatcaagcgctcctactgtgtcaatgaaaattcctgattataacaaaacaaattgggagaatggagacattaaagacgtttctgtaacagttgagtttaacaacaacaatgcttctggtaaaaagattaatttcactttgccagacggaatgcgttttgtttctctaccagttccaagtagttatcaagcacctagtagcgtagactcgaatattttaagttattttggcgcaggtaatccagttggagattcgattacttcagtgactgttccaaataaagaaacaggctacaataaagcaacttatggtactttgagctatgaactagatccagctactgaaaaactaactctaaacttctctgtacaagtagatgcagctaaatactatggtcctactgacttgaagtctccaattaaagttgatgcttatatgggagaaggaagtactccagcagcatccgcagagcaaagcattcgtgccgagggtaaaactgttgttggctatgcaaatcaaaaacaggtagacacaatgtttagaaactggtatacatcttcatttttaccagaagtaagtccaagtacagccactgaagattcttataactacactaaaccttattcagttgtaaatggtatcagccaaatggatggacgtggttcaaaaatctttgttcctaaaaacgttaaaactactctttattacccagaaggtatggagtatgtaggcgtagttaatgaaaacaagagtttactaacaaacaacgaaaatagaacaatcacgcattatccaaacgaaaataaagtagaaattgactttaaacaagaaaattactacggtattattgaaactattttagcagtaaaatacaaggtaccagaaggaacagaagaagggacttatacttctcctaaagtaccacatgcagttattacgacatatgatgataaagtgtttgaaacagatgcattaactaatgatgcaagtgatacaacaacactagctgcaaaagacacatgtaaagtagtaggtaaagcagcaaataaaatggttatgctaccaagaaactactatataaatccagataacgaatcttgggcgggacttattcaaatcaataataggcaaactgccggagtgaaaacaaaccaaatttaccaaattaaatttgatgaaaactgggaagcctatactgtcaacataccttttgatggaacttacccaggtaataaagtaaaagacgtacagtataaaacgaacttaaattcggaatatcgaacttacgatggtactcttccgaaaacaaatggtaataaaatgcttactttagatgcaacagcagttggacttcaagaaggcgagtactttactgaagtaaaagctaacgttggagacttctctgtaggtttcactaatattgacacagctgccccatttaaagcagcaaattctgcttcatacgggattgttaaaccaggtattacatctgttcaatttgacgtgaatatttggaacgcagatgatgaagaaaatacaaaagtttcaggatcatccacatatacagttgctaataatataagtacggcagcaaatgggacagcttcattctataatagtgaaggcacaccaattaaaactgctcgtgcaggagaaacagtaacaactaaagcatcattagttatgcatgattatccttatggaacaagatctgttcttaataatccggaagtttatctacgccaattagaaggaactacggttaaaccatcttccattaaattaacagaccaagatggcaaagaagttgatttcacagtagaagcaaaaactgctaaaaatggcgataaagtttatgtcattaaaacaaaagatataacagtaggggaatttgttggttatccatccaaaaaacaatatttgaatatcagctataacaccacatttgatatgacattaagtaaaagcattcacactgatattcaagaattacttgcttggggcggaagtaacgtaatttctgcactaggagcgaacgtcttcctagataatggattagacgtaaaccaaaatggtagagatgcggaacgtttactttcaactaatacaagtactctaagtgttccgaaacaagatacagttgccgtagagactttcttaaatgtagccggagaaggaattaaagctggttatgtagaaggcgatgacagtactgtttcctatttcacacctggaactgacgctgattatatggttaaaattacgaatacttctagcggtagcgcaagtagcttagatatttttatcccaattccaaaaactggacaagactttggtacaaaattccaaagtgaacctttcaaatgggacatgaagctaaacggagaagttcctatgacagctcagcaaaaatctcagtttgatttaacctatactgcggatgccactgcagataattatacgtctgatagcatttacagtaatacactcactgattacggaaaagctaacatggttcgtatcaaagttaaaactaaaattgagtcaggcgaatctcaaacaatcaaagtaccactgaaagtagatgaaacatttgaatctgctacagctggtaacaaaattggtgaacgtgatgtatacaacccttactatgcagttgaaactaacacttattctggttcaatcgcaggaactcgagtaggagcagagttagtaattgtagaagtagcaggtaagttattcaaagataaaaacgcgagtggtatttatgaaaccgcacaaggcgatacaccactagcaaatgaaacagttgaattatacaaatgggatgaagctacatccacctatgaaccattcaccaaagatggacaaaatgtaacaacaacaaccgatgccgatggaaaatataagtttgattataatttaggaattggttacggaaaatatgctgtgaaattccctgaaaaagcaggttacaagcatacgttacaaaatgttggtagagataaagacttaaatagtgcagcaccaaatatgggtactgaaattggttgggttaaagatattgatccagcacaaccagatgctcagcacattaatgcagggtacatttcttacgttcctgaaacagatttaaaagttaacttaaatgaaaaaacagttcaagaaggtaagagcctgaaaatcactttaccaaaagtagctcctacaagtggtgaagcagcagaagatacaattgaaccagacattttccaaaaaatccaagctaacacagatgggtataagtggactacagctgatgcttccgtagcaacagcgaaaacactaactgatggttctgtcgcaattgtaggtggttctacgaatgggaaaacaattagggttacagatttaacaattgctcttaaagatatttttggcacagagaaaaaatcaactgcccctctttatgtaacaacagcaaacggtaaagttgctcaaaaagatgaacttaaaattggagcaactaacttcacattagaatacaaagatgcagttgtccttagtgaagcacaagcagtaactaaagccaaaacagcagcatttgaagaagtgaaaaacggtgtgaattcagacgctgaagatcgcacagatgttgttaaagtagacgaacaacaattaaaagctcttaaaaacggttctaaccgcggtggtacgtatccactaacatttactcttgaaaaaaatggtaaagaagttgaaacagttattgatgtaaaagtagaaaaagacctaacagaagtaaatgctcatgattctactatttatgttggagataactggcgtgcggctgataactttgatagtgcgctaaataaagaaggcgaaacgcttacttttgcggacatcgaggctactggaacagttgatacaacaaaagcgggtgaatatccggtcacttataaatacaatgatactactaaaacagtaactatcacggtaaaagatgatgcgaccgaaattaacgcgcatgattccacaatctatacaggcgatacttggagtgcaaaagataacttcgatagcgctgcagatagagatggaaatgaagtagctttatcaaaagtaacagttactaatacagttaatacagcacaagctggcacttacccaatcacgtatacgtatggtggtgtatcaaaaactattacagtaacagttaaagaaaataaaaaaggaattaatgcccataacgctacaatttatgtaggagatagctggacagcagaagataattttgataatgctgttgataaagatggcaatccagtagaattttcaaaagtaacagtaactgaaacacctaatgttaatactaataaagcaggaacttatcaattgaaatatacttttgatggagcttccaaaacagttactcttacagttaaaaatattcaaaccgctgttaatgcccacaactccacagtttatgtaggagaaacatgggaagcgaaggataacttcgacagtgcacgaaataaagacggagaaacagtcgcttttgcagatgtagaagtagaaggaaatgtggatatgaccgtagcaggaacatattcaatcacttacaaatacgacggtttttctaaaacaattaaagtaacagttaaaaatccacaaactgcaataactgcacatgattctgtggtttatacaggagacaattggagtgctaaagataactttgatagtgcaattgataaggctgggaaaccagtagcttatagggatattacggtggaagaagatccaacagtggacttaaatacaccaggaacctactcagtaacgtataaatatcaaggtatatctaaagtagtacaaattactgtgaaaccaagacaaactaaagtagaatctcacgatagcacgatttatgcaggagcaagttggaacgccaaagacaacttcgattcagcgatagataaaaaaggcgatgacgtcaaactatctgatgtgactgtaattggccgtgttgataaccaaacaccaggcacatatgaaatcacttaccgttatgatggtgtaacaagcgtttctcgcgtgactgttctacaaaatcatgccaaaatcattgttaatgatagtaagctgaaaataaatgcagattgggatgcgaaagataatttcgttcgcgcaatgtctagagacggtagcgaaattccaatgtctaaagtaaaagttgaaggtaaagttaatacgaaaaaagctgggaaataccaagtaacttatacgattgatcctaatgaaggaacagtagatgctggtaaagaagagctttctgttacagctacaatcgaagtagtagaaggaaaagtagcgataactccatcagaaaatagcaattcagatgtaaaacctggtaagcaaaagacagcaacataccaacaagcaataccaagaacaggggaccaaatgaatttatgggttgttgtaatgggcgcttgcctagtaggatttgcgctgttcctatggacgtttagacaaagaagacgtcacggataa

SEQ ID NO: 2186 - DNA, 639 bp, Listeria innocua
atgacctttttagaatttcatcaactaatcagccaagattcactgatttattcatggattaggaaaaatttttcttttgttcaccaggagttggaggcaggtaaggaacttaaaatgcagcatgaacaactaatcattatggaaaaaggcctgctaatacaaaaaagcgaagaagataagaagcttacttttcaacgagtattcgcggatcaacggattatttttacgacaggtggaagtcttacattaggtgctctagaagatacggtttatagcgttatccctacagacgaattgtttgagaaattggatgagcatcaattgttacctaatttctttttacaaatagctgaagattttgaggtaagtatcgaatggcaaagaaagttaatgtcggcttatccagaggaacgggtcagaatggttttgagaaaagtaattgaacgatacaaactagatcccgtgcacaatccagtatttccaagatggcttaaaatttatgttctagcaaagttcgcaaaatgttccgtctcaacaacttctatgatagtaaatgatttagctgagaagggtgaaattaatgttaaaatgactccttggatattaatgcaggattcaccagcatattgtgtctcttaa

SEQ ID NO: 2187 - DNA, 1518 bp, Listeria innocua
atgcgccctacaaacgtatacatgcctgaagatatttatttaaaggatcgaacaggatttaataatggtaatctagcttaccaatacagcatttataggactttatggaatgacaatgtagaaatacacgctgatgggttatcttctaatcctaatttagcagaaaaaattaatgaacattacgatttgtacattgtgcctctagctgatgctttccgtgaagattttcgacccgcgctccgtaattatactcagttgattcgtaagctaaaaatcccggttgtagtcacaggggtaggtttacgagcaaactatgaacctcagttagatgaaggtttcacttttgatgaagatgttactaattttgtaaaagcagtccttgaaaaatcggctcaaataggagttcgaggacagattacagcagattatttaaaaaaactcggatttaatgaaggtatagactatcgagtaatcggctgtccttccctttatacatttggtcgagaaataaaaatcagagaactccacttaacagaacaatcctccattgctatcaacgcatctccaacctcttcagatatagctatcgagttcttaaacaacttgattaatacatataaagattaccaatttatccctcaacacctagacgaattccatttaatgtatgctggcggtccagatatctctagtgatatcaatggctacccaacaaatatccaacataagtattatcaagaaggtcgagtaaaatatttcactagcatgcctagttggttcgattttgtgaaaaatattgattttagcattggctctcgcttacatggaaatgtcattccaacaatagtcggaacacctaatatttcatttgtccaagatgctagaatgcgtgaactagcctcctaccatgcgcttcctcacgtcaccatcgatgaattggaaaaaacaagcaacctccaagaattactgactaaagtggacctgaaatcagccgaaaaagtccaagcaaggaattttgataactatattgatttcttagatacaaacggtctcaatcatatctacaaacacgataaaaacagaaaatcagctcctatggatgaacttataaactccattactttcccatcaagtccagaccccatttccatattaaatcctcaagaaatgctaaaccgagtaaaaatctccaccaacttattaaaagaaagacatgattttagcacaagataccgcgtcaacctcgtaaataaccaactcacccaactgaaaaaaacaacttctgagcaaaacaaaaaataccaacagaaaattactgaatcacaagaaaaaaatcaacaattagaaaaacaactgacagatactacacaaaaattacagctgacgctaaagaaaaatcatgaacttacaaataaaatcagacattatcaaggcacattaaaccgaaaatctgtgaaaacgactttaaaagtagcgaattcattagcagctttaaaaaagaaagtttctaaaagctaa

SEQ ID NO: 2188 - DNA, 1203 bp, Listeria innocua; identical to SEQ ID NO: 600

SEQ ID NO: 2189 - DNA, 336 bp, Listeria innocua
atgtcaaaacatgattttgaagcattaacagaagttgagaaaaatttcatcatgaaagaatgggaaaacaaggtcatttttgagtctactatgcttcgaaatgccgtcttgaatgctgaacaaaatctcaatcgcaaacgaaattcgcgttttattgatttgcataagaagcgccagaagaaagcagatgttaattatacagtaaatgcacttcaagcaatttctgagaatgaagcgcttgaaggtaaagcgtggattgaccggatttacggtgcaaatggcctacgcagacctaaaaataaacaagaaagggggaaaacgaatggcggattctaa

SEQ ID NO: 2190 - DNA, 1431 bp, Listeria innocua
gtgagccgaattgacatcggagaaatacaaacctttgcgcaccaactacatacagctaatgaagccggaagaaaaagcattaaagacatcaaaaaagccgtgaaaaactataccgaagacggcagtttaaaaggaaaagcgatcgatgcatcgaaaaattattaccaaatgacctatttcccattatgcgatgcgataatcgaagccatgaacgaaagtgaagaacggttagctcaatatatagctgatttccacgcccaagtggatggttctgcggatgcgaaaattgatgcggacggtttatacgaactcgggaaaatgattgatcgtattgaagcgaaaaaagaggcactagcccagcggatgaataccggaacagaagggcaaatgcaaagttatcgctcccagctaagcatcgcctacaaacaggaaaatatcttagaaaaatacttggcttttgaacaaagtcatggtggtttttttgataatttaaccgatttagtccgaggaattcagcaaaccattcgcgaactccagtcgaacattcaatttaacagtaaaacgggtacctatgatatgagcaaactgaatttcaccaccgtgacccggatgcaaaacgccttaggaaaagcgctaaaaaacaacgaaaaaacattcaattttgacgaatatcaaaaaacgtaccgtggccaaatgtgggtgttaatgaaaaatggtatagtagacgtagaagcaacgaacgcgtacaatgccgctgtgcttaacggggaattaccacatgaaagcaatgaagcgcaggaagaagccgagttgctgcgggcagttattcaatcggtgaaagaaggaatagacccggttactggacaagagataagtaaagcacaaggatttggtattattagtggtcttattttccgctatactgctggaggttataaagggaagaagattaagattcctaagaatatattagataagataaagaaatcccataagtctaaatcaatcttgacatccgaaatggaagccaaaattttagagggacaacgtaaagggactacaaatggaattaatggtggacattcatccgatattaataacaataacccaaatttcgcaacggaaactgtagaagtaaatcaagatggcactaaagtaataaaattcactaaacaatttccagatggaaatatttcaaaaataaagacgagtacgatttttccggaggattggtcagataaagatattattgattctatactgaaaattagtaattctactgctatcggacaacgaaagattgatgggttaacacttcatagaggtaagattgatggggtggagattgatgtaattaaaaaaggtaatgaaataatttcaggataccctgttggaggcaagccaactccaggatttgagacaataaaatag

SEQ ID NO: 2191 - DNA, 420 bp, Listeria innocua
ttgtttggaaaattagatacctatttacttgattttatcaatgaaaattcatcggaagacttttggtatgattatgcttatttacaggcacaagaccttttaaacaattttactcaaagcgactgggcggaattgcaccaaaatattgatactaaaagtgatttatggaaaataagagtagcctattgtattgatgaagatacggggatgaatggctttgaatttcttcttagtttaatgaatgatagtgatgatgtcgttgaatatgcaatagactcactaagatcgtttgattcagaagaatataagaatatcatacattcaaatcgcatgttaaaaataaaaacgcaaaaactattagaaaatgctagccttccagtaaaaagagttttagaagattttttacaacaaaacaaataa

SEQ ID NO: 2192 - DNA, 156 bp, Listeria innocua
ttgatttctagttctgcccataaagtcttaataattgacgcagttagcgaagaaaatggagtggataaagagcttactcgattagaatgttcgcttgaagactttacttttttactgaggaatataaaagatgttctgagatatgaagagaagtag

SEQ ID NO: 2193 - DNA, 1077 bp, Listeria innocua; identical to SEQ ID NO: 579

SEQ ID NO: 2194 - DNA, 879 bp, Listeria innocua
atgaacaaattagttagtcaaagtaatgcatttctttggaggaaaaatgaaatgaacccggttttagccaatattttagaggctagaaaagaaactgacttggttcaaattaaccaagaagatgcgatgaaattatatgaggatagccttgttgactcagatttgctttataacgactttgtaattgtcgacgaaatcgagggcgactgggcaaaagtagtcgttccttcccaacaaagttttcaagatgagcgcggttatcctggttggatgcttctttctgacttagaagatacagataaaactagcgatactggtgagaaaatcgcagttgttgtgccaaaagcagaaattacatacgaaaatggggaaacgcgcactgtttcatttggcacacttttcaccaaaatcgctgaaactgatgatagctacacgattgaaacacctcatggattagcgaccgttttacgaactcaagtagatttacaacataaacaaggcgacaacattggcatcactgtggtgcaaatggcgatgcaattccttgacttaccatacgtttgggcgggaattagcagtgctggttttgactgttcaggatttgcgtttactctttaccggacatgtggaaaatatatcggccgcgatgccacagagcaatctttcagaggggaaaaaattgattacgcaaacgctgaaccaggagatttgctgttttttgcttatgaggaaggcaaaggggaagtccatcacgtgggagtttacatcggaaatgacgagatgattcattcgcaaacaccaggatccaaagtaattttaactaaaatcgcaggcagtaagtacgaaccagaactttgtgtgacctcaagacatcgataa

SEQ ID NO: 2195 - DNA, 774 bp, Listeria innocua
ctgactaattatcaagaaattaatcaagatttcaacataattgattcaaaagcactttttatatcagatggggaaaaggtgctttttgcagaaaatgaaaaccagctttttactgctgcaagtgtcatcaaactaccgatttatttatattttttcgaaaaaattgccaaaaaagagttagacttacaaacggatttccaaattccaagcgaaaaagtagtagctggagcaggaatcatccaaatacttccgcaaaaaagaatttggacactggaagaattactgcatttaatgatagctgtttcggacaatacagctaccaaccaattaatcgagctagcaactatcaccaaactacaatcatggttacgtgaaaacaactgggaagatggaattcagctggaacggcaaatgatggatttcacgaccgtaaagcaaaataaaatcagcgctaaggcagccgtgaccattttccaaaaaataatgatgcttagtgaagcttatccagacttaaaagaaactatccggcgtccgctactaaatcagcaatttcgatccaacctagtgggcacgttggaagaagccggaatttcggggcttcaaatgttaaataaaacgggcgaactaaaaaatatccagcatgatgtggccgtttttgagtataaaggaaagaccagatttgcagccgcactgacgaataacacgggattagaagcgaatgcgacagcttggatgcagacagtcggcaaacaattattttctgagatgacataa

SEQ ID NO: 2196 - DNA, 1650 bp, Listeria innocua; identical to SEQ ID NO: 645

SEQ ID NO: 2197 - DNA, 819 bp, Listeria innocua; identical to SEQ ID NO: 510

SEQ ID NO: 2198 - DNA, 2046 bp, Listeria innocua
atgagtaaaaacggaaatcttttaaaaagagtagggttagcgtttctaagtgttttaatcatagctagcacggttttccaaacgaccattgtaaaagcagcaacgagttacggatctgagtttttaaatacagtagaacttttagataaagatggtacgccaaaaacggattttggctattacgataatatgaatgtgcactacacttggtcgattcctaactcaaccaatgtaaaagcaggcgactcaatggatttcgcattaccaagccagttagcacttgcgacagatcttgcttttaatgtgaaagacagtaaaggccagacagtcggaaccgccactgtaaaacgagcaactaaccaagtaacagtcgtatttagtgattatgtcgaaaaacattcagatattaaaggtgaacttgatttttggactacatttaatcaaaaagtaattactgggaacgaaaaaattaatttagaatttccaattgaaaatagcacaattaatgtagacgtcaatgttggtgaaaaaacacctgttagtccaacagaaacgattttcaaatatggttgggttgatgctaacaatccgagtttaattcattgggttgtccgcgtgaactatgctcaaaaaaatattcctaatgccgtttttactgatattatcggtgcaaagcagacgttgaattttgactctatcaaagcttttcacggaacctattcaactgatcgcgtattcacagcaggcacgccgatttcaaataccaatttttctaagacaagtgatggttttagcgtaacattgggaaatttaacggactcggtacaaatttcatatacaacaactgcgacagatggcgggaagtctactcaatatgataatactgctaagttatcgggcgaggattttgtaacgaaacaaacgtcaacttggaccccagcatccggtggtggaggtggagcggacggcacaacgggttcggttacactaacaaaacaagatgctaaaacgaaagcaacccttgaaggggcagaatttaaattagtcgatgcaaatggtactattttacaagaaaatatcacaacagatgcgagcggccaattaaacgtttctaacctcaaattcgctacctaccaattaatcgaaacaaaagccccgacaggctataaactggatagcacgccagtagaatttacaattggcgaaaataataaagaaattacggtaacaaaagaaaataccctggacactggcgcagtagaacttactaaagtagatgccgcgacaaaagccatacttgcaggagccacattcgaattgcaagataaagacggcagcgttcttcaaacagacttaaaaacagatgaaaatggtattttaaaggtaactgacctagtacctggcaattaccaatttgtcgaaacaagtgcccctaccggctataaattagatagcagtcccgttccatttgaaattattgcagatgaaacagatcaaatagtaaaagtaacaaaagaaaacatcttggaagtcggcgcagtagaacttactaaagtagatgccgcaacaaaagccctacttgcaggagcgacattcgaattacaagataaagacggaaagactttacaaacaggcttaacaacagatgagaatggtgtgttaaaagtcactgatttagtcccaggcacataccagtttgtagaaactaatgcgccaattggttatgaacttgatgctagtcccgtcgttttcgaaattatctatggagaaaataatcaggttgttaaagtaaccaaagaaaataaggcagaaaccacaccgcctccaacaccgctaataccatcacaaccagtgccaattgaaccaaaagttccaattgtccctgaaaagccagtgcaatcagaaaaaagtgaagaaagtccaaaattatacaaaatatccgcagctaaaaagttaccaaaaacaggcgatacacaaaactgggcgggattgggaatgattcttctagccctgtcaataagcggttttcttataaaacgaaaataa

SEQ ID NO: 2199 - DNA, 1518 bp, Listeria innocua; identical to SEQ ID NO: 632

SEQ ID NO: 2200 - DNA, 1086 bp, Listeria innocua
atgaaaaaatttattctagcaagtcttgcatgtacgaccttgattagttttagtcctttagcagagcaagtcgaagtaaatgctgctacaacaaacattgcaactgccccagaaaaaaatttacaagaagctcctccagccacggttgatcaaattttcccagatgatgctctagcttttaaagtcgcacaggaactaggtgtttcccaggatacagtcgtcacccaagaacaactagatactattaaaacaatggtctatatagctttcggcgtggaagatttaacagggatggaatatttacacaacttaaaacttgtagatttaagccaaaataacattagtaacttagataatctcgctaatttaacagaactagaaatagtatcacttaactacaatcaaattacagatattactccgctaatgaacttacctaagttaaataacttagaattaggtgttaaccagatctccaccttaccatccttcgaaaatttaactaatttaaaaatattaaatctaagtagcaatcaactaaaagatatttcggcgctaaaagatactcctctattaactaatttatctatttcagcaaataatatatcagacatcagtgtcctttcagaattcgataatctccaagttttttatgccgacagcaatcaactgacatctattgagccattaagaaataaaacacaactagaatacttcaatgctaattttaatcaaattaaagatgttacacctctcagtaccattccaacaattaagtcaataaaaattgaagaaaatcagattagtgatttcagctcattggcaggtcatcgcttagaattgtttgaagctgctggacaaaatgtataccttccagatgttgcgctcggtgattccactaatattgtaattaaagataacttcggagtaacattacatgattgggtttggtacactccaggaacttactcaaatgatacacttacttgggaaaatgcaggcgataattccgcttactttttaaataaacaatatccaactatcccttctgtcacagtaactgtctatcaaacagtcactccataa

SEQ ID NO: 2201 - DNA, 660 bp, Listeria innocua
ttggaagatattagtttgaacatacataacctaaaaaagaaatacgacgacaagaccataataaataatttgagtattacaattaattttaatcgtaaaataactttaataacgggaatgaatggttctgggaaatcaacattagcaaaaataatagcgggaattattttacctgacgaaggaatattacaaatttcaaatcataccaatttttcaaaatggacaaagagaactacgtactatttatcaagtgcagaacgaggcatgttttataaattgaacggcagacaaaatattgaatatttaacatcattaaaaggtacaaataaaaacgatgtgttaaaaaaactatctacttactgtgagaaattaaattgcaaagatattttagaaatgccagcagaaaagctatctacaggtcaaaaaaagaaagtatttatcttgtctgcgttatgttcgaactgtcagctattattattggatgaacctacaaacgggctggatgatgagagtttttatgcatttattgaaattctagctaaattaaggctagaaaaaaagatagtattaatttctcatgataaaagatttttagatatgccgaatatagagagaataatttttgaaaaaaacggtgagatttattgggaaggatgttag

SEQ ID NO: 2202 - DNA, 786 bp, Listeria innocua
atgatggattattttggggcttgtataggaacacttaaagcaaatattcttattctttttaagtacaagaaaaaccttgtttcggaattaataatgtttactggtgtatatctggcaatattaatgttaaatgatagcagttcagtaactaagttttatggtgcttctgcaattcaggggcctattcttttattaattggatatatgttttgggcattttctgatatggcattatcgagtacggccaactggattagtacggatgccaagatgggactgctggaacccaaagtccaaagtatattaccttatcctgtacaatcatttttgttacttttaatcagtattttagaaacaattatcattcttttggtagttgtccttatttccattttcgctgacaaaattagttggtcgcaagttccattcatttttttatccgtcatcatccttttgccgtctgttataggaatgtttggaatgggtctggtattcggcggttatgcggttaaagagaagagtttaggaaatttcgtaaacttgtttgcgggcgccttaatcattttttccaatacatttatcgtgggtctaccaaaaatcatttatatcataccatttacttcgggcgtggattttacgagtaatctgtatgtttctggcaaagtcgatttaggtctcctaagtataaatttatttattaatacaatttggcttattgtaggactgatattctttaattattcgttaaaaaaagaaagaactgttggtagttttgatactttttaa

SEQ ID NO: 2203 - DNA, 1218 bp, Listeria innocua
atgttaaaaaacaaaaattttagatatttatggttaggtcgtttaatcagtaatgccggggatagcatgtattacattgtattatcttggtatattttaacactcactaataattcgttttgggtaggagtagttaattttgctatttttatacctaacattttttcctttttatttggtcactggatagatacacattccaagaaaagatccttacttttatgcgaattcgggcaattatttgcgattttaattatggttatcagtattttgttggattttcaaagtcctcttttattatgtgttttagcatttttagcttccctttttggtatgaatacatatactatacaagacgcaatgactccgtttatcataaaaaaagaacagctagcaagtgctcaatcatacatgtctgttgcttataatggtactgaatatttatttaatgctctaacaggattcttaatcaatattttttcaacaatcacccttttagttgccaatatatttaccttcttattcgcaatattttctttttcaaaaataaaagaacctacagatgcaaataataaagaacctgaacctttcttaaaaaatgtatttaaaggcttcattgaactatttcaaaataaaaccattttatttatcgctatcggtggaggcatggcaaattttatgttcggcggattgaatgtctaccaagtgttaattgcaaaagagcaaggaagtgccattgtgcttggactattgacatcaacaatggccattggaacattgattggctcaactctcctagccaccttattactgaaattcatggaaatcggaaaagtactaactttatgcacactcatgtttgggctaacaatgttaataagctcttattttgtaaattcttcccttattattcttatctgggggattgcaagtacttttttaggagtcacccatgttgtccaaaaaccttttttccaagtattaattcaaaaagaacatttgggcaaagttttcagcgctctttatagcctaagtgtagccacattaccgataggagcattattatttggttattttagtagtcatagtttaaatagttctatctttcttcttattttcggcggaacctatttacttatcagtttcatatatttcgtaaacaagcatatttttaaattcactatctcagataaaataaaaaaaggacttctatcataa

SEQ ID NO: 2204 - DNA, 801 bp, Listeria innocua
ttggaattatcaataaatattctaaatattattgggattcttttagaaataggagtttcaatatatattattatttcagaaaagaagaagagcaagaatcgaaatagtgaagctgaaaatgatttgattcaacaaacgaataatattataaataatacgcaaggagataatgcgtcatttaattatactaacgttcttatgcaatcaaaatatcaagaaagagcgtatcgagaaatattaaatgatttaggagataaaaaagaaaacaagcagaaatctaaatatggaaaaaagtgttcatatttaagaaaagttattaatattgtctgtttgggaataggtggtttttgggcattttattattttgatttaatgaaaataacatctttcaatacctatctattaaatgtgttatttcaaaccatttatacattagccacttttattttgattttttcactttccaattttgttaaattatttctaattcattttaaagagtataattatatagttttacggaaaatccagttattcttaacaactctttttgcactgctaggtgctactatttggctatattttgattggagagcgaatttcagaccattatttaatatgtacactgaaagttcgtattatactttaggtattataatgcttggattagtattttatgtattccatcaaatggcacaaagttttttattaaataatatttgggttcctaaaaaagcagttaaaatattatttgtatctttaatttttagtttaatagcatctatttgtttatttatatga

SEQ ID NO: 2205 - DNA, 192 bp, Listeria innocua
atgaaaaaagtaacccataatgacgtactggcgcaaattgatactgtgaccagtccagaacaacaactgaacgcaggaatagcacaagagcaagtcagttctgtaagacaatcaaattcaacaaaaacagacgaatccgcgagcacagcaagtattttattcggtatgctcactctttctaaacgtaaataa

SEQ ID NO: 2206 - DNA, 462 bp, Listeria innocua
atgttgcgaaaaggtagttggttgctcatattattattgatagtattagtggcattatcagcttgcgaagatagggagaaaggagacgctcataatgtctcggctaaaagggaaaagcagattttctcttcaaaagatactaaaaagggatggctagagctcattgcagcagatgaaatttcaagtcaagatgattctccttgtatttataaagcgggggaatctgtagaaaaattggaagtgcatatgaaagaattaagtacggcgagtttgacctatatttacattgacggctacatcgtacaaatggaacaaggcggcgagctctcttttcaaattcaattaagtaaaacagaattaaaaaaaggatttcatgaattaacggctgttcaatatcaggaaaataaccctgaaactaaaaaagtagagttattaaaacgcgctaagtatgaagtaaaataa

SEQ ID NO: 2207 - DNA, 540 bp, Listeria innocua
gtgagccggatagatattgcggaattgaatgactttctctacggcttacgaaagagtaacgcggaagctaaaacgatgattaatcagattaaagatgcagcgatggattatgcccaagacaatagtttaaaaggggaagcagttactacatccaaacgatatttttctagcgcctatacaagtatttgccagagcatcatcgaagcactagatgaaagtgaggagcggctcgcgcaatatattcgcgagttcgggagccaagtggatagttcgccttccgctagaattgatgcagaaatcttacaagaagcgatggccaaggttagccagttgcagcgaaaagaagaagatttacaccggcaattgacggcaccgaacacgaagccagatatgcaacaagtctatgcagtgaaatcaagaagcgttcatacccaattgctgaaagccatcgaacaagagaatatcctagaaaaatatttggcttttgaacaaagtcatggcccgttttttaatgcattagccgaactcattcgagcatag

SEQ ID NO: 2208 - DNA, 1971 bp, Listeria innocua; identical to SEQ ID NO: 661

SEQ ID NO: 2209 - DNA, 363 bp, Listeria innocua
ttgaatgagaaaacaaatgaacaaaaacgagcaacatataatgaattaattatccaaaaagaaaatcagatggataagttggtagaaaatcaaaaggaaattgaaaagtctctttaccaattagatgaagattttaaaagaggttttcagcgattaaggtatttgaatgaggataatactgggacgggaaaaaatgagcactatcaagctcaacaatgggatgatcatttggagagtaagcttcgacatcaagttcaatatgcacaagaagagtttaattattgttttcaaaaagagatacttgaaatagataatgagcgagaagaattatttaaaaaaaggagtgagattccttgggattga

SEQ ID NO: 2210 - DNA, 1611 bp, Listeria innocua
ttgggattgatttattcaagccgtgattcggagcaggtgataaaagcactctctaaaaatttagccagtggaaaagatgtagttgcacaactaaaagagggaagtaaaaaaattattcaggctgttgatggacgaaccttatctggagcagcttatacagcgggtaaggatttatttgtaaatcttgttttacctacaatcgaaaaagtaacatcagcttgtgatgcaattgaacacgaattaaacaggtaccagtcaaccaactcaatagtctcaggtgaaggttaccttgacgaagacatcttaaagcaacaaattgaagctaaaaaagatatgaatacatcaatagaaaaaactgttaccataatgaatatgataatgaagacaagtttaattagagcattatttgatgctgcacaagattgtaaaagagagctaaaccagatgtcggatgttcttcaacaggatattgaagaactccagaagaagctagagaagttatatgaatttgatggacaaacaaaaaacttatttactagcagtcttgatgaaatgaaattagcaatgcaaggtgttttgattttaaataatacaactgtaaatagcgatgggagttatcaacttcctgctggaatagataaaagctggtttacagaattgaaaagtgaaaaacaacaaactgaaatgatagagaaggaaaggaatgcagtaattaaggagttaaatgagttatttgagaaaaatccagcagtagctattgaaaaaattaaaaataatgatcgtttattcggttacgtaatcggagctttagataaattccctgaaggacttcaaaatgcagctcttggaatctttatcgcacaagagagttggaataaacttccaaaagatgttgctacaaaagttttaaatagtgctaaattcgctacatatatcagtaagacatctatcgccacccaagcgattgtctatagtggattgattaaactaaacgaaaaaggatggaatgtccttgctccaattggttatacaacaaaagttctatctaaaaccagcgagggagcaaaaataatagctggatctaaagtgggatttgatttatttaagaaattaggaccagtttctgattttattaaaactcataaagtgacagttgaaggtattggttatgctggagatgggtttagtataactgcctatgcgtatgatgaatatatagatcctaagagcccggcttatggaaacgcaagtaaggctatatatggaggtcttaatttgtttatattaaaagctggaccacttgaaggtgctcaatatggaggtttaccaggtgcattatttggaacagtgaatactgcagttcaagggatggagattcaaaccccatttaagtggttaggtgataatgggaaaataggttgggatggactaatgggatttggtacagattcagatgcagaaaaatggctggctgagcagtatgaattatatgatcaaagagaaaaaaatcttaatgaaggaaatgttggtaagataaaggaagattggtttggaaaacaaagtggccgtgtaaatgtaactgattttaacaagggcctcccaaggtggtag

SEQ ID NO: 2211 - DNA, 759 bp, Listeria innocua
atgatgaaaaatgtgagttatgaagaagcacgagatacaatcagttccaaagaaatagaacagattaatacaatgaaagaacatacatctagctatataggtaagataatggtgagtattttattcgccttattactatgtttaccagcaatcaattattatccaatatacccagcagtagcttgtattcttataggtagcctgttaattagatatgttgcgttacaaccaattttcaaagtaacaaactataacttggtattatatttagtatggcaaactgctgcaatcttttttatgattgtttttttacgagtagaggcagatagatatcacttgattccgttagtttatattattttgggctacggaggttctattttattaattcgggctcgagtaaatacatatgtgaaagagatatttgaaacgacagctaaatctggaaaaaaagtgttttcaaacataattactaaaattttaggagcttttctggttcttgctgtaattgctgttttattttatcgtggaaataaatggtggcttatgaatatggataccgcagtaggaaattcaagttttttagaatatgttgtgtggggaatcggtttgttcattttgcttattggctttactttgttgccaacattgctattttcgccatctcaatatgtaaaagcaagattgattgggaaatatgcagaggaatttcgaaaagcttatagatttacggagaaagaatggtacggagaaaaatag

SEQ ID NO: 2212 - DNA, 1233 bp, Listeria innocua
atgaaaaaaataatcgcgttaatcacaacagttgcacttctatcaatggttgtctttaactttattccgagtatggttgcagatgcggctagtacttccgagagcaatttgacttataaagatgtacgaaatggcttttactttgttggatatgaagatgtgcaacttgaaaaaggtaaaagttataaatatacagtagcttatgaagcaaatgttgacatgcaagcgactaatactgttacaggtcaatcagcaaaagcaggactatttataccaaattcgtctggcgtagaacttgatagtaacaatgtgactactacacagaataacgtagtggatgtagcaaatgacggaaataaagtatttacacatatatttgaatttacagtaaaagaagatacaaaagcagatattggtacttatttaggagcaggatctgtcattccaacgactccggatgcaacaattatttggaaaaacgtatccgtaacaaatgaaaccccagcagaacaagcagaagctccagttattaatgcagaagataaaacaatcgaacaaaacgaaacttttgacgcattaaatgaagtaactgcaacagataaaaaagatggcgatcttactaaaagcatcaaagtaactaaaaacacagttgatacgacaaaaagtggcgaatatgacgttgactatagtgtgacaaactcaagcaaactcacaactacaaaaagcgttaaagtaaccgttactccagtagaaacaaaaacaaacacagctccagttattgatgcaaaagatcaaacaatcaaagttggtgacctatttaattcgttaaaaggagttacggcaacggataaagaagacggcgacttaacagcgaaaattaaagtaacaaaagacaccgtgaacaatgcggaaaaaggcgtttaccaagtaacttatacagttacagattccggtaatctatcagcctctcttacaatcaaagtgactgttactcaagatggaaaattaattgttaatccaagcgatccgacaaatccagctgatccatccaatccagaagtaacaaaaactcctgtagaatttgaaagagcttcagttgatccaacaacgactaaagtaaatgtgaacaaaattccaaaaactggtgatagctcgatgatatgggtagtcttagcaggactaggcttaactaccattggcatcagctcttatcgcaaaaaagcaaatagataa

SEQ ID NO: 2213 - DNA, 651 bp, Listeria innocua
atgccaaaaattgctaaaagtgatcgattggagaatgttgcttttgagtacattaagaacaaaattacaacgggggagtatcctaccgggtacagagtagtagaagcgaaattgtctcaagaattaaacatgagcagaacaccaattagaagggcgattattaatctttgccattctggttttttagttcatcagtataatcgtggtgccttcgttcaaaacacagaggtaacaattactgagtttttttcgagaatgaaattggtcgaacttttagtgtatgaaagcacggaaaaattagctttacgggaagattatattgttgtagatgacatcatagaaatagcagaaaaagtaattcaatatgaaaaaaatagagaatatgagttaatgcggggtgcttttgaagattttattagcacgtttatcggtaagttgaacaatgattactttaatagagtaattcaagatttatggaatgaaataaatgacaacgcaaccaaagaagtaagacttattattgtttctgcgagtgatcgaattgcggaagaattagcgcacatgattgaaattttaaaatcatggaattacgaacaattaaaaaaatgttttcaacacataatgaacgcaatgattttaattgctttttaa

SEQ ID NO: 2214 - DNA, 627 bp, Listeria innocua
ttgaaaaaaataagctggatgattatcatgctgattatcgttgctatatcagtaggctattattttataaaagaaaatgagaaaaaaacaccacaagtaattaattacaaaacagtcgaagcgaataaaacagacttaagcgtctatgtttccgcagaaggtcatatcgtaaaaacagtaaatgaatggccagattataaagattttgcggtacaaattatggtggacgaactagaaatcaatcaaataaaagaaaaacaagcagcgaatgtccacgttgaagccgtagataataagatttacaaaggcaaagtttctgatatagatgaaaaaggcatcataaacggctcagtaacatcatataaagttacgattgatttggaaaatgatgatgatttgaaagaaaatatgtcagtaagtgctgacgtgctcgtggcattagaaaaaatgattctgacaatcccgatagaagcagtccacacagataaacaagacaaaaattatgtttatattgttgatgaaaataagcaaaaaaagaaaatctggattgaaacaggaaaagataatacaaaatctatccaagtagtaaaaggacttacagaaggacaacctgtgattattccttaa

SEQ ID NO: 2215 - DNA, 675 bp, Listeria innocua
atgattcaactatttaacatctcaaaatcctaccaaatgggagaaaacacaataaaagcattagacgacatatcgcttcaaatcagtgaaggtgaatttttagccattatcggcccatctggttctggaaaatctaccttaatgaatatccttggaattcttgataaggcgacggttggtgagtactatctcaataaaaagaatttaatgcgcgtatcagaccgaaaaatttctaaaattagaaatcggaaaatcggttttattttccagcaatttaatttaatgccccgactcactgcttttgaaaatgtagaattgccgcttgtatatcgaggtgtaggtaaagctgttcgaaaaagagtcgtattaaaaagtttagaacgagttggattattagataaaaagaaacatctacctgcccagctttcaggaggtcagcagcaacgtatcgcgatagcacgagccatagcaggaagtccggaaataatactagcagatgaaccaacaggcgcgcttgattctaaaacaggagaagaagtaatgtcgttgcttaaagaaattcaccgagaaggaaatactttaattatgattacacacgatcaagaaatcgcccaacaagcagagcggataatagaaattaaagacggcaaactctgtgaatggaacaaattatga

SEQ ID NO: 2216 - DNA, 1179 bp, Listeria innocua; identical to SEQ ID NO: 595

SEQ ID NO: 2217 - DNA, 417 bp, Listeria innocua
atgaatagacaaacagaatttattttgcttataataggcgcttcttttagtatcatcactttttttgcagcagcattatatgcactggtttttggatttagcgcaattgttttatcgggttcaccaatgacttatggtggttctgaagaaatgattatgtcttggatatttactttcttttctattattgctgtgatttttacagtagcatcagctgtttttggatttattggagcttttaaaattaaaaataacagctctaaagtaaaaacaattgctgtttgttttatcatattaggaggattgcaagttttttcaatacaaggtattctatttttaatcgcaggaattttaactcttacaaaaaaggaatacaaaacaaattttagagaaaatgaggggataaaatgggaatag

SEQ ID NO: 2218 - DNA, 510 bp, Listeria innocua
atgaaccgtaaacaattagaacaattagaccaaaagtgcctttatgaagtatatgatgacgagcaagaaacaaatgattttcgtgtgggatatatcagagctatttttgattcgttcattatattggaaaaataccatactagagtgggatttgatggttttgcactcgtagcaaatgaagctatttttaaagttcaacaagatactcaatatctgaagccatatcaaaatttaaaccgcccccaggaacaaatacctgaattaagtgaggacggcgacacactattgaattttcttgaatggacgaaaaagaacaacaaattagtggaaataatgactgtctgggatgagctaattatcgggacaatagaaacgattgaagagaatttagtgatgcttaataccgttgcaccagaagaatttcaatctgacgggaaatgctttatagaatgcgacaatattgttgatatttgtattgatacagcgcgactgaaatttattactacttaa

SEQ ID NO: 2219 - DNA, 6504 bp, Listeria innocua
atgaaaatacatgcaaaagcaaaaaatgtactagtgagcttgatagcatttatgttattcttttcactattgcctggttatgcaccattagcggaagattcacctgtaggagtggatgcgccagacaagaaagcgggagaacaagcaccaacagaagttaaagaagaacgaacagaaaatgaagtggtttttgataaccacgacgggagctttacaaaacaaatctttgcggatcctatcaatatggaagttgacggggatatgaagcgcatcgatgcgaatgtggagaaagaagcagattctgacatgattgttccaaaacaaaccccattagaattaggcttcttagaaaaaatggaagacggggcatatcagaaactaacaaaagctggcgcagaagttacttttcgcttaaaaggagcacgtacaggcgagaatgaacaagcagtaacagaccaaccagcgacctacaaagaaaatgaagttacttatgaaaacgtatttcctagaacagatctaaggcatttaacttttccacaatcagttaaagaagacttagtactacaggaaccaaatcaagtagatacgtatgtttatcaaattgaaacaaaactagatttagaactagcggagaatggcgatgtgctattcaaaaataaatccgacgaaacaatgtatacgcttccaaaaccagtcatgacagattccaatgtcggcactgaaaccggggaagcggcacaatccgaaaatgtttcctttaaagtgaaacaactgaccaaaacagtgtatgaactacaactaaaagtagatacagaatggctaaatgatgacgctcgcgagtaccctgtctatattgatccatctgttcgtttagataaaatttataatgccaatattaattcggctaaaccaaccgaaacaaatattggtagtaagctatgggattctggtcaaaatgcttatacgttaaaactcggtaaatgggacaattcaacaggaaataatgccgcttttttaaaaatggatacatctactttaaataaagcgactatttctaaagcaacattgaaagtctataacatttggcatatgtccccaacggttaaaaatgatctttggtattacgaggcaaatgcaaaatggtctccgtggcaagtgacttggaatacagtgccacctgtaacgagattagggagtgttaacgttggtcgtggtgagtgggcgaacttagacgtaaccaaaactgtccaagcatgggcaagtggctcacgagtgaacaacggttttcgcttaggtactaacattaacaaaaactattggaaaaaagttgtagcaagtgaaaacaataaaaattatccctatttggaagtgaattatacgtacgcacaaccagaaaaaccaaccgtgaaaacaagttcaaacggtgttggaactggaacaggatacatggatttatcttggaaagcggttcctggtgcgactagttataatattgttatttctaatggatataaatacgaatattttaatacaaaaagtacagcaaccacttggagtaccaaaggaaagaaaattttcccaacaaatgacgaaattgctaaaggagaatttgaattccatcatgatggcaaaggaaccgacttcgctcttgatccgcgagcgcaatatgaaaatgcctttcaagccggaagtacttttggacttcgtaatttaacacgctatttattcagagtacaagccgttttcccgggtggagaaagtccgaattccgacttagtattcgcctacatgccaatcgagaaaccacaagctcctgttgcaaaagcgtattctaacttggcacataaagaaacaggatacgtggaacttaactgggaaaagagcccaatggcagatgggtataaagtacttgtctttaatgggaaagcctacgaagaatacgatgtcggcgcagaaacaaagtggacgacacaaaacaaaggtatttggccaaccaaagaagaaattgctgaagggaaatacgctctacaccatgacggaaaaggcgcagaactcgcaaaagacccttccccagtgtataccaattctggcggaaattataaagagcgcacaaactactggttccgcgttatcgcttatcaaaaagcaggaaataacacaactagcgtgcaatcagaaccagccacaccatctattccagaggcactcaataaacaactaggaatggttgattactggacaagtgtgccagttcgtggcggcgaagtgaatgctacaaacggaaactttttattccatgaaacagatttcaacttagaagggcgcggtccaagcattaatgttaaccgtacatttaatagccaagatgatgcaactggcattttcggtaaaggctggacaagtacgctcgaagaaaaactcgtagaagaagaaaacggtaatatcgtttgggtggaatcggacaagaaaatccatcgtttcacaaaaaaaggcgataaatacgaagctccaccaggcatttactccgagattactaaaaacgcagatggctatttgaaaatagaagaagataagtcagaaacacgctttttagttgatggacgattaaaatccgaaaaagacacaaaaggtaacgaattaacatacgaatatactgacggcaaactcacaagcttgcgcgacgcttccggacgtaccgttactctcacgtatgaaggcgagctcgtaaaagaacttgtcggaccagaagaccgtaaaatcagctacacgtataatgacaaacaggagctaatcagttcatccacagcccgcggaaaattatatcgctacggctacacagatggcttattaacctcgatttacgatccaaaacatacagaagaaaaaccatacgaaacaacttttgcctatgaagaagaaaaattaacagaaataaccgatccagtcggcaaaaaaacaacactttcttatgacaaagcagaacaacaaactactttaacaaacgagaaaaagaagaaaaccatttattcctacaatgatgctggaaatccaaagaaagaaattgtagatgcagatggtctcaaactcacaacgacctacacgtatgaatcaaataacttagtaaaagaagtgaatcctaagggacaagaagaaacgtacgcttacgatgcagatggtaatattacgaaagcgacagatgcatacggaacagaatcatacacttacaatgataataacgatgtaacgagctcaaccgatacagaaggacgaaaaacaaccgttacttatgacggagcagatgcggtatcagaaacacttgcgacagaatcccaagtatcctctgtaacacagtatgatgcctatggaaacccaattcgcggtagtggcgaactttcttccggcggtaacttacttcaaaacagcggctttgaaaaaggagcaggagtttccaactggacactgattcaatctgatgcaaaaggaagcatgacattcgataacacacagtcagctccaggagcacttggcggcagcggttccgttaaactaacgagtgaagcaaattctaccgtaaaaggctattcatccgttacccaacgcgtcgatgtagaaccagaaaccacgtatacatttagcgcctggattaaaacatccggaatgacaaacgccgatgcacttctcattggccgtttacaagatgcgaatgcaaaagacgttaccgatgccggcgtatggcaatccaaccgcgccacatcgatcaaaaagaacggcgactgggtaaaacgccaactaacctttaaaacatctaaaaacacgcgccaagtcttgctttatttggacaacgaacaaccagctccacataaaggaaaaggaacgatttggtacgataatgttcaatttgaaaaaggcagtgttgcttccagttacaacccagtagtcaataacagctttgaaaatcataatggaacacttccgactggctggatgcgtacaggcaataccgcgctgacacaagcaaaagtagtcgataatcaaagccacagcggtgatagcgccgtttacttcgagcgaaaagcaacaagtgaagcttacacgcatattgtccaagatgtacccgtaaatcaaaaagaagccaaagcattaacaatttccgcactatccaaatcagaagacgccaaagcaaacggttctgttgcaacgatgtcgaacgattattcggtatggggcacagtatattatcaagatggcacaacttcttctgtacaaggtcaattcccactcggaacgaacgactggaaccgaagtgctgtagttgttaaaccgaccaagccagtcaaaatgattaaagtttacaccatgttccgcaatggtttaaccggaaaagcttggtttgacgatgtacgtgtcatagaaggcgaagtattaacaaaaaatgaatatgacgcttccggaaactatgtaacagctagctatgacgaagaaggccgcaaaatcagcttcacttacgatatttacggcaataaaacatccgaaacagacgaaaaaggcaacaaaaaaactttaacttatgatgcagacaacgcacttatagacaccaaactagcgaacggcacatccgtagcctataagtacgacgacaatggcaacaccaccgaaaaaaatgtcactgcatctggcaaaacgcaaaaaaacatctatgaatatgacgtagataacaaaattaccgcatttaccgacgcactcaatcgcacaatcaagtacgaatacgatgcagccggtaatgaaacaaaagcaatcatgccaaatggtcgcgtaaccgaaagcacatacgattccgctgaccgcatggacgggattaaatggaatgataaactagcatttaaattccaatacgatccaaacggcaaccaaacaaaagtaaccgacgaaattaacagcatcgtaaccgacaaaacctacgacgatgccaaccgaatcaccaaagtagccgaacgaggtggcgacgtaagctacacatacaaagacaaaccaacaaaagacaacaaagggaaaacagacaaagtcggcgaagtagccattaaccacggcgactacacagcaaaaacaagctacacatacaacgacttagaccgaaatacccgcgtaaacgatggaagcaaaaatgcctattttgagtttgacgaatttggaaacatcaacgtctacacagcaggaaacggcaccgcagccaactacacctacgatagcacgcaaaaagtcaccaacgcagctattagtagcgcaagcggtacccaaattttagacgaaaactacacctatgacgcagcaagcaaccgcacaagcattgacaacaaacaagacggaaaaacaacctacgaatacgatgcagtcaaccaactaactaaagaaacactaccagacggcaccgtaaaagcatacacatacgatggcttcggaaaccgcacacaagtagcaatcagcggaagcgagacaaaaacaattgacgcaagttataatgatggtaatcaactagtttcgtggaacggagaagcgctgacgtatgacgccaatggtaaccgtacaagcgatggcaagtacacgtatacatgggataccggggaccgtttaagcagcatcacgaaaaaaggtgagagcgagccgtttacgagttatacgtacgatgatgataaccgccgcttgtcgaaaaccgtcgatggcgtgacgacgaattatcattatgacggagatagtattgatgttctgtatgagactgatggtgatggaaaagtagttcgtcagtatgtttattcggatgataatgttcgtttagcgatgaagatgaacggcaaaaccctctattatcactataatgcgcatggcgacgtgattgcactcacggatgaagcaggtaagattgtcgcagaatatgcgtatgatgcttggggaaatgtgctgaaaaacactgcctctacagaagaagccaaagcgaatccttatggttatgcaggatacacgtatgacaaggaaatcgaacaatattacttgatggcgcgttattacgaaccagagcaaggcgtgtttaccgcttacgatccgtacccgggcgatgaagatgatccgcaaacgatgaatgggtataattatgcgaataataatcctgtgatgatgtttgatcctgatggtaatgttgcatggtggattgcggcagcaggttatggggcattcgaaggtggggcagaatatttattaacaactaagaagaagaattggaagggttttggtaaagctgttgtaaaaggagctgttttaggtcttggatttggtaaattatacaaaggttttaagtttttaaaatcaacaaaaattgtaagaaaaaattcaaaaaaattcaaaaaaacaaagatatataaaaaatttagtaagaaaaaaaaggttgttaataagccctcaactaaacgaaaaaaggctaagaaaaaaaagaagagccgaaaaaaagggcattaa

SEQ ID NO: 2220 - DNA, 555 bp, Listeria innocua
atgtccacaaaattcatgtatgaaagattactaaaatgccaagaagcaaataaactagtagccatctatgcgtcacgcgaagacgaatatttcgaggcgggctacattgaagcagttacagcgagtgatgttatgtttcgctcgagacgttcggacggttacgaagagggacatgttgttcttccgttagaattagtgtaccgaatagaaattgacacggcacatttaaaaacagccgaactactcgcaaaacatcttaatcaacaaatcagctcaggattatttgagaaagcaccaaacaaaaagcattctcttttcgaaattgccgctgattatgtataccaaagtaaagagataatctttattgacatcataggcgacgagacgccagtaattggaatgatcgctgaaaatgaatatgaaggattagaaattactttagtggatgacgaaggtcgattagatggaacttgttggataaagaaagaagatattctagccctgcgtttcggcggcagtgtagaacaagatttgatgaacaaactaaaaaaataa

SEQ ID NO: 2221 - DNA, 564 bp, Listeria innocua
atgagcaaattaactagtgatgaagtcgaatttaaaataaaaaaacttatcgatttagaaaaaaatttaccgaaacaaatattttctaatccctcaaaatacaatttttattttgaagaaccagaggctatttatatggatacgaatgaatttgtccatatgattaaacaaattgtggaaattacacaggatgagaaagcatatattagtgaaattttgaaagaagataaatttttacaaaagagcaaaactatctttaatttaaaggaagtaatagactttacacaggaagagggtagtatagtagaaaatttggattttgaaaatataaccgagacaacgatatttttatattgctatatgtattttccttctgagcaactctttcttttcgttaatgaatattcagacacagcccttttagcgattgataaaaaacttgatattgatattccttggtatgatgtagaaacatttttgactgtggagaatctggggatgaaagataggctatacaggaagttcaggaagcgtttagttaataattataaaaaacatgaataa

SEQ ID NO: 2222 - DNA, 933 bp, Listeria innocua; identical to SEQ ID NO: 545

SEQ ID NO: 2223 - DNA, 639 bp, Listeria innocua; identical to SEQ ID NO: 445

SEQ ID NO: 2224 - DNA, 1053 bp, Listeria innocua
gtgattatgacaaataaaacattggtttgtgaattcttatacatagaaaaggaaatgaccccaagtgagttctttttaaagaattttgatctgcaaaagacggtggaaagtcatcaccaagatgggataatcgatatttctttaccatctctcaaatttaattataataaccaaagttataaattgttatataatgaaatagaacttaataataatgtttatagtatatccatctctcttctttatgaaaataataaagaaaaacatgcaattatcttagataaagtgatgggatttataaataatagaagaaatcacaattttaatttaatattcaccagaaatgatagtttaaagtatttttcaataagattatataaactactctatgattttgaaacaaacttacgatcattggtcaaaatcatgttgattcctgataataaacaagaatggcataaagtgataactagtaaagtagacgtaacaacaaagttgagtaagacagctaaaatcgaaaaaataattgaggaattaagtatcactgatttagagttaatgttatttgacaagacgtttccaaagggatcaaatttatttgaagatgaactatctagaaagcaagtagaaaaattaactaggcaagaaataattaacgttattaatattaatagaccagcctctttatgggatacatactttagtcattatattgagtacgatgtaatgaatgccatgaaggtaattaaaactactagaaataatgcggctcattacagagaatttgatagtgaacaatataaagaaacacttaaagtacttaataaggtaaatcctttgataaaaaatactattaaagaattgcaatctttggattccgatgtattaataaaaatatcccaagctatggaggaaaaagtcgcgaatgtgtttgaagagatttctaaaaacacaattaatcttactaaggatttgaaaaaagcattattaaatgacctttcgaacgatttgaatcctttaaaaagtatggtaatccctatgaaggatatttaa

SEQ ID NO: 2225 - DNA, 2499 bp, Listeria innocua; identical to SEQ ID NO: 674

SEQ ID NO: 2226 - DNA, 1224 bp, Listeria innocua
atgagatacataatgattgatactaattacttttgtgagaaaaaatttgatacagaaacaatcatattgaaagacttcaaaaaaatgattgaagagcaattaggtacatttttgtataatgatattttaattggagaatatgaaagtaacttagaaaaattaacaaacagtaccagagaagcgtttaaagcatttttacgtaataaaagcactttaaatgatgttatacctatgtttgggaaaaaaagacttgaacaaaaagttgcagaatatgaagaaaaatatttaaaaccttatgcagatagattttttgattatatcgagatgattaacggaatagatataatgattaaggatatagatattgaagtactttttgataaatattttaatggagaaccaccttttgaagctaataaaaataaaaaaagtgaatttccagatgctataattttcgaaagtgtgctaaattggacagaaaaagaatcaaaatttaataagtttacagatttgttatactttgttacaaaggataacggcttaaaagaagcatttgctcctactttggttcatgttgtagaagatttaagggattgcttaattagttcactagcagaagaggtagaaagaaatatcagtgaaaatattgaaagtgatgaatttaattgcgcgttaaatgatttgttagaagaaaatataaaagattttcttatggaaggatatctagatcttgataatggagaaatagaagcagaggccctgagatataatatagcaggaattggaaatatggactatgatttgttggcagcaaacaaagatgggaaagaattgaaaattataatcgccatctcaaatgtggatctagacttaattgtaaactattccgaagtatacccagaatcaggatactatgatagagagactggcgaggtatttggcttagaggtacatgaaacaaagcgtaatataggggtagaattaaagctagttgtagaattatcaattgatgagacaagtatgctctctaaaagattaatgtgctcaatagcagatatcgagactgaaactaatcctatattaaaggaagatttgtacaattatgaatacgatttaaaatctagcaatgcttctgtgttaattgatatagaagatatacaattaaatattgaagaaatggtaagtccctcagaatatttggaagatcctactatgttattttaa

SEQ ID NO: 2227 - DNA, 183 bp, Listeria innocua
atgacaggaagccgatatagtaagaacccgacttactgttcaaagattgtacttcaagcctattatttcgaaacaagaaataagcctgttgtgcaagtatttccgtccttagttactgtgtatgatttaccaaactatttttcaaaagcatataagccacaacaagtgaaatactttaaataa

SEQ ID NO: 2228 - DNA, 171 bp, Listeria innocua
atgaaaaagtataaaaagtggtggataacgattggattagtgttaattctttgcattatcggatatatttattggtttgcaatccctaaacatacagcaaatgaagcagtggatgattacatagcagcgcaaaagataaattcaacgcaagttaaaacgagggatatttaa

SEQ ID NO: 2229 - DNA, 189 bp, Listeria innocua
aaagattggactagaggaggatactatgtcacgatagtgtttaaggatgaccctaatttagtgtatgaatacaactacaatagtaaaaggaatacgccttaccatattaatctacttgtttttaaagatggctcgagtcaagaagatgaccaagtgaagcatccaccactacaagagcaaaaggattaa

SEQ ID NO: 2230 - DNA, 546 bp, Listeria innocua
atgacaacaattccactctcaatcccaatgactatcttatttgtagttgtttttgaactagtatacttaggctttaaaaaattcaatatttcaaaatctactttgggtacctacatgtttgtagcgtacttggctattttaacagaagtagttttattgccgtttaatctaacagctgccggagaaacctatccattagaggcttacttacaaataattcccttccaaaccatactattttatcttaaaaacatcccaaatctacacctaatgatccagtttttaggtaatgtagtcctacttgttccatttgctatttatattaatcggtttaaaaatatttctgttttaaaaaatatagttttagctttgggaatttctttaattatcgaaattagtcaaggaatcttaaatttaatcacacaatatccgaataatattactgatatagatgatgttattttaaacgtttcagggtatgtactcgcttggctcattttttcatcatttaaatcggataataaccgccctaaacctgtttcctaa

SEQ ID NO: 2231 - DNA, 588 bp, Listeria innocua
atgaaaaaagttctaatgccacttatgcttctcgcagttttattctatgggtgtacatcacaaaacgaaggagtaacgaaagaaactgccatttcgaagacgtttattatacgggcggactacgctattccagcaaatttggatgaactagtagcgaacagtgattcgattgttaaagtgaaatttctacagaataaagacatcggtaaaaatggaaatacgattagtgaagtagagattttgaaaaactataaaggtaattttaaaaaaggcgaaaaagtagatatttcggaaccgtggtatttaagtaatgataaatatgtcgcggttgaaaactatattgcacttgaaaaaaatgaagaatataccttgtttctaaacgagggtgacgataaagtaagttctatagttagcatgggttatggtaaattcagtgaaaagctccaagaaaaacaaggcgttctggcagattttgacaaacttggcgaagttcaaaaatacgattttatttccgaaagtaaggatgaagtaaagaattaccaagcaatcaaacaacaagttttcgaaaaatatcaagattcaaagtaa

SEQ ID NO: 2232 - DNA, 2988 bp, Listeria innocua; identical to SEQ ID NO: 678

SEQ ID NO: 2233 - DNA, 1590 bp, Listeria innocua; identical to SEQ ID NO: 642

SEQ ID NO: 2234 - DNA, 1194 bp, Listeria innocua; identical to SEQ ID NO: 599

SEQ ID NO: 2235 - DNA, 930 bp, Listeria innocua
atgaaagcgagaaagagaaaagaacaaacatttcatgagtattttaaagaatgggtagatctttataaagttggagcaatacgttcaattaccctgcagaaatactatgtaacagaacaaaaaattcaagaacttgtaccagatttaaaaataaaggatctagatcgttatacttatcaacaactgctaaatagttatgcagttactcatgagaaacaaactaccatggatttccatcatcatctgaaaggggctattttagatgctgtagatgaaggtgtgatcagtcaaaatcccacaaggaaaattgtgattaaaggaaaaacacctcgacctaaaaaagcaaaatttttaaatcaatttgaagtacaagccttattaaaagaattaaatttaaaggaggatataaattgggattggtttattctattaatcattaaaactgggcttcgattttcagaagcattagctctaaccccttcagacttcgatttttccaaacaaaaaattattattaacaaaacctgggattacaaaatggttactggttcttttcagccgacaaaaaacgaatcttccaatagaaagattcaaattgattggcaattagcaatgcaattttcccagttaattaaaatgaaagatccagataaaccgatttttgttaaaagcagagtattcaattctacaattaataatcgtttaaaggtgttgtgtgaaaacgcaaatataccaactatcacagttcatagtttacgacatacccatgcttctttactgttatttgctggagtttcaattgcaagcgttgcgaataggttagggcattcaagtatgactactactcaggaaacataccttcatattattcaggaattggaaaatcaagataatgataaaattatacgccatttatcaatgttaatgtga

SEQ ID NO: 2236 - DNA, 1206 bp, Listeria innocua
ttgcctcttttttatgtattttatcactactttaacttaccatttcgagcttgggaacagcgtaagttgagggatattgctaattatcgaaatggaaaagctcacgaacaagttgaagatgaagatgggaaatatacaattatcaattcaaaatttatttcaactaatggaaaagttcaacgatatacaaatgaacaagttgaaccaatctttgatggagagattgccatggtgttaagtgacttgccaaatggtaaagcactggcaaaactctttcttgtgaaagaagatggtaaatatactttaaatcaacgaattgctggtattactccaaatgaaaatattgatccaatatttttgaatttcagaatgaatcgaaataattattttctaaaattcgatagtggtgttactcaaacaaatctatcaaaatcacaagttgaaaattttattgctttatatccaacttttgatgagcaatacaagattggtctattttttactcagttagatgacactatcgctcttcatcagcgtaagttagatgctttaaagctgatgaagaaagcattctcgcaacaaatattcccagagaataataggaagaagcctaagatccgatttactagtttttacgaagaatgggaacagcgtaagataggagaatatggttatttctattatggaaagagtgctccgaaatggtctgtggctcaagatgcaactacaccatgtgtaaggtatggggaattgtatacaaagtttggaccggaaattgacattgtacactcctatacaaatattgataaaagcaacttaaaatttagttctggaaatgaagtgctagttccacgagttggtgaaaatcccttggattttgccaactgtagctggctttcgatttccaatgttgctatcggcgaaatgatatcggtttataatacagagcaatatcctttgtttattgcatactattttagaagtaaaatgaagtacgaatttgcaaaaagagttgaaggtggaaatgtatccaatctttattattcgtatcttgaggatattttaatatcagtaccatcaatagaggagcaaaagaaaatagctgaatttctgaataaaatagatattactattaatcttcttcaaaataaactaggtagaattaaagaattaaaaaaagcttatctacaaaatatgtttatataa

SEQ ID NO: 2237 - DNA, 2106 bp, Listeria innocua
atgaaaataaattggaagaaagttctggtttttgttttgattttggcgcttatcagtcccgtttactcgaaagctatagagacggaacaaagcatatcgccagaacaaccagtggagccggtagtagaggaagctataaagaaaactccagaaaaaaaagaaatggaaccagaaccaaagaaagagccagagccaccaaaaaaagaagagattgaaacaaaaaaaccgtcgaccgaacctagcaaactgaaagctaacccttcatcaatacccgagaatagtacgatagcagatttatttccggatccggtaatggcagaatcggtagttacaaacttaaataatcaaatccgctataaaaatgattgggttgtgactgatgttattacacaaaaggatttagataatctatcttcttttactgatttatccacagtaattataaaaaatctggaaggtatacagtatatgactaatctaaatagaataagtttaaggtcagatgatgatttgcaaggtctatcagctttattaaaagcaccaaatggatatcctaatttgcaggagataactattttaagaggaggaattacggatatttcaccgatcttaaaaataaatgcaccaaagttagcattcctaaacttatctcagaataagattagtgatttatctccatttgctaatctgccgaacaattttcctgtgctggaggaaataatacttgcgtctaacaatatttcaaatgtcgagcccttagctaaatatgctagtgctagtatgaggtttcttcttcttaatagcaatagtatttctgatttatcgagttttaaaaataattctatgccaaaactagtcgaaattgtgtgtacttatcaacaagtttatttagaaccaatggatctttcagcaaaatatgattttactttaaaggcagcagaggctaaaggtgtgaacaaatcaattcctataactgtgttcgatccaattgcgacaattgataatacaacttccatgattacttggaagcaaaatgtcatagaaaagaaaccagaaatatttttaaaagaaggtggatttcaagaaggcgttaaatatggatgggatgaaactactccggttaaggatgatattggcaaggtaatctttgatggtacattttttcaaccattagtatatatagtggctccaaaaattacatcatatgaaaaacaacttatttatgatattgacacgccactcacagaggaacaattgttaaaagatgcaaaaatcgtaacagaccaaccatcaaaaatcacaactaattttaaagacaaaataccgagttcgccagatcccactaaatatgtagtgacaatcgaagcttctaatatagatggaggtgagtcggtaaatgtggatgttatatttcaaccaaagccacctatcataactgcggatgaagaatatacctatttagttggtgaagctattgatgctaatcaatttagattagacgtgaatgcgactttgactggtgttggttcgctagtggatgattttgagtcagtagtagacctaacgaaagctggtgattatgttgtaacgctgtcgtctcccggaaatccaccagcttctcaaacagctattcctgtaaccgtagttgttcacgtcagagaaagtatggagctccaaattcctaatgattttcggatgggtatagatgaaaattcagaatcggtgccgatattaaatagaaaacaaaccctgaaatgttatggggctgacggaaaagtagatttaaaggtgacagatagaaggagatcaaagcaaggctggacgctaactggagcaatgacaacatttacaaatagcagcggtgacatcattcaaagttcgctaaagtatcaaagtaaatcatcaggtagcagcccagtttacttaaataatgcaaatcagcctattgaacaaaaacaagcaactcctacagaaacaggctttgtctctactattttcgacttagaggatagtttatcaatagaaatccagcctaacgatgctttagtgggggatgcttatgaatctaaggtaacgtggactctagaagatgcgcctaggccttaa

SEQ ID NO: 2238 - DNA, 294 bp, Listeria innocua
ttgaaaaaaataggattcattatattttgttgtttattcttattcgcagcaccattttatgtagaagcaaagacggcggatacagcgactagtaaagcaagcgttgtaattaagaaagaccctcgtaaggccaaaagtgggacagatgatagaacaggcacgtatcctacaaagttccccagaaagcttccgaaaactggggagtcgggcgatttaccacttattattgccggaattagcctcattttatttgtaagtaaaaaacactttaagggggtgagggaagagatttaa

SEQ ID NO: 2239 - DNA, 648 bp, Listeria innocua
gtggaggaattatttacatacaaagaatttatcaacatgatgcaaaagcatgggataaaacacagaaaacgtaaattcaaacacggcgaaaagattacaagcgagtcttctaaactagatagtgttattttactaattgagggatatatcagtagctatactcgggaatcacctcagaaattactatctatttttgaacctggaatttttcttagatattgtattttggaagaatctcccccaactacagagcacattgtattatcagaaacttgtgagatttatgaatataagaagcaagatgttgaatatgcgctcacgttatttccggaaaattttggttttcagtatttctttttaaaaagatttgaacgccacttattttatagatctttactaaacaataaggcgcacaaggataagctttactatgcaataaaatacttgggtgaacttatcggaagcaaggatgcacaaggaaatattaccttaccgtccgaaataaccttaaaagccttaattgaatatagtactttatcgaaagccgcattttaccggcaaagagtgtctttactagagaagaatattttgaaaaggaaccggaagacattcatcgtgcaagatggaattatggccgaattattatga

SEQ ID NO: 2240 - DNA, 1995 bp, Listeria innocua
atgaaactgaactggaagccactgttgctttttatattattattagcgctttgttctcctgtgtattcattcgcggaagaaacaagagaagcactagcaccgaaaactactgaaacgccagaattaacaaaaacgaacgacaacttaaataaaacaatcttaacccctgaaaaaaaacaagcaaacaataattcagaaaccgaaaataaaaccaaagaaagtcaaacaaataaaaaagcgcagaccccacttaaaaacctaaaaaatacccttcccccgattccgcctaatagcaaaatttcggatatttttaaagacccggggatggctaatgcaatagctgaaaatttatcaacatacaataataaaaggagtgtggattctattgtaacagaagcagagttgaaatcaattacaagtttgtggtccgtaaactggggtgtttacgataagcccttaattaaatcaattgaaggaatccaatatcttactgagctggaaactatcctttttcaaaagaatgaaataacagatttgtctccgtttttgaaatcacctaatggatttccacgcttggttaatcttgtgttggagcatagtaaaataacagatccatctgtattaccaaaaataaaaatgcctttaatagagcacatcgctctcacgggcaaccaaattatcgacctgtctatcttaaaaaacattgctgatgattcaaaaccaaaacttagaagtgtaggtttacactcacaagagattgtgcttcctaaattaaccgtttctagcaaaaagcctttttcattaattagtatgaatattataggagattctatttataggagccgttcatattctccagctgcaacatttgacacttcaacttcaactattacttggtcgaaagaagtaatgatgaaaaaaccaaatataacatttacggagcgtgtatatccgccaaaggttacaactgtacctggcgtgcactactactggcgagataattcagtctcacttggaagaattagaatggacttctctggatatgtaaaacaactacttgagtacctcggtcctccaaaaataatttcatcgaaagacgttctatatgaagtaaatacgccgctaacggaaagcaaatttttagaagatgccaagattgttacagatcaggaaacaactattactactaactttaattcgataataaaaaatacttcagttgctggtgtctactttgtaacggccacagcgtctaatatagaaggcgaagtttctaaagatataaaggttgttattaagaataagcaaccagtcatcactgcaaaaagtgaatatacttatttagtaggtgaaaacgttgactcgaatcaatttcgacaagacatcaatgcgactttaactggcccagggagcgttcctaatgatttgaaagatgactttgcttcgaaggtggatttaaataaagcaggcgattatttcgtcgagctttccactcctgattggccaccgttaaccgatgctgctaaaccagtgacaattttagtacgtgtcagggaaggcttagagatgaaaatttcagatgattttcggatggacgtggatgaaaatactgaccccattcctatttctaataataagcaaactctaaaatgttttgctcaggagggagacgctgaaatagaagtacttgatagaagaagggcgaaacaaggatggactataactggaatgatgagcccttttaaaaacgagaaaggagacatattagaaacttctcttaagtatcaaaaagagtcatcagaaagtagtccgatatttttgaatgcgactaatcaaccaattgaaacgaaacaaccaactgaccaatctggagaaattacaactacttttaatttgcaaaataacttaactctagaagttctaccaaatgatgcattagtaacgggaatttatgaagctacggtcacatggactttagaggatgtacctagataa

SEQ ID NO: 2241 - DNA, 291 bp, Listeria innocua
gtgaaaaaatatattctaattgttataggttgtactgttttatttctttttccattagaaagtagcgcgtatacagatacagcaataagtaaggcaggtgtaacttttgtgagagataaaaaccgccctgcacaggtttttggaacagatgacaggagcggcacttttccttccaaaggtccaattaagcggcttcctaaaaccggagataatagtgatgtttactttattttactaggtgtaagcctccttttaattgccaaaaagaacttatttaagggggtgaagtaa

SEQ ID NO: 2242 - DNA, 843 bp, Listeria innocua
atgataagaaaaacaacaaaggtaatttcaacaagtttattagcactaggattaatcgtgacaccggtactttctgaagattttgcgtctgcagcaactaaagtcaataaagatacaaaaggaaccatcaaatttgataaaagcacaacaccaactcccgaaccaataactccagatccaactgaaacagacccagtagtaccaagtccagacaatccacccgtgagttcggacggattatggatacttgctatatccaactgggatttcggaactcaaagtgtatctgctttatcttctggagctttgaacattcatgccgaagatgacacgctttctacgtatacagatacaaatggcaatgggcagcaagacttaccaggagaagcatccgtatcaaaaaaagtgactccgtatgcacaaataagtgatttacgtggtactaatactggttggacgctttctgttacagctagtgagtttaaagatagttccacgccagctaaaaaaattcaaggtgctcagttaacgattccgaaatctactgtcgcaacagtcaattcgacagcgaaagcgccaactggttatgataatataactattccgatgacgggtctcagcacggttcctgtaatggcagccaaagataaacaaacagcgacaccgactaactttagtgatgacgaaggtatgggaacttggacagatagctttggttcagcagcaaaaaatgcaacacaaacaacaaaacctaaattatccattccacaaaataccgttattgaagatggaacttatcaaagtaagttaacttggacgttaagcgacacgccagcaatttaa

SEQ ID NO: 2243 - DNA, 1032 bp, Listeria innocua
ttgaaaaaaatattcgctattgtctttgtatgtttttttacttttattttttttcacggtcaaacagtggcagcagcgaaagcggaagggaaattctctgtcaaagcaatcctgcctgagaaccaagcgtctggtgttacttattttgatttacaaatggctccagaagataaacaaactataaaagtagaactaatgaaccaaggaaaagaacaaatcacgattaaatgtgtggccaatacagctgttactaacgaaatggggtacgtagattattcgattccaaaagcaaaaacggataaaacattaaagtatccattttcagatatagtaaaagcgagtgaatcagaagtaacacttaaaccgaatgaaacaaaaatatggtctctcgatattaatatgccagcagagagttatgatggcattattttaggtgggctacatttccaagaaaagaaagatgaagaaaaggaaaaagatacctctaaaaaagaagtccaaattaaaaatgagtacgcctatgtaatcggagtgaagcttacagaaaaaacgacgatcgtaaagccgaacttggaattaaatgaaattaaaccggcatcgcgaaactaccgaaatgtagtcgaaataaacttgcaaaatacaaaagcgaccttagttggcgggatggccgtggatgcaaaaatatataaagacggtagcaagaaagtattgcgtgaatcaaaacgaaccgacctttctatggcaccaaactccaactttaattacagtgtggactgggaaaatcaagaattaaaacccggtaaatacaaagtggagttggtagctaaaacagccgatgataagtgggaatgggtaaaagaatttaccatttcagaggaagatgctaaaaaggctaataaggtggctctaggacttgagaaagactatacttggatgtatgtgactggcggtattttactcgtgctccttgtgatagcaacagcttattttattggaaaacgagctaggaaaaaagacgaggaatcacagtaa

SEQ ID NO: 2244 - DNA, 1791 bp, Listeria innocua; identical to SEQ ID NO: 654

SEQ ID NO: 2245 - DNA, 2496 bp, Listeria innocua; identical to SEQ ID NO: 673

SEQ ID NO: 2246 - DNA, 882 bp, Listeria innocua; identical to SEQ ID NO: 530

SEQ ID NO: 2247 - DNA, 429 bp, Listeria innocua
atgaacaaaaatataggaagaactacagagttttgtttaggcttatgtggggggatatttggaattttagcggcaactactatgttgggatttacgataccagatataggtgatatagattttagttattggttgttatccattttattaacgagcatattttccatttctggagtagtaggttctttgtttgttcgtaagcaccatctacttggaggtgttttaatgctcggtgctgcaatcggtggagtactgtcacaaaatatgttttttattatgtatttagcttttccactcctcttgattggtggattagtagcacttattcgagggggagagtttttaaaactatttagtatgtggtggttttatatcgttttagcattatctatctttgttccacttttacttttccggggatattactga

SEQ ID NO: 2248 - DNA, 411 bp, Listeria innocua; identical to SEQ ID NO: 312

SEQ ID NO: 2249 - DNA, 1566 bp, Listeria innocua
atgattaactacatgaaaaaaacaatcacaatgtcgctactagtcgtatctctcgtcttaattagttttattagttctccaaacgccaatgcagccgaaaaaagtattttaacatcaccgaaaccaataaatgaggtttttcctgatgaaaatatggctaaagtaatagctgaagtcacttataagagtagttcagcagatgaagtatctcaggcagatttagataacattacaaagttagatggcagcacctctgaccgtatgccggggccaataatttattcgatagagggtgtcgagtatcttcaaaatttatcggaatttaatatttctgggcagtctgtaagtaatatttcaccgttagaaggattatcagagttagaaactgtatatatttctgaaaataatattaatgatttatcaccacttagtaaatctccaaaaataaaaatattagatgcatcgaataataatataagtgatataagcacacttagctcattgccaaatttaaattcggtaagactaaataataatagtataagtaatattagtgtgttaagggatttcccgacaaaccaatttgtttatatttatttggccgataataaaatcaaggatattagcccgctcgctggtaaatcgtttcaacaattaacacttaacaataatgaaataagtgatattagtccattaagtaagatgacactatattcagaggatccattggccgatgatttttatattgatattagcaataaccacattagtgatattagttcgttgaaaaatgctgattttggcaaattagattacttttttgcagaggatcagagtattgtcaatcaacccaaagctttttctacaaatttcacactggaaaataaagtgaaaaatatcaatggaacacttgtgacgccgaagaatattagtaatagcggtagttattcaaatgctatcttatcttggcaacttccaagcttcgtagcaaatctagattattctttttctgagacaactcagattggcaggtcaacaggggaatttagtgggaaggtcacacaatcccttgttggaggatatacagtaacctttgacaatgaaggaacactatctacaaggacttttgctagtgatgaattagtaactgaacccgcaaagcctagcaaaacagggttcacgttcactggttggtacgatgcaaaaactggtggaaagaaatggaacttcgctacagataaaatgccagcaaacaatatgacactatatgctcagtatgaagaacaaacaacagatccagttgatcctgcaagtccagttgccccaacaaaaccaacagatccagttaaaccggatgaaatagtctcctccgagggatcgggtgatatggagattaagggagaacaatctggaactatagcggcatcagaaaacgcaacttctttagatgactcaaaacaacaaagaacactaccaaaaacaggtgatactaacttatacttggtgctgattgggctattatttgttggatttgctagtttattttggaagaaaaaacaaatttaa

SEQ ID NO: 2250 - DNA, 1974 bp, Listeria innocua
ttgagaaaaacttttctaatcctcatttgctccatgctactcgcaacactcgtccccttcactttcccaaaagctaatactgaaccgacgtcctggattgaaacagaattagatggtaacgaagctttcatctcggcaacagagagaaatctcaataaaaaacgagaagatattacactagcagatgtagaaacaatcacttctcttgatccagtaggcgcctcttctatacctgataatataacagactataaaaatttaactaggctttatataacacaaggaactttgacggaagtaccagagagtattggtgaactcaaaaagctaacctttttaagtttttataataataagctgactgaatttccaacagttgtttatgacctaccagctttaaattcgcttctattacaacgaaataatattagtgaaatccctgaagaaattacgaatatgtcttcccatttatcaagtctcgatgttcgtaataacaatttaatttccattcctgataagatttttacaactaaatgggctagccgcagtggccaactaattatagatacagaaggaaatcaaattacttcagatgttcctgttgattatttagataactataataatggcggaaacatgttagagaattacaattatcgtcaaaagcaagatcaattggtttataaaggcgatccaatcgtagttccttacaaaacagactttaaacaactgactcctgataaatccaaactaggattagcttcaaataatgcgttataccctactcacgaattcgaatattacgacgacggttcttcaacgcttgaaaacggggtagccacaacagaaggtgaaggtttcattacgattaaaagcaccttatcaactacctccaacccatttgcaaaagtacgggtgccaatcgttgtggaagctcctccagaaggctccgatgtcacagtcgaatacaaaagtaccacaggagaaacaattgctccttctgaaactttaaaaggtttattagaagcaaattatacgtctgaagctaaaacgattcctggctacacactgacagaaacgccagctaatgcgaacggtactttttttaatgatccacaaacagtcacttatgtttattcaaaagaccccgttcctgctaaaccagttactgtaaaatatgttgatgataaaggtaaagaactagcgccatcagaaacattcactggttttatagacgatgattatacttctacagaaaaaacgattgaaggatacacattagtagaaacaccagcaaacgccaacggaaaattaacagcagaccaacaaacagtgaattacatttacactaaaaatattattcctgctgagtctgtaacaattaattatgtgagcgatacaggtaaagagttagcagaacaaactgtcttagatggcaatattggagattcctattcttcttttgccaaaacaattcaaggttataagctaactacaacaccaacaaatgcgaacggtacattttctgatactaaacaaagcgttaattacgtgtacactaaagacaaatctttactaaaagcaaaaattggtaaagtcgaagtagaatttgttgattccacaaacacgccaatcagtaatcctttaatagtagaaggagaaattggaaaaacgtataaaatcactcataaagaaataacaggatacacactaaaaaaagagccctctaatgagctcggaacatttgatcaaacaccgaaaaaagtcacttttgtatatcaaaaagaagacagttcagaaaaatcaccatcgaacaaaacaacttttaataaatcgataacaaaagcagaatcaagcacagtaggaatgccaaaacttccaaaaactggtgataagagtccactaattccttcactagtaggaatcttgcttttaagttctgccactgttctttggagaaagaatcagctgtaa

SEQ ID NO: 2251 - DNA, 333 bp, Listeria innocua
atgttagaaattaagcacttaaaaaaatcttacaaacttggaaagaaaaacgagactcctgttttgaaagatattaatgtgacgattcaagacggggaatttgcggcaatcatcgggaaaagcggtagcggtaagtccactttgctgaatattattagtgggctagataccgactattccggacaagttttatacaatggcgctgatttacaagatatagacttagacgcctatcattttaatcatattggttttatttttcaaagctttcatttagttaaacatatgtctgttattgaaaatgtcaaagttcctttatatttgaatgcctaa

SEQ ID NO: 2252 - DNA, 1254 bp, Listeria innocua
atgatagaatatgatgaaagaatctacaaaaatattgttttgtttagcccatttatcaaaatcggaaaaatccaagatgcatttaaacaaataagcacaaaaaaagaagaagagtattcattgaaaaatacacttaaagagtataatcgaaagtttagagaaaaaaacaataaatcctatgattatgcttcaaaaagtctagctgccatggtaaaaaatgaaattttaactattgagcaaattgacgaaatactatttattattactgaagattctttgtttaattcttacatttataagttatcaagtgagcaattaaaaactaacggggaaagattaatcaattggaaacttccaaataccattgaaatacttgaaaatataggaatatctacaaagaaggattttaaggtatgtgggtataaactagttgaaggaactcctggtaccgtggaatcattgagactattattaattgatagtcaaatacttcaaagatatgataaagaagaggatgaaacttataattttatttttccaactttagtagaatatgatttcagaagacaactgttgcatattcgtacacaagagattaataatattattaatacagaagacaaatttagaactgcatctgggcgcataaaaaatactcttacttttattgattcttttaagaatcctataaaatataaacatgtaagtaattttaaagaaaaactatttaatattgaagaaaatttactaaaagaggtaagaaataaagttaataaagaactagattcttttaaagagcctattaatgttttctgtaaatcaatagatgcaaaatataaaaataaaagtgagaatatttctacagctgactatgttaaaacatctattcaaaccattatagccatgaatatagttcggaatcctttaggcgatattactagtattaagtttagaaataaatcaacagatgatgagagcagctatagtgaagttagcatccgagataaaaagaaccattgtatctctgttgataacctttattggctaaacctagctgtattgttagatgtaaaatctgtagagtctatgaaattagttctttacaaggataatctcacatcacttgtaaacttagattattcattaggtacaggtaatattaaacttttaaaaaatacagctggtgaagatggaacaatgcctagtcaagtgaaatacgattcagttctagacgaactagttaaatttatctaa

SEQ ID NO: 2253 - DNA, 723 bp, Listeria innocua
atgcatttgaaaattgcgatatgtgatgatgacaaggtagtctgtgcccaaattgaaagtatgattctacaatatgcgcaagaatctgggtttgatgtcaccattcatatattttatgatggaagttcactaatggaagggattcaaaatgatgataattttgatttaatctatcttgatattgaaatggatggaatcaatggtgtagatgttggtatgacaattagggacaaattaagggatcataagatgcaaattgtttatgtttctggaaaaggacaatatgatcgtcaattatttgatgttcagccattattatttattccaaaacctattgaggaaagtaaactagtaaaatctatcaatttggcaagggaaaaattggcattaacaccaaagttatatcactataaaaaacggaaagaatattttagtgtttggatggaagatatcatctattttgagaattctggtaggaatgtgaaaatcatgacaattgatggcacggatctatttgttggaaatattaaagacatagccaaagaagttctcccatacggatttattcaaattagtcaatcgattattgtaaactataactttgtgagtaaatattctcgtgaggagattattttaataaacaaagaaaaaattgcaattccaaaaaataaaaggaatggcgtaaaggaacaatttttaagagaaagtgataagcatttataa

SEQ ID NO: 2254 - DNA, 1302 bp, Listeria innocua
atgatattcaatatgcaaacttttttcgttcatgtttatgttagtggattggagtatttactaatatactttcttttttcacgatataaaccaatgaacccacgagtgtcaaaggagaaactcattctaattttttgcatagctagcctagtacaagcattttttgattcatttgaatactttaccatcaatgtaatagtttctgcggtattatttctagttgtatctttcttcttttttacaaagtggcaggatattttgatgtcttcaatcattgctacagcagtaatcgatattggagaaggtattgctttaatgtcattaacgagtacagcgataggaaggcaagatgtaggagaatttatgttgcaaccttcaaatacaatgctactttttactatttctcgtttgattagtttgggattagtgctgattattttaagatttagaaaaatacgtttaggaaatggcagtttaccaactatttattggacgacatttttatttattacaatgaaagacattttatgggtgttaatcttagcggattcccctgtagaaatatccttctactattgggcagcagttattccactcttaccggtatcctatattttattttattatacacgtcgctcaatagaaaaaatggtgaaaacgcaagtagacagtaaagtgctagatgaaaaaaataaatactatgaacaacagctcgttacaatgaaacaaacacttgagtcacaaagaacagttcggcatgatttaaaaaataagttatcacccctaatttatctagcggaaagtggtaagaccgacgaattggttgagcaggtacaagagcttggtagtttaagtgtacttggtaaaatctatgcagattcagggaatataacgattgactatattattaatctaaaactgcaagccctagcgaataaaggcgtaacaatattttgcgagataaatgtccctaatgatatagatgttgtcccctttgatttatcaacggttttagggaatttaattgataatgcagctgaagcgttagagtatgtgcaaaatgaaaagtggattgggattaaaataagttatcaagttggctttttgatgatacaggtggcaaactcttttgatggaattgtacatttagataataagaaaatcatttctagaaaagaggatactgagaatcatgggattggtttaactagtattaaaaaaattgctggtaaatatgatggggaagtggttgttcaacatgatgataagcaatttgatgtgattgtaaaattattggcttaa

SEQ ID NO: 2255 - DNA, 4161 bp, Listeria innocua
gtgaagaaaaaaagtatagcaagtctgttaattagcggtattatttttagtcagttagcaccaattgttagttttgctgtggaacaagaagcaaatgaaaagccaacagaactgacgcaattagaagaaaccccgaattcaacagatgaaaaaacaaatgaagaattaaatcaaacagaaatagaggaacaagaaatacaggatgaaaaaagtcaagatactgagagtaatacaggcacggaacattctcaaacacaagagtctagcaaggagtcaaatgagacaactaacacccagagtgaaataagtgctgaacaagctacaaaagagaaatctaatgtagaaaaagatgtaaatcctgaaataatcaaaggatcatggggaacagctccttatgaatataatcaggatactggggaacttaaagtaggcggtggagatttatcaaattggtataacactaccggttttattataagtaaagcagatgacgcagaagttaaaaaaattatttttacagaaccggtaaatgcaccatcagattctactagattatttgagggagatggattcaagagtttagaagaaatatgcgatttatcttatttggacacgtcaaaagtaacaattatgaccgctatgtttcatggtttgaaaagcgtaaagagcttagatgtcagtaacttcgatacaaaaaatgttacagatatgaggtacatgtttcagggaatgatagccttagagagtttagatgtcagtaacttcgatacaggaaaagtgagaagtatgtactacctatttgcgaatctgaaaagtataaagagtctagatgtcagtaactttgatacaaaaaatgtgacagatatgggcgccatgtttatgggtatgagtagtatagagagtctagatgtcagtaactttgatacaaaaaatgtgacaaatatgggcgccatgtttatgagtgtgagtagtataaagagtctagatctcagtagctttgatacaaaaaaagtgacatatatgacaagcatgtttagatattcggaaagtctgacaagcttagatataagcagttttgaaacgaatagttctacaactgaaatgaagttaatgtttgacggagccaataatttgtccctcattaagttaggaaaaaaaataaagttttatactgtggctacgtatgaaaaacttgttaatccaccccgcagtgcaccttataatggaacgtggacgaaccctcgtacaaaacgaacaattttgtcagactctttaacgatgaaatacgacggtgcaaccatgtatggatattatcattggtctgctgtaaataatatcatagccattgattctactatttattcaggtgatgactggaaagctgaggataattttatttcagcaacggataaagatttcaatctaattgattttccgctggtaacagtaacaggatccgtagatactacgacacctggtgaatatgaaatcacatatagtgtaaatggcttgactactacaatcacagtaacagtgaaagaaaatcaagcaagtgttgtagcggaaaactcaactatctatacaaaagaatcgtggaaagccgaagataattttgtttcagcaaccaataaaaaaggtaaaattgcagatatttcgtcagttaccgtaacaggggaagttgatgtaaatacaccaggagactacgaaattatgtatacaattgatggagtctctacaaaaataattgtgacggtgaaagaagataaaagcagtatagaagctaaagattcaattctttatataggtgatacgtggaattccaaagacaattttatttcagcgacagataaagatggtaatccggtggactttaaggatattaaagtagaaggcacagtaaacacgataaaaccaggaactaacaaagttacgtatttgtatggaaaccaaagtaaggaagttaccataacagtcaaagcggatcaatcaactttagaggccaaagattcaattatttatactggagataagtggaatgccaaagacaattttattacagccacagataaagatggtaatccagtagactttaaggatattgaagtcgaaggtacagtagacacaacaaaaccaggaactaacaagattacgtatatatatggaaatctaagtaaggaagttaccgtaacagtcaaagcgaatcaagcaactttagaagccaaagattcagctctttatgtaggtgatacgtggaattccaaagataattttatttcagcaaccgataaagatggcactccagtagactttaaggatataaaagtcgaaggcacagtagacaccacgaaagcaggaactaacaaggtaacctatttgtatggaaaccaaagtaaggaagttaccgtaaacgtcaaagcggatcaaacaactttagaggtcaaagattcagttatttatactggagacaagtggaaagcagaagataactttatttcagccacagacaaaaccggaaattcagtaggctttaaggatattaaagtcgaaggtacagtagacacaacgaaagcaggaactaacaaggttacctatacgtatgcaaatcaaagcaaggaagttacgataacagtcaaagcggatcaagcaactttagaagccaaagattcaattatttataccggagataagtggaaagcagaagacaactttatttccgctactgataaagcaggaaagacaattgactttaaaaatattaaagtggaagggacaatagataccacaaaagctggtaattatgacatcacttattcttattcaggagtgactcgtagtactgaattgagtaaaacaattacagtaacagtcaaaaaaaatcaagtaaacttggaagcgaaagactcaactctttatgaaggagacaagtggatagctaaagataactttgtttcagcaaccgataaagatggcaatacagtggactttaaagctattgaagttaaaggaactgtaaataccacaaaagcaggaacttacaaaatcacctattcatatgcaggcatcagcaagacaattacagtgacagttctagccaatcaaactaaaatcgtagcgaaagatttaactatttatgaaggcgacaactggaaagagcaagacaactttgtttcagcaacagataagtttggacaagcaattgactttaattcagtaaaagtaacaggttcagtagatattcaaacaccaggtaaatatcgaatcacctacagcatagaaggtgcatctacaaccattacagtgacggtcctagcagatcaaagtaaccttgttgctaaaaactcaacgatctatgtaggcgacaaatggcaatcaaaagacaactttgtttcagcaacagataaatatggtaaaccaattgatctttcacttttaacagtgacaggaacagtggatacgactacacctggtgagtatgaaatcacatacagtgtcaacggattgactactaccattacagtgacagtgaaagaaaatcaagcaaatattgtagcagaagattcaactattcatgcaaaagaatcgtggaaagccgcagataattttgtttcagcaacagataaaacaggtaaaaacataggtctttcatcagtttccgtaacaggaaaagtagacatcaatacaccagggaattacgaaatcacgtatacaatcgacggtgtaagcacaacaataactgtgactgtgttagtaaatcacagccaaatcgaagcccatgacgctaaaataaaagttggaacatcatggaaaccagaagacagcttcattttagctaaagataaattcggtgaaacagcagacttctcagatgtaacagttgaaggaacagtagacacaacaaaaccaggtaaatatcaaattacgtatacaattgatggagtgtcagtcactattacggtaatagtagaagataattcaaaaggttcatcaaacactatcaccatcccaccaactaatcactcaattggtgaagaagaaacaagcaattcaaatgacaaacaacttccaaaaactggagaacaacaaaataacttcatcttattaggtggactagttttagtagcactagcttttatcttaggcaaaagaaaaatgtataaataa

SEQ ID NO: 2256 - DNA, 993 bp, Listeria innocua
atgaaaaaaataagtttaacattcatgcttatctgtttgagtctaataggaggtattttctattcatcctctgcagtatcagcagcaggatttaattacacagcaacacctattttaccaagtagccaagaacaagatgttaccagttatttcaaattaagagtgacaccaaatcaagaagaaacattacaagttaaaatagagaaccagtcagacgaaaatcaaaaatttaaagtgattgtcaacacagcttcaacgaatcaaaatgggattatcgattacagtttacatgatgttgaaaaagattcttcaatgaaatattctattcaagatcttattacaagtgatttaccaatagttgaggtagcggcaaatagtgagcaaatcgtttctctcaagttgaaaataccagaagaatcatttaaaggtgtccttcttggtggaattacaattgaaccttttcaagatgaaactaagcaagaacaagtaaacaatgtatacacccgtacttttgcgattcaaatatctgaaaatgacgaaccaattccggctaagttagaagctggagaagtttctctttctcagattaattatcacaatgtagtcagtttattaattaaaaataaagcaccaactattattacttcagttgaagcaaacattaaagttactaaaaaaggccagacagagccactgttaaatgaagtgaaaaaagatatgagtattgcaccaaattctcaatttttccttcctgttgagtggaaagatcttttttcagctggtgaatacgagtatgaagtaacattgcatagtcatcagcaagattggaatttcaaaaaagcgtttagtgtgaaagacaaggaagcaaaaaaattaaatgatttatcaattgatgaaaaatcagatagcggaacatatatttacccaatccttgtatttattaaagtagctgttattttaatagctttgtatttgttcaagaaaaaaagatga

SEQ ID NO: 2257 - DNA, 774 bp, Listeria innocua
atgaaaaaatatgttgtcatcacaggcgcgagttccggcatcggctatgctaccgctaaacagtttgcaaaacgcaaaaaaaatctaatcttaattgccagaagagtagctaatttggtgaagttgaaaaacgagattgagaaggaagtacccgaagttgaagtcctaatcaaagcgattgatttaacaaaaatagaccgtttagagaaattattttctgaattggacctttatttcattgaaacgtgggtaaataatgctggtctaggatattatagtgaagttaaaaaccagaacctaactaagactttacagcttcttcatttgaatattgaagcattaacagttttatcggtcttgtatgttagaaagtatcatgaccaatcaggtacacaactaattaatgtttcttcagcaggtggctatacgatggttcctactgcaacaacttattgtgctagtaaattctatgttagttcctttactgaagcactaagtttggaattacgagaaagcggttctccacttcaagcaaaagtattagcaccagctgccaccaaaaccgaatttgggcaaaaagcaaatgatgtaagcgaatatgactatgacaaaaaatttaataattatcatacaagtgatgaaatggcccaatttttactagatttgtatgacagcgataaaatagtgggcatgattgataggacaacattctccctaactttaactgaaaatttgttttcttacgcaaaccaagcctcatctaatcaaaaataa

SEQ ID NO: 2258 - DNA, 372 bp, Listeria innocua; identical to SEQ ID NO: 276

SEQ ID NO: 2259 - DNA, 762 bp, Listeria innocua
atgggagacataaatattcagcagatgatttttcaatttattggaggacttggaatttttcttttcggtataaaatatatgggggacgggctgcaaatggcagccggcgacagactccgtgatattttagataagtatacaacgaatccttttatgggtgtacttgccggaattttagttactgtattaattcaaagtagctcaggtacaactgttttgacggtcgggttagtaagtgccgggtttatgaccttaaaacaagcaattggtgttatcatgggggcgaacattggaacaaccgtaaccgcctttattattggtattaagttatccgagtattctttaccaataattgctgtaggagcagtacttttattcttctttaaaaatcataaagtaaaaaatattggacaagtattctttggatttggtgcgttattttatggactggatttgatgggacaagggatgaagcctcttgctagcatggaagctttccatgagttaactgcgcaaatgagtacgaatccattcttaggtttgttaatcggaacgatctttaccgcggtagtgcagcttcaagtgcgactatcgggatattacaagagctatatgggcaaggtgcaattgaccttcaagccgcattaccagttttatttggagataatattggtacaacgatcacagcggttcttgctgccattggagctagtgttgctgctaaacgtgcagcagcgactcatgttattttcaacttattag

SEQ ID NO: 2260 - DNA, 858 bp, Listeria innocua
atgttgattttgccacttttcacatcgctcgtagcttatatgcaaggtttatttggactaaatccagaaatgaccattgcggttgctcacggaacgtttaatgtgacaaatacatttattcaattctggtttattggggcctttgcttggctagtaacaaaactaataccaggagacgattcgcgcattgattataaagtgaaacatctagatacaaacttaatcgatcagtcaccggggattgcacttgaaatggcacgcgaggaaacacttcgcatggcagattatgccaaattaggcctacaagaagcaaaagaatatctcgttaaccaggaaccaaaacatgccgagtcaactgttcaagtcgaagaagcagtgaataatttagaccggaaaattaccgaatacttaactaaaatttcttcggttgctttaacaaacaatgaaacagaagaacatgcgctgatgcttgataccgttcgtgatattgaacgggttggcgatcacatggagaacatcgtagaaaatatcgaccaactgattaaaaacaaagcgaaaatgtccgaagaagcttccacgcagctaatcgaaatgtttgaactgacaacatccaatttcgaacgagcagtaaaagcaatgcataaaaaagaccgagcacttgctgaagaaactattttggttgaaaaagatattgataaagctgaacgtagattacgtaaaagccacatccgtcgcttaaatgaaggcaaatgccaagtagttagcggaattttatatatcgatattgtaagtgatttagaacgaattggtgaccatgcaaataacattgcagagtctgttttagaattaaacgaataa

SEQ ID NO: 2261 - DNA, 279 bp, Listeria innocua
atgcctactaaaaaatataccgaaaaattcaaaataagccttgtttatttatatcgcaaaggaacttctaaacaaactctatgcgaggattttggagtttcaagcgcttcactttctagatggattaaatggtacgatgtgacagacgttgatttgaatgaagctgcaaacatcttacaaatgtacgaactaaaaaaacaaaaagataaattagaagccgaagttttagaacttactaaagcgattcaacttttcaattcagatttaaatacagtataa

SEQ ID NO: 2262 - DNA, 1470 bp, Listeria innocua
atgtttgagaaaataacaattggtataaaagtgaaaaaaaataatcattttgagcaaatagatgttcattttattaaggataactctattgtaaatgatgcagagtattataatcagggaaatgattatatgaataaaagagatgttataattcaagtaaaaatgaaggaacaaacttttaatgttgaaatcgaatttttaggttatatagttgatgaaattgatggaataagacaagaatttgaaaaagcttataatgaaaaaaaaatcaaaatggagtcaatggatgaagatgaggatgaggacgaatatgacaatatagatagtcgcaatgaaattaagccgtatgaccctaatttaatacgggttgaccagaaacaatttactattgaaaattcagtaagtaaaattggtaataaagaaattgatttgaatcctgattttcaaagaaaatttgtttggacggacattacaagaaagtctagattaattgagtcaattcttttaagaatacctcttcctgttttttatttatcagaagatgaggatggagtttatcatgtgttagatggtctccaaagattaacagttttgaactcatatttaaacaatgaatttagattgaaaaacttagagtatttagaagaagagtgtggaggtcgtttttttgcttctgaggaaaaaaaagcattagataatcctgatcgttttctttctaaaaaatatgttagaagaataaaagatactatgttaaattttaacgtggttgattccagaacacctgatcaggcaaaatatgatatatttcgaagaattaatactggtggaaagcccttgaatcgtcaagaaatgagaaatgcaatggcaacattgccgacgcgtaaattattaggaaagctttcaaatttagaaatatttaaaaaagctactggttattctgttaaagacacaagatttgctgatcaagagttaatacttaggtttgttggattctatttgatagatcaaggttaccgaaattctgtcccatacaaaggtgttatggcaacatttttagatgaggtcatagaggtgctaaataaatattattcatataaagatgaatttatagaaagaatatttaatgattttaaaactgcaatggaaaacgcatatttcatgtttggtgataaagcttttaaacgaacacaagtcattaataaagcattatttttagcagtatccagaaactcatataaattccatttcgataataaactaaatatagggagcaacatcaaaaatagagatgctttttttaataataacaataatgttttttggaattctagaattgaaaattatgaaacaaaaagtgatttgataaatgattcgcttagtacaggtactaatgaagtattaaaaatagaacattcttatactattatgcaagacttaatggaggttttaatgaatgaaacaaatttctag

SEQ ID NO: 2263 - DNA, 1110 bp, Listeria innocua; identical to SEQ ID NO: 585

SEQ ID NO: 2264 - DNA, 858 bp, Listeria innocua
atggatagtatcatttcaaatgagatttttcaaactataaaaagtgaaaatgttcaagaatatttaaatgacattttgattttgatgaatgaggttgataatcataactttaaaatgaaaaaacataaagatatttgggaagttgaaattaatggtgaatttttttatgagtggttatatagtaaaactccagctgagctagtagatttgaaaacagaattttataggcgtatggagagagtaagtgatattgatttagatgagtataaagcttttgagtcttttctaaatgaatctaatcctaagtataaggactatgataatcaatttttatttatcaagaaagataacatcaaagaaatacatgtactatcatctttaaaaagattttattctctaagaagatggtatttggagaaatgtggaaatcaaaaaaatttttataatgatttaccattattattccctaacatttattttcatgagaatgttaaatcaacattaagaaccttgaataatgactttaatttaattcttcccgaaattgtggaacatttatctgctttagaattatttcatcacttgaaattagcgaaagatggagattcaaatattgagaaatgtcaaaagtttgaaaagttttctcaaattagctgtagtcctgaaagtaaaagagcgacagcagaaaaactttcttttaaagatgaccggggagagaaaataaattgtgaatgtcacactaaattcaaaaaaattgcaagagacaaaacaaaacaagataggatttatttttcttttgggcagaaaggttatcaagaagaagcaattattgtttatcatataggaaaacatatttaa

SEQ ID NO: 2265 - DNA, 1920 bp, Listeria innocua
atgaaaagacgaattatcatcatatgtgccacagttattacaacgtttagtgtaaccggtacctatctctacctaacaagccaacaaacttccgcaccagaaagaacctctagcctttccaaaaaagacctgccaacatccaaatccaaagattccaatcaacatgataaagataaaaaaatcggttcaaataaagaaaacttcaaactagaaactggttttggcaataaaacattagaagttggtagattaactggaaaagtttcacaggaatctgttaatcaaaacaaaaatttcgaaattaaattaacaaacgacaaaacagcagcagcgaaaaaaaagggaagttctaagctgaataacactacaccgaataacactttgccgagtaaagtaaaacctgggaaagtaaatccaggtaaacaagaaccgaccgaagagacgccaatccaagatataaatttttatgataaagaacgagtaatggatccaattgacgcacaactagaatcattggatatagcggctcttgaagaaaaagagcatctcgtaattggggctgacatagccaaacttcaaaatttaattgcaactaaccaactaagttataaagaattagcaggaatttacctcaaccgaataaaaaaacacgatcaaaatggaattatgttaaatgcaatcacagaggttagtcctactattattgcagaagcagaacaacttgataatcaaaacgagccaaataaaccagctttatacggcatgcctgtcgttttaaaagataatattggtactattaccctgccaacaagtgccggtactgtagcccttaaagattgggtaatggagaaagacgcggctatcgtagacaaacttaaaacaaacggtgctttaattctaggaaaaactaatatgtcagaatgggcagctgcaatggacgacggagtaccaaatggctactcaggaaaaaaagggcgtagcaaaaatccttactcttccgaactagatccacttggttcaagctctggatctgcaactgctgctacttgtgatttcgctgcaattgcgattggaacagaaacaaatggttctatcattttaccagcaggagctcaatctgttgttggctttaaacccagtcaaggccttgtaagcaatgagggaattatcccactctcaagtagatttgatacgcctggtccacttacaagaacagttacagatgcttatttaacaaccaatgttttaatggatgaagcaagtcaaacaccactttccaaagatgcgctaaaaaataagcggattggactactgtctgatgatgaaagcaatgaagaaacagccatcctaaagaaaattaaaaaagatttaacaactgctggtgcaaccgttatagagggcatcacattggaagaattagaacaagtggatactgattatatcactttattaaatgccgatttcaaacgagatcttaatcaatttttacaaattaatcgttctcctatgtcgacattagaatcgattatcgcttttaataaaactaatcctactagaaacatgaagttcggccaaagtgaacttgtagcgtcgcagaatagtacaatgacgaaacaagaagcggataacgtagctaatgaacttattcatattacacaaaacgaactggattctgtgttacaaaatgaaagattagacgctatcgtatcagcaggtgtcggcggatctgtgaagttcctagctccaatcgctggaaatccggaactcactatcccagctggctatgatactgaatcaaatcaacctaagagcttaacttttgtctctaaacgtaatacggacatagctttactaaatatgggatatgcttacgaacagatttcaaagaatcgaaaaaatcccgttttaacaaaccaataa

SEQ ID NO: 2266 - DNA, 840 bp, Listeria innocua
ataaaaacatatggagctgctattcgtcaaatcagaaaaaataaatcactttctcaatcgtatgtatctaataacattcttgctcgcactactatctcgaaaatcgaaaataacaatattataccaaccatcactacaatagagaatatcgtcattaaattagatgtaaccatagatgaacttcggtatattaaaaatgattataaattaaacactcgagaagatattattgcagactttttcaaactcgtttctaatacacaaacagaactaatattgaaaattataaatagatgcgataattatttagataatcattttaaagacaatttattagaagatattagaatcgtgttaaaggcatcacttcttttaacaaacaatgaagttgaaaaagcacaaaagcttgttaagccaatctggaagcgattagaaaaaattgataatttctcactgattgagatacgcctcgtgtgtaatattctattttatttcccgctggatgtaatcgaaaaatttgtcccccgattattaacaatgattgataaatataatgctttagataaatctttaaatccgctaaaattagctctgcttatcaatactgccactatttttatgcaacataattctaccattacaacaagtagtttaaacgctgctattattattgctaaagaaattaaccgctttgatttattagctagcgcatattatttacaaggtgttaacactaatgattatagcttaataactaaggcgaaaaatattctccttactatcgataaagaagctattctattacaatttgaaaaagaatatttcccagatttacgttga

SEQ ID NO: 2267 - DNA, 396 bp, Listeria innocua; identical to SEQ ID NO: 296

SEQ ID NO: 2268 - DNA, 672 bp, Listeria innocua; identical to SEQ ID NO: 459

SEQ ID NO: 2269 - DNA, 1266 bp, Listeria innocua
atgaataataacaaattcgttttttggaatttttggaaaaattataaaaaaactagtaagcaatggttgtcaacgggagttgttactttttgcgggcttttactaataaacgtgactattttaattgtttttattggaaatacatatattaatgtaaattttactgaaaataattctctaaaatggatagaggttcagagtgatgggccttcgattccattaagacaaatatcaagaaatagagataatacgattacactattaccaaagtatgaaccctttatgagtggtgtaacgttcgaaaattatgatgaaaaaggaaatgttaaaatgtctatggatgttaatagtatttttgttccttatgaatctcttgaattttttggcataaacataaaagatattgataaaatacagtgggatgagggaaaagtaattttagtttccccaattgatgcaaaaagtaatgggctgttagatggacagaaattgtctgttccgtttgataaaacagcattcaataatgaatttgatttaagtgatactgaattagaagattatatagctaaaataaatgaaaataaaattgaggtaacagttaaaattcgagaaattacaactttgcctcaatatgaaaattattctttacttcctattcaattattagtcaatcaacacagtaaggttaattctataagtgaagacgaatttatttcgaatgctaaattaacagatgggttttacatcatagtaaagaaattcgaagatgtagataaaattgctaatgaatacaaagcaagaggttattctcttaaatatgcattagagtcgtttcaaaatctatccgaaatattatccaatgtaaagttagtaagtaattattttataatactagtgtcaattataattagtataacttttattaataattgctctcaaatattatatcatcgaaaacatgaaataggattacaacaagcgctaggaattagtaaaaggagcttgatttggagtactctaatagaattcgtttttcaaagtattatagtaatgattatcattcttccaacgattatttttgaatggtttgttgttaaaagtatgttaactaataacatagtggagattaatggtttagaaacagtacttgttgtttggggaataaattggattattatattagcaatttctttaataggagctacgttcccattaatgggaacgtttaaattaaaaattgtaaatctattgaattccataaactag

SEQ ID NO: 2270 - DNA, 1137 bp, Listeria innocua
atgaaaaaatattattgtatgtatttgattgttttagtattgttatctggctgtacaacaactccagtaaaggaaaatacgagtaatcaatcaatcagtaatataaaagtagaaaatataaaagacattattccaatcagcaaagaaatagtcaaggatcaaaaaattaaagtaaagtcctatattcttaatgcccaaactggagagcgtattaatacagatattttatttgatgaagttccgaatcttttccaaatgcatggatacgatatttactcttcagcatatcaatattataaagatcgtcttgttattggctgtcaatctggcggagggaaaagttatgtttataaaatatctgacgacgggcagttgactgtagacacagtcaactataatatactttattatgatgaaaataaaagattatatatagcacaaacagatgaaggatatgtaacattaaatgaaaaatatgcagtgaatgaagaatttccagtacttaaagatagcaatattactactaaagaccagaggtttatcttgcaagcctatggtgttaatgaaatttactatttaggaagatatggtgaaaagacttaccaattaatgaaatataattcaaatgaaaagaagttagttaaagtttatgatttggtagaagaattaaaacaacagggcattgattttgaggaaggatcagaaattaatccaaaaatgactctgtataaagaaggtcaaaaatcatatatttctatctcagtagatcgaatatggaatggaaaagatgactttaaagaaattaataaaaatatcctaataaatattactaataatgtagccatatttgataatgcttttgaggaggatgattctgcatatcctgaactagatttttcaagaaatgtaatgcaaagttctgataaaatatctattttcaaattaaatgaaggaaaaataataagagtgaatgactacaatgcagaagatataattaatgatggagataatcatattaactatatctatcgtatggatgataaggaaattataatgaatgtgccatcaggagttgttaaatataatattgctgaagataaaagtgaacaactatatgtagataggcttgaagaatga

SEQ ID NO: 2271 - DNA, 177 bp, Listeria innocua
atggatattcaagcgaaaatagcagtccaactatattcagtacgcaaagaaatggaacgcgatttagaaggtacgctccagaaaattcacgaaatcggctttcgttatgtgcaacttgatggtatgcgaggcaatgtccggcagaggttttacgcttacttcaaaaatatgagttga

SEQ ID NO: 2272 - DNA, 612 bp, Listeria innocua
ttacttcaaaaatatgagttgaaagttatcgggatgcacattaaacacgaccgctttatgaatgatttagacggtattattgaagaagcttattacttcggttgtaaaacagtttttgataaatatattgaagaggaagaccaaacaactgcgggttacattgcaacaaaagaagcactcatagaagcagcaggaaagttacacgcactcggttttcgcatcggtcttcacaatccggaatacgattttaatgaatgcatcaatggccgccgagtgatggattttatcacagatccagttaatggaatttgcatttacgcagaaccagatacgtactggattaaagcagccggacatgatgaaacggaatttattaaacgatacagtggacgggcgccaattgttcatatgaaagactttataagtggttttgagctagaagatatggataataacctcgttgaaatgggcgagggcgaagtaaatttccgcgctatcatcgagtggggcgaaactaatggagtggaatattattgtatcgagcaagatagatcgaaacgaaatatgttcgaaactttagaagcaagttacaactatttattagaattatag

SEQ ID NO: 2273 - DNA, 291 bp, Listeria innocua
atggcagaaaagacaatagtagaaaaattacaactgactaaatataaagaagcagtcattctaaatcaagcagatggagcggattattttcgaaatttagcgaattacgatgaaaaactagcaaataagcaatatgacttaattttcgattttgttgaaacgctagaagaattggtgtcttttacgaaagaagtcattgctactaaaaaactttccacgaatggttatttatttttcgcctatccgaaaaaaggcaataaaaaaattcgctacatatgtacaccgcgatga

SEQ ID NO: 2274 - DNA, 417 bp, Listeria innocua
aaaaaattcgctacatatgtacaccgcgatgaactcatgccggcgcttaaaaccgatgaggaaggttacgtcgacggtagcaccctcaaattcacgcgaatggttgcgcttgatgaaacatacacggttgttggtctaaaagaagcagcaaaactaaaagcgaagggcgtaaagaagaataatccttccgcagatgaatatgccgattatgtaccacttgtcgcagagtttttagcagataaaggtgatttacaagctttttacaataatttagcgacaggataccagcgtgtttgggcgcgttatatttattctgccaaacaaccagccacacaagaaaaaagacgtgtagaaatggtcgatattttgagccaaggatacaaaacaaaagatctttaccgccaaggaaaaaagtaa

SEQ ID NO: 2275 - DNA, 276 bp, Listeria innocua
atgaacaacaaagtgatggattttatgacaaataaatttgctccaaaagtaaataaagttgttaaaaatccttgggtatcagcaattcaagatgcaattatgtctgcgcttccactcgtttttgtcggttctttagtaaccatcgtttcacttcttaaaaatttatttccaggtatgccagatttttcgatgataagtaatttttcgtttgggatgttcggtttagttgtagcatttttaatcccgtattatctgatggagaaaaaaagggaatag

SEQ ID NO: 2276 - DNA, 1008 bp, Listeria innocua
aaaaaagggaatagcagtcaaaaattaatttccggagctactggacttgtattatttttaatgttactatttccgactatttcagcagatggagacgcggttttcattttatctagatttggggcaactggaatgttcttgtcgattacaacgggactatttgttggttgtgtaatgaattttgcggcgaaacgttcgctcttcagtgaagatacgccaatcccggatttcgttgtcggttggtttaacagtttactaccaattacttttattttaatcgttggttggttaattacagttcaatttaatattgatttctttgaagttattgtggctgtgtttagcccactcgcatcgattgtacaatcttatccgggctttgtgctttcggttttcattcccgcttttctttatacattcgggatttctggatgggtaatgatgccagcgatttatccagtttatatggcaggactcgcagaaaactcacaagccgtagcaaatggcgcaagtgcatcaaatatcgcaacacaagaaacagtgtacgctttaatttcaatcggcggggtgggtacaaccttatcactttcgattatgatgctgattttaagtaaatctttacagctaaaagcaatcggaaaagcagttattgttccgtcaatttttaacatcaacgaaccattattcttcggagcaccaattgccttcaatccatacttaatgattccaacgtggattaatgctttcttagttccaagcatcgcctatttcgttatgtcgatgaacttagtgagtatccccgcgcaatcattcttgctatggtacatgccttacccagtaacatcttatctcgcaacacaagacttccgcgcggttattgcttgtctagcgattatcgtcatcacatggctcgtctatctgccattctttaaagcatacgataactctttattaaaacaagaaaaattagatgcagtagaagcagagaaagaaatggtaacaaattga

SEQ ID NO: 2277 - DNA, 114 bp, Listeria innocua
gtgattgttaatgttctttatattcaggctttactgttaggacattatccactcaaacggaaagaaatggacttaatgaatcaaaatatgttacgaatcttagaaatgctatag

SEQ ID NO: 2278 - DNA, 870 bp, Listeria innocua; identical to SEQ ID NO: 528

SEQ ID NO: 2279 - DNA, 2325 bp, Listeria innocua
atgataaataaaaagtggatgaaaattgtaatgattccaatgctagttgtcccaatgtacggtttgacaactgtcagtggacaattacagaattcattaactggagaaaattcctttgttaaagacgctcaagctgcaacaacagcatcgcaacaagcgtttatagacaaaatagcacctgctgcccaggcatctcaagaaaaatatcatctgttgtctagtataactttagctcaagcaattttagaatccggttgggggaaaagtggacttgctacacaaggatataatttatttggtattaaaggaaagtacaatggacaatcagttatcatgtcaacctctgaatatgtgaatggtgagtggattaagattgatgctgagttccgtaaatatcctagttggaacgaatctgtaactgatcatacacttttattagtgaatggaacttcttggaataaaaacttatacaaaaaagtagttgatgcaacagactataaagtagctgctaatgagctacaaaaagctggatatgcaacatctccaacttatgctgctagtttaatccgagtaattgaaacttatgatttagcaaaatatgatgttttatacgacaaaattcttactcaaaaatccacttccggtaaagcgactgtaacaagtccaacagggaatggtgtttggactctaccttataaagttaaaggtgtacaatctgttagtccagctagcacatacgctaacaaagatattgatttagtatctgttgctacaactaaaagaggtacgtactatcaatttaaatataatggtaaagtaattggttgggtagatggaaaagcactgaccatatacgatagcgtcaattatgataaagtaaacgttggacgagctaagattacgagcgcacctggcaatggtatttggtctaaaccatacaatgtatatggacgagaatttgtaaccaatgcaactacttatgcccaacaagaaataaaactcttacgtgaagcgcaaaccgcaaaaggaacttattaccagtttagtattaacaataaaacaattggttggattgataaacgtgctttgactatctatccatatgattctgttatttctagcaaagctgttaaccttgatggacaaattactaacccaacaggaaacggtatttggacaaaagcatataaattagaaggcacaacttctgtcgcccaggctactcaatatgctaaccaagatgttaaaattagtgaagttgttgaaactcaacatggtacttattacaatattagtatcggcggaagagcaatcggttggttagataaaaatgcgattactctatatgaccaagctgagtacaataaagctgttacactagacggaactatcaaaaacgtacaaggtaatgctatttggacagaaccttatcggactgctggcacaaaattagtcgctcaagctgaaaaatatgccaacaaagatgttcaaattgtccgtgaggcgaaaacaccaagaggaacttactaccaatttaaatcaggtggaaatgtgattggctggttagatgtaaaagcttttgatatgtatgatgaaataacttcgaacaaagctgtaaatatggaagcagttattgaaaatgtcgagggaaatgctgtttggactgcaccttataagagtgtaggtgtaaaactgattggtccagcaagtaattataaagataaaactgtcaaaataactcgtgaagctcaaacaagtagaggaacatattatgaatttagctctaatggtaaaactgtaggctggttagataagaaagcatttaaaacttatagtactatagaatatgatgaatcttatgtacgtgatgcagttgtaacgaatgttagtggtcatactgtttggacattgccatatcaagtttatggtgtgaaatcagttgggtcagcatcaaactacaacaataaacaagctaaaattacaagacgtgctaaaacagatcgaggcatttattaccaattcagcattgatggtaaaaatgtaggttggttggatgaaagagcttttgatgtctatgatacggtagaatacaataatgtaattaataaaactgcattattgagcaacccaacaggaaacggtatatggtcagcaccttatagagttatcggtgttaagaatgtaggacaagctacctcatatgctaataaaaccgtgcaattagttcgagaagcgaagacaactcgagcaacttactctcaaatgagcgtagatggtaaactaattggttggattgaccaaagagcatttacgaatattagataa

SEQ ID NO: 2280 - DNA, 2007 bp, Listeria innocua
atgaaattttatataaaggaaattgagttaatagaatctaaaacatggaagatacatggtttttcagaaggaaaaatcagtagcattcaagcatattacaacgaaatccgagaatataaacaccctgaacaaaagttaaacattccttttactcaagaaaaaaattcattcactgcagttatttcgattgacgaacttgctgagtattctctcccaaataatgagactgcttggaaatttaaagtgaatggcgattatccatataatcatttgatgtcagatggacctattattaatcaacctttccaaccatctaattcactttaccaatatcattttgattttccagaaggtgtattaacgcttattagtagaccagtggaacttttagcttcattagaaagtttttcattaagcgaaaaattgatgacaggtactatcaaaattaattcttcgcttccagatggaccgtttaaagcaaagctactactaaaacgtagaccaacacctagcttttatttattccatgagcaagaacaatcatttgacttaggactggttacagataaagtcgttagcttttcgattcctgttaaagacttagcaactaacttcttagtagataatacaaatattttagatgccatgattgaaatatcgcctaaagaagtagagcaaggattaactacattcctatctattgacgccgaaagaaaaccatccattccgaaagaagtggaattggcttccccgcactttgctacactgcgctcttatgtcactggctcaagcagattatccttctatttcaaaaagaatattcaaggattagtaagtgtcagtcaactaaaagaatcaggtagcgatataactttacaatttaaattagaaggaaacttccatgaaggacaagttgtagcaaaacgactagataaaaaagcagatgtatttgaatatcatatggaacaagcttggccactaaaaaaaggaatagggaaacactctgtacgcattagtaaaagtgaattcttagctggccctaataacaaagcatatgcgacatgggattttttcctccgttccaaagatatgcctgatttacctattctagttccaaatacaattgaccttagtaatactaagttttttaatattgccaacaagaaattcctagcacaattaactaaaaatgatttcaataatttgtcatgcttaacggctcccgcgccaaaaattaaagaagatataactaaaattgctgttatgggcacttgttttagtcgcaatgcttttaactcatctccttttttcaatcctgattataaagcatttttcgaatgtagctttacgcagtttcactcttctattattagtgtaatgactgaacctgctgagagttttaatttggacaagtacaatgatatgaaaccagcagagaaaacaatcgtggaagaagattggaagaaagactttttcgttaacctaaaagagtctaattctgattatttccttattgatctttatcctgatgttattcgtccagtcatttggttaaataacaaaacggcaatcactttatcatatattatagaagatagtcaattacttaatgaccttccttatgaaagaattctagatcatattgataatgaagcattctttaatgagtggaaaggttatgctgatcaatttattgcaaaattaacagaaacattccctgctgatcgagtgattttaaacttaggtggctttacaacctcatattacgatgaaaatggaaaagtagtagtttataaaaataaaatggcaattgagaaaaataattacttctgggatagaataaacaactacttcttgtcgaaactgcctgaagcaaaagtcatcgatttttcaaagaaatcatatattggtgatttcaactatccatttggtcattcgttttcccattttgaatcagcttattacaaagactttttgaaagagcttatttatataactaaatcgtaa

SEQ ID NO: 2281 - DNA, 990 bp, Listeria innocua
gtggaaaaaccatttttaaccgttgtggtgccttgttataatgaagaagaggtattaagcgagagcgtaacacaactaacaaatattataaaaaaattagtgatgaatgattctattagtaacaatagtcaaatcatgtttgttgatgatggaagtaaggatcgaacttgggaacttataaagcaatattctgaatcacatgagcatgtatcagggctaaagttgagtcgtaattatgggcatcaaggtgcattattagcaggattaacagctgcacatgaacattcagactgtgttgtttctatcgacgcagatttacaagatgacgtaaatgcaattattgaatttatggaaaaatatcatgaaggtttcgatgtggtttatggtgtgagagataaacgcgatacagatacttttttcaaaagaaattctgctctaactttttataagattatgagtaagttaggtgttaatatggttcctaatcatgaggactatagattacttagcaaacgcgcattaacagaatttttacgctataaagaagaaaatatgtttattagaggtattgtaccattacttggatttaaatctaccaaagtttattataatagaaatgaacgctttgctggagaatcgaaatatccattaaagaaaatgttattatttgctgttgatggtattacttcttttagtgtggcgccaattcgcttattgctagtgattggttctattactttcttagtaggtgtagttttaggtatttatgcaattgttcaaaaaataatcgggggcgtagttcctggttggacctctttaattgtttctatttggttactcggcggggtacaattaattggtatgggcgttttgggcgaatatattggaaaaattttccgacaagtaaaagaacgtcctcgttttacaattgaagataatgtctttgaaatgaaatgcgagaaaaataaaaacaacgagagtttggtgtaa

SEQ ID NO: 2282 - DNA, 2091 bp, Listeria innocua
gtgaagaataagttagtttacacttttaatgctttatttatcctcctatttggctacttgctttgcctaagcattttcaaaccacaaacttttacttttgaacatccttttgtcttaatagttcttagcgctgctgcgttattagttcttattgggattttccagtttagtactagattaaataaaaaaggagatggttttttaaccatctctttagtgattttgatattagcagtccaagtatatctattagtttcgctgcaaatgaattcatatgcggatgcctatgtaattaagggcgagtctttaaaaatgctggcaaatggaggacatgctactggtcaagaatactttatgatgtatccaaataatatctttataaccattatacgatactggttatatgcttttggaggaatgcttggagtttccaatgtattcttacttgaaagtgtatttctatttttatgtatgaatattactatttttgtattgttttggattattcgtaaagaaaatggtagcaaatatgcgaatatttatcttatcattatactattttgtgttccattactaggttacatttggtatttttatactgatactctagtcttgccttttgcttcccttattactttattttattatttatatacgaaaaataataaatggtggtattttattattatcgggttattgtttgccgttgggtatcatattaagccaaatatcataattttattgccagcgatgattattcatcaatgtttcataagaaattggcgtaaggtcttgctaaatacaatggtgttagcgattttctttgtaagtttaaatgctgttttcacgccattatctaatcattatggatttaagaaaaatttggctatagaatttccgcaaacgcactgggtgatgatggggcttggtgagccagcaggtcgttacaatagtgaagacgtggcttttacaaatcaatacaagacaaaagaagagaaacaagaagcgaatatagagaaaataaaagaacgactaaaagagcatgggcccattggacttgcaaaattatataataataaaatgataaacacatggacagatggtacacgcgcttatacgtggtacacgaattctgcattagattatccagcttcatttgattatttctttggagataagcgcttttttacagagttcgctgcccaaatgttccatatcattaatttactgttaatatgtttaggtgcgttacgtttttataaaaaaagagaacttgatatatctttctttataaatatcaccttagttggtgtctggttatttcatttaatctgggaagcaaatcagcgttatatattatttgtaactccattaatgattgtgtcttctatttatggatttaagtttattatagaaagtttatttacagaaaaagtagttttaaaagataagttaaaaaaatctttcttaattacgagtttccttatctttttgttaagtagtgtttttcttgcgtttggtggaaaaatgattgcgactgataaacaagatattaatcattatattgttaagcaaagttatgctcatatagcgttaccagttaataataaacaaactatttcacaagaatttacatctgatagtccttttaactcaattgacatatatgtgatgaaaaaaccggaagctagtagttcatatcgaataaaagttatcaatgaaactaatgacactataatttataatcaagagaaaaaaggtacagattttccaaatgaggcttaccttaaattgagcgttaacgataatcctaaaggaaataataggtatcgcatcgtaatctcagaagtagaaaatagccatccaaatcaacctttagttttaggaacctattttgataatgatttagacctttacccatatggcgatttgtacgttaatgatgacaaaaaagaataccaagacataggcttttttgttacaaatacaacctcaaaaccattaatgccaaaatatgcatatattatgtttgatttatgtatcatgcttgtttttgcaggaacgtattatgtttttaaaagaagacgttaa

SEQ ID NO: 2283 - DNA, 2325 bp, Listeria innocua; identical to SEQ ID NO: 671

SEQ ID NO: 2284 - DNA, 1011 bp, Listeria innocua
atgagtatagtaatagaacaactcgttgtaaaggaatctagtggtaaatggggaagtcctcatcttttagaacaaataaaaaataatatttctatgtcaaacgctgattttttaattatttgttcaaaacctgaagaaaacatcctttcacaaattcaagactatattgctcgcttccccgaaaacatggttggagcagatattcatttatttagtcaaaatcctgtatttttacaacatcttcgtaaattaccaaatgaagatagttacgaaatgactgacacacttcaattcttagttgaattaacaccaaagccaactagtacgtatttagaacgtgatcctcatatgctcctagaagaaatgggacaataccaattatataatgtatcctttttgaaaaattattttgaggagaggataaacgaaacaactttgattgatatttttcatcaggcaaaaatggtttggaagcacagtgttttagaagaaacaaaaataaacgaggctaaaaatcaagttgcaaataattatagaataacagatatggttgattgctgggaattttatcgaaagttagaaaataactacacaagtttaagactggaacttcttgattttgataagaacttgtttaattatttgattcgtactaaattaggtccaactttccaaaagcaattaatgtctggaaatcttaccgaggcaaccgaggcaattgaggcccttactgtttttctagaagataatgataagcatcttgtaagtgaacttgtttccttaggatatttctatctacaagtaccagtgaaagaatatcctgagtggggtaataataaagcgtttagtaatgcgtatttaaaattcttaaatgtactttttgaaaaaatgcattatcaaacaaagcaatataatttaagattttatcgacgcgctacaaacgctgtctataaagcagttggtttaaattctttaaaaccgattgctaagtgttacaaactttatttttaa

SEQ ID NO: 2285 - DNA, 1389 bp, Listeria innocua
atgaaatttgcgattataattcctttttacaatgcggaaaaaaggttggctttatcgatagatagtataattaagcagacttacagctttttgaagcatgtggaagttctgcttattaatgatgggagcacggaccgtagtagtgcgattgctcatagctatgccgaaaaatatccgagtaatattcgcgtttttgatgtcccgaatggtggtccttctaaggcgagaaatattggaatacataatgtacaagaagacactgactttgtaggatttttagatgcagatgatctgttatcgccaaatatgctttttagtatggtgaacttcctagaaaaatcagctgttaatatgcttgtcccagctttttattatttagatgattttggaaaaaaacaaaaaatttctccacataaattaaatgaccgtttcacaaatggaaatcgagttgtagcgattgaaaaagaaccgcaagcaattcatttttatattggcggtactttttttcgtttcgaaagtttgaagcaatttgtctttgatgaaacgcttaactttgcggaagatcagcttttaattacgaaatttttgcttgaaaatagaagttacggattgattgccgatgctggttactattactatcgtgatttaaagcaaaaaggttctttagtaagttcagcttggaagcaaccggaaagatatacgccatttttacaaaaggtgtaccaaacttatttaacaaactctaaagaaatttttggcgaagtgattccatatgtgcagtatttaatcgcgtaccatgccaagttgtttttttataaagaaaacatttattttaaagaagtattaaatgagcaggaacaagaaatctttgtgcgtgaattacagaaaatattacaagaagttggtccggagatgattgtagctctggatacaccgcttgttgtaaaagaaatgatgctctctattttgcgaaacggctggccagtacagtttaagacggcagaattagaagaagttccgcttgtcacagtaaaagaaaattaccgtcctggaaaagctgtaacagtggaactcttactagaagaggcgcgggaaactttatcagatggcggagaattctttgctagtacatctgtaggtacggcgcaaacaaaagtggtaaaacgaaaaacagcccaaacaatttgggatattgttgttcgtgaagagggtacacttgaaaaagtggtgacacggttaaaaccatatcaattgaaagtccaagtgttttaccaagacaaaaatcaaaaaataacaatgacagatttaaatgtcatcaagagtgtgttaggaaaattaaaaagaaataaagctttaaagcgaaagtttaaacaggggggagtatcctga

SEQ ID NO: 2286 - DNA, 1155 bp, Listeria innocua
atgaagtttgtacaaaaaatatattatttcctatttaagctagtaggatttttacctcgaagaaaagaattagtgatgtttgaaagcttttctgggaagcaatatagttgtaatccacgtgctatttttgaatatatggaagagcataatccagaatacgagttgttgtggagtgtaaatccgaagtatgttgatttgtttgaagcgcacggggtaccgtatgttaagcgtttttctgttaattggttgtttaaaatgggcttagctaaattttggatttctaatagtagactgccgcttgagctaccaaaaccgaaaaaaactatttatgtacaaacgtggcacggaacgcctttgaaaaaactaggtgtcgacatcgatgaagtacatatgcctggccaaacaaccgaacaatacaaggctgattttgtgaaagaggcgcagaagtgggattatttaatttcacctaatgcgtattctagtacgattttcagacgtgcatttggtttcactggggaaatgattgagtctggctatccgagaaatgatattttatttagtgcggataaagagttgaaaatcgctaatatcaaaatggccttaaatattccagaagataagaaagttattttatatgcgccaacttggcgtgataatgatttttacgaaatcggaaaatataagtttgatttaaagattgatattgccaaaatgcaagaaaaatttggcgatgaagtcgttctgttagttcggatgcattatctcgtagcagaacattttgatttcacgcagtatggcgattttgtacgagatgcttcaaaacacgaagatattagagatttgtatttagtgagcgatttattaattaccgattattcttccgtattttttgattatgctaatttaaaaagaccaatgttgttctatacgtatgatttggctgaatatcgcgatacacttagaggcttttactttgattttgaacaaaatgccccaggaccacttgttgaaatgaatgatgctttaatggcagaaatagaaatcatgcttgaaaatcctcctcaaattgcagaaagctttttagaacaattctgtacttgggaagacgggcacgcagcagagaaaacagtgaaaaaagtttttgctgaaaaatag

SEQ ID NO: 2287 - DNA, 1152 bp, Listeria innocua
ttgaaaaaaatagcaatttatatgtatatgcttgctgttaaaataattggattcttggcgagccttttaccagttcagcaaaaagttgtttttcttataagttttgaagaaaatcccactgcgattattaagcaaatgaaactgtccaatgtcaccccgaaaacaattgtcttctatgatcctagagtagacgtatcaaagttatctttagactttataaaagtaaaaccgaagacactgcaacaatttattccattaatgtttcacctcaatacggcaaaagtagttgtcacagataattattttgtggaattagctggcttgaaattacgaaatggcgtaaattgtatccaagtttggcacgcaaacggtgcgcttaagaaatttggctgggaagataaagcagcgcaaaaaaggtcagatcgggataagaaaagatttcaagaagtatataaacgttttacaaaagtacttgttggttctgatgaaatggcatcaattttcaaaaaatcatttttactagatgaatcgaacatgttgaaacttggtgttccacggactgattatttcttcaaagaagcgcagttacaagaaaattatcagtggtcatacgagcatttacatttaacaaacagaataaaattactatatgcgccgacttttcgggataatgagttgggaatggcaaagttacatttagatattgcggaaatgaaacaagccttaggaaatgaatatcaattgattttaaaattacatccttctattagtaatgatttagagaaactagatgatgattttgtcatttatgtggataaagaaacgccgattgaaacgttactaccagttgtggatattttgattactgattattcttccattccgtttgagtttgctttacttcaaaaaccaatgattttctttacgtatgatttaacggaatataataatgctagaggactttcagatggctttttagaaaccattcccggtccgcatgtttttacaacgactgagctaattgaagtaatacaaaataatacgtttgatttggaaaaagttcggttatttgctgagaaatggaataaatattcggatggattttcaagtgagcgttttgtatcctttttaaaagaacagcttgaaaagtag

SEQ ID NO: 2288 - DNA, 1164 bp, Listeria innocua
gtgagaaaaaaattaattgaacagattttaatatcaccttcacctttttctattttcgaagaaaactataatgaattgagaaatactagatttttattatttgataacaactcaaataattttggaaaaaaatttcaaaaaatggaatttaataactttacaatttctccattagcagagtatcacaatacaatggttcttgatcaatatactgtaaaagaatcaagggaattagaagtagttcattgtgtagattttgattcaaacattattagtaacttaagaaaactttttttccatactaattacagtaacgaatacttaataaaattacttttatatgtgaaaaaagaacgtatacagcctaattgttcgccctatttaatagaatgtgccgcaaataattttaatttggataaacaagatatttatgaaagtttattatccttctcactattggaaaatacgaatattgaacaattgataactaaccatctaaataaagaaccctcatcaacagattatttagacacagatgaaagatggcgatctttaattgaactaaaaaaatatgcaactaaagaatatatcccaagatactattatatctattgtttattattgaagatgtattttcttaagttctcttctaaaaaatctgcaaaaaacaaactcattcaattattagatagtattaatacagaactatttagttattgggaaaatgaacttgtaatttgctacttatcattaaaagaagactctaaaactgattcgttttttggttctgtaaagcccaatacaaaagatatgttaataaaaatccaaggaatggcttgggatttatttcatttgcgatgtgctcatgaacatatggcagagcgtaataattattcaaaacgtatttttttacattcatttagctcagaggataaaggattaaactcaattattagattaaatccaataaaaagaattgcattcgatggtaaggatgtttatactcaccatagatataccatatttaatatgtgtcctgaagtagatgtatatacgattctaaatgaatacacacatcatagaaacaaaatgtgcaaagaaacaaattaccaagaactatccaaaaaattagagtttgaactcctacatctatcatcacgatag

SEQ ID NO: 2289 - DNA, 651 bp, Listeria innocua
atgggcccctcttacgcagtttttatgaattccccatatgttactgaaaaaggtttaagatttattgattcaatgaagccgcttaggatgaacaaaaaaaatcaaatggaacaaaagagagtatttttagagcgagtagaaaataaagatgaggatttaaatatttcaaattatagggttgattcggatgattatttagagatagttaaattggctattgaagaggaattagttttaggcatatgtataaagtatgcttctaataagggaatagtaatacattctaatgctcatttgagttcaaaaggaattgaatatttagataatcctgatttagtggagacagaaagtaaagtaaacgttgctccttctcaagtaattaatatttatggtggagaccaaaggggcgctggttttggaatgaatgccactattaataataattttgataattctcttgaggaacttggtgcttttatttctagactttctgaaaatgagcaaaaagaagcgaatgaaatattagatgcaattaagaatggggatattaagccaggtatgctttctaggttctctactttccttgagagccatcctaatttaggcgcttatactggaaaagctattgtttgggcactaacaaaattataa

SEQ ID NO: 2290 - DNA, 285 bp, Listeria innocua
atgacaaaaattcgtattaataaagaaaaaatgaataatcatgctacaaccctaggtgagagtgcgggaaagttagattactatcctttgaaaaatgaaaacatgagttatacgcaaactaattctatccacctttttcgggaatcattacttgaactacttgaaggcatcgaaaatttaggatctgttgcgcaagatgatgctactcgaatcaagcaaatgggggaagcttttgcaaaacaagataaatccatcagccagaagatgaatttggaggtgcgttaa

SEQ ID NO: 2291 - DNA, 357 bp, Listeria innocua; identical to SEQ ID NO: 248

SEQ ID NO: 2292 - DNA, 1398 bp, Listeria innocua; identical to SEQ ID NO: 624

SEQ ID NO: 2293 - DNA, 336 bp, Listeria innocua
atgaacgaatttccagttgtatatgaaccagagtatatgacaatttatttacttgttatcatcggtgtcttttctacaacattggctttatcacttgaaaaatataagttcactttagcgggaaaagcgttgattgggatgtgttttatttctctagctgtgttatttatatatgttttagagttagcatatctttcggatacagctgatttgttatttcatacaatcggtgtttgggaagtagtgcttttcacacatccatatattttcttaatacttgcaatcttgctcggtggggaaaagaaaccgccacatgtgcccaaacctaaaaaataa

SEQ ID NO: 2294 - DNA, 303 bp, Listeria innocua
atgaagtcgcagcagacctttatggtagaggttaccttttattctagtgcaagaaaaacggttccggaagcggggtatcggccgcattttgtgatggagttggatgaggatcgggaatatttaggagttgaaatttatgatatagaagtggatacgctggattcggtggggtatgcaatgtgttcttttttatatgaacaagagggcgttggttatagtaagattcagccaaataggtcttttatggttatggagggcgcgagtgttgttgggagagggaagatagtgtcgtttcatttgtaa

SEQ ID NO: 2295 - DNA, 708 bp, Listeria innocua
gtgatttccatgaagttcctccttgtttacttggtagttaaaagttcactaatgaacttgatgattatattttacaatgttatcattaaattcaacataaattcaatcaagcaggtgttcatcatgatatattacaaagacaaacttaaaacaatcggaacagctttaacttctttatcttttattttcttgtttggcttattaactttattgtcaatagaaaaaccagaatcattttactatggtcttattactctattttttataggatatttaattgttaaacttctactcccgccaaaagaatggatccaggtcacaaagaatgcttttattattcacacacgcaacaaaacaaaaacgattcatcttgcaaatgtgaaaagaataagttataacttccaaccttttcgtaggttcttgaagtatcaagttccagaaacgatggaactattctttcaaacagaaaacaaaatggagaaaatcgactgtgcctttatcggccgaaataatttcgttgagttaattaaccaatttgatgccaaattagcttcattaagcgaagatattattgaacatgatcatcgctatccccttgatcttgtatatggagtatttatttttggtatcgtcatgctcttcttgattttcattcttttgtttggacgagaatttctatttgagcaaattgggaaagtttttgtatag

SEQ ID NO: 2296 - DNA, 471 bp, Listeria innocua
atggaaatcacattacaacaacctacaacagctgactttcctttcattgaatggttgtggggagatttagcaacaacagaagtgctcggcggaccattttcttttccagaagaaacgcgaatggactggctaaaatcaaaatcacaagcgagcaatgcttattttattataaaaaaaggtacagaatctgttggtgaagttagttttcgcgattttgaaaaaggaacagctcatttaaatattaaagtggctgcatgttataggggccagcgaatcgctcaaaaagctttgcaattattcttagattttttccaaactgattgcggcgggatagttttgttggatgaagttagacgggaaaatgaagcaggcattgggtttctcgtgaaagctggtttcgaagttatagaagaaaaagaatggacgatggtgctcaaatggagtgttcaagcagaggggagttttgaatga

SEQ ID NO: 2297 - DNA, 549 bp, Listeria innocua
atggagaaaaaagtcttaaagttttttactgtagataatatggaaaaagaagaagcctatttaaacgatatggctcaaaaaggctggttatttaaagaatataaatcttttaggtaccattttgaaaaaggggaaccgaacaaatatcgctatgccattgattataaagtgaatcaaggcgacgaagcctcgtataaagcactctttgctgatgctggttgggataatgtattctgctatccagtattaaacggtaattggatgtatttccgaaaactacaggccgaagaggcaggaagtgaaacgatattctcagatgaagtatcatatattcatttatatagaagtattcggaaacgctggacgatttttggcatattaatgagtattcttttattgctggatttatttttcctaaacaatgctggaagttatcaagtaattactattttcatttttattctatttattattctcatcggtttgtacggaaagatgtttatccaattaacgaggaaaataaataaatttgcgaacaaaaatctataa

SEQ ID NO: 2298 - DNA, 3714 bp, Listeria innocua
atgaaaagaaagataagttctatcattgtagtcgggataatgctctttcaatcattaactatgtatccatttatcaccgaagccaaagaaaatgaacaaaaagaagaaataaataaaccctcaaaaataactaagggattaactaattccctaaaatacactaagacaattcttgaaacaggggacacctatgatagtgtatttcctgacagtgctttagctaaagtagttgctaaagaagcaacggggtcagagaatacaactcagctagtaacacaagcagacctgaataaaatcaaatctctcaatggttataataaaggaatcagcgtattaacaggaatcgatttgctagtcaatgtgacaagtataagcttgaataataatcaagtaacagacatttctccaatagatcaattacctaatttagtaagcctatcggtaaaaaacaatcaaattagcagtcttatcttaaatgcgcaaaatcaactcccgaaactaacaaccattgatattgaaaataatcctgatcttaatactatcgatatccaagatcaaccccaattggtagatgtaaagacatccggttatacaggattacgtaagttaacaacggtaattgccaaaaacaatccagaattagtcaatttaggccaatacactatccgaaatgtctactttagccaagtagcaagtttaacgaaagttgaattagtcaatctccctaaggtaagaaaagtaaaccttgagaggaacagtattaatgagctaaaagttactgatttggctattgaagatctgccattagaagaaaatgaattaacagatacagtattcgataacatccaaaatctgcctaatttaaaaacgttagacctgtcaaaaaaccaactagaagaagttgtgttagacaaaacggatgtagaaaatctacccaatttgatgacattagatatacagcaaaatttggctataaaattgataaatgttcaagatcaaccccaattggtagatgtaaagacttccgattataaagaattatctgcgttaacaacagtaattgccaaaaacaatccagaattagtcaatttaggccaatacactatccgaaatgtctactttagccaagtagcaagtttaacgaaagttgaattagtcaatctccctaaggtaagaaaagtaaaccttgagaggaacagtattaatgagctaaaagttactgatttggctattgaagatctgccattagaagaaaatgaattaacagatacagtattcgataacatccaaaatctgcctaatttaaaaacgttagacctgtcaaaaaaccaactagaagaagttgtgttagacaaaacggatgtagaaaatctacccaatttgatgacattagatatacagcaaaatttggctataaaattgataaatgttcaagatcaaccccaattggtagatgtaaagacttccgattataaagaattatctgcgttaacaacagtaattgccaaaaataatccagaattagttaatttaggttatcccattatgcaaaatgtttactttagccaggtggcaagtttaacgaaagttgaacttgctaaccttccaaaagtaagagcagttcgattggaacgtaatagcatcaatcagattgaactaaataatttagtttcagtaaaagacgtgaatctaaatactaacaaaataacaaatgatagcatagagaaatttagaggcatgcctatactagcaactttaaatttaaacaaaaaccaaattaccaatataaatatgcttgatggtttcccacaaatgactactttaaatatcgatttaaactccatcagtgttttaccaagtaaccttaaaacaaaaatgccaaaactatcgagaattagtgcattaaatcaaacagttactttaggtaaagcaattgtagtggatgattccgatttaattattaataatgagattagtaattttgaaaagttaaccgagccaagcccaatatcaaattttggaacttacgcaaatgaaaaaataacttggtcgtctgaaagaataaaaaatttaacagaggtcagctttcagttttctgagctaattaatgtgactggtatagatggaactttttcaggaaaagtaacacaaccatttaaaagatcaactaccccagtaattaatgcagattccgaaattcattatccacaagggacagaaaaaacagaagcagagtttttaaaggatgttcaagcgcaaacaacggatgatttagccattaaaagcgattttgaaacaatggtgaatctcaagaaagtaggaaaatacacagtaacattaaacgtagagaatctggatggaattaaagctactccaaaagaagtgattgtttatattgatgctgtacaaggtgcaaatataactgtgaaatatgaagacgaatcagggaataaacttgcggaaaatagtatactaactggaaatgtcggtgaagaatatagttcaagtgcaaaagaaattttaggttatacactaactgaaatgccatcaaatgcacaaggagaatttagcttagaagaacagactgtgacatatatctattcgaaaaatcccgttccagctaaagacatcacggtacaatataccgatgaggatgggatggaattagcaccaaccgaaacattatcaggtaatgttgatgaaaattatgttacaacagcgaagacttttacaggatacgaattaattgaaacaccgagcaatgcagaaggaaagtttagcgaaaatgcacaaacagtgacctatgtgtatcgcgcgattaaagcagagccaattttagctaaagaagttacggtgaactaccaggacgaattaggagctaaaattagtgaaacggaagtattgactggtgaaattggtgaaacatacacaacagtggctaaaacaatagatggctataccttaattaagagccctactaacgctaacgggatttttaacgagaatcctcaaacggttacctatgtgtatcaattacaaaatagcccaatagcagcaaatatcaccgttaaacacttggatgaaaacaacaacgagctagcaccaagtgaggtactaagcggaaatgtcgatgaagcatatacaactaaaccaaaagaaataaaagactattcgctagtaaaagtaccaactaatgctagcggaaaattcacgacagaagcacaaactgtgatttatcactataaaaagaacagtataccgacatcatcttatattactgtaaaatatgtagatgaaacagggaaagagctggccataagcaaggtattaaacggaaacattaatgattcctacgcaactacagccaaggaaattaaaggctatacgctagtgcaaaagcccgctaatgcaactggtaaatttacggatcagaatcaaactataaaatatgtatatcgtgctaataaagccgaagtaaatccaaatccaaattcagatgtactagggagtaattccaatggagatattcaaccaacgaatgatattaagccaacaaacgatgtccaaccaacaaatgaggctccacaaaccctacctaaaacaggtagtcagccggcaaatttgatctttggattaggaattttactagtacttcttagtacccaatggctacaccgaaataaaagaaaaaaagctaaatctcataactgctga

SEQ ID NO: 2299 - DNA, 363 bp, Listeria innocua; identical to SEQ ID NO: 260

SEQ ID NO: 2300 - DNA, 276 bp, Listeria innocua; identical to SEQ ID NO: 138

SEQ ID NO: 2301 - DNA, 1461 bp, Listeria innocua
atgaagatagatgtcagagaattaaatgagatagttagcgagaatatagtaatgcttaagaaagagtatgaaaatttaaatatagcaatgaacgctacaaccaatttcacagtagaaactcaggaattttttaaaggaaaaacagcagatgcaagtcgtgcttatctacaagaggcatataaacctgtacaacaaaaagcgctagaagttaataaattgatgacaaaaatattgagcgaatatattgcagatgccgaggcacagttcggagcaaatggtatgatagatattcaatctattgaaatggaatacaagcgcagttttaatcaagttagtgatgatgaaatgagagaataccgcgatttgaataatcttattcaagaggcaaacgaatttacttactttcagtcgagtaatttaggtttttttgaagaattgcatcatgatgctttaacagaaataacaaatattcgcatgaaactagaagactttgaaaccaaatggaatgttgaacttagtaaagctgaaaaattacaaaaagagcttgattggatgttaacacaagttaatgataataaaataattccaacaagctatcaagccggaacgctcccattcggtaagccatttaaatcacgagatgagtttgatacagtgcaagaatattaccaatatgtcgttgaatgggcagtggcaaatggtaaagcgaaagaaatcattgttgatgggcaaagatattatgagtttaccgatactttttattatgaaaattataataaggaagtcaatggaacattagttatgacagaagtaaatggagaaatgatattatttgtacaacgtaaagatatagagagtgcagtttctgttccttttggagtattttacccagatccatttcaaaggctagcaaatggaggagaaacagatggaactataaaattatatcactggaagagcaaagatataccagaaggactaagtgttccaaacgaagaattaaaggctatggcagatttcttcgcagatacacagaatagttatgatgcaggtatggctatattaaaatatttggctcataacaaaaatcctgaaaagctatcatttacagatacagaattagataaagttgcaacgaattggtctggcggtaaaaatagatttgactttgcaggtgaagttgaggcgcatgctgatatgcttactgattcaatactaacagaacttgccgcgaagccaatggataaaattgatagacctggtaatacagatgaagagaaggagcaaggatattatcacgcagcttcaatagctgatatgcaaaaaggagaagatggaatgatgaacaaaagttttaattcgatttggggttctggccaatattcagcttatcttcaaaaccttatgcatggacaagagaatacgccgaaagctaaaaagagaagtttcccacgccaataa

SEQ ID NO: 2302 - DNA, 555 bp, Listeria innocua
atggaagatagaacacggtactttttacaaaggaaatttaatgatgattggaaagatatctccccgaacttagcatttgatttcaatgttgaaagtggtcgaaataaattaatgacagcgcattttgatatatccgcgcaagtcgaaaatagaaaagatgatttacacacatttaaaactaaaaagaaaagtgagttcagtaaacttattacatttgatatcgaagtaattaaaaatgtaaaagcaagtactaaaattgaaaagaagcagacagtatatatacatccattacctgtaaaagagaacaatgaaatttatacacttcagttttctaataatatgtatcaacccaatcgaaaaatggaaaaaggattagacatacggtcatcagatgtggttgatagcgtaatttcttctcagaaaaagtatcaacttttacttgagcagatcacaacaaaagaattatcaagcaaaaaactaacaaagaatattatacttttacttagcattttggttttgggagcttatgcatatttaataattattaaaaagtag

SEQ ID NO: 2303 - DNA, 138 bp, Listeria innocua
atgactaaagttattttaactattatcgcaattatcgttccagcatttcttggatttttatttgcttatcagatttataagaaaaaaactgccacttatatgccactaaaaaatgaatttgtacactgggcaaagtaa

SEQ ID NO: 2304 - DNA, 1416 bp, Listeria innocua
atgactgtagggatttatataagggtttccactgaagaacaagtgaaggaaggcttttctatatcagcacagaaagagaagttaaaagcatattgcacagcgcaaggatgggaagatttcaagttttacgtcgatgaaggtaaatcagcaaaagatatgcaccgccctcttctacaagaaatgatttcacatataaaaaaaggacttatagacacagtcctagtatataaattggatcgtcttactaggtccgttgtagatttgcataatttattaagtatatttgatgaatttaactgtgcatttaaaagcgctactgaagtctacgatacttcttccgctatgggcagattttttattacaataataagttcagttgctcaatttgaaagagagaatacctctgaacgagttagctttgggatggctgagaaagtgcgtcaaggagaatatattcctctcgctcccttcggttatactaaggggactgacggaaaactaatagtaaataaaatagaaaaagaaatatttttacaagtagttgaaatggtttcaaccggttattctttacgacaaacttgtgaatatttaacaaatattggtttgaaaacaaggcgttcaaatgatgtgtggaaagtatctacattaatttggatgttaaaaaatcctgctgtctacggagcgataaaatggaataatgaaatatatgaaaatacacatgagcctctaatcgataaggcaacatttaataaagtagccaaaatactatcaataagaagtaaatcaacaacaagccgtcgtggacacgttcatcacatttttaaaaatagattaatttgtccagcttgtggaaaaagattatctggattaagaacaaaatatataaataaaaataaggaaactttttataacaataactatcgttgtgctacctgcaaagaacatagacgtccagcagtacagataagcgagcaaaaaatagagaaagcatttattgattatatttcaaactatacactcaataaagcaaatatctcttctaaaaaattagataataatttgagaaaacaagaaatgattcaaaaagaaattatttcacttcaaagaaaacgtgaaaagtttcagaaagcatgggctgctgaccttatgaatgatgatgaattttctaaattaatgattgatacaaaaatggagattgatgctgcagaagatagaaaaaaagaatatgacgtatcattatttgtatctcctgaagatattgctaaaagaaataacattcttcgtgaactaaaaataaattggacttcattatctcctactgaaaaaacagattttataagtatgtttattgaaggaattgaatatgtaaaagatgatgaaaataaagcggttataacgaaaataagttttttataa

SEQ ID NO: 2305 - DNA, 672 bp, Listeria innocua
atgaaaaaaattttactgggcgggataatagtttgttttggagtactaatgattggctgtggttcaacaactgattcagaaacaactacaaaagataacgaagacgaacaaaaatatagtaagccagaatctaagaaagatgaaaattatattaaggatggtcccttaaccaaagttaatcaatggaaaaatgacgatggggaaaaaataaaattactgaaaattattacgccaaatacattgtttgatttagatccaatacaaatgaggattttagatataaaattgcttgagcattatgatttgaatgcagatgtgaaaaaagagtatcaagaattaactggaaaagaacaagagaactatctaagcatacaaatcagcttaaaaacagaggatactgatcctaataaagaaattatgtttcacggaatagatactataattacgaacactaaacaacaaatagatgtttctaacgagagttggactagcctggatgttatgggcgttggtactttcaagggaaatgttgaaaaaactggttatcttgttgttcctttttacggaaaagccgatgaactaaaaaacttaacaatcatatctagtaaagtttgggatgataaagaacccactttatatcacgattctgaaaaaaaagaattcaacttttaa

SEQ ID NO: 2306 - DNA, 420 bp, Listeria innocua; identical to SEQ ID NO: 318

SEQ ID NO: 2307 - DNA, 429 bp, Listeria innocua; identical to SEQ ID NO: 325

SEQ ID NO: 2308 - DNA, 186 bp, Listeria innocua
atggagtggttaaagaaatatagattagaaaaagatatgacacagcaagaagtagctgaacagtgtggtatacccaaaaccacatatgcatctattgagcaaggtaaaagacggccatcgccagaacgtgcgaagttaatcgcaagtaagctgggattcgactggactattttttttaacaactaa

SEQ ID NO: 2309 - DNA, 525 bp, Listeria innocua
gtgacagtaataaaatcttcaattaatgcatccaaaataatgaaatatactggcgaactacctcaaaaacaattggcagacttacttttaacaagtagacctaatgtaagtcatatacaaacaggtaggcgaaagatgcagcaagatatagccattacagcattaaataatgtacagagtaatttattcaaattagcgctatcgcatgaatttactgaattggttccagacgttttttccggacaatacgtgaatcagaatccattaagtttccttgtaatgtatgaacaggaagccaacgaatttagtgcaaatattgatgaggtaatgaaaattcttgttaaaccagctaatcagctaacaacaaatgaacgtgtatcagctagaaataatttaaaagaacttattgatgtattgggctggggctataatcttttattttttgcaagtgattatttaaatattgatgcttataaattaattagtgaacaagatgagtgttggaaacaaaaaaaatggatttga

SEQ ID NO: 2310 - DNA, 159 bp, Listeria innocua
atgagcaaagtttgtgataaagaaaatgctgtgaaggttgaaatagtttatacggaactaactcaagagcaagaacaagcaatgtttaacttctttaaaagccgctcttttccaagaattataaaaaaactagaagaagaggagcgaaaaaaatgttaa

SEQ ID NO: 2311 - DNA, 165 bp, Listeria innocua
atgttaacagcagtattaatcacactgagtcttggaattgttatgaatatagcgctttatgcgtatcagaagggttgggaaaagaaaaatgtcgataccgatttggatagcgataatctggatactcgcactgctcggaacaatgtccgtaatatcaagcgctaa

SEQ ID NO: 2312 - DNA, 285 bp, Listeria innocua; identical to SEQ ID NO: 151

SEQ ID NO: 2313 - DNA, 342 bp, Listeria innocua
atgacacaaaaaagtattgaagaagtgaaatttgaagaggcaaaaaaattaataactgggttacaagcaattgctacatttaatgaaagcataacttgtgccgtgaatgtaagcttcaatgatggaaaaggtatacacagtgcgtcatctgcaattggagggaaaagcgaactcttaaagatgtatggggacatcgccgaagcaattgtatatgaatttatgaaagaccatgattgtgtgtgcaacgtgaatgaaaccattgaacatgcaatagaaggggcattaaatggatttcaaaatttcaaacaagatgcaaaggagaaaacagatgaaaacaattaa

SEQ ID NO: 2314 - DNA, 1941 bp, Listeria innocua
atgaaaacaattaaattgctaaagcttcaattagaaaattttaaaggtatcaaggaactggaaattgatttcgaaaacagtacatctatctatggcgcaaatgcctcggggaaaaccactatcatagatgcatttacgtggcttttattcgataaagatagcacaaataaaaaagactttgctattaaaacattagatatggaaggtaaagttattcacaagttgaatcatgttgtaaccgcagtgattgatgttgatggcgaacaagttgagttgtctaaaaagtacatggagaagtggacaaaatcaagaggaaaactagaacaagagttaacaagtcatactacagaatattatatcgacgagatcaaaaagaaagcgaatgaatataagtcatttattagcgagctactagacgaggaacttttcaaactaattactaaccctctttattttaatgagcaatttgactggaaaaaaagacgtgcaatgctaattaaaattgcaggtgatgtaacagacgcagaagtaacgagtgcagatgattcactgaaagatttaagcatctttcttggaaagcactcgattgaagataaattaattcagattaatgaacagcgcaagaacttgcgtaaaagattagaacttatccccgaacttgtaaatgaagctactaaagctaaacaagatgtaaccggcttaaatccaagcgatattaaaggtgaattatcagtaattgaagaacagattcaatttatcgaacaagaaaaaaatgttctgaaaaacggtggtatacaaactgagcttaataagcaaaaagcgaacattgaactggaacttacaaaaatcaaagcaaatgagcaaaaagaaacacaagaactattaatgagtaaaaaagaagaaattttcgaagaaagaaatgaacttatagatgtaaataaccggattggtgaatctacttttcttattcagcgtaaacaaggagaaattgcaactaagcagcaagaattaactaaattaggcaaagagtgggacgtattgcaggtagaaaaatttgacgaacatcgcaaaaaatgcccgacctgcaatcaagatttcccagcagaacatttgagttctatgattgaaaaattcaatcaagaaaaggcagaaaaaattaaagaaaatgaagctgcaggaaagtcaagtaaagcagtaattgaagaaacagaaggtgatattgctgaactttcgtttgatattaaagcgaatgaacttgaattgaataatattgaatcaaaattagagattttggaacaggaaaaaacagctttagaacatcagctggaacaagctgaaaactctactacttacatcgagaaacaatctgaactggaaatgattgaagaaaaactgcgtgatgaaaaaggttcttctataactgcagtagcagagattcaaatcaaaattgataaattgaatgctgaagcaagtgatttaaaagctgatttagcaaaatttgatagcaatcagaaacaagaaaatcgcattcaggaattagaagaagaagcagcagaaaaaggcgctaagtacgacgaattggaaatgggattatatctcattgaacgatttaataaagcaaaatgtaatcttcttgaagacaagattaacagcaagttcaaatatgtttcattcaagttatttaaaacgcaaattaacggtgggattgatgagtgctgtgaaacgatttacaacggtgttccttacaattccggattgaacaatgccgctagaatcaacggtggtttggacattattaacgcactaacagagcatgttcaagttagggcaacgatatttgtagataacagggagtcggtaacggaactaattgatacagaatcacaattagtaagcttaatcgtttctgagtcagataaaaatttgagagtggaggcatag

SEQ ID NO: 2315 - DNA, 783 bp, Listeria innocua
atggcaaaagagaattatagcgacccaaacggaaaattgctcaatagtataacgacatttgaagtgaatggagaagaagtaaagttatctggcaatattattagggattatctagtaagtggaaatgcagaggtaacagaccaggaaataatcatgtttttgcagttatgtaaatatcaaaaattaaatccatttcttaacgaagcctacctagttaaatttaaaaacacaaaaggaccagataaacccgcacaaataattgtttctaaagaagcatttatgaagcgtgctgaaacacatgaacaatatgacggatttgaagcaggaattatcgtcgagcgtaatggtgaagttgttgaaatagaaggagcagtttctctagataaagacaaattactagggggctgggcaaaggtttttagaaaagacagatctagaccagttagtgtaagaatcagtgaaagagagtttaataaaagacaatcaacgtggaatgctatgcctcttacgatgatgcgtaaaaccgcagttgttaatgcaatgagagaagcatttccggataacttaggcgccatgtatacagaggaagaacaagggtcgctacaaaacaatgagacaagtgttcaagaagagattaaacaaaatgctaatacagaaatgctagatataccagcacagcaaattgaagtgccagattttaaagaaataagagagccagagcatgtggaaatgccaccgatatatgatgagcagccatctacaccgccagctagaccttattaa

SEQ ID NO: 2316 - DNA, 759 bp, Listeria innocua
atgtggaaatgccaccgatatatgatgagcagccatctacaccgccagctagaccttattaatatggaaattaagacaattgcgagtggaagcaaagggaacgcctacgttattagtagcgggcgctcccaactactaattgaatgtggagtaaacttcgacaaaataagaaaagcactaaattttgatttatcggcagtggaagcctgtttaatcagccacgagcatggagatcacgtcgctggcgtcaaaaagatgttacgcacatccagcattaagatatacgcatcagaaggcaccttgtctgctttaaatgttccggacagtcgacaattcattttaaaagaaaaagacgctcaaaacatcggagaatggattattttaccgtttcaaactgaacatgatgcaaaagagccgcttggttttatgattcaacgccataatgaaagactacttttcattacagacagttattttgtaagatacaaattcaaaaacatcaactatttaatgattgagtgtaactattcagcagatattttagaagaaaatgtaataaataaagttatacatcaagttcaaaaaaagcgtgttttacaatcgcatttcagcttagaaaatgtaaaagagtttttgaacgcaaatgacttatcgcaactaagagaaattcacttgctacacatttcagagagaaatggtgatcctgaacgatttaaaaaagaaattcaagctatgaccggcgttccggtttatgtatag

SEQ ID NO: 2317 - DNA, 918 bp, Listeria innocua
atggcaaggcctttaaaagaggggttagattattttccgttagatgtagatgctgattatgatgataaatttcaattaatcgaaacgctacatggaccgactggttttgcaataatgatcaagttatttatgaagatttatagtcaaaacttttactataagtggacagaaacagaacaaatactgttcgcgaaaagagttaatgttgacattaacacactgaaaacagtagttaatgactgcattaagtacgatttgttcgacaataacctttttagtgagtttcaaatattgacaagcctaggggttcaagagagatatttcactgcaattggtcgaagaaaaaaacaaatagtagtactagagtacttgttactagataggccagaagtaataaatttatgtcctaaaatcgtttttgcaaacattaatgttgtaaatgatgacattaacgcggaacaagaagagttaatgccagcattaagtgcacaaactaaaggaaaggaaagtaaagtaaatgaaagtaaagcagtagtaagcgaacaagaaaaactccctgaaaaaattgtaaaagaaaaaccaactactactgcttataaattttgggaagaaaatgttgcaattaccggattatcggaattcgatagagaattgctaaaaaaacttatttctctagggggcaatgagttaacggtacatgctatgaagaaggcaattgaactgaacagacgcagaatgaaaactgttgatactgttttgcggggttggttagataatggagttaaaaccaccgctgaagcagatgaacaagaaaaaaactggaatggtggtgctaaaaagaatgcgcgagcagaaccagcaaaacaagaaattaaaatcagcgaccaatataatttcggagctacaagaacggattga

SEQ ID NO: 2318 - DNA, 864 bp, Listeria innocua
ctgaagcagatgaacaagaaaaaaactggaatggtggtgctaaaaagaatgcgcgagcagaaccagcaaaacaagaaattaaaatcagcgaccaatataatttcggagctacaagaacggattgatagacatacgcttaccgaagcagatgagcaaaaaatccgaaaacagattgcaaaagaagatgccgagctggcagctaaagcacttgactctgatagaaatcaccagttaaacaaaatattttctaatagcatgattaataaaaagcttgaaaatgcgagttttgaaaactatcacgcagagaacgaagagaatgcaaaagctctagcagtttgtagacggtttgtagaaacgtttaatcttaatcagcctagaagcttgctactaacaggtgcatatggtgttggcaaaagtcatttagcggcttccattatgcgagatattagtgaaatagatattgtactaaaaagagacaatgaacgtgatgtcgtgttaaagacgagaaaaccaacgatgatttttattaacacgcctaagttattaacaaaaattagatcatcttttagtaagacgagtgagtttactgaagcagatttgttaaatgaaatcgaaagcgtagacctcctggtcttagatgattttggaagtgaaatcaaagaagcaaataacgattttgcagtacaaaagattttcgaaattgtagaaggccgtgttgggaaacacactgtttatactacgaactttaacgtagatgaactttttaatttctatggagaacgtaattttagcagaattatggaagatggaaatttaattcaaatgtcaggagaaaattatagattgcgaggatttaaaaaatga

SEQ ID NO: 2319 - DNA, 228 bp, Listeria innocua
atgcagatgaaaacttttaaaatttggctaaaaatttactgggtttctggcctttgtcaaaatagaagctttgaagtagaagctagaactttcaaagaagcatttgataatgcagaaaaaaaggtacctcaagaaaaagtgaagaaaataaaacatttacagggagatatcgtaggttacatttttgaaccgccaaagagaggagctaataattttgaaacgaattga

SEQ ID NO: 2320 - DNA, 240 bp, Listeria innocua
ttgaaccgccaaagagaggagctaataattttgaaacgaattgagtacgttgaaatcattaaaaaaattcccgggacaccttttagattaggagggatatacgaaatagaacgagtgggttcagcaaatgcacgtgtgagaattaacaacagtatttaccaagttcctaaagaagcgctaaaagtagttgaacaagtggaacgtgaacggtgggaagaaaatgataaaattcacgattaa

SEQ ID NO: 2321 - DNA, 438 bp, Listeria innocua; identical to SEQ ID NO: 330

SEQ ID NO: 2322 - DNA, 621 bp, Listeria innocua
atgattaattgttacgcagaggttagaaatgtacaggtaaaaccaaacgatacggtggaaattaaactagtagtagatgtagatgaattatctggccaaaacgaagaacttatgaagctagtaggtagagaagtaaatacttcactcgaaagcaaccaaatatcttaccgtgaaaaggttgacccagaaacacgagagccagttcttaaatatatggtccataaggatggaactgtggcgatgtactcacaagaaaaacttgatttagaactagaagaattacccgcagaagaacgttcaagcgtaattaataaatccgaaattgatgaatatattcttgcttgtgaaggaatcgcgatgacaatacctggtgggatttttgaagggaaagaagtacttcaaaaattatcagagggtgaagacatagaggatttggctaggttttatggaactccggttaaagaaatgcaagacactttagatgaatatcgtaaattcgtagctgccaaagcaaaagcatggcaagactggaaaaataactctgaacaaacagctgatagtgaagaacaagaatctgaaaatgatggtcaagcaactttagagtttgaaaccgaagaataa

SEQ ID NO: 2323 - DNA, 378 bp, Listeria innocua
atgccatcagaagaattaaatttattcgatttaatggattactatcctgagcagtctgctaaaaaaaagcgaaaggaagaagccttaaaaccgattaaaacacataaaaacgatagattagattatcctacagcaagagccgaaatagagcggattttaggtaagaaagtaactacagtttgcggatattacgatcacccaattaataaagaaattcgatggatattcaatttagaaaaaggatgctgctacattaacgataaatgccatttgtattcaacagaagaaggaaaaggatacaaatatcgcggaaaagtacacgaggaggttttttataatgcagacgatagaaaaagagctactacaacgattgagtga

SEQ ID NO: 2324 - DNA, 177 bp, Listeria innocua
atgcagacgatagaaaaagagctactacaacgattgagtgagagaagaataggggttcaacatcagattgcttcacttgtgcatacagagaagtgcacgttgctagaagcattaaaaatgacagatacagaagtcgatttgacttttaacgagatgcggatggagttagatagttag

SEQ ID NO: 2325 - DNA, 423 bp, Listeria innocua
atgacaactattggaatgttaagcataaaagagcaagcactcaataaaatgttaacggaaatgaatgagaaacactcaggagctgaagatgcagtacataattggctctgtactcaagaagaagaagcgatttttgaaggtattctgaaagatgatagaagcattagtggggcggttaaatactgctcctcaagggcttcaaagcatcaggctgaaggcgtggccatgattgatgacaaaacggtcttttcctgggtgaaaaagtattttatatcagaaaaagtgccgaaaagtagtgtaaaggctacagttaaaacaactgcaacaaaaccagaaaaagcgaaggttaaagctaaggaaaaaccgaaaaaaacaactgcgcaagaagggtatgagcaattagatttgcttgatttcttatga

SEQ ID NO: 2326 - DNA, 1362 bp, Listeria innocua
atgaagagagaagcacgaaattatattgataataaattaaagccaccaaaagccttttttgactggtgtttctcacaaattccaacttacaaatggtccaacaaaaaagaaactattctagcttccaatcgaaaaaactgcagtgttattgaacagaagttaagaaaaaattctagattgacattttttggtaaattgaacgtgttcggtattgtcttagttacatcgaaaagaattgagatacaaagttacgcgttctggaatcgagtagtggaaggaaaagaaatgattgaatttgatctagtcaattttgaacaatttgctgatggagaacacgtaaaggttgccatcagcgacggcaagatgtggtttggtttaattccaatatatggtgggatgtctggaggtccttactcaatgattcgattgtttgaaaatgactggaaagaaaaaattcgaagtaaatcagagcttaagtacctagaaataccgcacttagactttaaagaaattgaaactatatataaatatagagttgaaattgaatttttgcagaaaattaaagcaagacaattgtccaaggaagttatgtatcccgtaacacaatatacaaatggatcgtttagaaaaacggtagatatgcggacaattaatgcgaagtggttgaaagaaaacaagcctttctttaagaactcggacagaggttttatggaatttgaattagcaagaagaatacagaaacggcgaggaaaggtagtttctggaattgaaaaatatcttgattaccgtgctatcaacaaaatcccagaaggagtaggaatagttcgctttcagaattggatcattaagaataaagtggattttagctactatctggattatctaaacctaatgcgagacttaaatattgcaatcgatagcgaaaacataattatgcctaaaaatttagtaatagctcatgataacgcggtcaaattactgtaccaaatgaaacatgaagttgaagaacaacaatataaaatgagatttgagaagataaaagacttagaaaaaacgatagataattacgcttttattgtccctaaacaagcttctgatttattaacagaaggcaaagcattaagtcattgtgtgggtggtagtaattatattaaacaacacattgaagggaaaacaacgattatttttgttcgtgataagcagtacttagaaaagtcattgtatacacttgaatacaaaaatggccaaatttaccaactgagaggtaagcacaattgtgagccaacccacgatgtgcaagaggctgcaaacaactgggctgcatcagtaaaaagtaaaacaaaggtattacaacatagttga

SEQ ID NO: 2327 - DNA, 945 bp, Listeria innocua; identical to SEQ ID NO: 547

SEQ ID NO: 2328 - DNA, 681 bp, Listeria innocua; identical to SEQ ID NO: 468

SEQ ID NO: 2329 - DNA, 294 bp, Listeria innocua
atgattaaatacttcgaatacacaagaagagaaaactatctttatgcattaattaaagcagaaagcaaaaaacaagctgattttatttattggcgtgatgttgttaagtgcgaagaagaatttgcaagaactggactaataacagaattcaatgccgttgaattaacagagaaaaaagcgttaaaactcttcatgtcatctttgcaagaatatgaaacagaggaagaaataaaacaaggtttttatgaaactgtcaacaataaaattttactgcttgattccgatttaatttga

SEQ ID NO: 2330 - DNA, 528 bp, Listeria innocua; identical to SEQ ID NO: 395

SEQ ID NO: 2331 - DNA, 555 bp, Listeria innocua
atgcaagaaaggcgaacattaagacaaaacaaaatgattcatgctttgattagtgacatagtaaagcacacctataacgattttgaagctacaaagccgaggagtttcagcaatgattgtcaagttgtcaaagaaactttaaaagtggcgtatgcagttgaagcgaatttaccgggtgatttcagtacagcgaaattatcgaaaatacaagcccgtgacttcataagttccattatagagttttgttttcaatttgatataccgttatcatcgccaggactgcaaatgacggatgatatcaatagatacctgttcttatgtatcaaatacagaaaatgcgctgtaacaggtcatagaggcgaaatacatcatgtagatgccattggccaaggtagagatagaagaaattatgatcacagtaaatcaagactgatttgtttatctcgagaaatgcacacagaagctcaccaaatcggttggctaacgtttataagtaaataccacgttgatggaataattttaagtccggatgctgtaaaagaattaaatatataa

SEQ ID NO: 2332 - DNA, 426 bp, Listeria innocua; identical to SEQ ID NO: 322

SEQ ID NO: 2333 - DNA, 768 bp, Listeria innocua
atgaataatttagcagtattagataaaaataatacattaaacagtcgtgaagttgctgaaatggtagaaaaaaggcactctgatttactacgtgatatcgaaacttatattagatatatcaatcaaaacgcaaaactgcgttctgatgattttttcagtgaatctacttatcaagctggcaccgggaaagattataagtgctatgaaatcacaaaaatgggctgtgaaatgatagccaataaattaactggggcaaaaggcattcagtttacagctttatttgtacaaaagttcaacaagttagaagaaaaagaaatgcaaactttttatattccaggaacctacgcagaagcacttacacttgcagcaaaacaagctgaactaaatgagcagttaatgttagaaaatgaagtgaaaacacaaactatagccgaatatgaaccaaaagtgagttattatgatcagattttaaaatctcctggattaataactgttacgcaaattgcagctgactatgacttgaccgcacataagctcaataaaatattatacgaagagcaggtgcagcataaagttggtgggcagtggatattatacaaaaaacatatgaatttaggtttgactaaatcagaaacggtcagcatagttcatagtaatggacgtctaggaacaaaagtaaacaccaagtggacacaaaaagggagattatttatacatgaaattcttgaaaaagttggaattcaggctgttatcgacaaggatatttaa

SEQ ID NO: 2334 - DNA, 480 bp, Listeria innocua; identical to SEQ ID NO: 364

SEQ ID NO: 2335 - DNA, 1338 bp, Listeria innocua
atgattatcaaagaaatagaagtaagcaaaattaacccagcaccatacaatccgagaatggatttacagccaaacgatccagaatatcaaaaattaaaaaaatcaattgaagagtttggctatatcgatccgttaatctggaacaagaaaactggtaatttggttggtggccatcagcgttttaaaattttacttgaggaaaatccggaaaggttgactgtatcagtagttgaccttgatataaatcaagagaaagcattgaatattgctttaaataaaatagaaggcggatggagtactgataaattaggcgaattactaaaaagcattaatgatgaagaaatgctaaatttaacaggattctcagcacttgaaatagatgaattaattaaagaattcgaattacctccagctactgtggataaagtaaaagaaaacccgttagactcgaatctgttcgagtcttttttgtttcctcctttttcgtatttagattcaaaaacaaagaggtggagggataggaaggaccaatggaaaaatttagggattagaagcgaattaggtcgagaaggtaatctcacgtttgcatctagcttgcggtcagcaagtttgacaggaacgagtattttcgaccccgtactttgcgagttggcttacagatggtttactcctggagaatctgccaaaatatacgatccattcgctggcggctctgttcggggtattgtggcaaaagtgcttggccacgaatatactggaattgatttaagaaaagaacaagtagaagctaaccgcattaatgctaaagaaatcggattagatggcattaattggattaccgataatagcttaaacgcggataaacatattgaagataactcgatggacttattatttacatgcccaccttactttgatttagaagtatattcagataataaagaagacattagcaacatggaatacgaggaatttattaaagtgtactccgagatattggcgaagggtgcgaataaattaaaagataatcgatttgccattgtggttatttcagatgtacgagataaagcaggtttttatagagatttgacaggtcttactaaatcggtatttgagaagaatggtatttacttctataatgacttgattttgttaaactcactaggctcaggagcattaagagctcgcagaaatatgcgtaacaggaagttagtccgtattcaccagaatgttttagtgttttataaaggaaatcctgatgagatacaagaacatttccccattttagaggtactggaagataatttagaagaagcgcttgaatctatcgacatttaa

SEQ ID NO: 2336 - DNA, 198 bp, Listeria innocua
atgagagaagatattcaacgattaaaagataaagcggacacagctaaaatgaaatatcatcgaaatataattgatagagaaacagctaagaaacaaataattccatacgcggaagcttttaatactagatcgaaagagattgctaaaaagtataatcaaaagcctaaattactttcagtagcagcgtttttaagataa

SEQ ID NO: 2337 - DNA, 231 bp, Listeria innocua; identical to SEQ ID NO: 69

SEQ ID NO: 2338 - DNA, 225 bp, Listeria innocua
atgacccttatattttggactaaaaatggacaagagatggaatttgatctagttgaaaatgtagagattgacgagaaaattattacattcgattactatggagaaggtgaaaaaagaggcgtagtgtttatattaaataatcttgctggcatggctgtagaggatgagaattcggagagtgaaagtaaagatggtgcatcttggtttaaagtgtacaggggttaa

SEQ ID NO: 2339 - DNA, 837 bp, Listeria innocua
atggataacctagataaagagctcataaaaaaagactatttggcaggaatgaagaacaaagaaatagtagaaaaatatggcatatctccgaataccttgaaggcgtggattagaagatatggttggaaagatgaaaaagaaaagggtgcatccaaaacaaaaaaaatgggcgcaccctttggaaatgtaaacgcaaaagggaattcgggcggtggggcacctttaggcaataaaaacgcgataggtaactctggcgggggtgcaccctttggtaataagaatgcactttttacaggagagttcgaaattattgatcctgattactttagcgatgaagaaaaaaaaatatacaattctctgacagaccaccccctagcccacgctaataatatcattaaagatgaatatattcggaaaagaagaatgatgaaacgactaaacgaattagaaaataatttgtcggagtctgaaaaagagataaaaaaagcttacttaaaacaagatataagaaaagttattgaaagagacggacagaaagcaattatgacagttcctgagctagtacttgttgaacaaaaagaagaaactaaacgtaagatagatgatgttttacggctagaagaatctattacaagacaaaacggtgttttacttagagcattgagagacaagtctgcaataattgctcagctatctatgctaccgctcaatcaagaaaaaacacaaaaagaaatcgaaatgctagaactcgaaatacaagagcttaaaggtatagacttagaaaaaccgcttgaaattagagtctcaagggcggtgaagaaacttggtagaagctaa

SEQ ID NO: 2340 - DNA, 1335 bp, Listeria innocua; identical to SEQ ID NO: 614

SEQ ID NO: 2341 - DNA, 1575 bp, Listeria innocua; identical to SEQ ID NO: 641

SEQ ID NO: 2342 - DNA, 1749 bp, Listeria innocua
atggtaaactatgacgctatagataaccttatcgatactatcaatatattagtagagaaggttaatgaaggagaattcgaaaaagaactacttggacaactaggaatgaaaaatattcccgcatttgttgagacgttcgagaaggacatttctagccttcttctaatccagaggtcttattatattaatcaacttaaaaaaactgtaataaaggcagaaaaaccacttacgattgaagaattatttcaatactactctaatgatttgtttataggtgatgattttagaataaatatgtctaaaaaagcatctgattttcttacagcaacaacaaaagacattagtaaaactgttatgaagtcactagataaagatgtctctttcaaacgtttatctggacgttctgtgagctggattaaagaatggtcagaggatttggccaacctaatgaaaattagtactcaatccgaagtagagggggtgctaataaaggcactgagtgaagggaaaggtattcaacatgtagagctagcgctaaaggatttacccgcatttgaccgaaaaagggcaaggacaacggctattacagaagttttgacagcagctagtgttgctcagcaagaagcttttgaacaatcaccatcagttgaaggcaagaaatggaagcattccggcggtaaaggaatcgaaccccgctcatcccatattgaattaagtggaaaagtggtccagataaatgaaacgtttacgatacctggaagcggcgagttagcaaaatatccgagagatacagacttgtctgcttctgaaaggatacattgtcattgtgcccttggaccagctgtaaatgaagagattctcggatggacaaaagaagataaagaaaaagcaagaaaagaagttatggacgatttagacaagaatccgtacactaaaaaacaaaaagatgcaaaaaaattggcgaataaagttggccaaaaaataaagaacgaacaggatattttagatgctggggaagtagtgtataaaaacattgaatctaaagttaatttttatacaaggagaatagagcgtcttaaaaagattaatgataaggctaatagagatttgatttttgataagataactgcaaaagagcaaattagaacgaggttcttaacaagcaatctacaagaaaaagcagcagaaaaaagattagaacttattttttcggaactgaaaaagatacgaaaattcggcaatgttaagatgcttaatatattagataactcagatttataccttaaacagattttgataaataataagaaatactttccagcatcgtggattactgagtcgaacaagaacagtgttttacttttaaatttaacaaaagagcgtggatcacaacaactatacaaaggagtcagcatagttagcgctggtgtccatggtacaaaatcaacaataatccatgaaatgatgcatcactttgaaatttcagtaccgggatttcttgctgctgaaaaacttttttatgagcgtagaacgaaaggatacgatttggtacaattaggttatccatacgatgatcaagaaatagctagattggataaattcgttattgggtacattggaaaagattatgcaggaaccggttatgaaataatgagtgtaggattacaagagatgatggaagcagacactcgtatttttagtgatacagattatattcactttatcataggaatgttagcgaggttatag

SEQ ID NO: 2343 - DNA, 1095 bp, Listeria innocua; identical to SEQ ID NO: 582

SEQ ID NO: 2344 - DNA, 930 bp, Listeria innocua; identical to SEQ ID NO: 544

SEQ ID NO: 2345 - DNA, 213 bp, Listeria innocua; identical to SEQ ID NO: 41

SEQ ID NO: 2346 - DNA, 405 bp, Listeria innocua; identical to SEQ ID NO: 308

SEQ ID NO: 2347 - DNA, 360 bp, Listeria innocua; identical to SEQ ID NO: 256

SEQ ID NO: 2348 - DNA, 507 bp, Listeria innocua
atgggattggaaatcgaaggtttagaagaatttattgcagaattagatacattcaaaaaagacttgcctaaaaagtttaaagaatggctagaagcttctggaatggcctttcttgatattgtgcaagatgagattatttcatctgagacagttgatactagaagactactaaattcgttttctaaggcagctgctggcaatgtatttattatgtctagttcggggatgtctttagaagttggaacaaatgttgattatgcttggtatgttaatgatggacattttacaattaatcctaattcaggtaaggatagacgctgggttccgggatactggaaaggtgataaattcacgtatgatccaggagcaacaaccggtatgctgttaacaatcaaatggatagatgggacaaattattgggatgtggcaatttcaatatttgaaaagctctttcaaaaaggaatggataaacagctacaggactttatggaccaatgttttaagtga

SEQ ID NO: 2349 - DNA, 480 bp, Listeria innocua; identical to SEQ ID NO: 363

SEQ ID NO: 2350 - DNA, 237 bp, Listeria innocua
atggctaacgtaaaaaatgtgacaaagaaggcggttgaggtttctgatgtaacacaaaatcaacaggccgaagaaacacaattttctgttgaacagttgaaagagcattctcgtgctatttttggcgtacagccagaagttatcgatggtgctttttttgctcacacgggaaatcaaattacaaaaacggaagcaagaaatttaattgataatttcttgcggaaagtggtgaaatga

SEQ ID NO: 2351 - DNA, 1359 bp, Listeria innocua; identical to SEQ ID NO: 618

SEQ ID NO: 2352 - DNA, 447 bp, Listeria innocua; identical to SEQ ID NO: 337

SEQ ID NO: 2353 - DNA, 489 bp, Listeria innocua; identical to SEQ ID NO: 371

SEQ ID NO: 2354 - DNA, 183 bp, Listeria innocua
aaaaaactaataaagggcggggatagaaatgcgacgtatgcatattatgcctttactgaattacatcaatccccgtcagatattcaagaaatgttacgtttaccagttcaacagagagctttgttttatgcttttatagaatacaagttagaattagctgaaaaggaaatgaaaaataattag

SEQ ID NO: 2355 - DNA, 3966 bp, Listeria innocua
ttggttaaaatgaccgcggtattcgatatgcaggataaaatccaatctaagatagacaaattaactaataacctaaaaaaaatggataaacaagctaagtctatgcaagatatggagtttaaagttagattaaaggatgatgttacaagaaatgcaactcgaattcaaaagatgattacaaaagattttgcaaaatcttatgctatttcagttggtattaatgatacagcattaagaggcgcaaaaagcatcgcgaattttatgcaaaaaaatatgcctaaaacttattcaattggggtgaatattgctgataatgcaagtaaaaaggttgctggaattggtaaactattggataaaaaattacctaaggcttattatacaaaaatagatgcggatggcaaaccttttgaagtcactgtcggacgattaatgaattatttacgtcgcaaaaacttcaaaaaatatgaaattgttttatcggcaaaagatacagcaactgaaacgataaaaaaggctgcatcttttacaaagaaactgttctcaaaaggttattcagttactatcactgctattgataaattaaccagtactgctgcacgaatgggttcaaaaattaaaagtgtattacctaaaatgattaatattccagttaaagctttgaattatacagctagcgccattggtgcggcaaaaagagctttgttttctctgccgactttgttcacggtaactataggtgctgtattagggaaaagtttttatgaagctacagtgaaatcatcagctacatttgaagaatatacagtgtcaatgacacactggctaaagtctgcagataaagcaaaagattatatgaaatggatcggacaatattctgattcaactccttttagctcggctgatttaatgccagccgcggcaagagcaacaggtttaacaaagaatagaaaagaatttgaaaagttaatgaaactatctgtcgatatggctgctttaactccgggaaaaacagtcgcggagtcaatggaagcattagctgatgcgcagatgggggaatttgaacgattaaaagaatttaatatgaaatataccaaagaatcaatggatgcagctggtggatttgacggttttattaaggatgcgcaagacaagttttctggtggagctaaagggttttcgcaagcctatacaggaatgatttcaactattaaaggttatacaagctcattctttagaagtataggtgatggattccaaacagcgattaagcctcgattatctaaagttattaagtggttagaagaaaaccaagatgcatgggcagcgtggaaagaaacggcagttgaagccggttctgagattgctagctggttgggtgaaaaattcgatggtttatttagttatattggtaagaaattggaatctatcaatgagtggcggagttacggaacatcagttactaacatattcaaacaaatcacgtatgaaattggacaagatataaataattggttatacaaaaatggtggaatgaatcaaattaaagacttttttagtaaggcgggttctgcttttggttcagcaataaatgcttttattactggtgttttgtttagcagtgaagtgaagggcgaagaagtagcaggaagcatgggattagttaatattatggctaatgtaggtggcgaagctgctaagtcatttgggaaatcatttctagattcactagatccaggagcgctaataaaacaaattttttctaaattacttgatatcaatacaagtggtcttaaatctgtttttggcaaaatgattggcaataaagagcttgaggatcaagggaacatatggggaactttattagctgacggattgttattaggatttgctttgcgcttcaagggaattcggctgattatggctgctggtttaaaaccgattagtaaaatagcgggcaagggcattaaaggcctaggaaaaaaaggaatgggtaaaatatttcctgctactatgaaagtagaccctacgaaaaccacaagagtaggacgatattcagaaggcgggttacctggttctatatctaaattaggtaagtttatggataaaactggagcacttggcaagggattaaaaggcttaggttcagtagccaaaagaattcctgtgcttggcacagcattatcggctacctctctcattggcataaataaagaaaatgctggcgaaaaggtcggagattttggaggcggtttgggaggtatggctgcaggagctgctggaggagctgctatcggttcaattattccagggattggcacagcaattggtggtgttattggatcaattatcggaggtatcgccggaagtgagctaggacagcgaattgggaaatgggttcaaaatggacctgttggaaaagcttttggaaaagtaaaagattttcttgcagagacgttgtttgacggtggttggtggtctgaaaaatggaatgatgtaactagctatgcaagtgatatgtggatacagtttaaagaaggatggaccaatattactgagtgggtaagtgagaaaattgagcttattgggggatttttctcaagtgtatggaaaagtatctcaaatacattcgggggatttgtcgaatggtttgataaaactatttggacacctatttacaacagtgcagttgataaaattaatctaattgtaggtatattcacagttgcatgggaagtaatttctggtgtttgggcagttgtgtcagaatggttcaatacaaacatttgggaaccgattaaatcagcagttgaaatcgtaggctctgcaatatcaagctacttttcaacctcatgggaaatgataaaattagtttggttcctcgctgtagaatggtttaatacgaacatttgggaaccgattaaattagcagtttcaactgtggcttatgcaatatcaagctacttttcaacctcatgggaaatgataaaattagtttggttccttgctgtagaatggtttaatacgaacatttgggaaccgattaaattagcagtttcaactgtggcttatgcaatatcaagctacttttcaacctcatgggaaatgataaaattagtttggttccttgctgtagaatggtttaatacgaacatttgggaaccattaaaggttggggcacaagctattggtgaagctataagtagtttcttccaaactgctcacgatgcagtaattagtgcttggaatggagttacagaatggtttggtgcaaatgtaagagatcctatagttggggtcgctgaagatattagcgcagcttttcaagatgcgtttggctggataaatgatgtaataggtaaagcgggagaagctgctaatagcgcgaaagattggattggaggaaaagtaaacggagcaaaagatttctttactggaattggtgaagaaaagactggtttaaagaagaaatcagtgggaaaaaatgccaccggaggtttaattactcaagaacaactatcttggattggtgaaggtggtaagaaagaatttattattcctgttgatcaaaatgtagggcgtggaaaaatgcttcttggagcagctgctaatgctctcggggtcgatatgggaggacaacaaagaaatacagttaataacgttatacaaatgccttctgtaccgctacctgctagttcagcttctatagcaatgctttctacaggtgctaatggtcctgcaacaacaaattcgataactgtaactccagagattgcgcaagcggctaatggtcctgcgagtgtatctactaaaagtggtgataaaatagtgactgtaaactttaacggagacaatcactttgctaataattctgatatggaagattttgaaggaagagttgttagtgtaattcgtcaaacattagatgatgaagattttgaaagtggagatggtattcaagatggctaa

SEQ ID NO: 2356 - DNA, 684 bp, Listeria innocua; identical to SEQ ID NO: 470

SEQ ID NO: 2357 - DNA, 978 bp, Listeria innocua; identical to SEQ ID NO: 558

SEQ ID NO: 2358 - DNA, 255 bp, Listeria innocua
atgaaaaaacaaattcaatcaatcgtaaaaggagttcttaattcagaagttttagcggattttgttccaggtgaaattttaaacattgctcctctttcggtgaaaataaatgacaatgataaactgattctttctggtgaacaagttcagattactgaaggatttatggaacgtggaccagttgaaggtgatagagtactctgcgctagattaaaaggcggtcaactattcgttgttttggatagattaatttga

SEQ ID NO: 2359 - DNA, 408 bp, Listeria innocua
ttgagcacacctgaaattgaaattgataatgatgatttagaagcatttgagacaatttctaagacatatgaaatcgacttcgttaataaaaaaatgaccgggagaataatcgatggtttagaagctattcggcaatttgtacacttagctatacaagtatctagatttaaatatccggcctatagtgacgattacggtagtgagttatttgacttgataacagatgaagaatctacagaagaattgattgagattgaaataccacgattaataagtgaagcaattgaatatgacgatagaatagaagttgtagataattttgttattgaaaaagttagtggctcttttcatatttcatttgatgtaacaacaagtgaaggtgttttagaggtgcaggaggtgatttaa

SEQ ID NO: 2360 - DNA, 1086 bp, Listeria innocua; identical to SEQ ID NO: 580

SEQ ID NO: 2361 - DNA, 570 bp, Listeria innocua
atgtatgaagcgttaaaaaacaaattgccagagattatttctggaataagagagattgacggtttacttaaagctgaatcagaacagcttcaaatctcggaggataacatattggacttgattgatcaggctcactttcaatcagctacatgggcaataggaagattagaagacatctttaatgttagcggttcggtagatgatagtttagaagttcggcgcaaacgaatagcggataaacaagcgacgaatattgtcgctagcaggaatgttttagagaatctggttaatcaatatttaaaaaaagatagtgcaaaaatagaattattgcatgagttatatcactttgttgttagctataacttggatgatttgcagttcttttccgaaataacttcgatgattgagaaaacgaaacctgcgcatcttggatattcaatgcgaagcgtagtaattgaaaacgtaacatttgatgagaaagtaatcgcaaacaatcgacgatatagacgagtaagagagattaaatttggttacccgcttttatttgaaaataatgaggtgatactatga

SEQ ID NO: 2362 - DNA, 270 bp, Listeria innocua; identical to SEQ ID NO: 132

SEQ ID NO: 2363 - DNA, 822 bp, Listeria innocua; identical to SEQ ID NO: 511

SEQ ID NO: 2364 - DNA, 342 bp, Listeria innocua
atggaaatttacattaccacaaacgaggaaggatttcttacaggttattcgacaagcgagtgcgtgcctggcaaaaaaatcgagatagacgaaaacgatgtgttttttcaacgtggttttgctagttataaatataaagtgaatcaacttatttttgacgaaaataaagaaaaagagtttcagtatgaaaagactctacaagaggcaatgttaagtactgaagaacaattactaactacgcaggaagcattagttgaattgtatgagcaaaatacaaaattaggacagcagttgattgacacacaattggcgatggtagacatgtacgaagccaatctatag

SEQ ID NO: 2365 - DNA, 126 bp, Listeria innocua
atggcagtaatctatttgaatttgattttgaatggtaaaaaaacattcaaagaagtaccacgcttgctacaagcacaagtaaaagcattgttaattgacgcggattgcgctgaattagcagagtaa

SEQ ID NO: 2366 - DNA, 447 bp, Listeria innocua
atgaaaacaaaatggcgaaagtttatagatcaaatgcttgaaactaattacaaagaagtttttgcgctatttttcttgttatcagtttcattttataatattctgactggtttttttttgatgacgtctggtgataaaattgttgaaaaaagcaggacgtatcaactgatggacaatcttatgacaattgatacatgggggttgttgtttattttaagtgctgcactgatactaattgcatcttttcaagaatcaaatgcaagatttataaatttgatgattggcgggggaataggtgcgatagtgctgttcttatattcagcagcgagctcagagagcgctgctacaaatttattgccgagtcgatatgctttgagcgcatgctttaatctatttgttgcaaccatgggaggcttagagctatggaaaacgaaaagaaaaaaatag

SEQ ID NO: 2367 - DNA, 447 bp, Listeria innocua
atggaaaacgaaaagaaaaaaatagattatgtgtcaagagcagaattattcgagcatggaatggatataaaaaaagagatgtcaagaaaagtcgataaagttgagagcaaagtcgataaaatcagtgaagaagtagttgagctaaaagtattagtaatacctatggtaacatctgcgaaagaaacggccataaacacacaaaagatggcggatacactggaacgatacacgcgatcaacaacaaagcagttgcatgaacatgacttagaaattgcagatgtgaaacactcaatcgataatacattaaaaagcataagcgatgaagagtcagaggagaaacataagaagtttagtaacgttcaaattataacttctgttctagcacttgtagggataattttaggtggaattctaagctgggactggggacaatttatatttaaatga

SEQ ID NO: 2368 - DNA, 264 bp, Listeria innocua; identical to SEQ ID NO: 120

SEQ ID NO: 2369 - DNA, 834 bp, Listeria innocua
atggcaaaagtggcaatttttggaggacataacggaacttatgaacaaggtgcgaatggcaatggacttactgaaaaagcagtggcgaaagaaggcgcgcaaatcgcgacagcatatgctaaaagttgcggtcatgatgtaataaatggtttcggcaaatctttatcagagcgggttaaatacgcaaacagtgagaacgttgtcgcagtattggaactacatgcaaattctggaggtggtcaaggaaccgaaacactattttgcgctggtattgcatcagcccagcaagatgcgattgcagttgcgaaagccggatcaataaaaggcctaaaaaatcgaggcgcaaaagcagacacttctacaagacacgggagactagccattgtacgcgatacaaaagcgcaagcattactacatgagctgttcttcattgattcagctagtgatgtagcgatttggaaaagcaataaaaaagccattatagaatcgatcacaaaagaatggttaaaaagacgaggcttaaattctgttccgaagacaacaacgtctaagcccgctcctattaaaccaacgacaccttctaagccggcaacatcaaataacacttataagaataaaaaactagtttctaaagctgctagtttgagattttatagtaagccttcttgggcagataaagatgtggcgggcactgttaataagggtattggcttcccaacagtagttgaaaaagttaaagttggcacggcttatcaatacaaagttaaaaattcaaaaggcgctactttttacatcactgcaagtgataaatatgtagagcttaaaaacaaataa

SEQ ID NO: 2370 - DNA, 222 bp, Listeria innocua
atggcaggatttattaaaaaatacttagaaagtaaagattggacaatttaccagctaggtaatgcaacgggacttgcacatcaaacaataagaagtgctgactcaaaaactgtagaccaaatatctgcgaaaaatgtgcgtttaatagcagaggtctttcaatgcactcctggcgaattgttagatgaattctacaaaatcgaagaagaaataatgcgctaa

SEQ ID NO: 2371 - DNA, 204 bp, Listeria innocua
atgatgaatttaaaaaatatttttgaaaaatggggctacgggcatttgaaggaagaaattgaagatttagaggatggctatgaagtagtaataaatgtagtagatagagatacttttaatcttatgaatgatttaaacgaatcaactaaatttactgtttatgaagattgcattaacgatactataacaatagcgcatagctaa

SEQ ID NO: 2372 - DNA, 366 bp, Listeria innocua; identical to SEQ ID NO: 264

SEQ ID NO: 2373 - DNA, 612 bp, Listeria innocua
atgaaaaagccttttttaaaacatgtagtagcaccgataattgttggactattggtaataacgccgattacgcatgtatctgcagcagtaaggaatgttgatacaactccagttattacgcaaaaagaagttgaaagtggtatacaagataacaacaatgaattaccgaacgaatttattgtcagagatcaagtcaacccaagtgaaccagttaatcaagaaagacagctattaaaaagtgcaagtctaggttatgagaaatggaccaaagtatctacaacaagaaaagtttcaaaaggatttatcgcatggcatcctggatggaaaaattatcaatataatgtttctgcttattattttagtaaagcaacaatgaatgtgagcgcgagtattggttatggaaaattcagtatgtctgtatcaaaagcaggctcaaacggacaaattattaaagcgaatccaaaaaagtggacaagacctgcaatatatgggaatgtagatgttacgaagtatactgttaaaaaatataacggcgctggaatttacacaggatcgacaacaaaatacgcaagtactgctacaagtacttatgtccaaagtcgtaataaataa

SEQ ID NO: 2374 - DNA, 366 bp, Listeria innocua
atgaagaaaaagtggttaataatactgttggtagtaatagtaatttgcgcttcattattcggaataaagtggttagttgataggaataacattgtaggaatgatacaagttgatggacttgtatacgttatgaccaatgaaccagcaaataaagatgacgctttagagaaaattggagagataaagaataagataaaaaggtataaaacgccagacaaagatttcacatctaataagttagctgaaggatctgaactttataaagcaaaaaatggagaggaccttccaaggactattttgtataaagatgatggcaagtattacgttgcatcagaagctgcggaacagccaaatcaaaagcaatag

SEQ ID NO: 2375 - DNA, 222 bp, Listeria innocua
atgagaaaatatagctttaatgatttcgcatacatttgctatattgaggggaagaaaagtgcggtagagaaaattttctcggaaatttttgaatcgaaaaaattaaaagcgttttgtaagaaagtagaaaagaaggatatagatttaaaaacaatttataaagaatacttagatatgcaagtaattaaaaacgattaccaacaaaaaagaagcagatattag

SEQ ID NO: 2376 - DNA, 1863 bp, Listeria innocua
atgtcgattaaatctaaaattatgaaagtcgggatttgtagtgccatggttatggtaccactatctcaagtttctttacctagttttgccgcagaagaacaaggattacaagcaagtcaagatgtagtaaatattccagatccagaactaaaaaaacaattaaattctcatatgtcgaaaccagctactgctgatattacagaagatgaaatgagtaggctagataatgtttcattaagttcaggtattactgacctaactgggttagagtatgcaaagaatattactagaatatcattccgtggtataaatgcttcctatgacgtagtaacaaaacttcctaaacttaataatttaactatcacaggttctaatattacttctgataaaattcctaatctaaatagtatgactaatttagaaaatttatatttatacgaatcaaattttgacaattcgttacttcctaaaattaacgcgcttcccaatttaaaaacccttaatataggttataataagcaaataactaatattagttcattaaaaagccttcccaatttaaccgatttagtagttatgggctgccaaattgacgatttcagagggattgcagattttccgaaattagaaaattttaatggtacttatcaaagatttgaagatgaagcaagcaagagtcttaaaagtagtgagctaacatttaatgaagcagaacaaacactatttatcccatttaaaattttggaaaaacaaacgatttataactacgatggaaccattttaccctacgatacaaatcctgctaatttaatgattgaaatagattctggttatgaatttacggatgataaaactactatttcacaagaaggcgttacactaaagaatttttccaaagaaaattatgatggcatggaaatgttatatatagtcgctatgttcgatggaattaacattgcaacaccaccaaatttagctaatggaacatataatataactggaaatctttctggtggattatatgacgtcgatcattctgtaagtattgaagcagatgataatgtatcttatacgcaaggacaaaccgtaacaccagaacaattcttaaaagatattaatgcaagtgccaatggtggaacaattacaagcgactttgcagataaagtagatttctccacaccgggaacttatacagttactttaaatgcatcaaattcagttggtttaacggctgatccagtgcaagtaaccgttactatcgttgaacaaacagtgattactgcagaaacagaagttagttacaatatgaatgacgcaaaaacagaagctgaatttttagcggatattaatgctgtaacgaacaatagtgctgcgattacgacagactttgatacagttgttgatttaacaacagctggtgaatatacagttacactaaatgcgggaacagcgaaacaaaaagcaacaccatttaaagttactgttaaagttgtagatccaacaccggcgccagcaccagatccaacgccgacaccggatccaacaccgtcaccagatccaacaccaacaccagaccctgcatctgaccctgatccatcaaacgatccagcgccagcagaagatcctggaacatccattgactcaacgggttcaatggactcaactgatccagctaattcaacatcagaagattcaagttcttctactccgaaagctagtaaaaaagctaactctggtaactcaacattagtaacagccagcaaagcaagtttaccaaaaacaggtgattctttacctgtaactggagtagcagtaggattcttagttttaggattaggcgttctaattgctcgtaaaaaataa

SEQ ID NO: 2377 - DNA, 318 bp, Listeria innocua
atgaaaaataatggatttacgctcccgtttatactttttatagcgttgattacaatattaattgtgacaggtagcgcttcaatttttaagactcaaattcaatatgaaaaacaacttcaaaactattatttagcatctgcagagttgaatttagcactgttagtagcaaaagatgattcgatgttagccaaccaacttaacatagaatacggtagctcaataataaaatgtcaatcaactgacgatactttatctagctttaactgcaacatcaccctagaaaatggttatacgctaacaaaaacaacgaacccataa

SEQ ID NO: 2378 - DNA, 465 bp, Listeria innocua
gtgcaaaaactaatacaattgaaaaatgtacattatagaaagagcacatcagccttcactttgcttgaaacaattctatcgatcaccatcgttttaagtatcagctctcttattccattatttttcgaatgttatcataaaactatccagcttagtaatttagatcaaacaagtgaatggcaattatttttggtacaaactcggttagaattagaaaaagcaacaaatatacaagtacatccagaaaaactctctttcaaagtaaatgataatctcgttacttattcaaaatacaataacattctacgacggcaagtaaacggtaaaggacatgagcctttattacacaaagtaactaattggcaaatcaccaatgaggaaaaccagcttattttaaaagttactttttccaataataagttctatacttccaaattccctctgacgaaagcgaatgaattctaa

SEQ ID NO: 2379 - DNA, 423 bp, Listeria innocua
atgaaaaagaacgccttcactttactagaaatgttactcgtcatatccattagtctcactatgattaccctaactatttatccaattgcaaacactatcactgcacttacagagaaacaactattagaggaagtaaaagccgctatttaccttgcccaaataaatgctataacatcaaaacaagatactaccatttcttttattcctaatgaaaatcaattcattgcgacttataacaatcaaccacttatcactattccatttggaactactttaagtttacaacaaacaaaaactgagaattatcgtttttctagtctagacggaactatcaatcgtttttctacgattcatctttcaggaacaaataaaaattataagcttatattccaaattgggaaaggacgttttcgtgttgaataa

SEQ ID NO: 2380 - DNA, 513 bp, Listeria innocua; identical to SEQ ID NO: 381

SEQ ID NO: 2381 - DNA, 1341 bp, Listeria innocua
gtgagccgaattgacatcggagaaatacaaacctttgcgtaccaactacatacagccaatgaagcagcaagaaagagtatcaaagacatcaaaactgccgtgaaaaattataccgaagacggcagtttaaaaggaaaagcagttgatgcatcgaaaaattattaccaaatgacctatttcccattatgtgatgcgataatcgaagccatgaacgaaagcgaagaacgattagcacagtatatagctgattttcacgcccaagtggatggttctgcggatgcgaaaattgatgcggacggtttatacgaactcgggaaaatgattgatcgcatcgaagcgaaaaaaaaagcattagcccagcagatgaatactggaacggaaggacagatgcagagctatcgttcccagctgagtatcgcctacaaacaagaaaatattttagaaaaatacttggcttttgaacaaagccatggcggtttttttgataatttaaccgatttagtccgaggaattcagcagactattcgcgaactccagtcgaacattcaatttaacagtaaaaccggcacctatgatatgagcaagctgaattttaccaccgtaacccggatgcaaaaagccttaggaaaagcgctaaaaagcaacgaaacaacattcaattttgatgaatatcaaaaaacgtaccgtggtcaaatgtgggtgttaatgaaaaatggtatagtagatgttgaagcaacgaacgcgtacaatgccgctgtgcttagcggagaattaccaccagagcctaaccaaggaatagaagatgccaagttattaaaaggaatcatacaatccgtaaaagctagaagggatccactaaccggacaagaaataagcttgttgcaaggaataagtatcatagctggcatcacctttacatacacagctggagcttaccatgggaaaaggcttgcaattcctaaacttaaagatttggtgaggaagaagagtgctagcggttctgcaggtacagtctgggatgacattaagggttcacaacctccaagagaaggaactactattcctaaatcgtttgaaataaatgttaatggagagaagttatgggtgaatcccaatggaaccaaacatatggtagaatactcaactcgaaatttatctcatggacaaaaacttaccgagcaacaattgttaaggagttttcaaggtgctgtagaaaaagctacctctaatgtgataaagtttaatactaaaatagtcatagataattgggaattaatatttagtccggctagagaagcaggacaattaccagttattaaacatgctgtatatctaccttga

SEQ ID NO: 2382 - DNA, 378 bp, Listeria innocua
atggaatggaaacaaataaaaaacgaaaccgatattgtaaaattaatggactcattaaattattttcatgatagttgcattactggtttaacttactcaagtagcacatatgtagacgaaactgacttatcaatggtgatgggcacgaatccagtagttaaattgattattcaaagacaagcagattcattaacgaccctagaattttgtttagaaggcgttactcatttatgcatacataacgatttaaacacgtcgtcagaaatccaagaagcaaatctttactataaaaacggtaactttcattggaacgttgatgatgaaatggcaagttttaaatgtaagaaagtatcgtggagagaaattcaaaagaaatag

SEQ ID NO: 2383 - DNA, 228 bp, Listeria innocua; identical to SEQ ID NO: 62

SEQ ID NO: 2384 - DNA, 429 bp, Listeria innocua
gtgaaactgacgaatgattttatagagagaaatatgcggcagtttcaccgatatgcactaagaacccttcattacgcagctctcaccgcctactatgagcggctgcggttagggaaaaatacaatcacattttcaagtctatcctttcaagaaacccgtctcctttatcgtattgatcagcactttactgacgatactatcttcaatgtattggattatgaaattattgtacaagacaataatctggctaacgcattaaactgtctgccagagcagggacgtaatatcattctgctcaaatactttcttgggtggacagacagaaaaatcggagaggctttttcaagttatgactcttcaacacgcaaacgtcggttagcggcattaagggttctacggataatatatgaggaacaaaacggtgagtaa

SEQ ID NO: 2385 - DNA, 687 bp, Listeria innocua
ttgcatttactcatcataaatggcagtcctcgcaaaagtggtgctaccgcaaaaattttaacctatatccatgaaaaactctgcacaatggattcggaacttgaaataacgcacattgatttaagcaattataatttaaaattgtgtgtgggttgcatgggctgctataaaactggatattgctttattcaagatgatggagtggaaagattacgcagtctcatcgatcaatgcgatggcttgattcttggaagtccaacctataccagcaatgtatccgggtatttaaaaattctaatgtatcgtgggtattttatttttgaacaacttcttagaaataaaccatgtttctctgttatcacttatgagaatgcgggtggaaaaaaggcacaaaaaattctaaatgaatttatacactattctggtggctcggttagcggacattatagaaaaaagctgaatcacggttcagaggtattaaacaaggcaactgaaaaaaccatagatagaaaatgtgcacagtatttggtcagagcaaaaagaacaatgtctttatctgttcttgaaattgtgatgagagctattgtttttcatgtaggacttcgcagacatgcaatgaaaaatccagttcgctataaagcagttattgatcgttggaataacaaaggctatacccagacgagatag

SEQ ID NO: 2386 - DNA, 762 bp, Listeria innocua
atgagaactgtcttaataacaggcactaccagtggtataggctatgcactaagtgagctttttgctaaaaaagagtgtcatgtcattttggtatcacggaatgctatgaagctatccgcacaaaaacaaaagctggaaaacggaaataaccgtattgataccattacatgtgaccttgaacagactaatgctgctgaaataatatataaatctattaagcagaacggatggcaagttgacatattggtaaataatgctggctttaatgaagcagggttattttctgaaacagatgccacatgcgaacaaggcatgataaatttacatatcaattttgtaaccgatatgatgaagttgtttattcctgaaatgattcagaatagtcatggacatatattaaatgttggttcaaccggctcctacattgcttgccctaaagatgctgtctatgctgcttcaaaagcgtatatccttcatctttcaaaagcggttcatgctgaattaaaaggcacaggtgtcacagtaacaacgctttgccccggctcaacacgcactgaatttgcacataaagcaaaaatagaacacacattattatttaagatattcgttatgtctccccataaggttgcgttgtccggcttgcgtgctatggaaaagggcaagtctgtcataataccaggtctttataataaaattttagttttatgttctcgattattgccctattcctttattggctggatgacgaaaaaaatgttatag

SEQ ID NO: 2387 - DNA, 438 bp, Listeria innocua
atggaatatattgcgcatgaagtggctgagaagttgggcattacagttcccacactgcactactatgaaaaagctggtttgcttccatcaataaaaagaaatagtgtaggaaatagaatatacacagaagagaatattgaatggctttacatgattgtgttgatgcgggaagttggcgtaccgattcgtgaaatacgctcttacatacaattattgttgaagggccctgaaacaatccctgaacgctatcaattagtaacgcagtacaagcaatctgtagaagaaaagatgaaggcaatgcaaacttctttaaaatggctgggtgctaaagtgaatttctatcaggaaatgatggatacaggggagaacaagccttgccgtacctttctggaggaatctgaactttttaggttgaagcaagcggaggagcaaaaatga

SEQ ID NO: 2388 - DNA, 906 bp, Listeria innocua
atgaaccagcagcctgaacaaatcaccgccctgtattgccgtctatctcgtgatgacgaacttcaaggcgatagcaacagcattgtgaatcagaaatcaattctctcaaagtacgcagaagaacaccgcttactcaacactcgcttctttattgatgatggggtatcaggaactacctttgaccgtcccggactgaatgaaatgcttgctctaattgatgaggaaaaagtatctactgtaatagtcaaggacatgagcaggctcggcagggattatttgaaggttggtctgcttaccgaaatccaactaccggaaaaaggtgttcggtttatcgctatcaatgatggcgttgacagtaatcaaggcgtcagtgagttcatcgcattccgcaatgtgattaatgaatggtacgccaaagataccagtaagaaaatcaaagctgtgtttacagcaaaaggacaatccggcaaaccgcttagcaccttcccgccttatggatatatcaaagacccagaggacaaaaatcgctggattgtagatgaagctgccgccgaggttgttcgtgagatattccggctttgcatggagggtaacggccccactaaaattgctcggatattatctgagcgcagggtgctgataccgtctgcttatgcaaagtcaaacggcagaagcgcacctgctgatgttcccgctgatcgatgtaaatggtgtgacagtaccgtggctcatatccttgaacggaaagagtatctggggcatacggtgaattttaaaacctacaaggaatcctttcggaataagaaacagcggaagaacccgaaagaaaaccaaatggtatttgaaaacacccatcagcctatcattgaacaggatgtatgggataccgtccagcagctgcgttag

SEQ ID NO: 2389 - DNA, 720 bp, Listeria innocua
atgttcagcggcattgcccattgtgctgattgcgggagcaagctgtattactgcacaaccagatactttgagacaaggcatgaccatttccggtgttctgcttcgcaaaaagcggttgacccgtgtacatcccatttcatccgtgctgttgtgctggaagaaatggtactggcgcacatgcgctatgtgattggctttgtacagcggtatgaggacagctttcgggtgtccatcgaagcagaacgttccacggaaatccaaaaagagttaagtgccaagcggaaacaaatagcacagtctcagaagcgtgtagatgatctggatgtattattccgtaaagtctatgaggacaacgctagtgggaagctgacggatgaacgcttcatgcagttgtcaagaggatatgatctggaacagaaaacactgcggcaaatgattacaatgctagaaaaagagattgatcagcaggaacaaaagaccacacaggtagaagatttcattgccaagtgcaagcggtactctagcctagaaacattgacccctgccatcctcaatgaccttgtgatcaaggtatttgtggaagcaccggacaaaagcactggcaagcgcagacaggggattcatatcagttacaatcttgtggggatactgccaccactggaacgcttccagcctgttgtagttgagcgaccaaacaaagaaaaagcagaaacggcgtag

SEQ ID NO: 2390 - DNA, 639 bp, Listeria innocua
ttggaaaaagggatgacgaacattaaaagaaatatttataaattacttttatttttacttagtttgctagtagcttttattgtatatttccgtatattttataatatcttacccatgtactttggcaatatggagagcttgaataaaaatgttttagcttttgggattgtggtattcacactatacattttactcaaaatggtttttaagcttcaaaataaatgggatggatatttattactcttattgtatttattcgttttaactatcggcttattaagacctgatgatagtgtatctttagagtcctattttaatgtcaatgtgatgcttattttggaagatttacgcgttaatgaagcttcgtggtccgtacttttaattaatttagtgttattcactcctatgtattttctgctaagctttgttccatttttggatgattttctaaagcgctttattgccttttttactttgattttagtaatcgaaagcttgcaatctatattaaaagtggggatgtttgatgtaaccgatttgctattatatatcatcggatttttcgttggattcggagtttactgttgtataaaaaaggtatttagagcacaaaagcccagaaactcgagccaattttaa

SEQ ID NO: 2391 - DNA, 240 bp, Listeria innocua
atgaaaaaaatcatcaagtttatttttgttactttatttattttatttttagtagattgtttatggacaatgattcaaacaaaagacggattagattcacctctttggctacaaattgtttatttattagcttatctagtttctgcaattggtgcctataaagaaaagtggttcggtttttttatcgcatttttatttggagttatgattatgatagcaagtattattatcactttataa

SEQ ID NO: 2392 - DNA, 927 bp, Listeria innocua
atgactacagttaacggggtactctttaggcaaaatttagtctcaagttcaaagtataacatcaaagcacctaatactatgaagcccaaaaaagtcactattcacaatacgtataataatgcttcatcgcaaaacgagaccgattactgtaagaacaacaataatgaagttagtttccacgtcgcagttgatgataaagaagctattcaagtcgtgcctttcaatcgtaatgcctggcactgcggagatggtgccaatggtttcggtaacagaaatacaatcggtgtagagacgtgttacagtaagtctggaggagctaaatatatagcagctgaaaaaaatactattaaatatgtcgctggattgtgcgtgcaacaagatattatcgcctcaaaagatactattaaaaaacatcaagactggtccggtaagtattgtccacatcgtatccttgatgataaacgatggccagcagtgcaacaagcaattatagatgagtacaatcgtattacatctaaaaatccgaataggcacagcggacaggtcgttggcagtgcgccactattgccgaagacggattttaaatcaaatccggcgcggatgtataaatcgggaactgagttcttagtatatgagcacaatcagtattggtacaagacttatattgatgacaaattatactacatgtataagagtttttgcgatgttgtagctaaaaaagacgcaaaaggtcgcatcaaagttcgaattaaaagcgcgaaagatctacgcattccagtttggaataacacaaaattaaactcaggtaaaatcaaatggtatgcgcctaatacgaaattatcttggtacaataacggtaaaggttatttggaactctggtacgaaaaagacggctggtactacacagcgaattacttcttgaaataa

SEQ ID NO: 2393 - DNA, 234 bp, Listeria innocua
atgaaatttagtaaagggcaaagagtaaaagtagttgatacagatagcgtaaagaatgataaacagctagatgaaacagctaaaaacatcattgataaaagtaagtacaaaggaataatcacaaagacagttcgtggtgaaggagataaagatttattctttgtctctttttatattaatgacgaaagaataacgcaaggattccgagaaaatgaaatcgaaggggtggagtaa

SEQ ID NO: 2394 - DNA, 261 bp, Listeria innocua
atgaaaatcaattggaaagtacgaatgaaatcgaaagtgttttgggtatcggttatcccacttgtgctagtcttagcgcagcaattgctcggctggtttggtgtgacaattcccgcagatacagtcaacaagcaagcattagattttgtaaattcagtgttcttgctactaggtgtcttaggtgtagttaacgaccctaccacagaagggacagctgatagcgagcttgttcttaatagaaatagaaaggatgaggaataa

SEQ ID NO: 2395 - DNA, 216 bp, Listeria innocua; identical to SEQ ID NO: 46

SEQ ID NO: 2396 - DNA, 447 bp, Listeria innocua
atggaaaacgaaaaggaaaaaatagattatgtgtccagagcagagttatttgagcatggaattgatataaaaaaagagatgtcaagaaaagtcgataaagttgagagcaaagtagataaaatcggtgaggaagtagtagaactgaaagttctggtgattccgatggtcacgtcatcaaaagagacagctcaaaacacgcagaagatggcggacacacttgaacgatatacgcgatcaacaacaaagcagttgcacgaacatgacttagaaatcgccggcgtgaagcactcaatcgataatactttaaaaagtataagtgatgaagagtctgaggagaaacataagaagtttagtaatgtgcaaattataacttctgttttagctcttatagggataattttaggcggaattctaagctgggattggggacaatttatatttaaatga

SEQ ID NO: 2397 - DNA, 447 bp, Listeria innocua
atgaaaacaaaatggcgaaagtttatagatcaaatgcttgaaactaattacaaagaagtttttgcgttgtttttcttgttatcagtttcattttataatattctgactggtttttttttgatgacgtctggtgataaaattgttgaaaaaagcaagacatatcaactgatggacaatcttatgacaattgacacatgggggttgttgtttattttaagtgctgcactgatactaattgcatcttttcaagaatcaaatgcaagatttataaatttgatgattggcgggggaataggtgcgatagtgctgttcttatattcagcagcgagctcagagagtgctgttacaaatttattgcccagccgctatgctctaagcgcatgttttaatctatttgttgcggtaatggggggcttggaattatggaaaacgaaaaggaaaaaatag

SEQ ID NO: 2398 - DNA, 126 bp, Listeria innocua
atggctgtgatttatttgaatttgattctcaacggtaagaaaacattcaaagaagtaccacgcttactgcaagcgcaagtaaaagcattgttaattgacgcagattgcgctgaattagcagagtaa

SEQ ID NO: 2399 - DNA, 342 bp, Listeria innocua; identical to SEQ ID NO: 228

SEQ ID NO: 2400 - DNA, 729 bp, Listeria innocua
atgtcacgatttaatgcgaatttagcaccctgggaagcaacgggaacaaagccaccagacagtaccattcaaaacggatggttggcggggactaagccgccggccgattggtttaactggtattttaatagcacatatacagcattgaaggagctacaagaacttgctgcattaaatgcagatttaataaatcatacaggaaatacaaataatccacacagtgtaacaaaagctcaacttggtttaagtgatgtagaaaattttggaattgcatctctggatgaagctaaagcgggtattgccagtaacaaactaatgactcctgcgagtgtgttagcagcaataaaagagcgatttaatacgcaaaatatccttttcgaaggtgcagcctggccttccggaaatacgtacaaattcgccaacagtcaaaaagtttctgatcaaaatttaggcttgattttcatttggagtgattatgacgtaatacctggatcagcaagtgttgcaaataattataactttgactttacatttatccctaaattttttgttgataagcatgccggagcaaacataaatgtgccagtcgctacaaatttcaatgctcaagtcgctcaaatcacaattaaaacattatatcttacagatacaacttttgctgggcacgatttaaactcaagtggcttaaatgcgaatgatgctattttacgctatatcataggagtgtga

SEQ ID NO: 2401 - DNA, 642 bp, Listeria innocua; identical to SEQ ID NO: 447

SEQ ID NO: 2402 - DNA, 1152 bp, Listeria innocua
atgcttgatgaaaatggctttaaaagaaagacttttgatgagctgttgaccgacatggaaattaaagcaactgaactttatggagaagacgtcaatttgagtgcacattcggcgttaggtgtttttttaagaatcattgcctggttcttagcactatcaaatgaattagctgaacgtgtttataactctggttttatcggtacagctggtggagtgcaattggaccggttaggcagtaataatagtattatgcgtgatcctgcaatgcctgcagtagttgttttggaaatagaaggaaatcctggttatgttattgaagaaggagtccagtttaaaactaataatgacatagtttttgaaatgattgatgtgatcattcttgatgaaaatggccgtggttcaggacaagcaatatctcaaatttattcggataaagctaatgtagctgcaaatacaataacagtagttgctgagccgagtgaggatattttaaaagttaataacccactgggagctactggtggatcgaagaaagaaaatgacactacttatagagcaaggattaaagtagcgatgcaagcaagtcctggtcctccaatcaatggaattataacagcactaaaccaagttccaggtgttcgaagtgtttcagtagtcgagaataatagcatgaccgtagattcatcaaataatcctgcaaagtctgtgcatatttatgcctttggaggaattgaagaagaaattggggaagcgatttttaacagcgtggcagctggtgttcaaacagttggtaatattgctgtcaaagtcaaagatttatcagattttgagcatgtagtttattacgatagggctactgcactacaaatttatgcaggtattgatgttattgtaaactcaaaatttgaagaaagcggcgaaaatgatattaagcaagcggtgcttaattatataaattctttaaacatgggagaatcagtaatacattcatatatttatcctgaattatacaaaatagctggtataaagattgcaagtgtaaaaatcggaaaaagtgcagatactttagcttcatcagatgtggtggctaacattgatgaagctgcttctattcgctgggaagatattgaggtgacaataaatgtccgttaa

SEQ ID NO: 2403 - DNA, 363 bp, Listeria innocua
atgaaagatttactaataagttcagatggtgatttacttattgaacaaaatgagataatgatgacggatggcattgaagatattattcaatctgtacgtttgattttgctgactcgtaaaggtgagttttattttgatcaagattctggattggtttatgaaaacttgttttcaaaactgccaaactttgactatattaagcaagatattgttactgcgataacagaacaagaagagcgtgtatctagtgtagatagcgttctttttaattttaataaatctgataggaagctattcgtaagtataaaaatgactgcagatgatattcctgtaagtatagaagaggtgattttaaatgcttga

SEQ ID NO: 2404 - DNA, 339 bp, Listeria innocua
gtggcacaagatacaaagttctttgattcatttattcgattagtaaattcaagtgtatcagtacttcttatgtgtagagtcgttaattatgatgcaagtaacaaacgagcggatgtgcaaccattgaatttaaagcccaacggagcaaaacgagcaatgattttagatgctttagtattaaagcataccgaagaagatattgcacaaggaaagatagtagctgtagtattttgcgattgcgaattagataacatcaatggctctgcagatttcatgactgacagcgctaggcaacacagcatcaatgatgccgttgtcgtaggagtgtgggatgtatga

SEQ ID NO: 2405 - DNA, 807 bp, Listeria innocua
atgcaatggatgcgagaagtattcgtgtatatcgataatggatcagaatatgcgacgattcgagaaataaatgaagcaagtggtagcttgaaacttaattttagtatacctttctcagatgaaccaaagccttcagagtgcgaagttattatttataatttagcaccttcatctgtaaataaaataaaaaaaggttctgctatatctgttacagcaggatataagggtgatataggtttattatctcgcggaaaaatctcaaaagtatctactgtaccgagtggaacagacaaattaacgacaatcaaattcactgaaggtgtagattatgaagacaaaaaagatgtaaatattacctttaaaaaagggtcgtccgcaaaatcaattattcaaagagtcgcttctaaagcaggaattaaaatataccaaataaatcttccggcaaataaaatttataaatctggatataccgctgacggtgatgctctatcaattattgaagagattgttaaagactgtaaagctgcaatttattatcgacgtggtaacttgattattagatcaattaaaacaggtgatgatgagcgattcttgttaaattctgggacggggctgatatcttccccagaacgactggaaaatgacgactattccggttggagctttcagtcattgctacagcatcgaattgctacagcatcaattattactttaaaatctaaaacagctaatgggacttttagggttaaaaatgggacacatagttatgatggttctacttttacaactcagtgtgaggtggtctaa

SEQ ID NO: 2406 - DNA, 366 bp, Listeria innocua
atggcgattagaagttatataccagtggaacttgataatattcctgaaatctttgaatttgatttcgatagcagaagttatctatttggcattaattatgcagaatcacaggacgttttttcagttgatttatttgatattgaaggtaacgcaattgtattaggagaaaagttagtgttaaacgaacgactgtgggcagatgttatagatgacagattaccagcagcagatattgttcctttagatgaatcaggaaaagaagtatctattacaaaagataattttacaaaaacagtgtttttatattttgacgaattagctccgaatgttgattttccaacgttagaaggcgaggtcgatgtttaa

SEQ ID NO: 2407 - DNA, 564 bp, Listeria innocua
atggtagcaacgttaggttcagtaaaattagtaaatacaaatgaaaacgagtcttctccgtttacaattacggataatcctgttgaaacaggtgcaaatgtttctgatcacgttcaacgtgaaacgaaaacactagaaattagtggctttttgcttggagctactgctgaaagagattacgctactttaaaagactatgctgagaaaggtactatagttacatttcggggacgtgtatatttcaaaaacgtactaattagtaatctatcaaaaagctataatacaataaaaaatggtttcgaaattacgatatcgctcagagatttaaggcgcgcatcgacgccctgggtgcgaaagaaaaagaaaagttcaggaaaaaaacaaccagtgaaaccaaaaaagcaaccggtcaaaaaaacaacagcagtctacgtgacagttaaatcaggggactgttattggaagtggtggaagcgatatggtacaagtatcgctcagcttaggaaatggaataagtggccagaccgtagaattccgaatggtgcgagagcgagggttaagtga

SEQ ID NO: 2408 - DNA, 4716 bp, Listeria innocua
atggaaggcgcattgagaaaaacaacaatcgaaattgattggaaaatcaataatcaaatgttgcagaaagctgatgaggaaactgatcgcatcgttcgttctgcggataaaatggaacgaaacttcaatcaaacttctagggctgttgacggcaccacccgtgctatacataaacagtcaaatgaagtgagagagagtgcgactcgagtagataagcttgataagaattttaaagaagcaaagaactcggctaatcaatttgggaattctgctaagggtgcagttgataaaactaaaaactccgtagactcagcaaagaatagcgttaataagttagataatgaaattgataaaacaactaaaaatgctaattctaaattcagcgcactaaaaacaaccattattgcagttggtagcgctttggtggttgctggtgggaaagcaatgtttaattatgcatcagatacaaatgagtcattaaataaagtggacgtagcatttaaaggaaatgctgaaagtgtcaaacggtggtccaaaacaactctggataatatcgggcttgcgcaaggtacggcgttggacttagctgccacttacggcgatatgtcaacatcaatgggattgagcacacaggaagcagaaaaaatgtcgacttccatggtcgacttggccggaaacttagcgtcatttaaaaatattgatattgatagagcgaatacagccctaaacggcgtattcacaggtgaaactgaagcgttaaaaagtttaggtattgtaatgactcaaacgaacctagaacaattcgcactggaaacaggcgctggaaaagttgcgaaaagtagcactgaagttacaaagcaaaatattgcacgtgaaaaagcacaaaagaaattaaatgaagcgataaaagaacatggtaaaaattcgttagaagcaagggaagcacaaaataaattacaggaaattcaagctaaaacaagcgaaggcgcaaaagttaatttaaaagacatgaaacaagatgagctagtacgtctacgttataactatgttatgaagcagactactaatgcgcatggagattttaaaaacactagtgatcaagctgcaaacgcaagccgagtattttctgaatcagtaaaagagctagcatcaaatgctggacagttcttgctaccaatcattacaccgctaattatacaagcgagtgatttcacgaaaaaactttctgatattcctggagctgtaaaggggatgaaggagaaattcaagccggctttcgaggtattcgaaacagttggagatttcttcaaaaaagaccttatcccaagtgcgaaagaattagcgaaaagtatgggacccggtttcatcgagggtggagttttagcatttaaaggattaggcatagtattaaacactactgttattcccgcttttaaagcagttactaagtttacgcgtgaaaatccggacagcatgaaaaggattgctaagtatgcgactgttggtgtagccggatttttagggtttaagttagttaaaaatactatcgataaagtaacagttgctattggaaaaatgaacagcaaactattgaacattggaccgagcgctgcggctggtgcgacagaagcaaatgttgcgatgtcaactataggaacaaccagcaatggcggtggcggagttgtattgcctgggggaaaaggaaaagggaaagttaaacttttcagcaaagctactgcaggactcaaaggcatgggtaaattcggtaagttggctagcggtgtaggtgttttaggtgtaggattaagcgctactgagttgattggtatgaacaaaaataatgcaggtgaaaaaactggtggctttggtggttctttaggtggtatggctggtggtgctgcaataggaactatgattgctcctggagtaggtacagctattggtggggcaattggcgcttttgctggaactgcattaggtaaagaattagggaaatatgttcaaaaagaaggaccaaaaatattagataaattcaagacaggttggaaaggcttaagcaaaattgctgaagagcatccgattttaggagcaaatataaatgtaataaataaaactatcgatgcggcaaagaaaggcattaaagcagttggagacacgcataaaactgtttggaatgcttcaaaatcaatagtcgccgacccgctcaaaattgatgcgagcagtaaaggtgtttctaaagactctgctaaagcaatgaacgagtatttacgaaatgagcagaaaatgcaagatagtcgagtcgaaatcatggtatctggtcgtcgtattactgaaaaagaactcgaaaacaacataaaaacatatgataaaatgtctgatcagttaatagctgcaactgaaaaaaaatcagcaaaagcaaataaagattgggataagctagtagcacttggggctgtttctaaagatacagctagcgcaaagaaacacactaataatgaaactgcatcaataaataaagcggatattaaagcgaataacgaagaattaaaagctttagaaagagaattctataaagggcaagaagagattacacgaaatgctgaaaatagaattaatgctattaaacagaaagctagcaaagagaaacggaaattaacaaaagatgaagaaaaagaaatccaaagaatggaaacaacaacacttgagttccgtcgttctgaacgacgttcttatgaaaaagaagttagaaagattgaagaaaagcaaaggaaagaagctgctattgcactcactgcttcagctaaagaacaaaaaataatactaggaaacttagaaaactcgaaagaaaaaatgtcagcaaaagcagcagcaagtgttgttaaaaattccgcaaaagctagagatgcatccgtaaaagaagctaataaagagtataaacagactaaaaaaatacttgatgaaaaacgatttgtcacaggtgaaatttcagaagaagaatatcaagatgcgctgaaaaatgcgaagaaaaagaaaaacggcgtagttaaagaagcggagaagatgcacgataatgtagtgcgagaagctcagcaacaagcaaaaggacatttaagagaagtagattgggaaactggtgaaacattaaataagtgggagcaatttaaaaaaggaacagttgaaacatttaacagtataaaagatgcagcgctcggaaaatggaacgagttgtcctctgcgacagttaatattttcagtggaatgaaagatacagcgttgagagtatttgatagttttaagacaaacttgtataaagtcattaataatgtaattaccggagtcaataaagtactatcgttctttaacattaagacaatacctgtgcttgggaacggtagcataggttcaagtcaagaaaacagtttatctgcaaaggataagaaaacgtatcattctacatcccaatcaggaaatctagctatgaactatactggttctaataatgcaagtggccaaattatggctggtgaggaaggtttcgagattgcatataacaagaactcagcacaagcgagaattctaggggaaaatggtcctgagataaccactgtagcacctggaacaaagatccttaatcatgcggagtctaagaaaattatggctggtggcatgggagcaggaaaaatacttcctggattcgcaaaagggaatagcacaattggcgattttgtttctgcaagcgttgataaagttcaggcagctggcggggcaattcgagatggtgcctcggcaatgtgggactggatgtctgatcccgttggaaaagttaaagacttaatagcgaaaaataatacgtttaatggcgaaggtatacaagcgctaggtggaggtatagttaaatattttgggaatggagtaacaaactacgtaaaagataaaataggttcttacatgagctctagttctggattaggaccttccactggaggaacatttggaccacgcttcggctctccgttcagatttacgtctggatacggaccacgtgtggtttttggtaaatctgaatttcacaaagggatcgactatggcgcacctacgggcacaccgttgccggcgcaacattcaggtatagtatcattcgcaggtggtgcaggaggttttggaaacctgattaaaattaaggttgcacaaggagtagaaacactttatggtcacttgtccaagattttaacgtcgagtggtgcagttgtgagagcaggtcaaacaataggtttagtgggaagcacaggccgttcgactggaccgcatgtacactatcaggtaaatgcaaatggttctcctgttaatcctggaagtgcaattggaggaaagaaaaaagcatctggatcggaagatgtagctaaaattgcggaaaagaaaggtctagcattcagacggggcggaagaccaccactgaacaaacaagttcttgttggtgaggaaggtccggaattatttgaaactgatagccctggaatgattcatacagcacagaaaacgaaacaaatgctaaataaaagctcttcaggaacaacaatcaacttcaatcccacgattaacattactattgaaggtggatcgagcgaaagcgagtcatctattcgaaaaactgttcgagcggaaatggaaaaattattcgaaaaacttgttggaatttatactcctggagaggtgtga

SEQ ID NO: 2409 - DNA, 213 bp, Listeria innocua; identical to SEQ ID NO: 40

SEQ ID NO: 2410 - DNA, 357 bp, Listeria innocua
atggcagagaagaaaaataatgcaactaaaagtgatgtagcagcagctcaagcagcacaaaagattccgaaagtagaaaaaaaacctttggataaatttggaaaaaaagaagtattcaaagctagcaacaaggttgaatacacattccagttccctggaactcgcgctgcacaagcaatcttagacgagtctaagaatggctatggcgtgattgtggattctgtatattatgagcgaattatgaaagatgtaattgttgagcctttgggtttggacttagattattgggatgaacatgaagggtatcgcgaggttatgaatgcggcggataactttcttggtaaattgcttaactga

SEQ ID NO: 2411 - DNA, 399 bp, Listeria innocua
atgggcgaagtaatggcaacatatgatgcaaatacagtatcgacaattatcaacggaatttctatttttggtttttctgatggggatatggtttcatgctctaaagattcaaacaatgtagaaattaaatcagacgcacaaggtaattcgtcagcagctgttaataatgacaaaatgggtacaatcaaagttgatttagctcagacatcaccttgttatccaaagctgattgatatagcaaatagacagctcaaagttcctatttacgttattaacggaaaagaaaaaattggtgggtctatggcttttatcgaaaaattaccagacgcaggttttggtaaaagtgttgggacaaggtcatttactttcaaagtactagattatacacatactgcataa

SEQ ID NO: 2412 - DNA, 996 bp, Listeria innocua
atggtagaaactattacagatgtaagagtacacatttctgtattgtatccctctccgcgaattgggttaggtcgtcctgcgatttttgtcaaaggaacggcgatgggttacaaggaatacactactctcgaagaattgaaagatacgtttgcagataatacagaagtctatgcgaaagcaaaagcagtgtttcttcaaaaagatagacccgacacagtggcagtcatcacttacgaggatacgaaattactagaagccgctgaagcgtacttcttgaagtcgtggcattttgctttgcttgcagagtttaaagctgcggatgctcttgcgttatcaaacttgatcgaagaacagaaatttaaatttgcggtgttccaagttacagctgtcgctgatattacaccacttgcaaaaaacacacgtactatagcaattgttcacagcaaaactggagaaaaactagatgcagcgctaattgggaatgtagcaagtttgccggttggttccgcaacatggaaaggccgtcatggacttgcaggaatcacatcagaagagcttaaagtatctgaaattgatgcaattcaaaaagctggaggcatgtgctatatcgaaaaagcaggtattgcacaaactagtgaaggaaaaactgtttcaggcgaattcatcgactccattcatggcgatgattggatcaaagcaacaattgaaactcgtcttcagaagctgcttacagaaacagacaaacttacttttgatgcacgaggtattgcgctgcttcaaagtgagttgactactgtcttaaatgaaggttttgcgaacggaatcattgatagtaatgatgagacgggggagcccaatttttctattactgcgcttcaacgttcagatttaaatgatgacgatattgctaaacgaaattacaaagggctatcattccgctacaaacgttccggggctattcattccgtggatgtatacggcgaagtggaagtataa

SEQ ID NO: 2413 - DNA, 489 bp, Listeria innocua
gtgccaaatgatactgctggttatgactatggaaaacttgttaaaactttgattaatgctgttaatgagctttcgggcgggttacaacttatcgaaagttctagtggtggggaacaaccagaatatccattttgccaatacaccataacatctccttacattgctatcagtcctgatatagtcgaaggggagcaatttgagattgtaatctcgcttacatggcgagccttatccggccatcaagcgttaaacttggccaacattacaaataagtatttccgctcccaaaaagggcgtttttttatgcaagaaaatgggggtattgttgttgtcagtgttcaaaacagcgggctgcgcgatactttcattagcattgaatatgagcgctcggcaggcattgatttgcggttgcgtgtagttgattcgtattcaagtgaaatacaagaaattgataatatcagctttacaaatgagaatttaggaggataa

SEQ ID NO: 2414 - DNA, 375 bp, Listeria innocua; identical to SEQ ID NO: 279

SEQ ID NO: 2415 - DNA, 600 bp, Listeria innocua
atgaaggtaactactgataaatctacaatgaacaaagcaatcagggagcttgatcagctagaccgatatagtttgcaaatcggtctttttggtgaagatgattcttttattcaaatgattgctggtgttcacgaattcggtttaaccatacgcccgaaaggcaagtatctaaccataccaacgccagaagctggtgataggagagcgcgagatattcctggtctatttaaaccaaaaggtaaaaatattcttgctgtggcaggtcctgatggtaaattgacggtcatgttctatttaaagaccgaagttaatattccggaacgttcttttttgaggtccacatttgatgagaaaagcaataaatggggagagttgtttgagggatggatagatgacgttattcatggaaagttaagcgccgagcaggtatataatcgattaggcgccaaaattgtggacgatatacaaatgaaaattgttgagattcaaactccggccaagtcagcagcgactttggccagaaaccccagaaaaaataatcctttaattgtcaccggtaaaatgaaaaatagtgttacttggaaggtgatgaagtcataa

SEQ ID NO: 2416 - DNA, 336 bp, Listeria innocua; identical to SEQ ID NO: 224

SEQ ID NO: 2417 - DNA, 387 bp, Listeria innocua; identical to SEQ ID NO: 285

SEQ ID NO: 2418 - DNA, 906 bp, Listeria innocua; identical to SEQ ID NO: 537

SEQ ID NO: 2419 - DNA, 450 bp, Listeria innocua; identical to SEQ ID NO: 341

SEQ ID NO: 2420 - DNA, 1110 bp, Listeria innocua; identical to SEQ ID NO: 584

SEQ ID NO: 2421 - DNA, 171 bp, Listeria innocua
gtgattaactacaaaaaatggcttgatagcatgatggccaccgaagacggaaaaatactttttgaacgttataaaaaactttatggacattacccgccattcttacttgacgcaacagagaaagaacagtgggatgaaattaaacgattgataaaagacgctgataaatga

SEQ ID NO: 2422 - DNA, 1410 bp, Listeria innocua
atggctaaaagacgcgttcctgcgactcgctatccacataatttagaaaagagttatactaaacagctagtaaaacttagcacggctttgtctgacatgtttttacatgaatttgacacaaatattagtgccattctaaaaacgtctcaaaatcgctctgatgcgttcagagaagatggtataagtgatgccgttcaagctgttttaaataaagtaaaggcgctaagttttggattattcaacccgcgagacaagtattctattgcaagtaaacatgttaaagcaataaatacgactaataaatcacaaataggcaatcaagtgcgctcacaaggaattgagcccacacagtctgaaccatggttaagtgagttcatggacgcttcgattgccgaaaatgtaagttatattggttcaattgcagacgaatttaacgccaaaacagaacaaataattttgcgtggtgtaaaaagtggccaatcattaaaagatatgcgtgatgaactggttacgcaagtaggtacatcaaaaaataaagctgaatttatcgctaatgaccagaccggaacaatctttgggcagatgacagccgagaggcataagaaagcaggcatacccggctttacttggagagattcaggagatgcagcggttagaccatcacaccacgcaagaaatggtaaagtttattcatatgatgatccaactgcaccgattcctggaactgattatagatgtcgttgcactgctggtcctgaatttgatgaatctgtagttaaagctgcaacaaatgagcgtaaacaacaagagctagaagataaagcaacattaaaaaacgcttatagcgaagtagctcaagctgctcaaaaagctccggataatgttaaggacttaataagtagtaacattactgcaaattcttttgagatagtacgagataataatattgcatatgcttatcgcccttcaagcaagaagataattattaatccaagtaataaagctttaaaatattataataaacaagaaatattgcttcacgaatctggtcatttgatagattatgcgaaatataaatcttgggaaaataaaagttttactatttccactcagatagagaagaaagttgcaaagtgggatgagataaatgaattgttcagtcatgaaaaatgggcaaacgatgattactttagcgatatttgttcggcacttacggaaaatagagtaaaaggtaatgcaggacatgccgcttcatattggaaacgaaaagggagcattgaaaaagagatttttgcaaatttatttgctatgctagcaatgaacaaacaagaatcaattgctatggtaaaaaaacaatttccgatgatttacggatcgttcattaaaatgttagaaggtgaattgaagtga

SEQ ID NO: 2423 - DNA, 1386 bp, Listeria innocua
atgtattcaattgataaagcaaaacaagcaaagatagattcaaagatagttaataggaatgatttcatggttggccatggaaaagcaaactctcgtgacaagttaacaaggcaaacaccaggtaacggccaaaaattagatttgaaagcatgtgagaatttatatgcttctaacagtattgctatgaatattgtagatattatctcggaagatatggttcgagcaggttggtctttaaagactgataacaaagaaatgaaaaagaacatcgagtcaaaatggcgtaagttaaaaacaaaggatcgatttcagaagctttatgcagataaacgactttacggcgatggctttctaagtattggcgtagtatcaagtaatagggaacaggcggatttgagcactgctatcgatccaaaaacaattaaaagtattccatatattaatacttttaatacacagaaagtaactcaactctatttgaatcaagatatgtttagtgagcactttggtgaagttgagttttttgaagttaatcgcgtgtcccaactaggagaagaaatattatccggaacgacagcatctacttcagaacaaattcaccgttcgaggataatacacgagcaaggattgcgttttgagggcgaaacaaaaggaaggtccatatttgaatcgctttatgatattattaccgtgatggatacatcgctttggtctgtaggtcaaattttgtatgactttgcttttaaagtgtataaaaccgatgacatagacgctttgaataaggatgataaggcgaatttaacggcaatgctagatttcatgtttcgtactgaggcactcgcaattatcaaaggagatgaacagctgactaaagaatcgacaaatgtgtcaggaatgaaggatttgctcgattatggatgggattatttggcaggagctgttcgaatgcctaaaacagttctaaaaggtcaagaagcaggtactcttacaggtgcgcaatatgatgttatgaactactatgcgcgagtttcgtctatccaggaaaacagacttcgacctcaattggaatatttaacaagattgctgatgtgggcaagtgatgattgtggtccgagtattgatccagattcttttgaatgggctattgaatttaatccgctctggaacttagacagtaagacagatgccgaagttagaaaactaactgcagaagcagatcagatttatattgtaaatggtgtattagaccctgacgaagtgaaagaaacacgttttggacgtttcggattagagaattcttctaaattcagtggtgatagcgcagaaattgataaattagctaagcttgtctatgacgcgtatgcgaagaagaacgcagatggctaa

SEQ ID NO: 2424 - DNA, 1461 bp, Listeria innocua; identical to SEQ ID NO: 628

SEQ ID NO: 2425 - DNA, 885 bp, Listeria innocua
atggcaaggaaacgcgacccacgaagaattgaagcgaaaaatatgtggcttgaatccggcggaaaaatgaaactggttgatattgcaaataaactaggctgctcttctaatcagatacggaagtggaaatcaacagaaaaatggtccatcgatgacgaaatagagagcgttcctaaatcgaatagtaacgttactaatgaaaaggaacgttaccataagttaaaagggaacagcaacgcaatcggtaatcgcggaggtgcaccaccagggaatggtaatgcggttggtaacgttggcggtagcgcaccaattggcaataagaacgctgttaccacaggggagtttgaaacgttgtcctgggagtttttaacagaaagagagcagcagttgtatgagagcatggacggcaatttagtaactcacattaaccaaactatccgtgagttagaaattagaaaacggcgtatgatggaacgcatcgcaaacattgaaaaatcaatgtctgatattgaaagaagcacgcttaaacagctaagagaaaaggagtacattggtgagaagaatggaaaaaaggttgttcttcacagacaagagctagtaaccgttgaggagcgcgaaaaggtaactgctaaaatcgaccgaatactaagtcttgaaaactcgttgaataacgtcactaaccaactaatcagagcaattaaacaacaaagcgacctagaacaagccgaattaaaaaaaggtcttatacgctctcaaacgagcctaaatcgcgagaagctatataaaccagatgaagcaaataaaagtaccgcagtaaataagcctgacttctcgggaatgagtacagaggagttgaggagttatgcagcaagccttagaaaatga

SEQ ID NO: 2426 - DNA, 225 bp, Listeria innocua
atgacccttatattttggactaaaaatggacaagagatggaatttgatctagttgaaaatgtagagattgacgagaaaattattacattcgattactatggagaaggtgaaaaaagaggcgtagtgtttatattaaataatcttgctggcatggctgtagaggatgagaattcggagagtgaaagtaaagatggcgcatcttggtttaaagtgtacaggggttaa

SEQ ID NO: 2427 - DNA, 231 bp, Listeria innocua; identical to SEQ ID NO: 66

SEQ ID NO: 2428 - DNA, 198 bp, Listeria innocua
atgagagaagatattcaacgattaaaagataaagcggacacagctaaaatgaaatatcatcgaaatttaattgatagagaaacagctaagaaacaaataattccatacgcggaagcttttaatactagatcgaaagagattgctaaaaagtataatcaaaagcctaaattactttcagtagcagcgtttttaagataa

SEQ ID NO: 2429 - DNA, 1338 bp, Listeria innocua; identical to SEQ ID NO: 615

SEQ ID NO: 2430 - DNA, 768 bp, Listeria innocua; identical to SEQ ID NO: 494

SEQ ID NO: 2431 - DNA, 426 bp, Listeria innocua; identical to SEQ ID NO: 322

SEQ ID NO: 2432 - DNA, 561 bp, Listeria innocua
atgtataaaacagaaaaacgaacattacggcaaaacaaaatgattcatgctttgattagtgacatcgtaaagcacacttataacgattttgaagcgacaaaaccgagaagcttcagcaatgattgtcaagttgtcaaagaaactttaaaagtggcgtatgcagttgaagcgaatttaccgggtgatttcagtacagcgaagttatcaaaaatacaagctcgcgacttcataagttccattatagagttttgctttcaatttgatataccgttatccgcttcaggactgcaaatgacggatgatatcaatagatatttgttcttatgtatcaaatacagaaaatgtgctataacggggcgcagaggcgaaatacaccatgttgattccttaggcgctggaagagatagaagaaattatgatcacagtaaatcaagattaatctgtttatctcgagaaatgcacacagaagcacatcagattggatggttaacgtttaaaaacaaataccacgttgatggaataattttaagtccggatgctgtaaaagaattaaatatataa

SEQ ID NO: 2433 - DNA, 252 bp, Listeria innocua
atgacagtacacaaattaaagattctacctgagtttttcgagaaaaaaagaacacttgtaaaagcgtttgaaataagaaagaatgaccgtaattttatggtcggggatactcttatcctgcaagaatatgtaaatggtgaatacactggccgagagtattgggaagatgttgtttatattaccgactacttgcaaaaagaaggaattgtagtcatgggtacactaccaaatgagcgagaatatccgttttaa

SEQ ID NO: 2434 - DNA, 681 bp, Listeria innocua; identical to SEQ ID NO: 468

SEQ ID NO: 2435 - DNA, 945 bp, Listeria innocua; identical to SEQ ID NO: 547

SEQ ID NO: 2436 - DNA, 1362 bp, Listeria innocua; identical to SEQ ID NO: 2326

SEQ ID NO: 2437 - DNA, 423 bp, Listeria innocua; identical to SEQ ID NO: 2325

SEQ ID NO: 2438 - DNA, 177 bp, Listeria innocua; identical to SEQ ID NO: 2324

SEQ ID NO: 2439 - DNA, 378 bp, Listeria innocua; identical to SEQ ID NO: 2323

SEQ ID NO: 2440 - DNA, 621 bp, Listeria innocua; identical to SEQ ID NO: 2322

SEQ ID NO: 2441 - DNA, 438 bp, Listeria innocua; identical to SEQ ID NO: 330

SEQ ID NO: 2442 - DNA, 240 bp, Listeria innocua; identical to SEQ ID NO: 2320

SEQ ID NO: 2443 - DNA, 228 bp, Listeria innocua; identical to SEQ ID NO: 2319

SEQ ID NO: 2444 - DNA, 864 bp, Listeria innocua; identical to SEQ ID NO: 2318

SEQ ID NO: 2445 - DNA, 918 bp, Listeria innocua; identical to SEQ ID NO: 2317

SEQ ID NO: 2446 - DNA, 759 bp, Listeria innocua; identical to SEQ ID NO: 2316

SEQ ID NO: 2447 - DNA, 783 bp, Listeria innocua; identical to SEQ ID NO: 2315

SEQ ID NO: 2448 - DNA, 1983 bp, Listeria innocua
atggatttcaaaatttcaaacaagatgcaaaggagaaaacagatgaaaacaattaaattgctaaagcttcaactagaaaattttaaaggtatcaaggaactagaaattgattttcaagataatacatcaatatacggagcgaatgcttcggggaaaacaacaatcttagatgcgttcacttggcttttattcgataaagacagcacaaataaaaaagactttgctattaaaacattagatatggaaggtaaagttattcacaagttgaatcatgttgtaaccgcagtgattgatgttgatggcgaacaagttgagttgtctaaaaagtacatggagaagtggacaaaatcaagaggaaaactagaacaagagttaacaagtcatactacagaatattatatcgacgagatcaaaaagaaagcgaatggatataagtcatttattagcgagctactagacgaggaacttttcaaactaattactaaccctctttattttaatgagcaatttgactggaaaaaaagacgtgcaatgctaattaaaattgcaggtgatgtaacagacgcagaagtaacgagtgcagatgattcactgaaagatttaagcatctttcttggaaagcactcgattgaagataaattaattcagattaatgaacagcgcaagaacttgcgtaaaagattagaacttatccccgaacttgtaaatgaagctactaaagctaaacaagatgtaaccggcttaaatccaagcgatattaaaggtgaattatcagtaattgaagaacagattcaatttatcgaacaagaaaaaaatgttctgaaaaacggtggtatacaaactgagcttaataagcaaaaagcgaacattgaactggaacttacaaaaatcaaagcaaatgagcaaaaagaaacacaagaactattaatgagtaaaaaagaagaaattttcgaagaaagaaatgaacttatagatgtaaataaccggattggtgaatctacttttcttattcagcgtaaacaaggagaaattgcaactaagcagcaagaattaactaaattaggcaaagagtgggacgtattgcaggtagaaaaatttgacgaacatcgcaaaaaatgcccgacctgcaatcaagatttcccagcagaacatttgagttctatgattgaaaaattcaatcaagaaaaggcagaaaaaattaaagaaaatgaagctgcaggaaagtcaagtaaagcagtaattgaagaaacagaaggtgatattgctgaactttcgtttgatattaaagcgaatgaacttgaattgaataatattgaatcaaaattagagattttggaacaggaaaaaacagctttagaacatcagctggaacaagctgaaaactctactacttacatcgagaaacaatctgaactggaaatgattgaagaaaaactgcgtgatgaaaaaggttcttctataactgcagtagcagagattcaaatcaaaattgataaattgaatgctgaagcaagtgatttaaaagctgatttagcaaaatttgatagcaatcagaaacaagaaaatcgcattcaggaattagaagaagaagcagcagaaaaaggcgctaagtacgacgaattggaaatgggattatatctcattgaacgatttaataaagcaaaatgtaatcttcttgaagacaagattaacagcaagttcaaatatgtttcattcaagttatttaaaacgcaaattaacggtgggattgatgagtgctgtgaaacgatttacaacggtgttccttacaattccggattgaacaatgccgctagaatcaacggtggtttggacattattaacgcactaacagagcatgttcaagttagggcaacgatatttgtagataacagggagtcggtaacggaactaattgatacagaatcacaattagtaagcttaatcgtttctgagtcagataaaaatttgagagtggaggcatag

SEQ ID NO: 2449 - DNA, 342 bp, Listeria innocua; identical to SEQ ID NO: 2313

SEQ ID NO: 2450 - DNA, 228 bp, Listeria innocua
atgcaaattaagactaatgagctcattgaaattttaaagaattcaagaactcactcattagaacgaatcaaagctttagagattaacttattcaagtacaaacgtgtaaataccaagccacctaagcaactaactgaaaggattgctaatcacgagaagaagattgaaacaataaaaaaattagaagacgaattgaagcaatcagaaaatgaagtttgtaaattttaa

SEQ ID NO: 2451 - DNA, 291 bp, Listeria innocua
atggaagaaataagagcaattcagaaagttgtgaccgttaataacgaaaaaaaatatattgtaagaattacaccaatcaatgactccacaggaagaaagacgtttaaaggcgtaaaagtaaatatgttacttgaaaatggagagcactttgctcaagatacttttgcatcaaccatcagccctggaataattgaaagctggattgtaaatatgcacaacgcaagcgaaaaaattcaaaaaaccatggatgcttttgaaagttgggatggtgaattgaatgaatactggtga

SEQ ID NO: 2452 - DNA, 525 bp, Listeria innocua; identical to SEQ ID NO: 392

SEQ ID NO: 2453 - DNA, 225 bp, Listeria innocua
atgaaaaacaataatttgtctgatgctagaaaagaaaagggattaactcaacaggaattagcagaaaaattacaagtaagaaaatcaacagtttctaactgggaaactgggtatagttctcccggcataagcacagcaattcagacagctataatcttggataaagatgtcagctttttatttggaaataaagtacaagaaactcatacaagagttagggattaa

SEQ ID NO: 2454 - DNA, 441 bp, Listeria innocua
atgatttcaaatagaattaagtctgcaaggaagtatagaaagctcactcaagaagaattagcaaaaaaaataaattctactaagagcacaataagtaactatgaaaattcatatagttcaccttcggcagaagttatatctatgcttgcagacgccttagagacaagcacagattatttactagaaaaaacagatgagattgaaattaaacagaaatattatgatcttactaagaaagatgaaaatgatattgaaaaagaattagaaaaaatcctcagtaatttagattcatcagacggtctagcattctcaggggaaccactggatgacgaaacaagagaactactttcaatatcattagaaagatcactcagattcgcaagacaagagtcaaaaagaaaattcactcccaaaaaatttagagataaagattctgattaa

SEQ ID NO: 2455 - DNA, 423 bp, Listeria innocua
atgacaatgtatgcgtggatgattgaaaaacaagatgacataataaaaaaatggaacactagaaatccttttgaaattgccgaattcctcgaaattgctatcttttttgaggatcttggtaacatgtacgggtattacaatatgaaaaaccgtattaaaatgattcatattaacgaaaatataactattgatgaacaaatattcacttgtgcacatgaattgcaacatgcaatatttcatgagcaggctaatacaccttttctatccgaacacacacttcagtctgtacagaaaatcgaaactcaagctaattttttagcaacaaggttattgattgcaaatagaaaaatagatggaatcaacacaaaaattgagttgttaagatattatgggatacctcttgagatggcgaggttcttataa

SEQ ID NO: 2456 - DNA, 549 bp, Listeria innocua
atgaagaagattttgttaagcgggttaattatttttactggtgtgattttgatcagttgcggagatcaaaaagaaactgaatcaactacaacaaaagataacgcagatgaacaaaaaattacaactgaagatattcaagttccagatgatgtaaaaaaagttgcaagtcaactaggagaagataagattcctacagaagatttgaaagtaacacaagataattattacatcgatggagaaaaaacaaatgttaatctagtaaaattgttaaacagtgaatctacatcaagtataaacgcaatattaaatagtgataacaaagcagcaaaagaatacaaatttaacggtagcaattcaggaactctcatgctattgctcgcagccgtaaacagcaaacttgatactcaagtctcgaaagaaatagtaaatgctaatgatactaatgaaagtgttgagaaagaactcagttcagacacaagcaatgtattattcaaatatgacccagcgagcgatgatcattctatgcatgctactattactttaaaataa

SEQ ID NO: 2457 - DNA, 1176 bp, Listeria innocua
atggcaaagaacaaatggcaacccactaaacatttaggaatttatgaatacatgactaaaaaaggaaagcgttatgggatacgagttcgttataagcaaggtaatgattatcctgaaataaataaatctggttttgagacaattgcagctgcaaaagtttataaaaacaacattgaaaatttgaaagctaataaaaaagaatatgtttttacaaatgaaaaattaacattaaatacttggtttgcttcttacatggaaatgtttaaaaagaaaaacaaaagtaaagacacaatagcgaataaatatagtatttataataatcacttagaaatcccttttggtaattactatttaactgatataagtttagatatttacgaagactttttgcgcgaaaaaattaaaaatggatacgcaaacaactcagtcaaagcgatgcataaattaatgaaaagcattttaaacgctgctgttagatatgagaaactagaaaaaaacagacttcaatttgctgaaatagagcaattagaagaaaatgaagttattgagcttaaggtattagaaacagatgagtttaatgtatttatatcagcttgtagagcattttttactaaatatgattttacaatgatttatcttgcagtttgggggatgcgtcgcggtgaagttatgggggtaaaacttaaaaatcttacttttgatgatgctaaacaacaagtacgtattacactagattccactcgaacccttcgtactcccgagggaaaaggtacgaaaacaccagctggtagaagaatattactaatagacggcgaaggttatcgactacttaaatattcggtagaaaaagcggttagcattgctaaagaccatggatctgttttgcaccaggatgattttatttttagaaacccaacttctaatcgtccttgggcggttacgcgtatgaatgatttactacgaaaattagaaaaagaatacgacataaaagtttaccctcatctattacgccataactttaatactcaggcattattggctggagctaatagcaatgatttacgaaaatttattggccacaaaaacagtagcatgactgatcattattcacatgcgacagacgagggacgagaaaaattaatgaatacgatgaaagacagattgtcaggaatctag

SEQ ID NO: 2458 - DNA, 378 bp, Listeria innocua
atgaaaaacagtatagactacattaaaactgtccaaaatgtaaaacgtttttttgaggagtttcagtatttggttttccttttaggacctaggaacaagatacaacttaattctgagggtatagtagaaaaaaagttaataacagatgacagtagcgatataactgcaataggaaaattagttcaattatatacagagatattaaataccatgaaacctctgcatcgtttcattctaattaaatgttatattgataaacaaaaagacatcgctacaatgatggaattaccttatgaaatagcacaatttaaaagaataaaaaaacaagccgttctcagtttagccgaagaacttgagattatcgttgaaaaaaactag

SEQ ID NO: 2459 - DNA, 972 bp, Listeria innocua; identical to SEQ ID NO: 555

SEQ ID NO: 2460 - DNA, 465 bp, Listeria innocua
aaaaatattaatgatgttctagaaatgagcgtagatgaggctatctcatttttggaaagttcaacgattgacctatccgtattaaatatccttaaaaaaatagggatggattatgtgaaattaggtcaacctacctcaactcttagtggtggtgaggctcagagaattaaattagcaaaagaaattggaaaaacaagaaaaaaagataccctttatgtgttagatgaaccgtcagcgggcttaagtcaatatgacatttcaaaattgctttatttactaaatgagttagttacaagtggtaattcagtaattgttattgaacatgatctcgatatattaaaatgctgtgactggattatagagcttggcgaaggtagtggagacaagggcggagaagttattgcacaaggaactccaatcgacttaagcgaaaataatgtatctattacagggaggtatttataa

SEQ ID NO: 2461 - DNA, 1863 bp, Listeria innocua
atggactatattcaaattgaaaacgcatatattaataacctgaaaaatataagtatagaaatccctaaaaataaatttattgtaattactggaatcagtggttcaggaaaatcaagtttagcattcgatttgatttttgaagaaggtagaaaaaagtatcttcaatcaataggaatggctttagattttggaacagactattatacaaatattaccgggttaagtcccactgtagcagtaaagcaaaacctcatcagacaaagtaatccgcgctctactgttggatctaaaacaggacttttaaacaaattttgtctattattcgcaaatgaaggttcttaccaagatagtgaaagtttttcgttagctaatgatgatataaatcctgatattttttcctatctttcgccaaatgggatgtgttttgactgcgctggaactggtaaacaatttcatattcatatggaaaatattatttcatctaaaacagtgacggtcgaacaagtatttcaacaaattggttcaacaaaaggttatcttaatttactacagagaaaatatactgcttattttcatgaagctttttcgaattgtcccatcgagattcaaaatgaattaatttatggtgtagtagataattactctgggaaaacaagttattgcattgaacgagtattacataatcggtatctacgtaatgaagatgttcagagattttattcacaagaaatctgtgaatcctgtaatggctaccgcatttgtgatgaagctagaatgatgaaaattgctaatctacacttgggtgaaattgccagcatgtcgttaataaaagtaaaagaattccttgataattatatagagatgaataaattgtcagcttttgggacagagttatctcgttcgcttattacaactttaaattcactcatccatattaaactaggacatttaacgatgtatcgagagattccgaccttaagtggaggcgaactacaacgaatttttttatatgaccacttagaatcaaaactagattcactcatctacgtgtttgacgaacctactagcggactacacgaatcagaaaaacaagagattatcgagtcacttcaatcaatcaaagcccatggaaacactgtacttattgtttctcatgataaaaaaataataaaagctgctgatcatattattgatgttggaacaaatgctggagatttaggcggtgaaatagtttatcaaggatcctattcagagtttctgaataatcgccattcgcttacttcaaaatttctagattatgatatgacaaaaagtttcaaaaaaaataagcagaaaacaaaagatacactaagcattagtaatgcaaaccgaaacaatttaaaaaacatttcaattgaaattccgattaacagacttgttggaattgctggagtttctgggagtggaaaaagtacattaatatctaaaacattagtaccactctgcaaagaacaattaaagaacagcgatttcagtaatccaaatatcaaaggaatggataaaatacaaaagataattgaaatatcacaagctccaattggacgcaaagcaaattcaaacccggtcacttatataggtttatgggataagataagagaattatttgcaaaacaacctcaagccgttaaggaaggattaaaagcaggcgatttttcttttaactcaaatggcgcatgcctatcttgtaaaggtagtggggttgaagatatttcgattggctacgacattcaatttagtaaaacttgtccagaatgtaatgggacacgatttaattctaaaaccctgcaagttttgtacaagaaaaaaatattaatgatgttctag

SEQ ID NO: 2462 - DNA, 906 bp, Listeria innocua
gtgacaacgagcaaatatgaaaacgaatattggaaacatattttcgccttacaagattatattgaagctcatccagcagagaatttcacatccgaacaattagcaaaaattgctggattatccaaataccactttcatagaatttttaaagcgttaacaaatgagtcgatatttcaatatacaacaagaataaaaatggaatgggcgcttggcttactaatgaatcgaaaggatttaacaataaccgatgtagcatatgaacttggcttcagcgattcttccgttttttctagggcattcaagaaatatttcgatgtgtctcctatagaaattagaaaacaaaatagcaacaattgcaaagagaattttcttacttcccgctataataagcctgtagatgaaaaacaatataatattccaggcaaagtaaccattactacgctacagaatatacctgtcatctataagagaatagtaggttcttacaaggaattagaactcaccaaccctttgagtgaactctttcaatatggaatggagcatgatttacttgataaagattcatcgtttccgttgacaatttaccatagccatcccgatataacaacagctgataatcagagagctagtagttgtattattattaaacaaaatgttaagcagttagacagtgaggaaatcgggcttatggagataccttctgggttatacggagtcattcattttgaaatacgtcaaaaagagtatccagatgcttgggattttgtttacggaaattggcttccttctagtggttatttgccagcaaactcatttccatttgaagtatatttaaacaatccactggaagacccacttcaaaaacatattgtggatatctatattcctattgaaccaataaactaa

SEQ ID NO: 2463 - DNA, 534 bp, Listeria innocua; identical to SEQ ID NO: 399

SEQ ID NO: 2464 - DNA, 363 bp, Listeria innocua
atgaaagtttataatttaggtgtagaagctacactcgatattatgggtggaaaatggaaacccttgattatttgttttcttgttcaagggactaagcggactggcgagctgcaaagatgtattccgaaaatatcacagaaggttctagttcagcaactaagggaattagagagagatgggattattgatcgtacggtgtataatgagcttccacctaaagtcgagtatagtataactgcttacgggcttactttaaatgctatagttgatacaatgtgtcagtggggaaaagaaaatatcgcacttagaaacagccaaggagaaccagtgacactaatcgaaaaatcttataaccttcagtaa

SEQ ID NO: 2465 - DNA, 195 bp, Listeria innocua
atggctacatctaaagcgaaaaagaaacgccaaaaactagtgcgtgaaggtcgtttaaatccagaaatcaaacgaagcccctttgcactaattgacctaagctccaagcaaacaaaaactaaaaaaggatatctttatagtaggaaaaagaagaatcaccaagaagatgattcttttttttgcggttttttttaa

SEQ ID NO: 2466 - DNA, 285 bp, Listeria innocua
gtgacgaagttccggcagaaatgctcggaagtggaacgaggtaaaccccacgagcgagaaactcaaacttatggtaggggcacttttcccgaggaatcaagaacaagggacgaggcgcaaatgtatttttgtgcagatagatggttatctctttactattaccctgtatgtagtaaagaacagaacatggcttacagagcgttatttacaggatttaatttaacattgaaggctgttttagaaggccggagcgcaagttttaaggtgggtgttcgacctggttga

SEQ ID NO: 2467 - DNA, 2295 bp, Listeria innocua
atgaaaagaattatatctgtattgtgcatttttgctattgtactgggattgtttagcccattcacaattaaagcaagtgcagcaaccaatacaaataaaacatttgaagagctttatgcagaagctaaaaaacatttaggtaaaccatattcgcaagaccaggacaagagaagagggccaaattacttcgactgctcaggttacacacaatatgtttatgaaaaagtaacaggagtaagaattcctaatacttcagctcctcaatattcagctgctgataaagtgaaaaatggtaatcaaaaacctggtgatttagtatatttcaaaggtcatgtaggaatatacataggtaatggtaaaatgattaatgctcaaaatgatggagtcaaaatagacaacattaatagtagttattggcagagtatttttgttggatacggaagatttttcaatttctccgagaaaaaaggatctaaatccgcctatgctgtgtcagatttaaatttacgatctagcaataactgggatagttcagtagctggaaaagttccacaaggcgctaaagtatctattgacttagacagtgataagaatggttggtgtatggtaacttataataatactaaaggttatatgttaaatacaactaattatttctccgatacacctgtgataaaaacatactatgccaaggataatataaacttaagaacgaaagcaacatgggatagcgatgtagctcaaaaagtacaaaaaggtgaaaaagttactgtgaaccttaaaactaatgtgaatggttggtatcaagtaacatacggcggaaaaacaggctatatgattttaaataataattacttagtagaaaatcccttgaatatggaaacgtattatgcggttggtaccttaaatctgcgtagtgcagcaaactgggatagtagcattagcttagttgtaccagaaggcagagctgtaaaagtagaaatggatacaaatagtggtccttggtataaagtaacatatcaaaaccaaacaggttacatcccactaacagatgattatttatccaaaactactgttctaaaaacgtattacgctaaagataatttaaacctaagaacaaaagcaacttgggatagcgacgttgctcaaaaagtacaaaaaggtgaaaaagtaacagttaatttaaaaacaagtgtaaatggttggtatcaagtaacttatggtggtaaaaaaggttacatgatcttaaatgataactatttagtcgaaaaagcgcttaatatgaaaacctattatgcggtgagtagcttaaatttacgtagtgaggcgaaatgggatagtagcataagtcaagtggttccagaaggtagagctgtcaaagtcgaaatggacacgaatgttggcaattggtttaaagtaacctatgacaataaaacaggttatatgccactaaatgatttatatttatctgaaaccgctgtgttaaaaacctattatgcaaaagataatttaaacttacgtagcgaagcaaaatgggatagtgaagttactcaaaaagtagaaaaaggtgaaaaagtaacagtcaattcgaaaacaagtatcgatggctggtatgaagtaacatacggtggtaagaaaggctatatgattttaaataataattatcttgtagcagaaccactagatttgaaaacatattacgcagttaacacattaaatttacgtagtgaatctaaatgggacagcagcataagccaagtggtacctgaaggcgctaaagtaaaagttgaaatgaacacaagtgatggtaattggtacaaagtaacttatcaaaataaaacaggttatatgccgctaaatgatttatatttatctgaaactgctgtgttaaaaacttattatgcaaaagataatttaaacttacgtagcgaagcaaaatgggatagtgaaatttctcaagtagtagaaaaaggtgaaaaagtaactattaattcgaaaacaagtataaatggttggcatgaagtaacttacggtggtaaaaaaggttatatgattttaagtgataactatttagtcgaaaaaccattgaacttgaaaacgtattatgcagtaggagatttaaatttacgtggtgaatctaaatgggatagcgacatagttcaagttattcctgcgggtactccggtaaaagtagaaatggatacaaatgatggtatttggtacaaagtaacgtatcaaagtaaaacaggctatatgccactaacagatgattatttaactttaacagcaaaataa

SEQ ID NO: 2468 - DNA, 174 bp, Listeria innocua
gtgagtattatcgttaatttattacttggcggagcaatttttggatatactatttacgcgattataaaatttgtaaaacgtagcaaagaaggaaaatgcggcggctgcgaactcgaaaaagcttgtaattgcgagtcagacgaacatacgaatttggatcatatatttaaatag

SEQ ID NO: 2469 - DNA, 4869 bp, Listeria innocua
atgaaatatatggtaaaatggagaagtttttttatcgctgcaattattggtttactcgtttttcaaaacttttcgccggtattagcaacgattatagatgaaaaaacaaaaatgataacgcttaaaataattaaagaagataaagatacaaaagaaaaaatcaatggttcttcttttgaaattaaaaataaaaaaactggagaaacaaaagaagtttctataacagaagacgggacaattgtagaaaattcactctcagaaggagaatatattgttaaggaaaagaaggctgccccagggtttactttagacgaacaaacttataacgtcaccttagctgataaagatgaggttataacttctatttcaaccaaagacgaagcagaaaagactccaattgttacagaacaaccctctaaaaaaggaaatctgaaagcagttatagcagataatatttttactgcagtaaaggtagaaaatggaactgggaatgaacttagtacgactaaccgcataaaaaatggcggagcagtagttctgaaaatgaattttactttttcggggaaaaactataaagctggagatacatttaaaacggttttaccagagacattcaactttggaacaaccaatttaacaggagatttcttgccttcaactgaagcgaaatgggacctgaatgcaagcactcgggaattaactattacctttttaaaagatggtgtgcaagaaggtaattatgatattgagcttagtactgcgctaaaaagtttctctgagacagataaaacaaggcaggaagcagtttttaatacggcgggtggtaatacaatttaccagttagaaattattcctgaagtagacaaggctacacaggtaatgctagaagcaactccgggtaaactcaatcctgataaagctaccgtggatgcaaggtttaatttaacaaaagaaagtaatgagctaggggaacttaggctatcggacactgcttacggaggttcgactattattaataggaatagtattaaggtctactcaacagatattagtgctaaaggaacattcattgggtcaaagcaattacttaacgagggtacagattatgaattgatttatgcaccttcaggattaacaattaaattaaaagaaggtctaaaagcaaaaggatatcaagttacctatgagcgttccattgataagacaaatacgtctttgactactttagggacttcagcaacaacagttggaagctctggcatgttatcaaatggaagtatgaccatttcagtaacaataaaagcatatgatcatttaactaaaaaagcagtttataaccctgtaactcaatgtattgattggacaattaatgttaattatgatttagcaaatttgacacctgatacggttttaaaagatgtattaacagacgataatgttagttatgtcgcagattctttgaaaatcaagcaagtcacttttaatgaagaatcaggagaagtagtaataggcgaggatgcgtctaatgattggactgtttcgactatatcagataacggtagttttaatatgaactacaagaaaacagataaaaaagcgtatcaagtaacgtattctacaaaactaaccgattttagtccacgaaaaattaaaaatgaagtaacggatgaaaaaggtgttaaagcaacagaaaactttgatttcaagccagacttactaaaaaaagaagctggagagattgattattataataatacaatggattggactattacagttaattcggaaggtattaatatgcaaaatattaatatcgttgacgagttttctacaggtgtaaaaagtttaatcagctacagtgtgtacgcttatccttctgattcaggctataacatattaactgaaggtagagacttcaccatccaaaaagacgtcacgccagatggttttaaaattaaacttatcggtaactatgcgacaacagataataaaattgttgtgaaaatgaaaacaaaaattgatttaactgatggagcaaacacgctaaataataaagcctcgttttcatattttgacggtagtttaacccagtattcagaaacaataaaggcagaagcaacaccggaaactagtattttagctaacggtgggaaggtcggcaaatggaacccggcaactggtgaaataaattggattgtatctgtcaatgcaatggggaaaaaatataataaattggttttagatgatgaatttctggatggtacaacctttgtagagggatctttacagtatcgtaatgtagttaattcatccgagctgaccgacttgagtattcctctagagataaaagggactttagcacaagttggggatgctaattatccaaccaaaatagacacatcagccaataaaatacatttagaatttggtaatttagatactaatcgtgtatttgttaaatataaaacaaaaccaaaagataattggtttttctcacagtgggtaaacaataaagctatcgtttcagataatggagcagatgaacaaatatacgaaacgaaagagtttgcttttttgcaaaatgaagttattaaggtagctggaaacatcgatagtacatttggaaataaagtgaattggaatatggaacttttgaatattactccagaaagaacactgtctaatccagttattaccaatcgattggaacaaggaaatacgggtgctcagtttattaaaaatagttttcaagtaattaatacaaaaacgaacgaaccgataaacgaagaaaattatgatattacttttgaaggaaatacctttaccattcaatttaaaaactatactgcaatggcgccaatcaaagtaaactacagcacaataagtttactttcaggaccaatttctaacgaaactacggtagaagcagaagattttagtaatgtcccaatgttttttaaaaagagaaatgtggcagtatcaccagtctttactgtgggaactggatcaggtattgcaacgattggtacgattaaaatcacaaaagtggatgaagacgatactacgaagaaattagaaggcgcaaaatttcagctttacacactagatggtgaaaaatctggacaagaaataacaactaattcagaaggtgaaattttactagatggtattcaatctggaaagtataaattagttgaaaccaaagcaccagaaggttacaacattagcgatgaatacaaagaaggaaaagaaattactgtaagttcatctggtgaggaacttcttttaaccatcaagaatgcaatgaaaaaaggcaatgttattttaacgaaaaaggacagtgcatcacatgaagtattagcagatgccgagtttgaattacaaaacgccactgggtcaaaactaaaagaaaaactaacaacagatgcgagcggtaatatagaaataaccgatttagcacccggtgactataagttaattgaaaccaaagcaccaaccggttaccaattagacgcgacaccagttaatttcacgattgattttaaccaatcagaagcagcgaaagtaagcaaaaccaacacagcaaaaacaggcacggtaatgctaacgaaaaaagatagcgcaacaaatgccgagctagcagatgcaacatttgagttgcgaaacgaggacgaaacgctagtccgtgagaatctcgtaacagacgataatggagaaattagtgtagctgatttagcacccggtgactataagctaattgaaactaaagcaccaaccggttaccaattagacgcgacacccgttaatttcacaattgattttaaccaatcagaagtagagaaagtaagcaaaaccaacacagcaaaaacaggcacggtagtgctaacgaaaaaagatagcgcaacaaatgccgagctagccgacgccacatttgagttgcgaaacgagagcgacacattagtccgcgaaaatcttgtaacagatgataatggagaaattagtgtagctgatttagcaccaggcgactataagctaattgaaaccaaagcaccagctggttatcaattagacgcgacaccggttaatttcacgattgattttaatcagtcagaagcagcgaaagtaagcaaaatcaacacagcaaaaacaggcacggtagtgctaacgaaaaaagatagcgcaacaaatgccgagctagcagatgctacatttgagttgcgaaatgagagcgacacattagtccgcgaaaatcttgtaacagatgataatggagaaattagtgtagctgatttagcgccaggcgactataagctaattgaaaccaaagcgccaaccggataccaattagacgcgacaccagttaacttcacgattgattttaaccaatcagaagcagccaaggtaactaaaaccaacaagaaaaaaattggtacaattatagttaactttatagatgtagacggcaatcaattaaatgacaaggaagtgcatactggaaatgttggtgaagaatacagtgtgaaagctaaagaaatcgttggccatacattggttaaagatcccgctaacaaaaaaggtatgtataaagaaacttcacaagaaataacctttgtctatgagaaaaaggcaatgccgattactgtggaacctactgaaccatcaaaaccaacagaacagctaacagaatcagctacagtagcagagccaaaacctataaaacaaaacattaaaacaaccaacaaatcaccaaataataagagaaaacttccttctacaggagatgagttcccttatacaatgctattcactggattgtttgttagtgttgctggagtattcttcttaagaaaacctaaacaaataaaatag

SEQ ID NO: 2470 - DNA, 483 bp, Listeria innocua
atggagaagttctatgatgattccatccgttttgcgggagaaaaaatttatttcgccgccactgataaaggtttgttttatgttgggaaaaataaggaaaacttgcaatcagcgatacatgacccagagaaaatgaggaaatataaagcagaactacttgcttatttaaatggagaaagcattcatttcactttccctattgatttatccggaacagcattacaattagaagtttttgaagccttaaaaacgattccatatggcgaaactagaacctatacagaaatagctgaacaaattaatcgcccaaaagcagtccgtgcagtcggaacagctattggaaaaaaccccttacttgtaattatcccgtgccaccgagtcatcggaaaaagcgggaaactaacagggtatagtggcggaataccaatgaaacaagcgctattaacattagaaaaaaagaatgtaaatcaattttctttttaa

SEQ ID NO: 2471 - DNA, 291 bp, Listeria innocua; identical to SEQ ID NO: 162

SEQ ID NO: 2472 - DNA, 897 bp, Listeria innocua
atgcagaggcaggataaaccggcgacaacataccaaattcaaattgaaaagatgaaacaaaaaaatataataattgaagatgaggcatttgcaattagttttttaaaaaaggttcaatattatagactaagtggatactggttatcatattttgaagatagagaaaaagatattttgaaacctggaataacatttgaaaaaatttcttcagtttatttatttgataaagaattaagaaatattttattgtctatgctagatacgattgaaacggaatttaaatctgttcttgcttatgatttttcgcataattgcggcccgttagcttacaaatatgctaataattttaataaaccagaatactacgcaaaatggcttaataaattttatagtagcataagttattctgatactaatagagaactttatattgaatggtataaaaaagaatataacgggaaatttcctttttggattgtagtagaagtttgcaatttcaatgatatttctaagttttatagtaatttacatattaaaattaaaaagaaaatggttaaaatttatggatatgatgcagaatatattcaaagttggttacacacagttgtgttaatacgaaatatatgcgcccataatgggaggctctataatagaacgataacagtatcgccaaaattacctaatgggacggctaaactaaatataaagagaatatttattgttatatttatattcaaatttttgtgcgttgatcaaacagagtgggaaatatttgtaaataaaatagaagaattaatacaaaaataccaagaggttattgaactagaaatgattggttttcctgaaacgtggaaagaaatgttaattgacagagtggtagttaattcgaataactag

SEQ ID NO: 2473 - DNA, 951 bp, Listeria innocua
atgtcagtactacaatataattatatcaataaaaatcaattttcacgcccaggatataagttgcttagagtaagtaagattgttatgcactatactgcaaaccctggggcaagcgcagataatcacagacgatattttagagatttaaaagagcgttacgcttctgcacatatttttattgatgataatgaagctatttgtattatccctctaaatgaagttgcataccatgcaaacgaaagaagttgcaaattaacagctcttcaagcaagtacaagttactatcgcggcggaaatgcgaatttaacctcaattggtattgaaatgtgcttagataaaaacgggaatatcactgcagcaacatttaatcgatcagttgatgtagctgcagagctatgcaaaacatacgatttaacggctagtgacattatccgtcattacgatgtaaccggaaaaaattgtcctgcgccttgggttgcgaaaccttccgaattaacacgtttcagaaacgcagtcaatgcaaaattgaaaggtgcatcacaaaataaaaacagacatgatggaaaagttgttgacagtgcgccattgcttccaaaaatggactttaaatcgtcgccattccgcatgtataaatcgggaactgagttcttagtatacgaacataatcaatattggtacaagacgtacatcaacgacaaattatactacatgtataagagcttttgcgatgttgtagctaaaaaagatgcgaaaggtcgcatcaaagttagaattaaaagcgcaaaagatttacgcattccggtttggaataatacgaagttgagttcgggcaaaattaaatggtatgcacctaatacgaaattagcatggtacaacaacggaaaaggatacttagagctttggtatccatctgatggctggtattacacagctaactatttcttgaaataa

SEQ ID NO: 2474 - DNA, 282 bp, Listeria innocua; identical to SEQ ID NO: 144

SEQ ID NO: 2475 - DNA, 306 bp, Listeria innocua
ttggtacttgggagcatatcgatagcaggaatgagcgtgggggagttaatagctttaattagcttaatagcggcaattgtgggatttgtaattagatgggcattagtcgcacctttgcggaatatgatagattctcttgatataactttaaaaagtcttagagaagaaatgtctgaaagcaagaaagatcgtatgagtttacgagaaaagcaaaacgaccacgataaagagattgctttattgaaacgggaagataaagcgatttggaaatatgttactgaaaaaaatgaaaaggaggtgaaatga

SEQ ID NO: 2476 - DNA, 147 bp, Listeria innocua
atgattaattggtatgaaaaagtaaaagattattttgtcggtggctactatactaaagcagatgttaataaattcgttactttaaaaaaaataacgagatcacaagcagatgaaataatcgctatgaaagaagcaaaagccgaatag

SEQ ID NO: 2477 - DNA, 342 bp, Listeria innocua; identical to SEQ ID NO: 230

SEQ ID NO: 2478 - DNA, 1074 bp, Listeria innocua
atgactgaaactgaaaacgttattcacaaaaacggcatatatgattttaacgtcacaacgcaagaagataaaccacttcaaaaagctgttttttatacgcaagatacaggcgggacagctagacttatttttaatatagataaagataatcaagatttaggattatcgtctgctgctgaattagagcttgctatgattttagcgaaaggaacagagtcagagagcaagtatcttgtgaaaccaacaatcatcgatggagtgcgaggaattgcagaatacgcacttacagactctcaaatagcgcacgatggaaatgctattgctgaattgtatataaaatacaaaaatagccaagggatgcgtgtgtataaattcagttttgagataaaaaaagcattaatagatagcgactttttcccggtaaaagaatactatgttgaacgttgggatgattatgaaaaaatattcgacgaatcgttcgagagattaaatactaaattagataatgtcgataaaaaagcggatgatttaacaatacaatttgatgctatgcagcccgcacaattcgcacaaaaaacagacttaaatacacatgtaaataatgcggatattcatgtcaccgcagcagataaaactaactggaattcaaaagaaacagcatctagcgcacaggctaaagcagataaagcacttgctgatgcaaaaacttttttcgaactagctagtgcggtgcaaagcgttactttgacgccaaaaaacggatttgttgcaagtcagcctttagtcgctcgatacattaagtttggcaaccggtttctagttattgttagcggaattgtaggaaaagggaccgggaacgggacaggtatatgtgcaacattgccaacttttttagctcctgatgcgagctggaataaactttattccgctgcacagcagagtacagcagcaagtaatcaagcgaatatatatctaagtgtgagtgctgatataaatattgttggtgttggctcggtagacgtgaacactggacttgacggcataatttatttaactaaagaggtgacaacatga

SEQ ID NO: 2479 - DNA, 1029 bp, Listeria innocua; identical to SEQ ID NO: 569

SEQ ID NO: 2480 - DNA, 1014 bp, Listeria innocua; identical to SEQ ID NO: 566

SEQ ID NO: 2481 - DNA, 825 bp, Listeria innocua; identical to SEQ ID NO: 513

SEQ ID NO: 2482 - DNA, 4806 bp, Listeria innocua; identical to SEQ ID NO: 688

SEQ ID NO: 2483 - DNA, 432 bp, Listeria innocua
atgaaatcatttaattttaacgagaatgaagtaaaacttcctttggaaattaacgggaaaaagtattatgcggacatttcggcacaagcacacattaagtacagtgcgcttttggatgaagctcccaaaattttaggacaagttcttgcgcctaaactaaaagctgatgaaagtgatgacgaacatacaataccaaataatgaaaacatgcatgaattgttaatgactatcacagatgggatcgtagcgacaaatgatgatatttttgctatttttttcagcaaagaagacagagaagaaatcaattccaaaacattgccaactaaagtctatgaggggcttattgaatacattatagctaaattatttgaaagcgatatgagcgaggaaagtgacgaggggaagccacaggaaaaaagtattacggaatag

SEQ ID NO: 2484 - DNA, 687 bp, Listeria innocua; identical to SEQ ID NO: 473

SEQ ID NO: 2485 - DNA, 372 bp, Listeria innocua
atgattgaggatttagtagtgcatttcaaaaaaacattcccagatataaaaacacttggattcattaaacaaacagggcttgattcaatggtagtaattaatgaagcaccgacatttcaaaacaagcaagtacaaacgcaaagtcgtgttcgtgagagcatcggctttttaatttatgacaaaaacacaattcaatgcaaacgaacatacgatttattacgtaactactttcttttaacaaacccttctgagctgaatatccaaaatcagaaggtagtagcaacagatgtagcaagcggcggacaagtcgattatgacgatgatggtcgcttgatttaccaactaacaatattatttgaaaaggagatgtaa

SEQ ID NO: 2486 - DNA, 366 bp, Listeria innocua
atgagctttcagttaccgcctattcccgaggctatactaaatacggaagttacaataattagtaatagtggacgtgatgactttgggaaccttttaccagatacaattaataaatcgatgtttcgctatgagtttgaaaagctcgtaaataaaacagaggaaggattaaacataagatatattgttaacttattttgtaacaaattaagttttgttgtgaatgaaggagacaatgtatcttttgttattcctggctattgtttaattaaaggtgaggttcagagcgtatccttcccgccaaatcccgatggcagtatacaccattttgaaattgtcgtaggagaggtgaccgagcatgagctttag

SEQ ID NO: 2487 - DNA, 354 bp, Listeria innocua
atgaaaacgtatattacaccaagtgagttagctagtctaacaaacttaagtatcgaaccaacagaagcggataatttaataaaagccgcttctgtagcaattgataagcaaattatgcctaatatcgtagaccgagataatgtggatgatgatattaagcaagctgtcgcatggcagtgtgagcatatcaagaaatatggtggatttattggtattggtaactttacactaggtaaattaactatgggtggtcaatcacaaaactcgaacaactttatacctgacgttccggacaaagttatggatttgcttttatctagtggctggctttatgcgggagtaggtggctgttaa

SEQ ID NO: 2488 - DNA, 156 bp, Listeria innocua
gtgcaattaagaaaagataatgcagtatacaataccgacaatgaagtattaattaagcagttagaaaacgatggctttgaagagttcgtgtataaagaaccagaaaaagaaccatccaagagcaaaaaggagcccaaaaacaaagagggtgagtaa

SEQ ID NO: 2489 - DNA, 873 bp, Listeria innocua; identical to SEQ ID NO: 529

SEQ ID NO: 2490 - DNA, 555 bp, Listeria innocua
atgaagaattatttacaacgcaagtttgacatccaacattttgctgaaggtggagacgataagaaattttcccaagcagagctggatgagattgtaaaaaatcgtgtagcagctgaaaaacggaaatttagtggagagattgaaaccatcaaaagcgcgcatgaggatgaaatcaggaagctaaaccaccaaatcaatcagcttaacgatcaagtgggcgaacatgattcatctgaaaaggcattgaaaaaacttcaaaaagagaaagacgaggcactatcaaagctggatgaatatgttcagaaagaacaaaccgcagagtggcacaacaagctaaaagaaagcggcgtaaaagaagaacgctatgaagcgtttacgaagctttttggggatgaagagcgaaatgacgacaacttagcgaaattcgcagagcaatatcctgaatggattgcaaaatctgatgatggtgacacgcctccaccaatcggggcaggactaggcaatgcaagtgagccaagtgctacagacccattcattcaagcattaaattcataa

SEQ ID NO: 2491 - DNA, 1044 bp, Listeria innocua; identical to SEQ ID NO: 570

SEQ ID NO: 2492 - DNA, 1557 bp, Listeria innocua; identical to SEQ ID NO: 638

SEQ ID NO: 2493 - DNA, 1320 bp, Listeria innocua
ttgagtaaaattgatgagctagtatttacgccaaagcaacaggatactattacattcccttttcaaaatgtaactcttgaagtcaacgagggaactcctcgatcaggaaaaaccacagcagacatctttaaaatggcttatatatactctatttcagaagaccagaatcatttagtcactgcttacaatcaagaacaagcttttcgactgtttatggacggtgacggctttggattgatgcacatatttggtaatcttgcagaaatgaaacatgatgaacatggcgatcatcttcttatacattctccgaatgggccaaagaaaatttactataaaggcggcgggaagatcaatagtgttggcgctattactggtatgtcactgggaaccgttacatttttagaaattaatttactccataaagattttatcgaagaatgctttcgacgaacttttgcagcaaagaatagatttcatttagcagaattaaatccaccggcacccaatcatccagtgttagaaatcttttcgcagtatgagaagtctgggcgttacaaatggaggcattggaccgctaaagacaatccggctctttcagacgaacgcaagcaagaaatatataacgaggtcaaacattcggcgtatttgttgcaacgtgattggtatgggaaaagagttttaccagcaggcatcatttatgaaacgtttgacgttgaagcgaatcaaattaaaaaaatgcaaggccatccaatcgaaatggtcttttttggtgatggaggtcaacaagatgcgactgtttgcgagtgctatgtaatcacagaacacgaagcggaaggcggatacacttacaacctcaatcaagttgccacctactatcacagcgggcgtgacacagggcaagtgaaagccggctctacttatgccattgagataaaacaatttattcaatggtgtatgaaagagtatgaagtaccagtaaatgagcctgtttttattgaccctgcctgtcgctggctacgtgaagaactggaaaaggttggtgttgatacagcaggagcagacaacaatgctcatgatgtgacaggtaaagcgcaaggtatagaggttggaattgagcggatgcagtcgctattaagcgaaaggcgttatttgcttgttgaacaacctaacgatcaatatgaccattacagttggctacaagaaattggtatgtatgtacgcgacgagaacagcggaaaaccagttgacaagaataatcacgcgatggatacaagtagatacgctacaaactacttttataggaattatgaagatatatag

SEQ ID NO: 2494 - DNA, 741 bp, Listeria innocua
gtggctagagcaagaaatccaaatagagacatagcaaagaaaatgtggcttgattcagataagacaatgccacttgtggaaattgccagtaagttaaattgtaaaccatcacagattaggaaatggaaatcggaagataactggagtgataacgccaatagtaacgttacgaatcaaaaggagcgttactattcaatgaaagggaacgggaatgctaagaacaataaaggcggcgccgctcctaaaggtaatcaaaacgcacgtacacatggattgtactctaaatatcttccggatgacacaatagaaattattagtatgatggatcaacaagaaccaactgatttaatttggggacagatacaaattcaatacgccgctattatccgagcacagaaaattatgtgggtagaaaacaccgaggatgaaacgagagttcaaacacaagttggattcggggaaagtggttctgataaatatgagtatcaattcgcttgggacaaacaggcgaattttttaaatgcacaaagtcgtgcgatgtctacactaagtgggttgattaagcaatttattgcgattgctgatgagcatgatgaacgcaaggctaagcttaatcaaattattgcatcaacagataatatacaggcccgcacagctcttattaaaggcgctgaaaaagatactacattgcttaataaactattagatgttgccaaaggaggaaacggagaccttgagtaa

SEQ ID NO: 2495 - DNA, 228 bp, Listeria innocua
atgagagacattataaaagcggggataactgaggtaaaaggaaaagagccggaattcaaaataaatattgctggttcagaacaagaacaaagttttgcattagcccagattcattacatgaaaatagagcggttagctatgctaaatggtaagacttttgaacaagctaagagtgattatttagaagctctaagcatcattgtaggagcaattaaagataataattaa

SEQ ID NO: 2496 - DNA, 573 bp, Listeria innocua
atgcaagaattaattaatgagtacagaggagctttacaggaagtgaacgaagtaaaagctaatttgcaaaccaaaattgacgcaaaaaaacgtcctccgcaagcagcggggcaaaaaagaactattcaagaagttccggaaaaggcgattatgtcgaaattaaacagtattatccgcagcttagagtattcgattgagtggatggaattaggacatgaaccagcgccacggagagctattcacagacgttctggacttcaaagggaagtatgtgttacagatattgaaactatgcgtcaatggttcgtatatgagcatggtatcgcatatgactttgaagataatgagccaaagatttcggaatgggacaaaattcggatggaagacgcaatgtccacgatgtcaacacaagaaaagaaagtatttttgttaaaacatgaaaaaaatttatcgtattcacaaattagcgatgagatggagataagcgttcgttctgtacgatcttatctacatcgtggggaagaaaaaatacagaatcaaattgacggtagcttattttgcatggcaatttag

SEQ ID NO: 2497 - DNA, 156 bp, Listeria innocua
atgaaaaaagaagatggcgtttatataatctctaaaggagaagaaacatatattaaaccgccaaaaaatggcttcggacaaactaccatcgcatggagccacggcaaacctaccactgccgagaacaaggaaacaataaaactaaataacaaatag

SEQ ID NO: 2498 - DNA, 384 bp, Listeria innocua
atggcggtaatggaagtaacagagaacaaggctaggcagcgggagattattagttatattacaaataatgatttacctcataacgagctaaaagagctacaacgtgagctaaatcaattgatgaacaggaacacagaggaaaagaagaaaaacttttggaataaaacgataaaaaggtttattgggaacaaacaatggaacgacattacagtagctgaattcgttgaaataagacacgcaggcgtaccgggagacgcgattgcggattattttaaaatagctagatcgacaatatttaatttcacacaaagaaacaaagaagaatatcatcgcagatttaacacagggatttatcacaaaagtaaagaattctggaatgactaa

SEQ ID NO: 2499 - DNA, 405 bp, Listeria innocua
ttgaggcaaagtataccgcgttcgtcattaacgaggcgaacgaatacgcgaagtaaatacaatgcgaagaaagtagttattgacaatataaagttcgatagcaaagcagaagcagcgtattatcagcaattgaaactattaaaattgactggtgaagtaaccagtttcgatttacaaccagaattcacattacaagactcgtttagaaaaaacggaaaactgtatcgagcgattaaatataaagctgattttctcgttcgatacagcgatggacatgaggaattaatcgacatcaaaggcatgttaacaaaagagtttcgaatcaagcaaaaacttttcgaaatgcggtatatgcaatcaattaaatgtttgaaactaaaaggcaaacaattcatggaggtgtga

SEQ ID NO: 2500 - DNA, 183 bp, Listeria innocua
atgccagcgataaaagcaattaaaaagttgcgaaatagatcaatgagcattaggcagatggctaacgcgattgcagaggtaactagctacaaaattaatgaaatcgaacaaatgggggacgaagaaattgaggcaaagtataccgcgttcgtcattaacgaggcgaacgaatacgcgaagtaa

SEQ ID NO: 2501 - DNA, 483 bp, Listeria innocua
atgatgaatcgtgtcgtgctcgtaggacgtttaactaaagatccagagctaagatatacgccagcgggtgtagcagttgcgacttttacacttgctgtcaatcgaccttttaaaaacgggcaaggagaacaagaagctgattttattcaatgtgttgtttggcgtaaaccagcagaaaacgtcgctaatttcttaaaaaaaggaagcttggcaggcgttgatggacgcgtacaaactcgtaattacgaaggtaacgatggtaagcgtgtttatgtgacggaaatagtggctgaatcagttcaatttttagagtctaagcaaaacggcgcaggaggctctacatcgaataataatcagagcgagactaattattcaaatgacaataaaacaagctcatatcgagctgataggagccagaatggtgattcatttgcgaatgaaggtgcgccggttgatatcaatccggacgacttgccattttaa

SEQ ID NO: 2502 - DNA, 180 bp, Listeria innocua
atgaacatacaagtaggaagcaaagtaaaaacaacatacaaaacaaagtttgttaaaaaaggtgagtacggaacagttaaagaaatatatgatgttgcgaacattccagttacagcattagtagcttttacgcattcggcggtttgttactttgtaagagatttagagttggtagaataa

SEQ ID NO: 2503 - DNA, 171 bp, Listeria innocua
atgacactcaattcttatttccgaagaaagagcagtcgagtatatggtgatttgctgttcacatacgacgggaaatatgaaaaatgccatggcaaagataagaaagcaagacgtaaatatgaacgattgttgcgtaaaagagatgtggaaaaagaggtggcgaaacaatga

SEQ ID NO: 2504 - DNA, 210 bp, Listeria innocua
atgagagaagtaatccttttaaaaagagaagagtactacgaagaagaaatagacatcagaacatcatatcgttataaagaaacaaacgaaatagcatactttcacgaatttgtaactatccaagaaacaatagctggtgaatcgggcgtatatgctgttttagaaaaagataatggcgagtgtggattgtacggactatctgaattttga

SEQ ID NO: 2505 - DNA, 147 bp, Listeria innocua
gtgatgacagtagccgagttaatagagaaactaaaagaacttccagcaaatgcagatattttgctaaccatcggatggaatcactcggaaatagaagaagtaggctgtatcgaaaatgaacgtaacgtttatataagcggctggtga

SEQ ID NO: 2506 - DNA, 486 bp, Listeria innocua
aacgacgacaatattagcaaagctgccgaatttttaggacgtacaaaagatgcagttataaacagactagcgaagttaagaaaaagagattcttcagtttcttttattaggcgtccgtggaccaaaaaagaagatgagatactaaaaaataattatattattatgtcgaatgaccaattagctgaacgattaagaagaacaaaagcctctgtagcggcaagaaaggtactgttaggactgacaaacaaacacatgtctaaaaaagatgacaaaatgattcgtcatcttggaaatcaagggtacacaatcaaagagatttcagcagaaatgaatttgccttattgtttaattaaaaactatataagaaatcacagaatcaattatagaagggaatcaaaaaacgagatgaacggttggcgaaaagaagcagatgcgacatattcgcattatattaactctaaaaaaatcaaggaggaacaagcatga

SEQ ID NO: 2507 - DNA, 231 bp, Listeria innocua
atgcgaaaaaattggacggatgaggaaatcagagttttacagaataattacgaatacgtagacactgaaataatagctaattttttaaatcgctcttatcattcaataaaaaacaaagcggtgcgacttggaatcagtaaaaactcggtgtggacagaagatgaggatatttatttagagtattttgtttatgaaacgacgacaatattagcaaagctgccgaatttttag

SEQ ID NO: 2508 - DNA, 945 bp, Listeria innocua
atgactaagaagcaaaaagaaatactattttgtgactactttgaagagtgggtcgaagtgtataaagtgggagcaattgcaaaaataacactagctaaatactataatgcagcaaaacaacttcgagatttatgcccaaaactttttatctcagattttgacagacgagaatatcaacgaattattaatgtttatgctgaaacacatgagaaacagaccgtaaaagactttcatcatcatgtgaaagcgtgcattaaagatttgtttcacgatggattaatagataaagacccaacatatcgagtggttatcaaaggcgcagaaccgacacgagcgaaaaaacggaaattcttacagaaagaggagttatcgaagttattacaatcactcgatatgagccaaattggatttggatggttcgtaatgctcgtagctaagaccggaatgcgctatgcagaagctttagctatcactccagcagattttgattggacagcacagactatatctatcaacaaaacatgggattacaaatataacaagggatttgctaaaacgaaaacattgtcgtcagtaaggaccattaaaattgattggcagattgtcggacagttcaaaccgcttataaaagattttccagaagacgaacccattttcgttgaaaaatttggagacggcacttacaaacgtcaattcaattcaaccatcaacaattttttagctgttaaatgcaatgaaacaggcattacacagattagctttcacgcattacggcatacgcatgcaagtgtattgttggcagaaggtgtttcgattcatacgatttcagcacgattaggacatgctgacgtaggtgtcacacaagaaacttatgcgcatgtgttagacgaattacaaaagaaagatgatcaaaaaatgttatctgttttgatgcagattgcttag

SEQ ID NO: 2509 - DNA, 714 bp, Listeria innocua; identical to SEQ ID NO: 481

SEQ ID NO: 2510 - DNA, 276 bp, Listeria innocua
gtgaaaacaatcgcaaatgagtataaagaatacattttagaacataagaaaaagaatcagtttgaaagtgaacaaactatttatcgatttaaaaatggctatggcgctagtgtaatcaaggaatatatgggtcctggcgtagaacttgcggttattcaatttataaatgacaaaaattgggagctggaatacagcacatctgtaacaaacgatgttcttagaaatttaacacatgaacaactgattgaaaagctagaagagattaagaatttatga

SEQ ID NO: 2511 - DNA, 933 bp, Listeria innocua; identical to SEQ ID NO: 546

SEQ ID NO: 2512 - DNA, 816 bp, Listeria innocua; identical to SEQ ID NO: 509

SEQ ID NO: 2513 - DNA, 960 bp, Listeria innocua
atggctattgcaaaagaaaagacaatgaacattttagcaagcgtgaaagacatggatagaacgcaatggttgctgactcggcgcctaggcattggcggaagcgatgcgggaatcatcatggggttaaatcagtacaaaacagcatttgagctgtggctagataagacagaccaagttttaccagatgaatcagcgggagaagccgcatactggggcaatcaaatggaagaagttgtcgcaaaagaattcgaaaagcgaactggcaagaaagtaagacgtagcaacatgatgtatcaacatccagagcatgattttatgttggcaaacgttgataggtttgtggttggtgaagacgctattttggaatgtaaaacagcatcagcatacttagcaaaggaatgggaagctgacgaagtaccagcgacttatctagtgcaaatacaacactatttagcggtcacaggtaaaagcaaagcctatgtagctgttctaattggaggaaataaatttatttggaaagaaattgaacgcgatgacgagttaatcaatcaaataattgcttttgagttagatttttgggaaacgaacgtaaaaggacatgtagcgccggcgctagacggttcaagtgccgcagaaaaatatttaaaagatcgttttgctaagtcagaagctaaacaagttattttatcaaaaaaatacaacgaatttttggctgaaagagcaaatttagaacgcgatataaagcttttagagacacgaaagaaagaaattgataataatatcaagaatgatttaaaagaagctgaaacagccatcgcagacgaatttacgattacttggaagcctgttattacttcaagagtagacactaaacgtttaaaagaagaacatccagacatttacaaaaaattacgtaaagaaactagttatagaaaatttgcagtgaaggagaataaataa

SEQ ID NO: 2514 - DNA, 189 bp, Listeria innocua
atggcagagcgaatttttcgtaagcaaacgattttcgggaatagcgagattttcatagacgacagaacgaaaatgatagctaatccggctttcagacagaagatagctttaattgaaacaggatgcgagaaaatgacggactatatcgaagagttaaaactaaagggttatgaggaggtcacaagataa

SEQ ID NO: 2515 - DNA, 771 bp, Listeria innocua; identical to SEQ ID NO: 495

SEQ ID NO: 2516 - DNA, 162 bp, Listeria innocua
atggaatactttgacacgatggaaaaaatcaaacaaaaacgccttgaatgtaaattagtggttttagaaaattttgaatcaaattttaaagacgctcttcataaaggggattccgccatggtattggcattagcggaatcattaaaagcagttattaaatag

SEQ ID NO: 2517 - DNA, 267 bp, Listeria innocua; identical to SEQ ID NO: 126

SEQ ID NO: 2518 - DNA, 252 bp, Listeria innocua
atgcaagttgaaattgatttaaaatatatcagagaaaaaagagaatctcttggattttctcaaaaagatatggctataaagttaggatttaagaatgcatccacatatttaaaatatgaaacaggagagtataaaattaaagcagaaatgttgcctcttttggcaaagatactaaaatgcaatatatcgaatttttttaccaaaaacgttgctaaaacggaaacgaaagattttgcgaaaataggaggctag

SEQ ID NO: 2519 - DNA, 483 bp, Listeria innocua
atgaaagtcaatgaaatgattatcaatcttagggaaaagagaaatatctctcaacgcgaattggctaatcgtatcgggattaataaaagcgtaatgaacagaatagaatctggcgaaagagatattagagctcacgagctagaagcaattgctaactatttcgatgtttctgcagattacttattaggacgttcaaaacaaaacgatattgctgatacaatcgcggctcatatagatcccaacgcaacagaagaggaaatggaggaaattctcgcttatatagaagaaaaaagaaaagaatatgctaatgaagaggaaatagatatcacggacatcgctgcaaagaaagatgctgacgtggcaaagtttgtagaagagaatccggacttcaaagcagttgctgcacgtgtcatggatgacgaagaggctgttaaagcggtcaaaacatttattgaatattatgagcaacaaaaaaagaagtaa

SEQ ID NO: 2520 - DNA, 219 bp, Listeria innocua; identical to SEQ ID NO: 49

SEQ ID NO: 2521 - DNA, 708 bp, Listeria innocua
atgaaaaaagggattgttttaggattaattttattacttagttttgttttgtatggatgcggagaacctgaactagatattagcaaggatcccggaaaaggatattatctacaatacaaaggaaccacttctgatgaggcaaagataactttaaaagatgaaagcggagaaacaaaaaaacttgatgtagagaaaaatagttttactgctctagtgcctagactaacttctaaggcaatctacactgtaatagctaaagataaagataaagagacagaaactaagttagtagttcctaaacaaaaaaaacttgtttcttatgaagatttaaaaggacagtttaattatatttatgaaactgaagacaagttatctatttctcttcctgattctataaacagtaatgaagaaataacaccgggatttaaaattatgtctgatggtaataacgtaatgtcaattttattaacatacagttctgaggataatattggtatcactgattataacgattttacctattcaattgctgctattatgatgtcgttagattcggaaaatagtttagataaagttcttgatgctttaaataacagtatggataatcaaaaggaaaataaagtcacagttaatgatattacttatcaattttctacaattaacgctggaacaacaaatataacaactttagagattttcccaaactaa

SEQ ID NO: 2522 - DNA, 1308 bp, Listeria innocua; identical to SEQ ID NO: 612

SEQ ID NO: 2523 - DNA, 1917 bp, Listeria innocua
atgcttaatcaacgtcaaaaaaatattttaagcacgctgtataatgagaataattggttgcttgggaaaaaattagcggatctattccaaataagtgaccggacaattagaaatgatatacgtgttattaaagaaaatataggagaggactttatctttacttctaaaaagttaggatatgcctataatatggaaaaaccttttccggttgacgttgaggaagaagctggatttgaacaaaaccggatggcgcaattaattaagaaattacttgtagatgatggagtagacatatatgaatatgcaaccgaaacatatacatcagaatctaccatccaacgtgatattcagtggttgcgaggctactttgaacaattattaggtttagatgtagtcattcattctagtgacggtatttatgctataagtgccacaccaactacgaaaatggaattattaaaccgcatcgcaaagctagatgagtcgctaaaaacgattttaatcaccaattgttttccagaaattaataatgaaaaaatccaccaaatattatcaaaaataatcaataaacataagattgttttaaagtattttgatgaaacaatcttactaacgcaaataatttatagcagtggcttcttaaaaaaacatccagaacaatcaacggttacagaaatcgataacccgtttttaagagagctctttgatgcgatagagcaggaagcgggttatgggatttctgctgaaatgaaacaatttattttgactgaatatgaaaaaattgttgcgatgaacaattttgaaaatcaagtcactacgaaaatggttttagaaggcgaactttaccaagaaattttactaattcttgaagaaattaagcacgtttatctcatagattttacaactgatttagaagtaactagcgatatgacaaaacacatttttatcgcacttgagagggctaaaagaggtattgtcattaaaaatcaagtgacgcatatcatcacgcagcagtacagttacttactagatattgccattttcatcggagaaaagttattagaacgtctaggagtaattctcaatcaagaggaaattattctactcgtaatgtatttataccaatactaccgcaaaatagaagctaaacatcaacttaaccaagtggtacggattgcattcattgttctagaaggtaaagctgcgatgtattacttacgagagcaattagcagaagtactacgacccgtaaacgtagaagttatagagattaccgataatacacagtgtcaattactactatcagaaaatgtagatgttgatttgtgtatttctactaaaaaaattgatttgcctgcggaagtcccgtgtattgtcttatccaacaatatcggtttaattgaggaagtaacaataaaaaaacagctttcggcaacaatagaagctaataaaatgaaaaaatttgcatatattaaagagaaatatttacatgaagatttatttttgaccaattatgaatatgatcagaaatataatgcaattgattttttaagtgaatattgtataagtaaaggatatgtaccaactagttttacagaaaaattatttagccgggaacagttattttcaacggctataccaacagggattgctttacctcatccaattaaaaatgttgcgattaaaagtggtatttttatttgtattatgaaaaagccaattacctgggataatcacaaggttagtctaattatgattccaatgattgaagaattagatggaacggaagcgccattaattaatgattttttatcgttaatagcttctaataaatcgtatgtagaacaaataagcaaatgtagcacttatcgtgaatgcgtggagttattacaaactatttataacaataatgagtaa

SEQ ID NO: 2524 - DNA, 747 bp, Listeria innocua; identical to SEQ ID NO: 488

SEQ ID NO: 2525 - DNA, 315 bp, Listeria innocua; identical to SEQ ID NO: 195

SEQ ID NO: 2526 - DNA, 357 bp, Listeria innocua; identical to SEQ ID NO: 250

SEQ ID NO: 2527 - DNA, 1302 bp, Listeria innocua; identical to SEQ ID NO: 611

SEQ ID NO: 2528 - DNA, 822 bp, Listeria innocua
atgaaacaactttttgagatacttcctagtgagtgggcagaaaaattttcaaaaacaatgaaagaacgtattgagttaagctttacaaatgaagacgtgatttctttaatagaaagtaaggttggtgggagaggatatttgccgaaagaacaaggttatccagtgaatgaaggaggagaaccacttttctttttagcgcaaataaattttgcggaaatgccgcaaatcgagaattatccaaaatcaggaatacttgctttttatgttgattatcatgatgacttatacggtcttaattttgatgatcagacagaacaaaatggttttcgggtgtttttctttgagaatatagacagagagagcatgactgcagaagaacaagctgtttattttgaaggtattgataaatcagccctttatactgtggtcaaaggggagtataaacttgctggtcgagtaacgaaagagcttttgatgaatgatattctagagtttgagaaagaatttggcagtggtttttatgacatcatggagcaaatttttggtgatgatgaagacaaagcgaatgagctatttgaccttgcaacatatagtagtcaaattggtggttttccgttcttcacccaagaagatccgcgaatgcgtacagaaaattcgtatcacgacacattgctgtttcaattagatagtgagtacagtgaagagccaggtgcccaaataaatatcatgtggggcatgagtggagtcggcaacttctttattaataaacaggatttaattaatcgggatttttccaatgttatttttaactgggattgttaa

SEQ ID NO: 2529 - DNA, 375 bp, Listeria innocua
ttggatcgttcgaagcaaagcgagttacgagccaaatatgcatgcgagcaaagcgagcatgtaatccttccagtaaagtgcgccctccacacaaaaacttccctcccatcaaaatccatccaccatcaatctaaaaccctccatcccattcggcccgttcgaagcaaagcgaattacggccaaatatgcatacgagcaaagcaagcatgtaatccttccagtaaagcgctccctccaaacaaaaagccccacccatcaaaatccatccaccatcaacctgaaatcctccatcccattcgacccattcaaagcaaaccaaatccccccaaaacaaacacacactcaccctcccccaaaccccagccaaaaaactaa

SEQ ID NO: 2530 - DNA, 1053 bp, Listeria innocua
atgaaaagactatttatagtatttagtttgattattattggagttgtcagcttgaatgcaatggatgcaaatgctagtgtgacagaggtatatccattgccagccagaataattgatgtttttccagatgaaaacttagcgaaagatatggtagaaaacttgcacaaaagtgatgttacagacgtcattacgcaagatgatataaatgcagcgacatcattaggattgggctattttacaaattacttaacagacgaaactttagaaatgctaggaaatgcttattttaccaatgtaaataatattatgatttatcctacccaaacaaagttcactaaatttccggatttaccgactttacctctattagatactttaagagcagaagtaagtataacaagtgaaataccacctgaaaatattaccgtaccagattatcaaaattatccagaattaaagtatcttaattttggtagtagaactattgtggggagcttgcctgacttttctaatattcctaaactagaaacgttgttgctaaatgaatgtggccttgcttcagaagatgtacctgattttacaaacttgaaaaatttacaggaagtaaactttgagtcgaatcaattcacaacagaaatgacagatttcactcatttggatagtttggtaagtatggatttgagctataattatttaaacatactaccacctactattgttgataaaataactgtactaggccaaattggaactttaccagatcaaacggttgcttatggggaagatgcatatatcacactaccaatttatacacaactgtatgatttaaaggatattaatggtgttcaagaggtatggattcgaaattcagatgatgataaagtgtttgattcatttaaagtaaattatgatgaggacaaggcgcaaattattgttcctacaagtaatcttgataaaggcgagtacacgattggtattgattttaatggaatagagccctatattgaagaaggcgaagttatgaaatactcactgaaattaactatcaattaa

SEQ ID NO: 2531 - DNA, 207 bp, Listeria innocua
atgacgaaaaaaacgacctctgacgcgcagttgaaagcaaataaggaatggcaaagcaagaacaaagaacatgcaaattatttaaaaagccgttcagctgcgcgatcttttataaagaataaagctacgttggaagatttgaaggaacttgaaaaattaattatagagggaaaaattaatcataagggaatgattaaggataaatga

SEQ ID NO: 2532 - DNA, 897 bp, Listeria innocua; identical to SEQ ID NO: 2472

SEQ ID NO: 2533 - DNA, 951 bp, Listeria innocua; identical to SEQ ID NO: 2473

SEQ ID NO: 2534 - DNA, 342 bp, Listeria innocua; identical to SEQ ID NO: 230

SEQ ID NO: 2535 - DNA, 1122 bp, Listeria innocua
atgagcaacttacgaaaaataaatgcgactttggacttgaatagaaaaagctggagtattgagcgaattgaggcaatacaaggcgatattaattcattaacaattgcagcgcgaatcgttctcgatggaaaaggcatgaacttatccgattatacgcctacattcgcggtagttttaccgggaacaaacgattatgttattgacgatttacattttgatactagcagattgagcgaaggatatttcgagtatactttcgtaaaagaagcgttttccgttccgggcgtatatgatacagcccgttttattttacaaaaagcggataaaacggaactaagcggaatgcctcgcttcacatattacgtagagaaagacccgcttcaaggtaaagttattgctgagagttatataagtgatttcgagcgattagaaagtttgattgctgatgttgaaacagaaattacaggtttgcacgatgaggtgacaagtgagagtgtgcggctagataatgaaatagctggacttgacgcaaaaattgacacagaaacgagtaaactacagacagaagcgaataatctacaaacgcaatttgatagctttaatccgtcacaatttgcacaaaaaacagacgtaaatgtgcatgtaaataatgcggatattcatgtcaccgcagcagataaaactaactggaattcaaaagaaacagcatctagcgcacaggctaaagcagataaagcacttgctgatgcaaaaacttttttcgaactagctagtgcggtgcaaagcgttactttgacgccaaaaaacggatttgttgcaagtcagcctttagtcgctcgatacattaagtttggcaaccggtttctagttattgttagcggaattgtaggaaaagggaccgggaacgggacaggtatatgtgcaacattgccaacttttttagctcctgatgcgagctggaataaactttattccgctgcacagcagagtacagcagcaagtaatcaagcgaatatatatctaagtgtgagtgctgatataaatattgttggtgttggctcggtagacgtgaacactggacttgacggcataatttatttaactaaagaggtgacaacatga

SEQ ID NO: 2536 - DNA, 2142 bp, Listeria innocua
atggtcgagcgtaatttaaatataccgcttttatatgaagcagatgaaacagagttcctgcatagcgggatttgttcgttatcggaaactgtgcgttgtgaagttcatgaagttatgaatgcggagtttgaacttgaattagagtatcctgtcaacggttcccatgcacacgatttgataaacggacgttatatttctgcattcgttgattcgcagagaggttataatccttttgaaatagacactgtagaaaagaatttgtttgctgatacattcatcatcaaagcatcacatcagacaaataaattaagaaaaaaaatgattaaagaatttaaagtagataaagtttcatgtggaactgcaatgaatagattgaaagactcgttacttgaacctacaaacattgaattttattcagatatttctacattgaatagtacgtttctacgttttaagaatgcattatcgtgcataggtggagtggaaggctctattttggatacatggcgcggtgaaattgaaagaacaacaaacaagatttcaatgttgaaaaaacgagggacggacagcggtgttgtgattgcatatagaaagaatatgacaggattaaacataaatactgatacgcttgatatggtaaatgcaatcatgccttacgcgattaaaacagtgaacgactcagatacagttatttctttgtcagagagttatatctactctccggattacaaaacgggcgatgagataaacgctgttgaaattgattattcttctgatgaaaacgtagttgatgaaatcacacttcgcaatgcatctaaaaattatttttctagtaatactattaatgagcctaagttagatttagaaataagctttcaagatttaggacaaacagaagagtataaaatgtttcaaaatatgaatagaatatttatcggtgatacgctttctgtatttcattctgaattgaacatcgaagcaactgcacgtatggtagagttcacgatggacagtttgagaggtgaatatgttaattgtaccgtcgggagtatcaagagtgatttaaaatcaacgatgactgcaggaatggctacaaaagatgaaatagaagctggcgacaatcgaatgcaagaatatgtagatgatttgacaaagcaaataacgggaaatcaaggcggaaacttgatcattcgtcctcctgaaaaaccagcggaactgttaattatggatactgataatattagtacagcagtcaatttgtggagatttaatcaaatggggctgggtcattcaaaaacaggatacaatggtgaatacactattggtctcacacaagatggtaagatagtagctgatttgatagcggcagggactttaagagctattgacattgaaggcgtgacaattacaggttcagctggttattttgatgttttatattcgagttttttacccagtaaaccatcaccgcaataccgagaagagctgcagatgggcggtggaacaggatttaatttacaagcgcagtctacaacaaaaccatatcccgcaatgcaagtaaggctaaatacaaatggtgatttagggcttgccattgaagctgtgaatgaaaatacgggtgcgatagatgctgatatggttgtcagactatcaccgttcgcgggaattgaaacgcctctcattcaaagcgacggttggtgttgcataggtgcgaacccggatgggaaaacagcttcaatcgatagatacacgtgggtctctggcgggggtccacaattacgttatgtgccgcatcgagctagtaattttgagactgctagttcagaagaatataagaaaaatatacgtaaagtaaagaaaactgcgtttggtaaaacagctaagcaagttattactgaaacggatgtttatacgtattcacatatcgcagataaaactaacgaaaagaaaatcggttttatcgcggaacaagcttctgattcattgaccacagcagacggaaaggcaattgatttatataattccgttgcatggctttatcaatatgcgaaagaaaatgaagccgaaaaagaagcattaaaagcagaagtaaaagagttgaaggacttagtaaataaattagtgaatgaggtgaataaatga

SEQ ID NO: 2537 - DNA, 741 bp, Listeria innocua
atgagagatggagaatttatttttaacggtataaatttttatgaaaataatgtatacattcaagaacgaccggaaattccgcgagctgaaagaaatgaaacacttgtagaaattccgggaagattcctcccattgacgaattgggacgggacttactcacctgtcgaatttacattatcattattcttgaaagcgcaaaatacagaaactgctattgatgagtattatcaaatcacttctaaactgcaagactcagtgaaccatctagcgaaattctatttcgatgaaaactattattattctgtaaaattcacagaaataactttatcctatcaaacaagttatatcgaaggtgtacctttcacagcaaaagtcacttgctcgcctctaaaaaatgatttgtcaggtatctatcctactataattgaaaacggcgctaaaatttataaaatgaattctttcatttctcaaccgctcattgaattttcaggttcgggagatattactatcaatgtgaacggaaatgaatttatatttaaaaacttacttcaaggaaattacggaatagatagtgaagtgagagaagtatatcaattgatagataatgcttatgtgtcaataaacaataaatattatagtaaaaatgcgtttccgttttttgatttagaagaaaatacaatttcttggagcggaaatgtttcgaaagtgcaggtgacgacaagatggtcgagcgtaatttaa

SEQ ID NO: 2538 - DNA, 3282 bp, Listeria innocua; identical to SEQ ID NO: 680

SEQ ID NO: 2539 - DNA, 135 bp, Listeria innocua
ttgacgattgatgatttagaaatgatgactttaggctcttgtttggattactttgcagaatatgaagaagcgcaaaatccgaataaaaagaaaaaagctagaagagcatcacaagcagacttcgatgcattttag

SEQ ID NO: 2540 - DNA, 357 bp, Listeria innocua; identical to SEQ ID NO: 246

SEQ ID NO: 2541 - DNA, 579 bp, Listeria innocua; identical to SEQ ID NO: 416

SEQ ID NO: 2542 - DNA, 324 bp, Listeria innocua
atgaacttaaaagatgttttaagcgaaacaggactacctgtcgcatacaaccacttcaccgaaacggacaacacaccaattcccgctcttccatatctgacatataacgagtctgacagtgtcaacttgatggcggataatattgtgttaaaaaaaatatcaaattacaccatcgaactgtatacagaatataaaacaccatcagcagaattacttttagaaaatgctttaatggcaaacaaactgcctttcaattcctctcaaacagaatggatagaggaagaaaaaatgtttgtaaaatattattatgtgaggatgatttaa

SEQ ID NO: 2543 - DNA, 354 bp, Listeria innocua
ttgaagataaaaggattaaataacgctatcgctgatgtgttgaaaacatacactaaagatgttgaacaagaactagaaacgattcaaaaaaaagtcgcaactaatgctacgaaaaaactacaacaaagaagccctgtaaaaaaaggtagatacgcgagaggatggaaagctaaaaagactgccacaggatatgttatttacaatgcttccgaccctggtaaaactcacctcttggaaaacggtcatgctaaacgaggcggaggaagagttaaagcttacaaacatattgagccagtggaacaagaagtaatacaagaatatgttagagaagcggaaagggcgttgagacgatga

SEQ ID NO: 2544 - DNA, 306 bp, Listeria innocua; identical to SEQ ID NO: 181

SEQ ID NO: 2545 - DNA, 288 bp, Listeria innocua
atggataccgatacaattttagaacttgtaaaagcaagagaaggtatttctagcaatgttagagatacctatttacttgcgataatcgacggagtaattcaagagttagaaaatgaaaaaagcattgttttaaatgttgatgatgcgaatcatttaatgtttgtagttgattatacgtcttggagatacaacaatcgtgactctgaaaacatgcctcgtcatttacagtatcgtttgcataatcttattattcaatatcgagaggtgtatgtgaatgaattggaatga

SEQ ID NO: 2546 - DNA, 1188 bp, Listeria innocua; identical to SEQ ID NO: 598

SEQ ID NO: 2547 - DNA, 585 bp, Listeria innocua; identical to SEQ ID NO: 422

SEQ ID NO: 2548 - DNA, 1182 bp, Listeria innocua
atgaattggagaattaaagttccgtggaaaaagaaaaggtctcaagattttggctttgtttggaatggagagtcttataattttgcattgaatagcggatatactaagctttccgataatgcagaggtgaaaattgccgtcgataaaatagcagacttagtctcgaatatgacagtgcatttgatggaaaatacagaaaagggagatattagaattagagacgaattgtctcgaaagattgatattaatccgtactccctgatgactcgaaagacatggatttataatatcgtatctaatttattactttacggtgatggaaatgcgattgttttaccggagataaaaaacggactgattagtgaattaaaaccgcttgacccatctttagttgacttcgatgtaagagatgattcgtacaagattcattataaaaacaaaacatacaatcccgacgaagtggtccatttcgctattaatccagactcggaatatccgtttatcggaacaggttacagggtagctttaaaatcacttgtggataatttaaatcaggcaacagcaacgaagaaggcatttatgagcagtaaatttatgccgaacttaattgtaaaagtagatgcaaatgcagcagaattgtcatcagaaaaaggcaaaaacaaaattgaagatatgtatttgcagcgaacggaagaaggaaaaccttggataattccggcggatttaatagaaatagaacaagttaaacctttaagtttaaatgacattgctattaatgaagcagtaaatattgataagaaaacggtggcgggactcttaggagtacctgctttttttgttggtgtaggagagtttgacaaaaacgagtttaataattttattaatacacgaatcatgtcaatcgcaatgattatctcgcaaacgttgactagagatttattaatcagtccaacacgatttttcaaactaaatcctcgaagtttgtattcatatgacattacggaattagtcgcagcaggtgggcaaatggtggatagaatcgcaatggatagaaacgaacttcgcgattggattggcatggcaccacgtgaggatatggaggaattacttgcattagaaaactttattccttctgaaaagctaggaagtcaaaacaagcttaaaggaggtgatgatgaatga

SEQ ID NO: 2549 - DNA, 1752 bp, Listeria innocua
atgactgcaaaagatttttttaattacgatagtgtgatgaattatgtaaatgaagttgtgaaaggcaaaaaaatagcggggaaagaaatacaacaagcggcgaaaagatttaaaagagatttgaagaataaagaatatgagttcaatcctaaagacgcagaatttgttatcggtattatcgaaagaacttttgttcatgatcaaggggaaagaattgacggaaccccgcttcgagggacaccgtttattttagaaccgtggcaaaaatttattatttactccttattgggattttatataaagggtacaatcattagacgtttcaaagaagcgtttatttttttacctcgaaaaaatggtaagactagatttgttgcagcattatcgtgggcgttagcacttttagaaagaaagtcagggtcaaaaatttatatcgttggcgcggctcttgaacaatctttacaaagctttaattttattaacttcaatattaaagaaatgggagaagaggattcatttcgtgttttagataataatcaagaacatagcatttctggtgatttcggagatggctctttatacatcaaagctttagctgctaatccagaccgccaagactcccttaattgtaatgtaggaattgcagatgaattacatgcgtataaaacgcctaaacaatacaacatcattaaagaagcaatgaaagcatatacaaataaattgatgattggtatcactacggctggtgataatatgagttctttttgttatcaacgtttacagtattgcaaaaagattttagacgacactgtgaaagatgaggcttattttgtttttatagcaaaagcggatgaagacgaaaaaggcgaagtggattatacagacccaaaacaacacgaaaaagcaaatccaaattacggaatcactattagacctgctgatatgacgaatgacagtttgcaagcgcaaaacgatccacaacagagaaaagattttttatctaaatctttaaatatatatactagcgcaatgaaagcgtattttaatattgatgaatttaaagcatctgattcaaaatataactggaccttagaagaattagcaaaactaccgattaaatggtacggcggtgccgacttggcaaaacttcacgatttaacagcggcggcactttatggaagatatgtaatggatgatggtacagaggtagacatcgttatcacacatgccttctttccaattgtgatggcaaataaaaaagcggatgaagataatattccgcttttcggttggaaagatgatggagtattgacaatgacgaacaccccgactaccaattttgcagtgatagtcaactggtttaaagaaatgaaaaataaaggtttcgacattaaactagtaggctttgacaaaaagtttggtcgtgaattcttttatctgatgaaaaagagtggcataaaaatagtagatcaaccgcaatatttttataaaaaatcggaagggtttagacgtattgagacgaaagcaaaagatgggcatttctattattgtcataatcaatcatttgaatattgtgttcaaaacgtccgcgctattgaaaaaacggatgacatgattcaatacgaaaaagtggatggtgacggcggctcacaacgtattgatttgtttgacgccgcagtttttggagcggtacaaatgttagaagatatacaaatgagtgcagtagcaagcaaatggctaaattcgaattga

SEQ ID NO: 2550 - DNA, 375 bp, Listeria innocua
atggcaaaaaagagtaaagttgaaagcatagaaaaatacaaacctctctctgtaaaggaaagagtgattaaagatatgaaaggtttaggagtttataaaacggaatatgataacatcattactatttactgtgatttattaactcagtatgacgacgcgcaaaagaaatttattgactctgattatcaatatgaaacttcaaccgcagcgggcggaacaaaaaaatctgctattgttgcaactctggaaaatctaagaaaagacatcattgcttattctgaccgattgtgtttaaacccgcgagcaatcgaaaacatcacgactgaaaataaaaagcaatctagtttagcagatatattgagtgaaatgcgatga

SEQ ID NO: 2551 - DNA, 375 bp, Listeria innocua
atgtcttataaagcaacagatccattctacttaacatcaaagtggaaacgaaaacggaagaagatactgcgacgagatgaatacctttgtcaggagtcgaggcgtttcggacgaacagaatcagctgagatggtccatcacatctttacgaaagaagaatatcctgaattagcatttgaggactggaatttaatttctttatcaaatcgttcacataattcaatgcataagagaggaactcacgaactgacagcgaaaggcttgatatggcaagaaaaacgaaaaaaggaattcgagtcattttattcatcccccccgtcaaacgtttcagaaaaaagctctggggataccgagggtggggactttttccaatag

SEQ ID NO: 2552 - DNA, 744 bp, Listeria innocua
atgaatttagttaggtgttgggaatgcgagcaatatatttcgcaggaagcttccgtacatttcagagatttgtctggcggtagaaacttatgcgttgaatgccaacataagtatcgaaaaaaaatagaagaaaagaaaaaagaatatattgcgcacaaaatcgaagcaacacttgaaagagcaatacatcttatagaaatgcaagaatgctgtagtatgaaaatggatgaataccttgacccatataatacagtagcccaattttatagaaatgacagtagcaagtttgattctgcccatgaagtaatggcttgtatcgaattgttaagaagtcagattaaagtaaaaacacaacaaagaatagggcgcaaacgagtagattttattttgccagacatgaaggttgtattagagattgatggagggcaccatcgttttaggattggtaaagattcagaacgagatgtgtttatccttaatactttgaataaatctgaacacggttgggaaattattagaataccaactagatttattgaacaaaatattagacgtcttgttccttctattaaagcattatataaagaacgtcaagaactaagaaacaaacataatgggttcattccgtcttattactcaagaacaaataagatgtctcacatatcagcgattaaaggtgttgcttcagataatgaaatcgaagcaatggaacatgaactgttagacggaactgagcatctataa

SEQ ID NO: 2553 - DNA, 426 bp, Listeria innocua
atgtcaaaacgattacgtaaagcacaatataaattgattgaagatgaattaaaattttatcattctactaaaaaagaattgatggaaaaggaagttaatgtaacactgggcgcttggcatagagaatacattgacgagaaccaaggtggtggcagtgcagggaatattagtaatgaagtggaagatcgtgtgatgttactgcaaatggataaagagataagtagattaaagaatattataaatgcaattgagtctgtgcttaatagattgaacgacgaggataaacaattgattcagtttagatactgggacagaagcaaaccgacgtgggtatggattgctagtaagttgaatatggacgagagtacagctagaagaagaaataaaacaatcattctttcaatagctgaaaggttgggatattaa

SEQ ID NO: 2554 - DNA, 228 bp, Listeria innocua
atggaggaatatgtaaatatcagtttagataaatatgaaatgttaaaaatgtttgaaaatgatagatacgaaagagatgctaaagaatttctaaaacagtttattaactttacaacgatatttggaaatcaaaatgaagagtattacacggcgcatgtcaacaaggaagaactgaaaaaactaattgaacaaatactaggcaaaacgtgtgagatagaattttattag

SEQ ID NO: 2555 - DNA, 645 bp, Listeria innocua
atgtttaactggtttcggaaatttataaacaaatggaaatttaatcaagggatgtacattgaaactatgagtcttgatgcgacaatcccattaaataaggaggataaacaaatgaaaatatatcacacagaaacacaagaagattttgatgctttattggaagaattgaaaaatgaagggtatagctggtttttcggagaggttattccgtcatatgactcggaactttgggaacggtataagcaagatactgttgtgcatatagaggaagaaggagtaagttgggggagtctttcttatgctaaatatttacaccccaacacaccaattgaaaaatacaaagtgaaacaagacgaagttgcaaagtggttcggtggcgctacaaatgccatgaaagcattttcatccaatggagtatctatgaaaaacgaaaataacgacaaagtaaataatcctgcacattacacagcaggcggtattgaaacgcttgactacattaaagctaaagtaaatgattatccgtcatatgctgtaggaaacatacttaaatatgtctcaagatacgagcacaagaatggcattgaggatttaaaaaaagcgcaattttatttaaataatttgattgaatggatggagagtgattga

SEQ ID NO: 2556 - DNA, 315 bp, Listeria innocua; identical to SEQ ID NO: 194

SEQ ID NO: 2557 - DNA, 2274 bp, Listeria innocua; identical to SEQ ID NO: 669

SEQ ID NO: 2558 - DNA, 483 bp, Listeria innocua; identical to SEQ ID NO: 365

SEQ ID NO: 2559 - DNA, 1257 bp, Listeria innocua; identical to SEQ ID NO: 607

SEQ ID NO: 2560 - DNA, 690 bp, Listeria innocua; identical to SEQ ID NO: 476

SEQ ID NO: 2561 - DNA, 480 bp, Listeria innocua; identical to SEQ ID NO: 361

SEQ ID NO: 2562 - DNA, 174 bp, Listeria innocua
atgaccgaacaaataatcatcaacgaagcaaacagtttacttcacaggaaaagcaaagagctaagtaaatccattattaaaacaccacgcgatctcgaacgtttcgcgattgggctggataaattatcacaagaaatgtgggactataaaaatgaattggaggcgattaaatga

SEQ ID NO: 2563 - DNA, 339 bp, Listeria innocua
atgaaagttctagacaaatattcgtggctgatttatctgaaatattgtatatcacttctgagcggtgtcatgacaaactaccatatcacactttccgcttttgaaaatagcgtaaaacgtaagctaattgatttcacaaaatatgatgtgtcatctgaagatttaaaaacatctattttaaaaaggctaggtaacatatgttctgtaaatcgtgtgaataaacacaaatataaagtgaaacaaattattaaatgttcaaagtcaattgacgaaatgattgagcgtataaatgatgaaacagattttagtattgttgcagaggaggttgaaaaacaatga

SEQ ID NO: 2564 - DNA, 222 bp, Listeria innocua
atgactaaattagtaagatgtggcgtatgtgaagaagcttttagtgaatatgatgacataattaacgtagatccccatggatggtttcacgagagatgtgtagaacttgttccaatacgttatgctgtttgggctaaatccagatattacgatgtagatggctttctcggaacttgcgatgaagatgataaaaattttgcaagctatgtttttgaagaatga

SEQ ID NO: 2565 - DNA, 186 bp, Listeria innocua
atgtgtgagtattgcaagaatgactctatgatgaataatgagcctttactaagttttgatgaagagtataaagaacctggtgttgttagactagatagcactggcaacttaggagttttcagctactacggtttaacagctaggaatatcaattactgtccaatgtgcggaaggagtttggaataa

SEQ ID NO: 2566 - DNA, 516 bp, Listeria innocua
atgagcaaaacaaacgacacgagaagagtggaagaagcgctttggaaagctcatgcaaagcaaggggttttcggtgcatttgaagtaacgattggttggttcggcaaagaaatagtggactttatagcatacaaaacgactggtgagtttctctgctatgaaatcaaagtaagcctttcagactttaaaagtaaagcaagcttatcgtttcacggagattttaactactatgttattccagagcatctgcttgaagttttgagagatcacacagcaaaatcctttaacagtttaaacttcaagttatttgacactcgtttgaaaaatagcggtattggtcttattacagttacagaaaaaggcgaattgaattacattgttaaagcgaaaagaaaacatgtaaatatggggactaaagcaaccttattggaaagcatgacacgctcacttaacagagaagtgaagaagttctacgaaaaaagtccgtactggataacggaagaggtggcagaatga

SEQ ID NO: 2567 - DNA, 294 bp, Listeria innocua
atgagcaaatacttcgaatacacacgagaagaaaacgaatattatgcgctaattaaagcagaaagcaaaaaacaagctgattttgtatactggcgtgatgttgttaagcacgaagacgaatttgcaaaaactggactaatgattgaattcaattccgttgaagtaacagagcaaaaagcactgaaactcttcatgtcatccttgcaagaatatgaaaccgaggaagaaataaaacaagggttttatgaaactgccaatgaaacgattttactaattgatgctgatttaatttga

SEQ ID NO: 2568 - DNA, 189 bp, Listeria innocua
atgagtaaaaacttgtatgcaatcaagcaagatggcttgtacaaacattttccacacagttggtatgatgctaatctgtctaaagattgcttatttgtaaaccgagaaacagcagaaaataactgtgctttaaatggttctgacgaaatagtagaaatcagtttagtagaagtggaggctgaagcatga

SEQ ID NO: 2569 - DNA, 399 bp, Listeria innocua
atgaatttcaaagtaggagataaagttacttggattaaagataaaaatgttattgggaaggtagttagcattaacgattttagaccaccagaaatggagtgcgcggttgattttggatttagcgatttggtgttttgcagtagagaggaattgattttagacgaaagcgcgacaaaacaagaatctgttatctgtacaatgtgcaaacaagaaattgaagaaggctcatatttattaaaagtacgtgaagatttattctgtggaaattgttatgaagagcaaccggtagtattttattatcgactaaatggtgatgacggctggatggacgattcggaagctaaagaatacagacttgaggattacttggaggaagtggagggtgaagacaatgagtaa

SEQ ID NO: 2570 - DNA, 681 bp, Listeria innocua
atgcgaaaaaattggacggatgaggaaatcagagttttacagaataattacgaatacgtagacactgaaataatagctaattttttaaatcgctcttatcattcaataaaaaacaaagcggtgcgacttggaatcagtaaaaactcggtgtggacagaagatgaggatatttatttagagtattttgtttatgaaaacgacgacaatattagcaaagctgccgaatttttaggacgtacaaaagatgcagttataaacagactagcgaagttaagaaaaagagattcttcagtttcttttattaggcgtccgtggaccaaaaaagaagatgagatactaaaaaataattatattattatgtcgaatgaccaattagctgaacgattaagaagaacaaaagcctctgtagcggcaagaaaggtactgttaggactgacaaacaaacacatgtctaaaaaagatgacaaaatgattcgtcatcttggaaatcaagggtacacaatcaaagagatttcagcagaaatgaatttgccttattgtttaattaaaaactatataagaaatcacagaatcaattatagaagggaatcaaaaaacgagatgaacggttggcgaaaagaagcagatgcgacatattcgcattatattaactctaaaaaaatcaaggaggaacaagcatga

SEQ ID NO: 2571 - DNA, 945 bp, Listeria innocua
atggctaagaagcaaaaagaaatactattttgtgactactttgaagagtgggtcgaagtgtataaagtgggagcaattgcaaaaataacactagctaaatactataatgcagcaaaacaacttcgagatttatgcccaaaactttttatctcagattttgacagacgagaatatcaacgaattattaatgtttatgctgaaacacatgagaaacagaccgtaaaagactttcatcatcatgtgaaagcgtgcattaaagatttgtttcacgatggattaatagataaagacccaacgtatcgagtggttatcaaaggcgcagaaccgacacgagcgaaaaaacggaaattcttacagaaagaggagttatcgaagttattacaatcactcgatatgagccaaattggatttggatggttcgtaatgctcgcagctaagaccggaatgcgctatgcagaagctttagctatcactccagcggattttgattggacagcacagactatatctatcaacaaaacatgggattacaaatataacaagggatttgctaaaacgaaaacattatcgtcagtaaggaccattaaaattgattggcagattgtcggacagttcaaaccgcttataaaagattttccagaagacgaacccattttcgttgaaaaatttggagacggcacttacaaacgtcaattcaattcaaccatcaacaattttttagctgttaaatgcaatgaaacaggcattacacagattagctttcacgcattacggcatacgcatgcaagtgtattgttggcagaaggtgtttcgattcatacgatttcagcacgattaggacatgctgacgtaggtgtcacacaagaaacttatgcgcatgtgttagacgaattacaaaagaaagatgatcaaaaaatgttatctgttttgatgcagattgcttag

SEQ ID NO: 2572 - DNA, 714 bp, Listeria innocua; identical to SEQ ID NO: 481

SEQ ID NO: 2573 - DNA, 288 bp, Listeria innocua; identical to SEQ ID NO: 154

SEQ ID NO: 2574 - DNA, 243 bp, Listeria innocua
atgggtcgtcctgtgaaaaataaaaacaggcatgtgaatttcctgtacggagtttggacgttagaagattttgcgcaagctagtccacgaagttacgggtggtggttagataacattaaagactttccagagcttgcagaatttagtaactgggctacaaagaatcaacgtgaagcgtgggcattcgatgcagtaaaagcaaatgattggctgattaaaaaatttgtatataaggaggtctga

SEQ ID NO: 2575 - DNA, 192 bp, Listeria innocua
atgtcagtagaacatcagcgtttcgctgttgcggtatacgcaaagttaaaagctataaatatgaaacaatctgatttagcaaaaatgctaggaattagcaatccttatttatcagacatcataaacggcaaaagagacgcatcgaaagttagaaaagaaattgcggaaattttagaaatagatgttgattaa

SEQ ID NO: 2576 - DNA, 204 bp, Listeria innocua
atgactttttatgattttttaataacttattaccttagcgaaaatagtcctttaggcgatctagctcatgatgttcaactagatggtaatttcccaacagaaagcaaaagcgaagatgaaatcagggattatttttctaatattggtactcctggcttccaagaggatttagatgaggcgttaaattattttagaagactatga

SEQ ID NO: 2577 - DNA, 324 bp, Listeria innocua; identical to SEQ ID NO: 206

SEQ ID NO: 2578 - DNA, 453 bp, Listeria innocua; identical to SEQ ID NO: 344

SEQ ID NO: 2579 - DNA, 489 bp, Listeria innocua
atgaaaaaattatttttgttagcgagtttattacttatttttagttttggtctatcagcatgtgggagtagtaactctgaaaacgagacaagtgattctaaaaaagaagatgtaaaaaaggttgaaaagaaaacaagtgtcgaatttccagacaaagaattaggtcaaggagagattattctgaaaacagaatcgggatcatctgaagatggaaatattccatttatgtataaagaagatgacttattgacgccatctatcggattcgaagcatgggaatttgatggttctaaattaacatatgtttatattgatgatgttcttaatactaaagaacaacttgcggacacacaaacttcattagatttaacaacaagtgagtatgaaacaggagaacacgaagtaaaagtagcccaatttgataatgataaagaaaccgggaaaataatcacatacaagacagcgaaatatgaaataaagaataaataa

SEQ ID NO: 2580 - DNA, 1155 bp, Listeria innocua
atgaaaataaaaaaaatgaaaaatggtaaatatactgttcgtttgcgtattaaagttgatggagagtggaaagaaaaacgtttgacagatacaagtgaaacaaatttgatgtacaaagcatcaaaattattaaaacaagttgaacatgatagtaattcactaaaagaatggaatttcaaagaattctattcgctatttatgaaaactttcaaagaaaataaaagtagtcaatcaacaattaacttgtatgacttagcttataatcagttcgttaattatttcgacgaaaaaataaagttaaattcaattgacgctgttcaatatcagcaatttattaatcatttagcattagattacgctgtcgctactatagataccagacaccgcaaaattagagcgattttcaataaagccgtccatttaggttacatgaaaaaaaaccctgctctgggcgctcacataagcggtcatgatatagcaaaaacaaaagcgcaatatttagaaacagataaagtacatctattattagaagagcttgcaaaacttcattctatatcaagagcagttatttttttagcagttcaaacaggaatgcgatttgaagaaattattgcactgacaaaaaaagatattaattttactaaacgttctatatcagtgaataaggcatgggattataaatacactaacacgtttacggacactaaaacaaaaaagtcacgagtaatctatattgataattcaactgttcaatatttacagtcttaccttgcttggcatgctgattatatgaaagagcatgcaattgaaaatccggtgatgttgttattcattacttatcacaataaacctgttgacaacgcttcatgtaacaaagcactgaagaaaatatgtactacaattaattctgaaacagtaacattacacaagcttcgacacacgcacacaggtctatgtgtagaggctggtatggatattatttatgtagctgacaggcttggtcatgatgatattaatacaacattaaaatattatagtcatctgagttctaatttacgacaacaaaatcaatctaaagtagatgcttttttcacactaaaaacagatgaaaataccacaaaatttgccacaaatgccacaaaaacaacggaataa

SEQ ID NO: 2581 - DNA, 657 bp, Listeria innocua
atgattaactgtttactttgtttacaacctgttaaacaatcagctagttgggaacttagttggtttcttagcgaggaagttttgtgttgttccgattgtatagcgggctttgaaaaattaactggaccgctttgtaatatgtgtagcagggaatcgtctgatgaattttgtaaagattgccaaggtagagagttttttctagatagtaatcgatctttgtaccaatataatgattttgccaaagaatatatgaaaaaatttaagtttcaaggtgattatatcatcggagctatttttcaaaaggaactaaaaaaatacttcgccgcgaacaaaacgactattgtcccaatcccggtaagtgaagtccgcaaattagagcgaggatttaatcaaacaacagcaatactgaaccaatctaatcttcactatgaggaacttttagcaaaaaaacactctgaaaaacaatctaagaaaacaaagcgagaacgattagaaacagagcaagtattttatgtagatgaagagattggaagcagtgaaaaggaaataattttatttgatgatatatacactacaggtagtactcttaacttagcggcgcaagcgttaaaagaatcaggggtgaaaaaggtgagctccttaaccatatttagatag

SEQ ID NO: 2582 - DNA, 1494 bp, Listeria innocua
atgataaatagcataaaaaaagatggcgtcaagattggaatttttagttttattgtttttttgttttacttatatctgtcttattgtaccccgttaactcatgatgactggacttggggcatacgacttggaatgaatcgtttttatgatggttttaaagactataatggtcgttattttggtaatatatgtgaattaataattactagagtagattggttccgctttttaatcatgggagtatttggagctgcaatagtagtaataccccttttaattgcaaaagcaacaaagttaactatcgcttttctaagtctattcttgatgctaggtgtttccagtgatatgttttcttctacttttgcgtgggcagctggttttgctaactataatactgcaacgatttgtattttagtatatttactaattgtgaagaatattttttatgaaaaaaatcctagttattcagtttggttggtaatatttgctgttccacttggaattggctctcaattgtttgtagaacatgctacaatttataatgtatttgctggtgcgtttgttataatttatagctttatgaaatttagaaagttcttttatttccatattgtataccttatttcagccctcatcggagcagttataatgttttctaatggtgcctatgtaaaaatatttactggcgcagataattatcgaacaattgatactgatatgggaatttttgaaaaaatttattcaattttctcaactagcatgtataagtttttaattatgaacaatattttattgaactttgcattggctatattttgtattttcttgttagtgaaaattggaactaatctacctatttggaaggtatgggttaaaaacattttcatggtaatactaactatatatcctttctatcgaccacttattgttgatagaatgcagttaagtatttttacggatgtagctaagacttcagaacttgaagcttggatttcattattattttacttaactattctatttactatcattttatttttccgaaagagttctttaaaagtggagctaagtttttatctaatttctgcagtattcgttgcaggaccgttattctttgtaactccttttggatcaagatgttttattatttcctatacattttttgttttatttattatacgacttcttgtttattttgtggatgagggatatgttaatctaaatgctatcagtgttccgattataacgctttctttatctttagtagtcgcgtatggtattatttttgctcaaataaaaatatctgataatgacagaatggatagtattcaaaaacaaattgacgaaggtaaaaaagtggtaactgttaaaccactaaaacatgagaaattcttatggaatagtaggttaatgattcctggattccaagcagataacttcaagattttctttaacttacctaaagatatagaacttaaaaatgcgcctaagtaa

SEQ ID NO: 2583 - DNA, 2313 bp, Listeria innocua
ttgaaaaaattagtaaaatcggcggttgtttttgcaagtcttgctttaattggcacgtccgcaaccttgattacagagaaagcaagcgcttcttccattgaaacagtacaaaaggtagatgatcaatctatttatattccccaaggcattagggatgggactgctacggaagaacatgacggctttgaagatgaaactaatagcgtactaaagacaacctctttacttcgcgccacaacaggatatcctgatgtaaatgcctatattaaatcgaataaattttcaacagcttccattgaaaaacaattaaaaagccaattccctaaatttaattaccgtaatggttacgggaaaccagaaggcgtcgtcattcatgaaacagcaaataattcatccactattgagggcgaaattagttatatgagcagaaactacaataatgcattcgttcattcatttgtagataaatctcgtatcattcaaatccacccaactgaaaatggggtatggggagcaggtcaatatgccaacgctcgttttatccaagtggaattagttcgttcgaagacatttgatgaatttgcacgctctatcaataattatgcttattatgcggcctacctattggatcaatataaacttccagtggatagtgcgcacagtgatggtaaaggaacaatttggtctcatgatgcagttacacgctatttaggtggaactacacataccgatcctgtaggttatttcaaccaatggggctataatttcaacagttttgttacgttgattaatgaaaaatacaaagcaattcaagctagcaaagttacttacgacaaaatcgaatacgataaaggcgtcacagcctatgctagagtgaaaacagctccaggcaacgctgtttggacaagaccttacagaacagaaggctctaaacttgttaatcaactttcggtctaccaaggcaaaaacatgcggatcctgcgcgaagctaaaacaccaatcactacttggtatcaatttagcatcgacggcaaaacaattggttgggtcgatactcgtgcacttgatacgttctacaaacaaagcatggagaaagatgctaatttaactcgctatgtcgcttccaacaaaacaggtgaagcgtactacaaagttccggttgtagatgcagatgtcaaatggggcactataggcacatataaaagcgaaaaactaaccgtcgataaacaagcaactgtggaaggtcaactttggtaccgtgtaaaagctgggtctaccttcattggttggacgaaagcatccaacttaacagctacctctccatttgataaaatcgaatatgataagggtgtcacagcctatgctagagtaaaaacggcgccaggcaatgctgtttggacgaaaccttacagaacggaaggttctaaacttgttaatcaactttcggtctatcaaggcaaaaacatgcgaatcctgcgcgaagctaaaacaccaatcactacttggtatcaatttagcattgatggaaaagtaatcggttgggtcgatactcgtgcacttgatacattctataagcaaagcatggagcaatcgactaatttaactcgttatgtcactgccaataaaacaggcgaagcttactacaaagttccagtagctgattcagatgtcaaatggggtacacttgcaacttataaaaatgagaagttaaccgtagatagtcaagcgactgttgaaggtcaactttggtaccgcgttagaacaagcactacttttatcggttggactaaagctgaaaacttaacaactacccctccattcgatgcaatcgaatatgataaaggtgttacagcctatgctagagtgaaaactgctccaggcaacgctgtttggacgaaaccatacagaacagaaggctctaaacttgttaatcaactttcggtctaccaaggtaaaaacatgcgtatcctgcgcgaagctaaaacagtaattactacgtggtatcaatttagtattgatgggaaagtaatcggttgggttgatactcgtgcacttgatacgttctataagcaaagcatggagaaagatactaatttaactcgctatgtgattgcgaacaaagtaaacgaagcgtactacaaagttcctgttgtagatgcggatgttagatggggcactttagctgcttacaaaggtcaaaaactcaccgtggataaacaagcaacggtcgaaggacaactttggtatcgaataagaacaagctccacctttattggttggacaaaagcttcgaaccttagtgctactaaataa

SEQ ID NO: 2584 - DNA, 285 bp, Listeria innocua
ttgatacacatagaagcgaaaatccaagtgaaaccagactttatagaatcatttttaaaagaagtggagctagtcatccaaaattcgctctcagaagccggaaaccatggctatgaattagttcgttctgtgaaaaacgcatctaccttctatctcttagaaaaatgggcagatgaagctgctattcaattccataattcaacagagcactataaacgatttaaacgggaaattcctgcatttttagcattcccgaccgaagtggatgtactcactaaaatttaa

SEQ ID NO: 2585 - DNA, 2817 bp, Listeria innocua
atgaaaagaaaaatatgtttactaattgcagtaggagtaatccttttacaattaagcgcagacccatttgctatatgggcttcagaaaataatggaaacaacgtaaatgcggcagaaacagagacgacaaaatacaaattgatattatcaacccctaaacgtgataatttaatgggagaatatgaagcagacgaagtaattaaatctgccccagcaaatccagttattgaagggtataagttttggggatggtatgaagaaccaaatggttacggaataagatggtattttcaggataataaaatgccggctcatgatgtaactttatacgcatactttacaatagagacctacacagctacattaatctctgaagaaagaacagctacccaaccagttgtttatcaaaagaaaattaatgaacctacaaaaccagtaaaagatggttatacatttattgggtggtatgatgcagaaacaggcggtaaaaaatgggattttgctaacgatttaatgccggggaaaaacatcacattatatgctcaatttgcttctaaaacatatcctatgacctttgataatggcggggtaacaacgacagaaacagtggactatgatggtcttgcagaagaaccaacaacgccaacgaaagctggttacacatttgatggttggtatgacgcagaaacaggcggtaaaaagtggaattttgctcaagataagatgcctgcaaatccagtaactttatatgcccgttttacaatgaataattacactgcgacttttaataatgatggaacaacgacaacgcaaacagtcgattatcaagaagcgctaacagaaccaactgaaccgacaaaagatggttatacgtttgaaggttggtacgacgcacaaacaggcggaaacaaatggaatttcgcgacgaacaaaatgccggggaacaacatcacactatatgctcgttatagcgctaaatcttatacaacaacatttgacaaagaaggaacaacaacgacacaaacagctaattatgatagtcttttgacagaaccaacagcgccaacaaaagagggttacacatttgatggttggtatgatgcggagacgggcggaaacaaatgggattttgcaactgacaaaatgcctgccaagaacatcacactgtacgctcgtttcacagtcaaatcctatacagcgacatttgataaagacggaacgacaacgacacaaacagctaattatgatagtcttctgacagaaccgacagagccaacaaaagagggttacacatttgatggttggtatgatgccgagacaggcggaaacaaatggaattttgcaaccaaaaaaatgcctgccaagaatgtcacgctgtacgctcgttttacagtcaaatcatatacagcaacatttgacaaagacggaacgacaacgacacaaacagtcaattatgatagcctgattcaagcgccgacagagccaacaaaagccggttatatatttactggttggtatgatgccgaaacaggtggaaacaaatgggatttcacagcgaaaaaaatgccagcgaaaaacgtcacattatatgcccgttttagtgcaaatgcttatacagcaacatttgataaagatggaacaacaacgacacaagctgttgattacgacagtctaattacagaaccaacagccccaacaaaagacggctacacatttgatggttggtatgatgccgaaacaggtggaaataaatgggatttcgctgcgaaaaaaatgccagcgaaaaacatcacattatatgcccgttttagtacaaatgcttatacagcaacatttgataaagacggaacaacaacgacacaagccgttgattacgacagtctgattacggaaccaacagcaccgactaaagacggctacacatttgatggttggtatgatgccgaaacaggcggaaacaaatggaatttcgcagtgaaaaaaatgccagcgaaaaacgttacattatatgcccgttttagcacaaatgcttatacagcaacatttgataaagacggaacaacaacgacacaagccgttgattacgacagtctgcttacagaaccgacagcgccaacaaaagaaggccacacatttgatggttggtatgatgcggaaacaggtggaaacaaatgggactttgcagcaaataaaatgccagcaaaagacgttacgctatatgcccgttttaccgttaaatcatatactgccacacttaatggtgaagaagttacaacacaaacagttgactaccaaggattactacaagaaccgccagcacttacaaaagctggttatacatttgatggttggtatgatgccgaaacaggtggtaataaatgggattttgctacaaacaaaatgcctgctaatgatttagccttatatgcgcgctttacccaaaatccagtagttccggtagacccggtaaatccagtaaacccggtaaatccgataaacccagtaaacccagtaaacccagtaaacccagtaaacccagtaaacccagtaaacccagtaaacccagtaaacccagtaaatccgattcaaccagcagatccagcacatcaagacgatctaatggatgacatcttaccggcaactgagaacacaaacattactgctacgataaaaccagctaatgaccctgttaagaaaacaaaacaaagtaaagaattaccaaaaacaggcgaccaagaaaatatcctttatttattaatagggttattactaatcgctggaacgtttggctttttcaaaaaaatgtctcataaataa

SEQ ID NO: 2586 - DNA, 648 bp, Listeria innocua
atgaagaaaagtattatcgttatcataggattagtgagcatagttggattgacgggttgtactaataataaaaatataaatgaaaaacaaatagtaggaaaagaaatcgaaaaagttgaacaaaaaagtagtatagtttcttgtgatggaaagtatctggatcttgcagaaaatattgaagaactagaagaaagttctcctattattgttactgtaacgaaacgctctgaaaaaaaatctattacaaaagaatcaaaaaatagcaatgtgcctacagaattttatactatgagtgaagtagttataaataatatagaaaaagatgaaacgaagaccttagaagaaaataaaacgattaaggtattagaagatagtgttgaaaatgttaaaatcgatggacaagaatacgatttaacgattgatgggtataaaaatatgaaagaagacgaagaatatacgctatttataaggaaaagtacatctggagataattatgtacttacaaatgctatgttaagtaaatatcctgttgctgagttgagtgaaagtgagctgttccttgaaaatgaggaaaacaaggaagaagcgatagatatgaaagatacgtataaggatatatataaggaagttctaagtgattataactaa

SEQ ID NO: 2587 - DNA, 537 bp, Listeria innocua
atgagaaaaaaaactgcggtaacaattttgctttttattgtactattgacaacgattctaatgccaacgaatgcaaatgcctatactaaattaggttattctttaagtaaatcaaatgctaagaattttaaattttatattaatgggtcggcgatgggttataaaaatataattattaatggagcaaaatcttggaatgcttctccatatttaaatacggtaagtaagggacgagatgcaaaccctcactttataattagtagttcaactatagacagaggggcaactgttgctgtctgcgaaacttgggcatataaagggtctaagttagtagccaaaaatgaaataactacttttaaagcttttagatctttatctgtaggtgataagactgaaactatagctcacgaatttggccatggccttggtttaggacatgtgaaaacgaagaatgcaatcatgctagatgttggttttacaaagaaaataaaaccacaaagggatgatttaaacggtattaaagcaatatataaataa

SEQ ID NO: 2588 - DNA, 459 bp, Listeria innocua; identical to SEQ ID NO: 348

SEQ ID NO: 2589 - DNA, 591 bp, Listeria innocua; identical to SEQ ID NO: 425

SEQ ID NO: 2590 - DNA, 297 bp, Listeria innocua
atgggatggcggacagttgttgtaaattctcattcgaaactatcgtacaaaaaccagcatcttgtttttaaatctgcctatcaacaggaaatgattcatctatcagaaattgatgtacttatattagaaacaacagatattactttgactacgatgttaattaactgcttagtagctgaaaatattttgattctcttttgtgatgataagcgattgcctattggaaaggtacttcctttttatggacgacatgacagtagtttgcaattatcgaagattcgaccatatttgcaatag

SEQ ID NO: 2591 - DNA, 4005 bp, Listeria innocua
atgaaaaaaccgtacacgattggactagacataggaacaaactcggttggatgggcagtgttaacagatcaatatgatttagtgaagaggaaaatgaaaattgctggagactctgagaaaaaacagataaagaaaaatttctggggagttagactatttgatgagggtcaaacggcagctgatagaagaatggctagaacagctagaaggagaatagagagaagacgcaatcgtatttcgtatttacaagggatatttgcggaagaaatgtctaagactgatgcaaatttcttttgccgattaagtgatagcttttatgttgataacgaaaaaagaaatagtcgtcatcctttttttgcgactatagaggaagaagtagaataccacaaaaactacccgaccatttatcacttgagagaagaactcgttaattcttcagaaaaagctgatttaagattagtttatttagctttagctcatattataaaatatcgagggaactttttaattgagggggcattagatacccaaaatacttctgttgatggaatatataagcaatttatacaaacatataatcaagtatttgcaagtggtattgaagatggttcgctaaaaaaattggaagataataaggacgtagctaaaattctcgttgaaaaagttacgcgaaaagaaaaacttgagagaattttaaaattataccctggtgaaaaatctgccggaatgtttgctcagtttatcagcttgattgtaggcagtaaagggaattttcaaaagccttttgatcttattgagaaatcggatattgaatgtgcgaaagatagctatgaagaagatttagagtctttgttagcgctaattggagatgaatatgcggaactttttgttgcggcgaaaaatgcatatagtgctgtggtgttatctagtattatcacagtggctgaaactgaaacaaacgcgaagttatccgcaagtatgattgaacgttttgatacacatgaagaagatttaggggaattgaaagcatttatcaagcttcatcttcctaaacactatgaagaaatatttagcaataccgaaaaacatggttacgcaggttatatagacggtaaaacaaagcaagcagatttctataaatatatgaaaatgacattagagaacatcgagggtgccgattattttattgctaaaatagaaaaagaaaactttttaagaaaacaacggacgtttgataatggggctattccgcatcaattacatttagaagaattagaagccattttgcaccagcaagcaaaatattatccttttttaaaagaaaactatgataaaatcaaaagtttagtaacttttagaattccttattttgttggcccactagctaacggacagagcgaattcgcatggttaacaagaaaagctgatggtgagattagaccgtggaatatagaagagaaagtggatttcggtaagtcagcggtcgatttcattgaaaagatgaccaataaagatacatatttacctaaagaaaatgtattgcctaaacacagtctctgttatcaaaaatatttggtttataatgagttaaccaaagttagatatattaatgaccaagggaagactagctatttttctgggcaggaaaaagaacagatttttaatgacttatttaagcaaaagcgtaaagttaaaaagaaggatttagagctgttcttacgcaatatgagccatgttgaaagtccgactattgaagggttggaagactcgtttaattcaagttattctacctatcatgatttactcaaggtagggataaaacaagaaatccttgataacccagtaaatacggaaatgctagaaaatatagtcaaaattttaactgtgtttgaagataaacgtatgattaaagagcagttacagcaattttctgatgttttagatggggttgttttgaaaaaattagaacgacgacattatacaggatggggaaggttatcagctaagttattaatgggaattcgtgataagcaatctcacttaactattttagattatttgatgaatgatgatggacttaatcgtaatctgatgcaacttataaatgacagtaatttatcatttaaatcaataattgaaaaagaacaagtaactacagcagataaagatattcaaagtattgtggcagaccttgctggtagcccggctataaaaaaaggtattctacaaagcttgaaaattgtcgatgaacttgttagtgtaatgggctacccacctcaaactattgttgtggaaatggcaagagaaaatcaaacaacaggaaaagggaaaaataattctagaccacgttataaatcattagaaaaagcgattaaagaatttggtagtcaaattctaaaagagcatccgactgataatcaagaattaagaaataatagattgtatttatattatttgcaaaatggcaaggatatgtatactggacaagacctagatattcataatctttctaactatgatattgatcatattgtgccacagagttttataacagataactccattgataatcttgtgttaacgagttcagctgggaatcgggaaaaaggggatgatgttccaccactagagatcgttcgaaagagaaaagtattctgggagaagttataccaagggaatttgatgagtaaacgtaaatttgattatttaactaaagctgaacgtggtggtcttacagaagcggataaagcgagatttattcatcggcaattagtggaaactcgtcaaataacgaagaatgtagctaatattttacatcaacgttttaattatgaaaaagacgatcatgggaatactatgaagcaagttcggattgtaacattaaaatctgcactggttagccaattccgtaagcaatttcaattgtacaaggtgcgtgatgttaatgattatcaccacgcccatgatgcttacttaaatggggtagtcgcgaatacgttattaaaagtatatcctcaattagagccagaatttgtttacggagattaccatcaatttgattggtttaaagcgaataaagccacggcgaaaaaacaattctatacaaacatcatgttattctttgcgcaaaaagatcgaataatagatgaaaacggtgaaattctttgggataaaaaatatttggatactgtcaaaaaagtcatgagttatcgacaaatgaatattgttaagaaaacagaaattcaaaaaggagaattttcaaaagctacaattaagcccaaaggaaattccagtaaattaattcctagaaaaactaattgggacccgatgaaatatggtggtcttgatagccctaatatggcatatgcagtggttattgaatatgcaaaagggaaaaataaattagttttcgagaaaaaaattatccgtgttactatcatggaacgtaaagcatttgaaaaagatgagaaagcctttttagaagaacaaggttatcgtcagcctaaagtcctcgcgaaattaccgaaatatacgttatatgaatgtgaggaaggacgccggagaatgctggctagtgctaatgaagctcagaaaggaaatcagcaggtattgccaaaccacctggtaacattactacaccatgcggcaaattgtgaggtaagtgatgggaaaagccttgattatattgaaagtaatagagaaatgtttgctgaactactagcgcacgtatcagaatttgccaaaagatatacgttagctgaagctaatctaaacaaaattaatcagctttttgagcaaaataaagaaggcgacattaaggcaattgcacaatcttttgttgatttaatggcattcaatgcgatgggcgcgccggcgagttttaaattttttgaaaccactattgagcgtaaaagatataacaatctcaaagaactattaaattccactataatttaccaatcaatcacaggactatatgaatcacgaaaaaggctggatgactaa

SEQ ID NO: 2592 - DNA, 207 bp, Listeria innocua
aaagcgcaattcgatgtaccgggattattcttgtttggtcgtcaagatgatcacgtgggatacgcagacgggcttacattgcttgaaaaatatccacatgcttcttttgctatccttgattttgcgggacataatttacaaattgaacaaccaaaaatatttacaacaatggtagaggatttcttgttccgcgtgaaaccagaataa

SEQ ID NO: 2593 - DNA, 606 bp, Listeria innocua
atgcataaaacaatccgtagcgtagacgtttattatgaaaaatatggtgaaggaataccaataataatgattcatggctttgcacctgattcgcagctgatgattggttgtatggagccaatctttgataaggaaagtccattctcgcgcatttatttggatttaccaggaatgggaaaaaccgagaattacgactcaattcaaaatgctgaccatgtactcactcttttactagaatttattgaagctgtaattccgggcgagcaatttgtactcgccggagaatcgtatggtggttatttagctcgcggaatcgcagcgaaaatgccagatagagtacttggagtcttgcttatttgcccagtcatttatcctgaaaaggaaagaagaactttacccgaacaaaaagtcatgtatcaagatgatacgtttgtacggtcgctatccaaagaagaccgagcgtatttttcaaaaagtggcgttattttaacagcaagaaactggaatcgtttcttggcggaagtgatggcgggaatgattaatgcagatggagaatttttagaccgattatccgcgaattatgcgcttagctttgatccagattaa

SEQ ID NO: 2594 - DNA, 300 bp, Listeria innocua
ctgggcttagaatggtcaataaaatcaaaagaagattatgaagaaattttgaaaattatagaaaagagtattattgattcggggataaaagatgtgaggtcatacttcaatgttttttgtgtgccctctggtatcgaaaagtggcccgatttaatggatttcaacatctatcacactaatgaagaaacttatatatattgcttattaaattcaagcctagcagaagccgagttaacgatgaaaaagattaaatgggaattggatgctttaaactatcaatgcgagatagatgaattataa

SEQ ID NO: 2595 - DNA, 480 bp, Listeria innocua
atggctagtagttttcttgaggaagtagatcggttaataactttaagtggaataacctttcatgctagtggtactggaacacctgaattaattaaaatttaccaagatgctttagggaacgaatttccagagacatataagctttttttagaaaaatatgggacgttaacttttaatggtgtatctttttatggtatctctaaacgaggcttgagtgcagcttccataccagacgtcaaatttgcaacagagcaggcgcgtacatttggggatataaataaagagatgattatgataaaaaattcaggatatggttcgattttctcgatagacacttcaattattgggagtgagggcgagcctgtaatagttgaaactaacttatcattcaaagacaatacagaaaagaaagttgttgctaatagttttggcgaatttttactggaagaaatagaactatctttaactgatttggggtaa

SEQ ID NO: 2596 - DNA, 198 bp, Listeria innocua
atggaaaaaaagcatttcgatttaaatgatatagtagaaatgaaaaagcctcatccttgtggtaccaatcgatttaagattattcgtatgggtatggatattcggattaagtgcgaaggttgcggacatagcgtcatgattcctcgacgtgaatttgaacgaaaagtaaagaaaattttagttaaggctgaagagtaa

SEQ ID NO: 2597 - DNA, 963 bp, Listeria innocua
gtgagcagtataaataagttgtttattatagggaacgggtttgatttagcgcatggagttccatctacttttaatcattttaaagagtatcttagatgtacatatttatatgaacacgatgtatatcctagtctgtggttacctgcttctacagattacgatggtgagatatgttataaaattgaagattgtgcacaaataattgattttatgatttgtgatagttgtttaaggattggttctgaagacgaaggagagaactggagtgattttgaaagagctattgggcgttttgattattctttgctagaagaggatatagaaattcaatatgataaggaaggggatataaatccttttcatacgggaaataattatgaagatgcatataatgatttaagtaatgtaatgttaaaattacctgagcttttctctgaatggataaataatatccctattctggaaaattgcttttctgtgttcaatttagataactattattctattttagaattaattgacaaagaacatgatgtttttctaacttttaattatacagagactctggaaaatctatatgaggcagagaatgttacgcacatacatggaaatcaaacttcccctgtgttaggtcacaataatacctcacgaatagaggaacaaagttatcatcaagatacctatataaatactatgaatgaaactttaaagaaaccaacagatagaattattgaagaaaaatcgtatttttttaagaacttagagggagaaattgattctatttattcatacggtttttcttttggagaagtcgatttgatttatcttaaggaaatatttaaacatttaaattctaaaaatatgatatggtatctccatagttatgacagacaacaacataatgagtttaaactgaaaataaaaaaatgcggatttttaggttctttttctgaatttaattga

SEQ ID NO: 2598 - DNA, 1992 bp, Listeria innocua
atggaacggattaaattttatagttcatcagatatatctagcggttatcattttaagaggctgaaagaacttatcgagtctagtgaagacatagaaacaaacaatcttttggatatgctagaagtatataatattttgaaattcatgagtaaagaaacttatcctgtcaatttatcagataagcagattaaagagactaagagtatacttaacagaaaacttaatcaatttttccgagagttatcaaaacaagatattttagaattttttgattatttttttgctcaaaataatccggatttaggtggaaatgtagtaaaatatactgatatggacaagtatagtgacactctttataaagaagactttttagaatgctttgaaaagtataaattagatgcgaaaattagtggaaatgacatgagaggcttttttaaagaacacgaaatccctgttgaatattttttgaaaactaattattttgtgaaacattatcctactgtaataaaggatatatttcttgcgaaagcaagaaatttcgaattagttttagataactatactcctagtgaaactaggtattttattcctaacaacattacgaaagatgaaatgtataatctttgcaaactatatataaagggtgaggcagctgatttaaattatctttatttggttgggcaaggaattcaaggtgttaaggaacttcaaattgatgctaaattaaaattaaagtctaggaaaagatgtgcgcaaatagagaagaaaatttttagtgatgaaaatggcaatgcaaataatggaatagagcaatcaatagttatttattcagacaaagaaaagtatgatatggcgaaagaagattttaaaaacttaattgacattgactatttaaaaaaagaaaaatccaaagaaaatttattagagtatatgatgtattttaatggttttttcacaggaaattggattttaaatttatgtagttttcctaacatcgaaagttcaactttaatgaaaaagttattggggattcatactaaaaaaaattatgaaacaagtttttatttcaatggtaaaaatatcttgatgttaataagctttaaaatatatcaggataaactacaagagatttttgatataagaatagaagaactgatagtttactttttttcagaatatagtaaggaatactttcttgtaaactggctaccaatagattttacgaacaagtcagaaaaaattcatattcagactaaaaacttagttactatagaggaacaattaagaaaacaatggaaactatatattgaggaaaatgaaatagataaagaattattcgaactagaagaaacgccaacgcttaagtcgttaaagagtagattagacaggaaatatatatatataaatcagaataataaagccattctcagagttatgtatttacttttttcagatcaatcacatataacgtatataactaaagagacaaatggagataattttgtagaactaatagttaataataaaattaaaaaagatgattttcataattatcaacgattagatattgaatttttacttgataattatattatttcgattgataaaaaaggagatatattcataactgaaaagcagttattacgaatccgtattttttctaatatttataaatatggggttattcattattaccattcgaataaaaaactggatattaataaagagttgacatatcaacaacaagagatagatgaaatgattgaagaggaattattaatttatgagaatactttttttgccaaacctgaggtagactatctaaactacatccttaataattctgaatttgacaatgcattgggtataagaaacaaatattcacatggatctattgtagacgaaaacgaggatgattatttttatttactaatcgtcttagtagtatatattattaaaataaacgaggaactgatccttaacgagagatag

SEQ ID NO: 2599 - DNA, 576 bp, Listeria innocua
ttgtgctttaaaaatctaacaacaaacagagaggacgagagcaacatgaagattgatacacaaaaaatcgttaatttcgcgattgaaggggtgggaaaattcctgcaagaaaaccctgagttaacatattatgcttttgcgttcgattgtaatgctgaatatgcggaaatcaatttatgcgtaaatacggaagaagcttttgctgaaatactggcatattatcaaagtggcaagtatggtgaaaactatcaaacggaagaaaatattcaagtcttgaaatacaatacaggcgactggaaataccaatgttttgatacattttatgtttttagtgaagaagaactgagcgccatatttaataaaatataccctaatgaagtcgatgatgattatcaagcatggaaagcatttgtaaatgagctgctagatgcttttacagaaagtataattcaattttcggagacaaaaaccttccaaaaaatcaataaaacagcggattttaaatttttctgtatagatcatgacgaagaattagcggattcaatgacgcgaatgcaactttttcaaaaaaaataa

SEQ ID NO: 2600 - DNA, 813 bp, Listeria innocua
ggtatcggcacgacgtcaattgcgacaggggtatctaaattagtaccgccgagcagaacgggagaaggaattggcttttatgggcttacgactgcgcttggaatgtcactagcgccaattattgctattttaatcatgaattatttttcttttgatgttttagtgactttttcgcttgttttgatggtatttattttacttttaatgacacaagtgaagattccaaaatcagaaaagatcgtccatcaaaaaatgaaattgttcgagaaaacagcgctacttccggcagggctatgcttgctaatggctattccgcttggtggtattcagacgtttatgatggtatacgggacggaaattgggatttcgacaacttgggtttattttatcgggcaagccattatggtgcttattagtcggttgtttgctgggcgtctttatgatacaaaaggacatcgttttgttattattccgggtgcgctatccatgattattggaatattaattctttcttttgcaaccggggcaatcagcttatttgttgcatcattgttttttggactaggatatgggatggcacaaccggcactccaagcacttgctgttgaccgagctgcgccacataacaaaggaactgcgaacggtacttttctttcaggaatggacattgggatggctgttggtagttttggtttaagtattgtggcgacttactacaattatgctattatgtaccgcacagcaattattgcgcttgtcatattttttgtggtttattggttaactttagggcgaaaagtgaaaaatagctga

SEQ ID NO: 2601 - DNA, 375 bp, Listeria innocua
ttggaaaataagacaagactttggacgaaggactacgtatttttattattaggcagtgtgcttttatatattgggtttatggtgtttatgccgacgttaccagctcgaattattgaacttggcggaacacaaatggaagctagtttagcggtagggctattttcaattgtcgccttacttatgcgggcgattgctggaagttggaacgataaatttggacctaaagtattaattattgcaggttttttgattttaattttaacgactgtgaacttttattggtcgacggcggttgcggctttgcttatattacggctttttcacggggctggctgggggtatcggcacgacgtcaattgcgacaggggtatctaa

SEQ ID NO: 2602 - DNA, 1119 bp, Listeria monocytogenes EGDe; identical to SEQ ID NO: 1030

SEQ ID NO: 2603 - DNA, 1026 bp, Listeria monocytogenes EGDe; identical to SEQ ID NO: 1031

SEQ ID NO: 2604 - DNA, 1386 bp, Listeria monocytogenes EGDe; identical to SEQ ID NO: 1032

SEQ ID NO: 2605 - DNA, 1092 bp, Listeria monocytogenes EGDe; identical to SEQ ID NO: 1033

SEQ ID NO: 2606 - DNA, 942 bp, Listeria monocytogenes EGDe; identical to SEQ ID NO: 1034

SEQ ID NO: 2607 - DNA, 1110 bp, Listeria monocytogenes EGDe; identical to SEQ ID NO: 1035

SEQ ID NO: 2608 - DNA, 780 bp, Listeria monocytogenes EGDe; identical to SEQ ID NO: 1036

SEQ ID NO: 2609 - DNA, 1815 bp, Listeria monocytogenes EGDe; identical to SEQ ID NO: 805

SEQ ID NO: 2610 - DNA, 990 bp, Listeria monocytogenes EGDe; identical to SEQ ID NO: 950

SEQ ID NO: 2611 - DNA, 294 bp, Listeria monocytogenes EGDe; identical to SEQ ID NO: 947

SEQ ID NO: 2612 - DNA, 723 bp, Listeria monocytogenes EGDe; identical to SEQ ID NO: 945

SEQ ID NO: 2613 - DNA, 258 bp, Listeria monocytogenes EGDe; identical to SEQ ID NO: 943

SEQ ID NO: 2614 - DNA, 204 bp, Listeria monocytogenes EGDe; identical to SEQ ID NO: 995

SEQ ID NO: 2615 - DNA, 285 bp, Listeria monocytogenes EGDe; identical to SEQ ID NO: 941

SEQ ID NO: 2616 - DNA, 450 bp, Listeria monocytogenes EGDe; identical to SEQ ID NO: 940

SEQ ID NO: 2617 - DNA, 1479 bp, Listeria monocytogenes EGDe; identical to SEQ ID NO: 935

SEQ ID NO: 2618 - DNA, 399 bp, Listeria monocytogenes EGDe; identical to SEQ ID NO: 934

SEQ ID NO: 2619 - DNA, 603 bp, Listeria monocytogenes EGDe; identical to SEQ ID NO: 933

SEQ ID NO: 2620 - DNA, 327 bp, Listeria monocytogenes EGDe; identical to SEQ ID NO: 931

SEQ ID NO: 2621 - DNA, 369 bp, Listeria monocytogenes EGDe; identical to SEQ ID NO: 930

SEQ ID NO: 2622 - DNA, 984 bp, Listeria monocytogenes EGDe; identical to SEQ ID NO: 927

SEQ ID NO: 2623 - DNA, 903 bp, Listeria monocytogenes EGDe; identical to SEQ ID NO: 905

SEQ ID NO: 2624 - DNA, 1116 bp, Listeria monocytogenes EGDe; identical to SEQ ID NO: 902

SEQ ID NO: 2625 - DNA, 1389 bp, Listeria monocytogenes EGDe; identical to SEQ ID NO: 826

SEQ ID NO: 2626 - DNA, 243 bp, Listeria monocytogenes EGDe; identical to SEQ ID NO: 957

SEQ ID NO: 2627 - DNA, 357 bp, Listeria monocytogenes EGDe; identical to SEQ ID NO: 825

SEQ ID NO: 2628 - DNA, 177 bp, Listeria monocytogenes EGDe; identical to SEQ ID NO: 824

SEQ ID NO: 2629 - DNA, 444 bp, Listeria monocytogenes EGDe; identical to SEQ ID NO: 823

SEQ ID NO: 2630 - DNA, 87 bp, Listeria monocytogenes EGDe
atgccagactgggattttaataatcctgagtcaatgaaagcatgggatttggcttctggttcttatgcagaacaagtttctgggtga

SEQ ID NO: 2631 - DNA, 207 bp, Listeria monocytogenes EGDe; identical to SEQ ID NO: 994

SEQ ID NO: 2632 - DNA, 438 bp, Listeria monocytogenes EGDe; identical to SEQ ID NO: 822

SEQ ID NO: 2633 - DNA, 351 bp, Listeria monocytogenes EGDe; identical to SEQ ID NO: 821

SEQ ID NO: 2634 - DNA, 618 bp, Listeria monocytogenes EGDe; identical to SEQ ID NO: 820

SEQ ID NO: 2635 - DNA, 366 bp, Listeria monocytogenes EGDe; identical to SEQ ID NO: 819

SEQ ID NO: 2636 - DNA, 408 bp, Listeria monocytogenes EGDe; identical to SEQ ID NO: 818

SEQ ID NO: 2637 - DNA, 2499 bp, Listeria monocytogenes EGDe; identical to SEQ ID NO: 1067

SEQ ID NO: 2638 - DNA, 339 bp, Listeria monocytogenes EGDe; identical to SEQ ID NO: 1066

SEQ ID NO: 2639 - DNA, 393 bp, Listeria monocytogenes EGDe; identical to SEQ ID NO: 1065

SEQ ID NO: 2640 - DNA, 306 bp, Listeria monocytogenes EGDe; identical to SEQ ID NO: 1064

SEQ ID NO: 2641 - DNA, 714 bp, Listeria monocytogenes EGDe; identical to SEQ ID NO: 747

SEQ ID NO: 2642 - DNA, 954 bp, Listeria monocytogenes EGDe; identical to SEQ ID NO: 746

SEQ ID NO: 2643 - DNA, 1590 bp, Listeria monocytogenes EGDe; identical to SEQ ID NO: 745

SEQ ID NO: 2644 - DNA, 1533 bp, Listeria monocytogenes EGDe; identical to SEQ ID NO: 744

SEQ ID NO: 2645 - DNA, 1920 bp, Listeria monocytogenes EGDe; identical to SEQ ID NO: 743

SEQ ID NO: 2646 - DNA, 870 bp, Listeria monocytogenes EGDe; identical to SEQ ID NO: 740

SEQ ID NO: 2647 - DNA, 324 bp, Listeria monocytogenes EGDe; identical to SEQ ID NO: 739

SEQ ID NO: 2648 - DNA, 387 bp, Listeria monocytogenes EGDe; identical to SEQ ID NO: 956

SEQ ID NO: 2649 - DNA, 1041 bp, Listeria monocytogenes EGDe; identical to SEQ ID NO: 996

SEQ ID NO: 2650 - DNA, 663 bp, Listeria monocytogenes EGDe; identical to SEQ ID NO: 786

SEQ ID NO: 2651 - DNA, 504 bp, Listeria monocytogenes EGDe; identical to SEQ ID NO: 785

SEQ ID NO: 2652 - DNA, 1179 bp, Listeria monocytogenes EGDe; identical to SEQ ID NO: 784

SEQ ID NO: 2653 - DNA, 1473 bp, Listeria monocytogenes EGDe; identical to SEQ ID NO: 783

SEQ ID NO: 2654 - DNA, 1647 bp, Listeria monocytogenes EGDe; identical to SEQ ID NO: 782

SEQ ID NO: 2655 - DNA, 1500 bp, Listeria monocytogenes EGDe; identical to SEQ ID NO: 781

SEQ ID NO: 2656 - DNA, 1266 bp, Listeria monocytogenes EGDe; identical to SEQ ID NO: 834

SEQ ID NO: 2657 - DNA, 1077 bp, Listeria monocytogenes EGDe; identical to SEQ ID NO: 936

SEQ ID NO: 2658 - DNA, 621 bp, Listeria monocytogenes EGDe; identical to SEQ ID NO: 816

SEQ ID NO: 2659 - DNA, 1203 bp, Listeria monocytogenes EGDe; identical to SEQ ID NO: 815

SEQ ID NO: 2660 - DNA, 747 bp, Listeria monocytogenes EGDe; identical to SEQ ID NO: 814

SEQ ID NO: 2661 - DNA, 1200 bp, Listeria monocytogenes EGDe; identical to SEQ ID NO: 813

SEQ ID NO: 2662 - DNA, 306 bp, Listeria monocytogenes EGDe; identical to SEQ ID NO: 723

SEQ ID NO: 2663 - DNA, 816 bp, Listeria monocytogenes EGDe; identical to SEQ ID NO: 928

SEQ ID NO: 2664 - DNA, 336 bp, Listeria monocytogenes EGDe
gtgatttattatatttgtgcattatatacattcattagtgcgttagtcagttttggcttttctttggatgcacttttaaaatctagaaaagtaaatggtgatgcattaataaatgcaaaatatgcggtatcaagaagtttatcattacttatagttgcattaggattgtttatattcaagtcagatgctttcttagtcgcattatctttagtaatgattggagcacaactttttgacgggattatcggaataaaaataagtacttttaaaacagttggtccacttttaactgcggtagggaatgtgattatgttaatattattcctaacgatctga

SEQ ID NO: 2665 - DNA, 5337 bp, Listeria monocytogenes EGDe
ttgaaaaagaaatttagtatagttattatcagtgtattgttacttggttatttagcgccttttgatactttgttagtaggtgcagatgaaacaacggtttctgaagatacagcagttaaaacggcagaagcagatagtgctactgaaggcatagaaagcgaaacaggttcagatgatgaaacggcagaagagccaaaagaagcaaaagaggcagaagcaagcaaagaaacgacagaaaaagaggaaaaagcgaaaacggaagaaccggcttctaatattaaaacggagattaatacagataaaagccagctgaaacaaactagcttaaaagcagcggtgccagcaggaagtacatataattctttgtttccagacgacaatcttgctaaaaaattagctgtgattatcacaggaaatgcggctgcaacaggtaatgaatcagtggatagtgcagctcttttagcaataagccaacttgatttgagtggggaaacgggcaatgacccaacggatatttccaatattgaaggattacaatatttagagaatttaacaagcctgaatttaagtgagaataatatatccgacttggctccacttaaagatttggtaaacctggtttcacttaacctttcttccaatcgaacattagtaaatctttcaggggtggaggatttagttaatttgcaagaacttaatgtctctgcaaataaggcgttagaagatatttcacaagttgcatcgttgccagtgttaaaagaaattagcgcgcaaggctgtaatattaaaaccttggaattaaagaatccggctggtgctgttttgccagaactagaaacattttatttgcaagaaaatgatttaaccaacttaacttcattagcgaaacttccaaaattaaaaaatctctatattaaagggaatgcttctttaaaaagtttagagacattgaacggggcgacgaagctccaattgattgatgcgagtaactgtaccgatttagaaacgcttggagatattagcgggctttcggaactcgaaatgattcaattaagtggttgtagtaaactgaaagaaatcacaagcttgaagaacttgcctaatctggtgaatattacggcggatagctgtgcaattgaagatttaggaacactgaataatttaccaaaattacagacattagttctttcagacaatgaaaatttaaccaatattactgcaattaccgatttaccacaattaaaaacattaactttggatggctgtggaattacatctattggaacgcttgataaccttcctaaattagaaaaattagatcttaaggaaaatcaaataactagtataagtgaaataaccgacttaccgcgattaagctatttagatgtaagtgtaaataatcttacaaccataggggacttgaaaaaattacctctattagaatggctgaatgttagttcgaatagattatcagatgtgagtacactaacaaatttcccgagtttaaattatattaatatatcaaataatgtcattagaacagtcggtaaaatgactgaattaccttcgcttaaggaattttacgctcaaaataacagtatatcagatatttcgatgattcacgatatgccgaatttaagaaaagtggatgcgagtaacaacctaattacaaatataggtacctttgataatttaccaaaattgcaaagtctagatgtgcattcaaatagaattacaagtacatcagttatacatgatttaccaagcttggagacgtttaatgcgcaaactaatttgattaccaatattggtacgatggataatttaccagatttaacctacgtaaacttatctttcaacagaataccgtcgcttgctccaattggtgacctacccaatttagaaacattaatagtatcagataataattcttatttaagaagcctaggaacgatggacggtgttcctaaactgagaattttagatttacaaaacaattaccttaattacactggaacagaaggaaacctaagttcattaagtgatttaacaaatctaacggaattaaatttgcgaaataatgtttatattgatgatataagtggactttccacgctatcaagactgatctacttgaatttagattccaataaaattgaagatatttctgcattgtctaatttaacgaatcttcaagagttaacacttgaaaacaacaagattgaaaacatttcagcacttagtgatttggaaaatttaaacaagctagttgtatcaaaaaataaaattattgatattagtcctgtcgctaatatggttaatcgaggggcaattgtaactgcgagtaatcaaacatatacattgccaactgtattatcatatcaaagctcgtttaccatagataatccggttatttggtatgacggcacactactagcgccatcatccataggaaactctggtaattacaaggacgggaaaataacttggactaatatgaccgctacgtctagttccactttatttaactttaataggttaaaagacggtttaaccttctcaggaacagtcacccaaccttataaatctgcagccaaagtaactgcagatgcagagcaaacttatacaattggtgatactatttcagaggagcagtttttaaaagatgttaatgcaaaatcatcagacggggcacctgttacaagtgattttgctacagtggtggatttaaacacttttggcgaatatgaagttactttaacttccgaaaaagatggaatccaaggggatagttgcaaagtaattgtcaaagttcttcacggagcgcctgtcatttcggcagaccaaacaattagttatgataaacatgcaactattacagagaaacaatttttagaagatattcatgccagcacagacttggatacagctattacaaccaattttagtacagcagttaacttgaataaaggcggagattatacagttgcactaaactctgaaaatgaggacggcgtgaaagctgaaacggtttatgtcactgttactgtaaataaagacccagcgccgattataagtgctaagacagaaatcacgtatgataaattctcgaaaaaaaccgaagcggcgttcttagatgatatagacgcagatacaaatgatggctctatagtaacttctaattttgctacagcagttaatttagataaagctggtgattatactgttacactgaattctattaatagtgatggtgtagcgggcacgccaacagcgattattgtgcatgtggagaaagagaaaatagcaacaattagcacaaatacggcacaacaatatgaaaaatatgcgaagattaatgaaacgcaatttctaaaagatgttcatgctagtattaacgcgagcccaacaaccgcagttttggaaagtgattttgaaacagtagttaaactagacgtcccaggaacgtacacagtaacgattactgctacaaatgaagatggcggagtatcggcacctaaagaagtttctgtcatagtaaggaaaattccagcaccagagatcactgcagataaggaaataacttatccgaaatttgatgaagtaagtgaagcagaatttttaaatgatattcatgcaactattagtgacaaaaatgtagcgattacaagtaacttcagcacagatgtgaatttaaataaagctggcgattacacagtaacattaaatgctacgaatgaagacggcgtaaaggctacaccggttgaagtaattgtacatgttcaacaaggagaacgccctgttataacagccgatgcaactatttcctatgacaagttcgctaacataacggaagcgaagttcttagaagatattcatgcaacaagtagtgatggtcaaagctctactgtaatcacctctaatttccagaccgcgacaaacttcaaaacagccatgagctacacagttacgcttaatgctgtaaatgaagacggcattagcgcagaaccagtagcagtgaccgttacaataaataaagaaccagccgcggcgttaaaagctgatgcagaagtaagctatgcgaaaaatgaagctgtaaccgaatccgatttcttcaaagatgttcatttagaaggaacggaagcgccaagtacagccaaagcaacaagtaattttgattccgtagtagatagaagtaaaacaggagattatactgttacgataaatgctacaaacgaagatggggctgtttctacaccaattgaagtaattgttcatattgaagcagaaagtgcaccagtaattacagcgaatgcagaagtaaaatataacaaacatgaacaaacagacgaaagaagatttttatatgatagtgaagcaaaaatcgatgaagctaatgtggaaattaaaaccgattttgcagaaaaagtagatattaataaagttggaacttatactgtcacactgactgctacgaatgaagatggccaagctgccaatccagtagaagtgagcgtcattgttagtgatgccgctgctgaaaaagtaaatgtgaaatatgtagatgaaaatggatcagaaattagtgcagcggagaccttaactggtaatttagatgaaacattttctattgatgcgaaatctatagctggatacaaatgtgatgcgactttaagcggtgtattttcaacagttgagcagacagttgtgttccattataaagcaatcaagcctggtgttgtaacgattaaatacgaagatacgaatggaaaagcagttgacgaagataaacaaatcactggcgaagtaggggatgattttgaagctgaggcgcaaacggtgagtggttattcatgccgagcaattgcaagcggtaagataacagaagaaccgcaaactattactttcacatacagtacagcaactccttcaaaaaaatcaggcgaaataacagttcagtatgtagatgagtcaggtaagaaattagctgattctaaaaaggttacagggaacattgatgatagttatagtgtagaagcaaaagcaattgaaggctatagcgtagttggcgatgattctgctaaaggtgtttttaccgaaaaatcgcaaacagttacttttaaatacaaaaaaaatacacaagttagtaaagatgaccctaaagttaaagggaaaacaaatcaaccatcaagtactgatacgaagctaaaagtagacaataattcgttgcctgcaaccggagatactgaaaatatgatattagcagttttaatcggttttaatatgctaatcgttgctagtatattcctttttagaaaaccaaaaacgaaccaataa

SEQ ID NO: 2666 - DNA, 525 bp, Listeria monocytogenes EGDe; identical to SEQ ID NO: 801

SEQ ID NO: 2667 - DNA, 1476 bp, Listeria monocytogenes EGDe; identical to SEQ ID NO: 802

SEQ ID NO: 2668 - DNA, 381 bp, Listeria monocytogenes EGDe; identical to SEQ ID NO: 803

SEQ ID NO: 2669 - DNA, 219 bp, Listeria monocytogenes EGDe; identical to SEQ ID NO: 963

SEQ ID NO: 2670 - DNA, 447 bp, Listeria monocytogenes EGDe; identical to SEQ ID NO: 795

SEQ ID NO: 2671 - DNA, 456 bp, Listeria monocytogenes EGDe; identical to SEQ ID NO: 794

SEQ ID NO: 2672 - DNA, 630 bp, Listeria monocytogenes EGDe; identical to SEQ ID NO: 699

SEQ ID NO: 2673 - DNA, 387 bp, Listeria monocytogenes EGDe; identical to SEQ ID NO: 698

SEQ ID NO: 2674 - DNA, 2466 bp, Listeria monocytogenes EGDe; identical to SEQ ID NO: 696

SEQ ID NO: 2675 - DNA, 555 bp, Listeria monocytogenes EGDe; identical to SEQ ID NO: 759

SEQ ID NO: 2676 - DNA, 2403 bp, Listeria monocytogenes EGDe; identical to SEQ ID NO: 756

SEQ ID NO: 2677 - DNA, 1893 bp, Listeria monocytogenes EGDe; identical to SEQ ID NO: 755

SEQ ID NO: 2678 - DNA, 618 bp, Listeria monocytogenes EGDe; identical to SEQ ID NO: 754

SEQ ID NO: 2679 - DNA, 504 bp, Listeria monocytogenes EGDe; identical to SEQ ID NO: 762

SEQ ID NO: 2680 - DNA, 2781 bp, Listeria monocytogenes EGDe; identical to SEQ ID NO: 764

SEQ ID NO: 2681 - DNA, 1488 bp, Listeria monocytogenes EGDe; identical to SEQ ID NO: 765

SEQ ID NO: 2682 - DNA, 990 bp, Listeria monocytogenes EGDe; identical to SEQ ID NO: 766

SEQ ID NO: 2683 - DNA, 1389 bp, Listeria monocytogenes EGDe
atgtttaaaacaaatgttgaacaaaataatgtaccggtgtttggctcttttgagtcaggacaagatttaccagaaaaacgcatgaataaggaatctgtagatccaagaattgcttatcaacttgtgaaggatcaactgattgatgagggttcagcgagacaaaatctagctacgttctgtcaaacatatatggaaccggaagctgagcaaatcatggcagaaacgatggagaaaaatgctattgataaatcagaatatccacagacagcaaagcttgagtctagttgtgtgaatatgttggcggatctttggaatgtggatgaatcggagcattacatgggaacgtcgacggttggttctagtgaggcgtgtatgcttggtggaatggctatgaaatttagatggaggagtgctgcactcaaaaatggattagacatccacgctaaaaaaccaagcttggttatttcttcaggctatcaagtttgttgggaaaagttctgtgtgtactgggatattgagttacgtgaagtaccgatgagtgaggagcatttgagtatcaatacagatatcataatggactatgtagatgaatatacaattggtattgtgggtattctgggcatcacctatacagggaaattcgacgatatcatgactttaaatgaccttgtggaagactataataatacacatgacaatgaagttgtaattcatgttgacggtgcgagtggtgcaatgtttacaccgtttgttgagccgggtttagaatgggattttcgattaccaaatgttgtttcgattaatacatcagggcacaaatatggtcttgtatacccaggtgtaggctggattttatggcgggacaaggaatatttgccagaagaattagtgtttgatgtgagctatcttggtgggcatatgcctacgatggccatcaatttttccagaagtgcgagtcagattatcggtcagtattataatttcttacgcttcggatatgagggttatcgtcaaattcatatgcgtacaagagatggtgccttgcaattatcacaagctgttgcagaaacaggacttttcgaaatttataacgatggcgcaaacttaccaatcgtatgttacaaactaaaagacgatgctaatgtggcgtggacgctttatgacttggcagatcgcttacaaatgaaaggttggcaagtaccggcgtatccacttccaaaagaaatgggtaacacaattattcaacgttacgtttgtcgcggcgatttaggacaaaatatggttacagctttcaaaaacgatttgagtgaaagtattgaagaactaaataacgctcatattttatatcatgatgtcaatacatctaaaacacatggctttactcattaa

SEQ ID NO: 2684 - DNA, 1452 bp, Listeria monocytogenes EGDe
atgaaacaacaaacttctgcaaaaactttatcactattcggattcttcgcaataacggcatctctttttatcactgtttatgaatatccgacatttgctacttctggattttcactggtattctttttactactatgtggattcttatggttcttgccagtctcgctttgttctgcagagctcgcgacagttgatggttaccaagaaggcggaattttcggctgggttagtaagacgcttggagaaaaatatggttttgctgcaatatttttccaatggttccaaatcacagtcggttttgttacgatgatttattttattattggcgcactatcttacgttattagtttcccggcgcttgattccaatccaatatataaatttatcgcggtccttataattttctggggactgacgttacttcaattaaaaggaacaaaagtaactgcaatctttgccaaattaggcttcgttctcggtattacaattcctgtattagcactatttttcttaacaattttccatttaaaatcaggtcatcatgctgcaatttccataacagcatcaagttttattcctaagtggacaaatatgtcgtctcttgttatcttcatgcttgcttatatgggtgtagaagcttctgcaccgcatattaatgaaatgaaaaatccaaaacgtgattatccactagcgatgattctactcatttttgtcggaattactttaaacacaattggtggactatctgtagcttccgttgtgccatcacatgatttatcactaagttcaggtgttgttcaaacatttaaagcgcttattttacaaaatggaaatagtatggagtggattgttaaactgattgcctccatgattgcatttggagttatggcgcaagtaagttcatggattgttggaccaacaaaaggtatgcaaactgttgctgataaaggtattatcccatctgtattccgtaaaacaaataaacacaatgttcctgttccacttattatggttcaaggtgtcatcgtttctatctgggcagcggtattgacattcggcggcggtggtaacaacgtatcattcctaacagctatttcattaactgttgtcatttacttgattggatatgttctcttctttctagcttatttcgttcttgtcttaaaaaagaaaaatctagaacgcacatatcaaattccaggagggaaaatcgtgaagttaatcgttgcaggtgttggactattaatgtcagtagcagctatcgtatctgctttcttcccacctacatcacttagtaagagcagtgatatgtcttatgaaatcattcttgcagcaagcttcatcgtcactattttaattccgtttttcatctatggtatacatcttaaaaagaaaaacaaagtcacaaaagaaaaaactattcaagaaaaagttgctttatcaatgaaataa

SEQ ID NO: 2685 - DNA, 1539 bp, Listeria monocytogenes EGDe; identical to SEQ ID NO: 767

SEQ ID NO: 2686 - DNA, 2070 bp, Listeria monocytogenes EGDe; identical to SEQ ID NO: 768

SEQ ID NO: 2687 - DNA, 474 bp, Listeria monocytogenes EGDe; identical to SEQ ID NO: 769

SEQ ID NO: 2688 - DNA, 486 bp, Listeria monocytogenes EGDe; identical to SEQ ID NO: 770

SEQ ID NO: 2689 - DNA, 306 bp, Listeria monocytogenes EGDe; identical to SEQ ID NO: 771

SEQ ID NO: 2690 - DNA, 267 bp, Listeria monocytogenes EGDe; identical to SEQ ID NO: 939

SEQ ID NO: 2691 - DNA, 237 bp, Listeria monocytogenes EGDe; identical to SEQ ID NO: 952

SEQ ID NO: 2692 - DNA, 1731 bp, Listeria monocytogenes EGDe; identical to SEQ ID NO: 946

SEQ ID NO: 2693 - DNA, 324 bp, Listeria monocytogenes EGDe; identical to SEQ ID NO: 953

SEQ ID NO: 2694 - DNA, 306 bp, Listeria monocytogenes EGDe; identical to SEQ ID NO: 960

SEQ ID NO: 2695 - DNA, 873 bp, Listeria monocytogenes EGDe; identical to SEQ ID NO: 899

SEQ ID NO: 2696 - DNA, 630 bp, Listeria monocytogenes EGDe; identical to SEQ ID NO: 898

SEQ ID NO: 2697 - DNA, 1011 bp, Listeria monocytogenes EGDe; identical to SEQ ID NO: 897

SEQ ID NO: 2698 - DNA, 888 bp, Listeria monocytogenes EGDe; identical to SEQ ID NO: 896

SEQ ID NO: 2699 - DNA, 1086 bp, Listeria monocytogenes EGDe
aggaagcatcgaaaagaagaagatttgcaccggcaattgacggcaccaaatacgaagccagatatgcaacaagtctatgcagtgaaatcaagaagcgttcatacccaattgctgaaagccatcgaacaagagaatatcctagaaaaatatttggcttttgaacaaagtcatggcccgttttttaatgcattagccgaactcattcaagcgactggacgcgcggtgcaagagttgctacatcatgtgacttttaacgataaaacaggcacttacgctgtgccgaaaagtgcggcaaacagcttgttgcttatgaaaaaagcgctggataacgcacgaacagaaaatgataaagacctatatccagatgactgggaagattacacggtattagcctatacatatgtgaataatcaaggtgaaactgtcacgatgtggttacttgaaaaagatggaaaacgggtagagaacaaggaattacaagacttcttagaaaaacatggtcaggaattaccagctatttcttatatagaactttccggggaagaactagaacggcgagtaaatgatagttggaaagatggagtaaactatttaactgggcaaaaagtttcgggattttccggtggtgtattaagatcctcagcttatgttgcgagtgtgaaaaagacattggattctgctgaacttattgatattggtctaggattgggaacagcagcaatgcgatatacaccgctactagctgaacaaattgaaaaattgagattagccaaagtagggcgttggatgtcagtagatgagtttgaaaaaatgcttgaaactggtaaggtgcaaatgtcgagaaatggaaacaggacttatgtggcttatccggcagataaagatgcctttccatccgcagcagatgatgcactatacgctgaatttaaggtgaatgaaaaaacgatttatccagctggtaaagaaggctgggcgcaaataccagggccgggctcattaatcgacaggtttaatcaaaaaaaaggattacctggaataactgaaatgccagatgctcttgatattaacaacttaggaggaaaataa

SEQ ID NO: 2700 - DNA, 348 bp, Listeria monocytogenes EGDe; identical to SEQ ID NO: 894

SEQ ID NO: 2701 - DNA, 243 bp, Listeria monocytogenes EGDe; identical to SEQ ID NO: 893

SEQ ID NO: 2702 - DNA, 978 bp, Listeria monocytogenes EGDe; identical to SEQ ID NO: 892

SEQ ID NO: 2703 - DNA, 378 bp, Listeria monocytogenes EGDe; identical to SEQ ID NO: 889

SEQ ID NO: 2704 - DNA, 378 bp, Listeria monocytogenes EGDe; identical to SEQ ID NO: 890

SEQ ID NO: 2705 - DNA, 360 bp, Listeria monocytogenes EGDe; identical to SEQ ID NO: 891

SEQ ID NO: 2706 - DNA, 909 bp, Listeria monocytogenes EGDe; identical to SEQ ID NO: 772

SEQ ID NO: 2707 - DNA, 1761 bp, Listeria monocytogenes EGDe; identical to SEQ ID NO: 773

SEQ ID NO: 2708 - DNA, 1509 bp, Listeria monocytogenes EGDe; identical to SEQ ID NO: 774

SEQ ID NO: 2709 - DNA, 1332 bp, Listeria monocytogenes EGDe; identical to SEQ ID NO: 692

SEQ ID NO: 2710 - DNA, 2031 bp, Listeria monocytogenes EGDe; identical to SEQ ID NO: 748

SEQ ID NO: 2711 - DNA, 453 bp, Listeria monocytogenes EGDe; identical to SEQ ID NO: 749

SEQ ID NO: 2712 - DNA, 1062 bp, Listeria monocytogenes EGDe; identical to SEQ ID NO: 750

SEQ ID NO: 2713 - DNA, 309 bp, Listeria monocytogenes EGDe; identical to SEQ ID NO: 751

SEQ ID NO: 2714 - DNA, 1269 bp, Listeria monocytogenes EGDe; identical to SEQ ID NO: 752

SEQ ID NO: 2715 - DNA, 630 bp, Listeria monocytogenes EGDe; identical to SEQ ID NO: 753

SEQ ID NO: 2716 - DNA, 144 bp, Listeria monocytogenes EGDe
atgcttgaaggtgaaatccctgaaaagtatcgatcagttgacgaggaggagattaatcgaagtttcggcgggagtctcccggctgtgcatgcagtcgttaagtcttacttacaaatcatttgggtgaccaagtggacagagtag

SEQ ID NO: 2717 - DNA, 510 bp, Listeria monocytogenes EGDe; identical to SEQ ID NO: 717

SEQ ID NO: 2718 - DNA, 1005 bp, Listeria monocytogenes EGDe; identical to SEQ ID NO: 716

SEQ ID NO: 2719 - DNA, 672 bp, Listeria monocytogenes EGDe; identical to SEQ ID NO: 715

SEQ ID NO: 2720 - DNA, 447 bp, Listeria monocytogenes EGDe; identical to SEQ ID NO: 714

SEQ ID NO: 2721 - DNA, 933 bp, Listeria monocytogenes EGDe; identical to SEQ ID NO: 713

SEQ ID NO: 2722 - DNA, 1854 bp, Listeria monocytogenes EGDe; identical to SEQ ID NO: 712

SEQ ID NO: 2723 - DNA, 1374 bp, Listeria monocytogenes EGDe; identical to SEQ ID NO: 711

SEQ ID NO: 2724 - DNA, 300 bp, Listeria monocytogenes EGDe; identical to SEQ ID NO: 710

SEQ ID NO: 2725 - DNA, 342 bp, Listeria monocytogenes EGDe; identical to SEQ ID NO: 709

SEQ ID NO: 2726 - DNA, 288 bp, Listeria monocytogenes EGDe; identical to SEQ ID NO: 708

SEQ ID NO: 2727 - DNA, 207 bp, Listeria monocytogenes EGDe
atgaaaaatattaatatgaaagttgctcgagtggaaaaggatatttcacaggaagagctcgcaaaacttattcatgtgtctaggcaaacgattagttcagtggaagcgggaaattataatcccacgctgaatttatgtattgctatttgcaaggcgttaggaaaaacgcttgatgatttattttgggaggaagatgacaatgtttaa

SEQ ID NO: 2728 - DNA, 516 bp, Listeria monocytogenes EGDe; identical to SEQ ID NO: 707

SEQ ID NO: 2729 - DNA, 297 bp, Listeria monocytogenes EGDe; identical to SEQ ID NO: 706

SEQ ID NO: 2730 - DNA, 837 bp, Listeria monocytogenes EGDe; identical to SEQ ID NO: 705

SEQ ID NO: 2731 - DNA, 681 bp, Listeria monocytogenes EGDe; identical to SEQ ID NO: 704

SEQ ID NO: 2732 - DNA, 612 bp, Listeria monocytogenes EGDe; identical to SEQ ID NO: 703

SEQ ID NO: 2733 - DNA, 348 bp, Listeria monocytogenes EGDe; identical to SEQ ID NO: 700

SEQ ID NO: 2734 - DNA, 1941 bp, Listeria monocytogenes EGDe; identical to SEQ ID NO: 908

SEQ ID NO: 2735 - DNA, 471 bp, Listeria monocytogenes EGDe; identical to SEQ ID NO: 907

SEQ ID NO: 2736 - DNA, 462 bp, Listeria monocytogenes EGDe; identical to SEQ ID NO: 948

SEQ ID NO: 2737 - DNA, 1635 bp, Listeria monocytogenes EGDe; identical to SEQ ID NO: 724

SEQ ID NO: 2738 - DNA, 306 bp, Listeria monocytogenes EGDe; identical to SEQ ID NO: 723

SEQ ID NO: 2739 - DNA, 837 bp, Listeria monocytogenes EGDe; identical to SEQ ID NO: 722

SEQ ID NO: 2740 - DNA, 891 bp, Listeria monocytogenes EGDe
atggttgcgtatggtgagttaattcgcgaagtacggctttcaaaaggactaacgcaaaaagaagtttatacaggagtaatttcaaaatcatatgcaataggttttgaaaaaggaaaacatgatattacattagtactatttgaagaaattttagaacgggtcatgttaagttcagatgaatttttctttatgaataggggctattctttagcggaggaagataatttttggtacaaatttgcaaatgcagctaatcaaaaaagtttggcagaattacaagaattataccaagaagtattgcagcaaaatggcgatagagcgaatctaaggaaagcaattgtccactcgagaattgaaattaatgaacaatttcttttgaataatcgatttgacgttagtatcgtttctgaggaagataaagcagttatccaaacgtatttgtggaaagttcaatcatggacactagaagaaattcggattttcgctaattcagtggactattttgaagaagatgtacaaatttatttttttcaattggtcttgaagtcactcgaaaaatataagcattacgatcgtggtaaaaaagtattttccacgctactcaccaacataatagaagaactaatcacccgtgatcaattagaatatgccgcgcaattattagaaatactgcacgaactttcttctacgcatgactgtgctttttaccggattatgcataattactatcaaggcttaatatggatgaaaaatgacgaggtcgaacaaggcttaaaagagtctaaaagtgcaatccgaattttagatgcacttgattacaaatccctcgcgctactttataatacattacttcaacagtttttagaaaaagagaatatacaaatagtttaa

SEQ ID NO: 2741 - DNA, 714 bp, Listeria monocytogenes EGDe
atattaaatcaaaaatatcaattactacttcataatgaatatgacacaaaaagtggtgatttagtcaaaaaagaaatagttgcaactaaaaaaactaaaaatctcttggaagatctaacttcgcatttgttatgtgttacaaatcaaatagagtatggaaaatttatcacttggtatgaaatggaaattaaaaaagttctacaagttcatcccaatcagcactttattattaaaatttcctttcaacaattatattttcgggaaacaatgctgttgcttgagaatttacagaaagatagccggcgactaacgattgagctagttggagatagtcagattagcccttattcaaaggaacatttttccgcagaggacagtgatgcttttttgaaagggaagttaaaaatgttgaaaaagtggcattattttatttcaaagcatattgaaagtggtgccatcgaacaaacactgatttttacgccctatattgatgaattgaaatatagtttaacgcaaaagtcgaagctcttacacaatattactgaattaaagttttttctatcattttggaaaaattgggctgagcttcgatttgttgattttttagttttagtagatgaaaaaaacgaatttgtatcgcatgtgcttttaccagatgaattaaatgtacgttgcaaaatgtatgagaactttggaggaatggtcagtgagtaa

SEQ ID NO: 2742 - DNA, 1005 bp, Listeria monocytogenes EGDe; identical to SEQ ID NO: 720

SEQ ID NO: 2743 - DNA, 1386 bp, Listeria monocytogenes EGDe; identical to SEQ ID NO: 719

SEQ ID NO: 2744 - DNA, 6135 bp, Listeria monocytogenes EGDe
atgattaaagcaactagagcgcgacattatttaatgctgttaatggcatttttcctagtattaggacaattaaatttaacagcccttaatgtgtttgcaaaagaaaatgggaatgacgaactaacttatgaagttcagtctaaattgacagaagataaaaaatcagctgatttaaccattaaagtaacaccaaaaagcgatcaggtgaaaatcttgactattgaaacacctgatggagagaagagagagggccaagaagtaagctataaagccgaaaaaaatggcacaactaactttttaattaattatcaaaatacaagcgaagaaaaagcagaaactaaaacatatactgcttcttatgaagtatctgacatagtttctgaagatggagtaaataaagattctgacacagagaaggcaactgaaaaagaagatgctaatattcagcctccttctactacaaataatactaaaaatataaaatcacttaaatctggacaaacaacagttgaactaaaaataccagattatgaccaaacagcatgggcaaatggtgatattaaagaagtaacagcgacagtgaactttggcgacagtacttctactggcaaaaaagtgaatttcactttaccagatggaatgcgttttgtttctttgccagtaccgagtaattatcaggctggtacgaatgaagatacaggcgttttgagttatttaggagcaagtgatccactaggaatagccattacttcggtggaagtacctaataaagaaacagcatatagtcaagctacgtttggaacagtaagttatgagctaagtccaggaactgaaaaagcgagctttaaattttcagtacgggtagatgcagcaaaatattacggaccaactgacttagcagatccaattaaaacagaagtatataaaggagaggcaagtacacctgttgcttctgcagatcaagcaattcgtgcggaaggaaataaagttgtagggtatgccgatcaaaatcatgtgaaaactatgtttcgaacttggtataatgatcaaagactatcagaagtccttgcaagtacagatactaccgactcttataactatacaaaatcatactctgtcgtgaatggatcgaatagtttagacagtcgtggagcagcagtatacattgctaaaaatatcgaagtaacactttattacccggaaggaatggagtttgtaaatgttgtaaataatgctggcacagtgctgaaggaaaattctaacgtaactattactaattatccaagtgaaaataaagttgtcattaataataagcacttaaacaacagcgccactagtaattctatttatggagtcaaatataaagtacctaaaggaactcctgcaggaacatacagcacagcaaaagctcctcatgcagttatcacaacatatgatggagaagtatttgaatcagatgcactgacaactaatcctaacgatttaactactatagcacctctagacacttgtaaagttgttgatactaccgaaaataaaatgactttgactacagcaaatggtcaacttaatccaaataacgaaacttgggctggtagcattcaaataaataataaaaaaagtgctggtgtgaaaaaaaatcaaatgtatcaaattaaatttgaccctaactgggaagcttatatggtcaatatcccttttgatagcactatttcaggaaacaaaatcagtgaagtacagtataaaacaaatttaaacgacgcttttcgaacatttgatggagcgcttattaaaaataataaccaaatgtatcgactagatgcaaaagcagttgggcttgaagaaggggaatatttcacagaagtaaaagcaaatgtgggagattttgcgcctggatatcagagcacagaagcttcggctacttatcgttggaactctactgcttcatacggtaaaatcaagccaggcgttacatctgtccaatatgaaggcgcaatatgggacgcggatgatgagtccaatacgaaagtatctggcatatcaacctataaagtttcaagtgcagaaagtacagtagcaaatggtacagcagctttctataataaagctggtacaaaggtgaaaacagctagcgcaggagaaacaattaacacaaaagcgacattagtgttacatgattacccttatggaacaagaacggtcctcaatgatccagaagtttatttacatgctctagaaggtacaacaattcaaccttcttccattaaactaacggatcaaggtggaaaagatgttaatttcacagttgaacaagaaacggcaaataatggagataaagtatacgccttaaaaacaacggatgtgtcagtgggagtatatgttggctatccaactaaacataaatatctaaatatcagttacgatacaacgtttgatgtaactctaaataaaagtattaatatggatgcgcaacaggtcattgcatggggagcaaatgttactccggcaacgggaactaatactttttcggatttagggctagatgtaaataaaaatggcagagacaatgataaattactttctgtcaacagtagtactttaagtattccaaaacaagacacagttactgtagaaaccttcttaagcgtggctggagaaggcgataaagcagcttatatggaaggagaagacagtacagtttcctacttctcaccaggaacagatgctgattatacagtcaagattacgaacacttctagtgggaacgcaagtacatttgagctttatatcccaattccaaaaactggtcaagacttcggatctaaattccaaagcgagccgttcaagtgggatatgaaactaaatggagcgctacctgttagtgcagaacaacaagaccaattcgatgtaagttacgcaacaaccgcaacaggagacaattatgattccaccgacatatactcaaatactgttgctgattatgaaaaagtaaatatggttcgaatcaaagttaaaacacaaattaatgcaggcgaaacacaaaccttcaaagtgccacttaaagtagatgaaacatttgattcagcaacagaaggcaacaaaattggtgaacgtgatatttacaacccatattaccgtgtaattactaatacgttcgctggttcattatctggaacaaaagttggtgctgaactagtaattggtgaagtagcaggtatgctatttaatgataaagatgttaacggttcgtatgaaaaagataaaggcgatgaaccattagcgaatgaaacagttgagttatacaaatggaatgtatccacatctgaatatgaacccgccaaagtaggcgacaaaaatataactgccacaacagatagcaatggtaaatacagttttgattatagtgatggtgttggttatggtaattatgcagtgaaattcccagacaaagctggctaccaatatacattaaaaaatattggtaaagatacttctctaaatagtgatgtaccttacagcggagcagatagaggttgggcgaaacaaatcaatccaactttaccaagctcacaatatacaaatgcaggttattatgcttataatccgacgcaagatttaaaagttaacctagatgaaaaacaagttcaaatgggtcgtagtttagaaatcactttaccaaaagtagcctcaacgactggacaagctgccgaagataccattgaaccaagcttctttaaaaatattaaagcaacaacaaatggctacaaatggactgttgcagatacaaaagtggcaacagtacaaacgctagcagatggttcagcagctgtagtcggcgtttccacaaataataaaacaattgatgtaacagatttaacgattaccatccaagatatttttggaacagaaaaaagttccaaagctccagtatatgttactggaacagatggaacggttgcgcaacaagacggttacaccatgggtgcgactgacttttcattggaatataaagaagccactgatttaacgaaagcacaggcactaactcttgcgaaaacagccgcttttgaagaagtaaaagacggcgttaattcaagcgcagaagatcgtttagaccaagttcaagtaaaccaaacacaattagacgccataaaaaatggttctaatcaaggtggcgtgtatccattaacttacacgataacaaaagatagcaaaacggtttcagttactattcaagtaactgtagcaaaagatttaaccgcagtgaacgcacatgattctactatttatttaggagacacatgggatgcggaggacaactttgatagtgcagcaaataaagaaggcgacactaatgtagcgtttagcgatgtaacagttacaggaagcgtgaataccgcagtagctggttcgtatccagtaacttacacatataatggtgtctctaaaaaaattaatgttactgtcaaagataaattaacagcagttaacgcacatgattccacaatctatacaggtgacacatggaatgcgggagacaactttgatagtgcgctagataaagatggtaattctgtcgcttttgctgatattacagtgacaggaactgttaatacaaatcaagctggtactaataccatcacttatagctatgatggagtttcgaaaactattacagttaccgtcttagaaaataaggaaggtatcagtgctcatgactctactatttatgtaggagatgcatggaatgccaaagataacttcgatagtgcttttgataaagatggaaacgcggttgacctagaagacgtaacagtcacagaaaaaccaactgtagatacgacaaaagcaggtgcttacgaagtcacttacaagtatggaaaagtatcgaaaaaaatcactttaacagtgaaagctaaattaacagcagtcaacgcacatgattccgcgatttacatcggagatacgtggagtgcagaagataactttgacagtgcgctggataaagatggcaattccgtcgcttttgctgatatcgaagttaaaggaaccgttgatacagacaaagttggaacatatccagtcacgtacacatatgacggtgtctcaaaaacaattaatatccaagtaaaagacatcttaacagcagtgaacgcgcatgattctgaaatttatataggggacaactggaatgccaaagataattttgacagtgccaaagataaagacggaaatacagtaaattggaaagacatcaatgtttcggaaaatccagcagttgatttagaaacagttggtgtttaccaagtgacttatagttatggcggtgtttcgaagacaattaatctgactgtccatccaagaaaaacaagtttagaagttcatgactccacaatgtatacaggagataaatggaaagcagaagacaactttgataatgctacagataaaaaaggtgaccaaattcctttcaaagatgtcactgtaaccggacaagttgattctaaaacagcaggcacgtatgaaataacctatatctatgatggattgaaaaaagtagcacgaattactgtaatccaaaatcaagcacaaatcactgtaaaagatagcgtcattccatatggcggaaaatgggaagcagaagctaactttataggtgcgacaaaccgagatggtgtagcaattcctttctccaaaattaaggtagatggtacagtagatgtaaataaagctggtacgtacaaagtgatttacacgtatgatccaaatgaaggaacagtagatgcaggtaagaaacaactttctgtcacagcaaatattcaagtagaagcagaaattgtaaaacctataaaacctataaaacctataaaacctataaaaccagttgatccatcaaaaccaatagatcctaaaaaaccagtaaaatcatcaaatccaacaaaaccatcaacagaaaaaacaccattaaaagtagttgataacaagcaacatacaagaacatatgaagaagcaaaaccattaccaaaaacaggtgaccaaacaaatacttgggtaatatggacaggcgtatgcttgctaagtatgagcttgcttctatgggtggtaatgagaggaagaaagaaaaactatcagtaa

SEQ ID NO: 2745 - DNA, 675 bp, Listeria monocytogenes EGDe; identical to SEQ ID NO: 761

SEQ ID NO: 2746 - DNA, 948 bp, Listeria monocytogenes EGDe; identical to SEQ ID NO: 760

SEQ ID NO: 2747 - DNA, 963 bp, Listeria monocytogenes EGDe
atggattatttgaatgcactagaagaagcttggggaatggacgatacttctgaaaaagtaaaattattggaacaagctattgcaagtgccgatatgtataacgatgtcgaaagcgctgttgaagccagggaattattgatagaaacttgtttaacggctggctttcctaaaaaacaactgaaagcatttagttggttagtgaaaaaatgggaagacgacgattcttctgtagacaccttcgatcttttttggaattataaatggattagcgaacagattgctacatttgatgaaataccaaaaacacaaattaacaggcttttagaggatatgaagctgaaattcgagcagcaaaattactcactgcgcccttattataaagtttgtacgcttgatgctatgtggatgggtgaagtggaaaaagctaaacaattctttgttaaatggaataacacagaagctgatcatttaaatgactgccgtgcttgcgaaacatgtgctcaagccagttattattacttcattaaagattatgaaaaagccaaggaaacagctaccccgattattaatggaaaattagcctgtgccgaagtccctcattatacttatggagatatggcgcttgtttatttggaacttggtgatgcggagatggcgcaagaatgcttcgataaaggttatccacttgtggaaaaacagatcgccttaatccaaccactcagctatttgcttaaatatctagtgaagacaaaccaaacagaaaaagcacgcgaagttcttgatgtgcataaggaaattgttcttcaagcagaaagcggaatggatcgtctcttattcctacaagcagcctattctcttttcgaccgggaaaaagaagctgatttggtggaaatgacggaaactttaacggcgaagtttgatgcgcggaatgaaaatagttattatcaagatcttttgaagtga

SEQ ID NO: 2748 - DNA, 1029 bp, Listeria monocytogenes EGDe; identical to SEQ ID NO: 914

SEQ ID NO: 2749 - DNA, 1404 bp, Listeria monocytogenes EGDe; identical to SEQ ID NO: 738

SEQ ID NO: 2750 - DNA, 825 bp, Listeria monocytogenes EGDe; identical to SEQ ID NO: 737

SEQ ID NO: 2751 - DNA, 957 bp, Listeria monocytogenes EGDe; identical to SEQ ID NO: 736

SEQ ID NO: 2752 - DNA, 1464 bp, Listeria monocytogenes EGDe; identical to SEQ ID NO: 735

SEQ ID NO: 2753 - DNA, 1857 bp, Listeria monocytogenes EGDe; identical to SEQ ID NO: 734

SEQ ID NO: 2754 - DNA, 1266 bp, Listeria monocytogenes EGDe; identical to SEQ ID NO: 733

SEQ ID NO: 2755 - DNA, 663 bp, Listeria monocytogenes EGDe; identical to SEQ ID NO: 732

SEQ ID NO: 2756 - DNA, 1446 bp, Listeria monocytogenes EGDe; identical to SEQ ID NO: 731

SEQ ID NO: 2757 - DNA, 1422 bp, Listeria monocytogenes EGDe; identical to SEQ ID NO: 730

SEQ ID NO: 2758 - DNA, 669 bp, Listeria monocytogenes EGDe; identical to SEQ ID NO: 729

SEQ ID NO: 2759 - DNA, 1719 bp, Listeria monocytogenes EGDe; identical to SEQ ID NO: 918

SEQ ID NO: 2760 - DNA, 1689 bp, Listeria monocytogenes EGDe; identical to SEQ ID NO: 919

SEQ ID NO: 2761 - DNA, 2859 bp, Listeria monocytogenes EGDe; identical to SEQ ID NO: 920

SEQ ID NO: 2762 - DNA, 1872 bp, Listeria monocytogenes EGDe; identical to SEQ ID NO: 847

SEQ ID NO: 2763 - DNA, 867 bp, Listeria monocytogenes EGDe; identical to SEQ ID NO: 848

SEQ ID NO: 2764 - DNA, 561 bp, Listeria monocytogenes EGDe; identical to SEQ ID NO: 849

SEQ ID NO: 2765 - DNA, 987 bp, Listeria monocytogenes EGDe; identical to SEQ ID NO: 850

SEQ ID NO: 2766 - DNA, 831 bp, Listeria monocytogenes EGDe; identical to SEQ ID NO: 851

SEQ ID NO: 2767 - DNA, 2091 bp, Listeria monocytogenes EGDe
atgcattcgtataattgtttttttatatctttatggggtttatttgtttataatagtaatgtgtataaattactctatgaacaaaaggagccggatattttgaacgattcaagggacttacattccatttgttttgtttctacagaagtggaagataagaacaataacgtacattttatagcagaatctgcagatttattggcagattgcttagtgctattagagaaagagaataaacactatttaacttttatgaaagaaaatttgaatacaattgcgttagccgagaaaatcgaatatgcaccagatatcatttgcccaaataaagttttgaaaggtagtttgtatacaaatcctgaatgcatagataacagccttgctggtagtactttctccaaagatttacttaagagagtagcaaatgaaatgaagcaagaagtatttgaattaacaagctttaattattattgttatcatttggcggagaagattggtcatttgggagaagaagctagctattcgctctctttggcggacttagatgactcggttacacgtttacttgatattaaagataatcattaccgaaaagattggacaattttatattatgtaaataagtttttaatgatgcatttagaaaatttaccgaaaatttttgaagaatcagatgaaaaatttcaaattaattatttagaaaaacttactgaacttattgcgaaactgccggatgaggttatttttgagttagatgcgctcgattatttggttcaaaatatattaaatgattcatttgaatggattaaatacgaagcatatccagcttgtttaactttagctgaaataataagtcaccgagcagcaccaaataaattcacggatactaaatggctgtgtttagaaaaatgtgtccgaaaaggttctgtaaatccgctaagaaacaaaaaaaatccaactgttttgacaccaataaaaaagaaatttgtttctttttttagccgtaaagtggtgtttacaattgcaaaactgttacctgttgcgaaagataatgttttgttagtttcgaataaaattagtgatttagatgctactttcatgccgatttaccagacaattaagcaaaagcatcctgaaaagtctgtgcgtgcgtacatgaaaatgcgaccagaagataatcatgcaatgtattatttaacatatttttggaatcttggaagagcaaagtatgtgtttttagatgactattattatcaattgtattctattagaatgaggaaagaagcggaagttattcagctttggcatgcagcaggagcgtttaaacgattcggtcatagttctctaggatttaaagactccatatcgcttgattttgaaacaagagcgcaccaaaattacacaacgagtgtcatatcatccagtgatttaaaaccgatttatgcagaagccttccatatggatgaaaccaaaattgaagcatttggtctaccacgtttatggaagttatttgatcaagactacaaggaattcagactagattatttccaaaaaatgtacccgcttcttaaagggaaaaaagtgattacttatgcaccaacttttcgagggaattcagaagagcgaaaagcattccaactcgaattaaatttacgtaaaatgaaagaggaactaggacaagaatatgtagtagtaattaaactgcatccattagtaagcgttgaaacgcaagttccagaagatttagctgattttgtacttgattttagtggaattgaaatgaatgacgttctaatcgtaacagatattctaataactgattattcgtctgttatttatgattactctatcttgaatagacccattattttctacgcatatgatcttgaagcctattcattagaacgtaatttttatcatgattatttggaatttgttccaggtccagtggttgctacaactgaagaagcaattaaacttattcaaacaaatcaaatgataacagggaagttacaggactttgcagagaaagcatttgaatatcatgatggtgatgccgcagctcgaattattgattatgtaatgcaagattga

SEQ ID NO: 2768 - DNA, 984 bp, Listeria monocytogenes EGDe; identical to SEQ ID NO: 854

SEQ ID NO: 2769 - DNA, 1014 bp, Listeria monocytogenes EGDe; identical to SEQ ID NO: 855

SEQ ID NO: 2770 - DNA, 1203 bp, Listeria monocytogenes EGDe; identical to SEQ ID NO: 856

SEQ ID NO: 2771 - DNA, 231 bp, Listeria monocytogenes EGDe; identical to SEQ ID NO: 969

SEQ ID NO: 2772 - DNA, 420 bp, Listeria monocytogenes EGDe; identical to SEQ ID NO: 857

SEQ ID NO: 2773 - DNA, 2124 bp, Listeria monocytogenes EGDe
atgagtaaagcgagtaaacaaacaacataccgtgtagacggtatgtcttgtacgaattgtgcaggaaagtttgaaaaaaatgttaaaaaccttgagggtgtaactgatgcaaaggttaattttggagcaggaaagatttcagtttatggagaaacttccatcagtcaaattgaaaaagcaggagcatttgaaaatctaagagtcactgatgaaaaagattattcaagtaaacctgctaagaaagaatcctttcttaagaaaaattggcatttagttgtctcaattatttttattatactagcctttatttctcagaatattagtggtgaagattcaacgacaactatcatcttgtatgttattgcaattgtggttggtggatttaatttatttaaagagggattcgctaatttaattaaattagactttacaatggaatcacttatgactatagcaattatcggtgcgtccatcataggtgaatgggctgagggttctattgtagtaatactttttgcttttagtgaagtgttagaacgatattctatggataaagcaagacaatctattcgttcattaatggacatcgctccaaaagaggcgttaatacgtcgtgatgatgttgaacaaatgattgcagttagtgatattcaaattggagatatcatgattataaaacccgggcaaaagattgccatggatggagttgttataaaaggttattcagcaattaatcagtccgcaatcactggagaatctattccagttgaaaagaaagttgatgatgaagtttttgctgggacattaaacgaagaaggactattagaagtaaaggttacgaaacatgtagaagatactacaatttcaaagattatacatttagttgaagaagcacaaggtgaacgagcaccagcacaagcgtttgtagataagtttgcgaagtattatacacctactattatgcttattgctttgcttgttgtagtcgttccaccactattctttggtggtgattgggacacatgggtatatcaagggttatctcttctagttgtaggttgtccttgttcattagtaatttccactccagtatctatcgtttctgcaattggtaattcagcaaaaaacggtgttcttgtaaaaggtggaatttacttagaagaaattggtggactacaagcaattgcttttgataagacaggtacattgacgaaaggaaaaccagttgtaactgattttattccttattctgaacatatggacgaacagaattcactttctattattactgctttggaaaccatgtcacaacaccctcttgcctcagcaatcatttcaaaagctatgattgataatgtcgattacaaatcaatagaaattgataatttttcatcaatcactggtaaaggtgttaaaggtgaggtaaacggtataacctattacattggtagctcaaaactttttgaatctagtttagaaaaatctcaaagtatatctcaaacttaccaatcattacaaaaacaaggaaaaacagctatgctgtttggaacagaatcaaatattttagcaatcatagctgtggctgatgaagttagggaatctagtaaagaagttattgcacaacttcataaattagggattgctcacactattatgttaacaggagataataatgacacagcacagtttataggtaaggaaatcggcgtttctgatataaaagcagaattaatgccagaagataaacttacttacatcaaagaattgaaacaaacatacggcaaagtcgctatgattggagatggagtaaatgatgcccctgccttagctgcttcaactgtaggaatagcaatgggaggagctgggactgatactgctttagaaacagctgatgttgccttaatgggagatgacttaaagaaattaccattcattgtaaatcttagtcgaaaaacattaaaaataatcaagcaaaatataactttctcccttggaattaaattactagcattactattagtgcttccaggctggttaacattatggattgcgattgtagctgatatgggtgccacattactagttacattaaatggattaagattaatgaaagtgaaaaaataa

SEQ ID NO: 2774 - DNA, 501 bp, Listeria monocytogenes EGDe; identical to SEQ ID NO: 955

SEQ ID NO: 2775 - DNA, 336 bp, Listeria monocytogenes EGDe; identical to SEQ ID NO: 882

SEQ ID NO: 2776 - DNA, 918 bp, Listeria monocytogenes EGDe; identical to SEQ ID NO: 881

SEQ ID NO: 2777 - DNA, 1011 bp, Listeria monocytogenes EGDe; identical to SEQ ID NO: 880

SEQ ID NO: 2778 - DNA, 2160 bp, Listeria monocytogenes EGDe; identical to SEQ ID NO: 879

SEQ ID NO: 2779 - DNA, 2451 bp, Listeria monocytogenes EGDe; identical to SEQ ID NO: 878

SEQ ID NO: 2780 - DNA, 396 bp, Listeria monocytogenes EGDe; identical to SEQ ID NO: 877

SEQ ID NO: 2781 - DNA, 501 bp, Listeria monocytogenes EGDe; identical to SEQ ID NO: 876

SEQ ID NO: 2782 - DNA, 222 bp, Listeria monocytogenes EGDe; identical to SEQ ID NO: 970

SEQ ID NO: 2783 - DNA, 291 bp, Listeria monocytogenes EGDe; identical to SEQ ID NO: 875

SEQ ID NO: 2784 - DNA, 1185 bp, Listeria monocytogenes EGDe; identical to SEQ ID NO: 874

SEQ ID NO: 2785 - DNA, 1401 bp, Listeria monocytogenes EGDe; identical to SEQ ID NO: 873

SEQ ID NO: 2786 - DNA, 375 bp, Listeria monocytogenes EGDe; identical to SEQ ID NO: 872

SEQ ID NO: 2787 - DNA, 315 bp, Listeria monocytogenes EGDe; identical to SEQ ID NO: 871

SEQ ID NO: 2788 - DNA, 2589 bp, Listeria monocytogenes EGDe; identical to SEQ ID NO: 870

SEQ ID NO: 2789 - DNA, 774 bp, Listeria monocytogenes EGDe; identical to SEQ ID NO: 997

SEQ ID NO: 2790 - DNA, 357 bp, Listeria monocytogenes EGDe; identical to SEQ ID NO: 998

SEQ ID NO: 2791 - DNA, 1518 bp, Listeria monocytogenes EGDe; identical to SEQ ID NO: 971

SEQ ID NO: 2792 - DNA, 858 bp, Listeria monocytogenes EGDe; identical to SEQ ID NO: 833

SEQ ID NO: 2793 - DNA, 417 bp, Listeria monocytogenes EGDe; identical to SEQ ID NO: 832

SEQ ID NO: 2794 - DNA, 369 bp, Listeria monocytogenes EGDe
atgaaattagacgataatgcaaaagaaataatccttaaaaaaagtgaatttctactccataataattttaaattaatagaaataacggacgctactatcacattttcaaacaagaaaattgcttttgtcatcggttatgaaagatatgataatgtaagtaatattaatataaagtttttggaagaaaatgaaatgtttaatcttggatggattgcttttgtaagaagaaatcagacgccgcttcctcagaataaattagataatatattagagttacttgattatgctgaaaaaaattatgctaaagttattaacttacaattttgccaagaaagtagaggaatgatagaagacttcttgaaagaataa

SEQ ID NO: 2795 - DNA, 534 bp, Listeria monocytogenes EGDe; identical to SEQ ID NO: 828

SEQ ID NO: 2796 - DNA, 309 bp, Listeria monocytogenes EGDe; identical to SEQ ID NO: 812

SEQ ID NO: 2797 - DNA, 348 bp, Listeria monocytogenes EGDe; identical to SEQ ID NO: 811

SEQ ID NO: 2798 - DNA, 1152 bp, Listeria monocytogenes EGDe; identical to SEQ ID NO: 810

SEQ ID NO: 2799 - DNA, 240 bp, Listeria monocytogenes EGDe; identical to SEQ ID NO: 808

SEQ ID NO: 2800 - DNA, 1452 bp, Listeria monocytogenes EGDe; identical to SEQ ID NO: 757

SEQ ID NO: 2801 - DNA, 264 bp, Listeria monocytogenes EGDe
atggaaaggccagataatcaacttattttaatggtgttagaagttgttaaaaatccaatttacaatataaaatcactaacaattaattttctacaaggtgacatcgttgggaattccacaagaaatgagttgttatactgcacttactggcttgaatttcatggctttattcttcgtgacgaaaaaggggataaccaaaagtactatagcatgaccaaacaaggagattttctacttcaaaaaattaaaaatgaactttcttag

SEQ ID NO: 2802 - DNA, 216 bp, Listeria monocytogenes EGDe; identical to SEQ ID NO: 972

SEQ ID NO: 2803 - DNA, 1797 bp, Listeria monocytogenes EGDe; identical to SEQ ID NO: 789

SEQ ID NO: 2804 - DNA, 843 bp, Listeria monocytogenes EGDe; identical to SEQ ID NO: 791

SEQ ID NO: 2805 - DNA, 1320 bp, Listeria monocytogenes EGDe; identical to SEQ ID NO: 777

SEQ ID NO: 2806 - DNA, 1107 bp, Listeria monocytogenes EGDe; identical to SEQ ID NO: 779

SEQ ID NO: 2807 - DNA, 996 bp, Listeria monocytogenes EGDe; identical to SEQ ID NO: 780

SEQ ID NO: 2808 - DNA, 1029 bp, Listeria monocytogenes EGDe; identical to SEQ ID NO: 868

SEQ ID NO: 2809 - DNA, 438 bp, Listeria monocytogenes EGDe; identical to SEQ ID NO: 869

SEQ ID NO: 2810 - DNA, 780 bp, Listeria monocytogenes EGDe; identical to SEQ ID NO: 951

SEQ ID NO: 2811 - DNA, 363 bp, Listeria monocytogenes EGDe; identical to SEQ ID NO: 799

SEQ ID NO: 2812 - DNA, 432 bp, Listeria monocytogenes EGDe; identical to SEQ ID NO: 925

SEQ ID NO: 2813 - DNA, 207 bp, Listeria monocytogenes EGDe; identical to SEQ ID NO: 922

SEQ ID NO: 2814 - DNA, 5136 bp, Listeria monocytogenes EGDe; identical to SEQ ID NO: 904

SEQ ID NO: 2815 - DNA, 573 bp, Listeria monocytogenes EGDe; identical to SEQ ID NO: 906

SEQ ID NO: 2816 - DNA, 891 bp, Listeria monocytogenes EGDe; identical to SEQ ID NO: 932

SEQ ID NO: 2817 - DNA, 744 bp, Listeria monocytogenes EGDe; identical to SEQ ID NO: 841

SEQ ID NO: 2818 - DNA, 609 bp, Listeria monocytogenes EGDe; identical to SEQ ID NO: 842

SEQ ID NO: 2819 - DNA, 918 bp, Listeria monocytogenes EGDe; identical to SEQ ID NO: 843

SEQ ID NO: 2820 - DNA, 1269 bp, Listeria monocytogenes EGDe
atgcttactttcatcacagaaattttttctacgccagcttttattttaggaattatagccgctattgggttaattgccttaaggaaaaccggttctgatattgtaaaaggaacattaaaaacgatttttggttttattatgctacaacagggatccgcgattattgttggaagtttaattccatttagcacaatgtttgaaaatgcttttcaacttaaaggggtggttgcagaagataatgctattgcagctgctgtccagcaaattttaggaacggaaacgtctttaattcttgtatttggttttattattaatgttattcttgctagaacaaccagatggaaatatattttcttaacagggcatatgatgttttccttcgcagctacaatggccatagtattcgatcaaatgggctttaatagctggcaaattattttgtttggttctatcgcacagggtatttcgagtattgtttttccagcactcgcacaaccttttgtacgcaaagtgacaggaaatgatcaagtcggttttggcttttggggcagttcccttgtctgggcgaccggttggcttggagggaaattaggaaataaagctaattctacagaagacttaaaagtacctaaaaaactagattttttgaaagaaatgtctgttttaatggggattgttatggcagtgatttatatatttacttctttctttgtggatgaaccggtgatgaaagaattagctggcacacaaagtaatgtattattcgcaatattgcaatcattcacttttgttgtcggaatattgatactacttcaaggggtccggatgtttttaggtgaattagttccagcgtttaaaggtattagcgagaaaattgttcccggcgcaattccagctcttgatgttcccgttttctattcattcgcacctactgcaacgaccattggttttttatgcgcagtagttggagggcttggagcgacactagtttctaccatgcttcccgttgtcgtacttccgtctgttatcggattgttttttatgggcggagcggctggtgtatttggaaatgcaatgggtggtagacgaggagccattattgctggtttattattaggatttatttttcaaatgattgtagcaattgcttatccaattttaggattagatggttatggcattcaaggattatggtttgcttcgacggatgcaatcattgttatcgtcattattcgattaattggagcattatttggaatagcactttaa

SEQ ID NO: 2821 - DNA, 282 bp, Listeria monocytogenes EGDe; identical to SEQ ID NO: 961

SEQ ID NO: 2822 - DNA, 444 bp, Listeria monocytogenes EGDe; identical to SEQ ID NO: 845

SEQ ID NO: 2823 - DNA, 750 bp, Listeria monocytogenes EGDe; identical to SEQ ID NO: 846

SEQ ID NO: 2824 - DNA, 1881 bp, Listeria monocytogenes EGDe; identical to SEQ ID NO: 839

SEQ ID NO: 2825 - DNA, 1104 bp, Listeria monocytogenes EGDe; identical to SEQ ID NO: 838

SEQ ID NO: 2826 - DNA, 978 bp, Listeria monocytogenes EGDe; identical to SEQ ID NO: 911

SEQ ID NO: 2827 - DNA, 1689 bp, Listeria monocytogenes EGDe; identical to SEQ ID NO: 923

SEQ ID NO: 2828 - DNA, 198 bp, Listeria monocytogenes EGDe
atggaaaaattcctttttaatgcaacgttatttgccagtgctttactactgatggtcggtatatttaaaagctctattccaattaccgccatttctctcgtgttagcagttgtttcgcaacatttctttcgaaaaaaatatcctaaacaaactcgtagctatcgcgaaatagtcgcggcaaagcagaaaaaaggatga

SEQ ID NO: 2829 - DNA, 1743 bp, Listeria monocytogenes EGDe; identical to SEQ ID NO: 1057

SEQ ID NO: 2830 - DNA, 735 bp, Listeria monocytogenes EGDe; identical to SEQ ID NO: 1056

SEQ ID NO: 2831 - DNA, 1902 bp, Listeria monocytogenes EGDe; identical to SEQ ID NO: 1054

SEQ ID NO: 2832 - DNA, 345 bp, Listeria monocytogenes EGDe
atgtttttacgaattactatttatacacttattcaagaagctattatttttggtattttactcttcggaaaaaatcagactgttagtttaagcaactatgtggatatttcctttatggtagcgcttatctcactactaattggattgtttgtttatattatgagaagtgggtttttagaccgggttcataatggttttcgaagtatttctcgcaaaattaaacgagaagaagaaaatgagttttcagatatgcctttatctgaattagtcggcctgcaatacgccggaattttgtttagttccatttttgttatgttgactagtattttatgtatgtttttgtga

SEQ ID NO: 2833 - DNA, 198 bp, Listeria monocytogenes EGDe
ttggataaaacacaaattgcattaattatacccgtaattcttctttatttagctttattattaactgccattattgatttaacaaaaaactggaatacacgaaaaaatcctattatttggctaattgttatcatcgttattaatatttttggaccgattgcctactttatttttggccgcaaagaggaagttaactaa

SEQ ID NO: 2834 - DNA, 345 bp, Listeria monocytogenes EGDe; identical to SEQ ID NO: 866

SEQ ID NO: 2835 - DNA, 240 bp, Listeria monocytogenes EGDe
gtgcatgagaaaatgtttaattcggtggaggatttaaacaggttactagaagaatcggatgagccaacgattgtactctgtaatcctaactgcgaattggaattgaaggaagcggtagaaggtactattattccgatttcattggcgttttttgatagggatttggaagatgtagaagaagtgattcagtctcttagaataaaagaacatgaaaaaaggctagcctatttgagaggctag

SEQ ID NO: 2836 - DNA, 1227 bp, Listeria monocytogenes EGDe; identical to SEQ ID NO: 1062

SEQ ID NO: 2837 - DNA, 159 bp, Listeria monocytogenes EGDe
atggagaatgatagtttgtgtggtgggcacattttacaggaaggattacatgttcgctttgctcgcatgcatatttgggccgtaactcgttacacttcgaacgggcgaatgggaatgcggattttcgatagatggtggatggattttggtggaggatga

SEQ ID NO: 2838 - DNA, 315 bp, Listeria monocytogenes EGDe; identical to SEQ ID NO: 1060

SEQ ID NO: 2839 - DNA, 204 bp, Listeria monocytogenes EGDe; identical to SEQ ID NO: 992

SEQ ID NO: 2840 - DNA, 414 bp, Listeria monocytogenes EGDe; identical to SEQ ID NO: 1059

SEQ ID NO: 2841 - DNA, 552 bp, Listeria monocytogenes EGDe; identical to SEQ ID NO: 1058

SEQ ID NO: 2842 - DNA, 189 bp, Listeria monocytogenes EGDe
atgaaaaaacatattgttttaattgttgttgcttgtattacggttattgcggtatttatgtacatagttcaaataaataatagtgaactcaaatatcaaaatagggcccaaattaaaatagcctctcaaatggctagtcagaatgaacagacagataatagtatcgttagtgaaataacttacaaataa

SEQ ID NO: 2843 - DNA, 420 bp, Listeria monocytogenes EGDe; identical to SEQ ID NO: 807

SEQ ID NO: 2844 - DNA, 1167 bp, Listeria monocytogenes EGDe; identical to SEQ ID NO: 1051

SEQ ID NO: 2845 - DNA, 4593 bp, Listeria monocytogenes EGDe; identical to SEQ ID NO: 924

SEQ ID NO: 2846 - DNA, 360 bp, Listeria monocytogenes EGDe
atgaaaaaaacctcaatcatttttattttttgcacattactctttgtaacagcatgctcaacctccgaaaaccaaacacaagccaccgaagcaaccggcacaatagaacaagttgaaacggatgcaattctaattaataatttcaaagaaaaaaaggataagtataatccggaagccgcaatacgctttgacatcgtagataaatattacgacgaaacgggaaataaaataaaaataaccgacttaaacaaaaacgatgacgtaaaaatcattttaacaaaagatttcccaatccaagaaacttcaccagcccaaatagacccaaaatacgtacaaaaaatcatcctgctaaacaaataa

SEQ ID NO: 2847 - DNA, 870 bp, Listeria monocytogenes EGDe
atgaaaaaaagaggtttattgttggtaagtgttttaatgcttttcatttttttgacagtagcatgcgggagttctgaagacaatgaagaaagtggagaaataagtacgaaagaaattgaacttaccgttgacgaccctattataccaaccgatgaaaacggtgaagcaactatagagggaactgtagatcctaaatccaaattaaccattgatggtaaagccgtaaaaaaagatgacagcgggagatttacttatacttacagtttaactaacgataatgttgcagaagttgatgtcaaacttctagcggtcagaaaaaattacaaagatgaaaagtacactataactattactaacaattcaaaagcatataacgacaacatggttaaacaagaggcaatacaaaaagaggaagccgagaaagctgaaaaggaacgtaaagaagcggaggaaaaagcaaaacaagaagaagaagctgccgctgcaaaagctgcaacgactgatgaaaacactccttctgatgataccgtatatggtactttagccagtaaagatactttaacaaaagagggagatgcattttataaagatgaagcacttgatgtactctattctacagtagaaaacgatgaaatttttcaagtacttatacaattaggcgacgaaagtacgattcgaaaagatttagataaaaatcatttaacagaattagcacgagattatatggaatctgatgccactcttatacaaactgtctccgatgaatcttttgtttatgaatctccatctataaataaaacatatacagtagattatatgttaaacgatgaaggttatgttattgcggtttatgttacacaagcaaagtga

SEQ ID NO: 2848 - DNA, 369 bp, Listeria monocytogenes EGDe; identical to SEQ ID NO: 1003

SEQ ID NO: 2849 - DNA, 807 bp, Listeria monocytogenes EGDe; identical to SEQ ID NO: 1010

SEQ ID NO: 2850 - DNA, 534 bp, Listeria monocytogenes EGDe; identical to SEQ ID NO: 1052

SEQ ID NO: 2851 - DNA, 753 bp, Listeria monocytogenes EGDe; identical to SEQ ID NO: 861

SEQ ID NO: 2852 - DNA, 1959 bp, Listeria monocytogenes EGDe; identical to SEQ ID NO: 862

SEQ ID NO: 2853 - DNA, 2649 bp, Listeria monocytogenes EGDe; identical to SEQ ID NO: 863

SEQ ID NO: 2854 - DNA, 1683 bp, Listeria monocytogenes EGDe; identical to SEQ ID NO: 864

SEQ ID NO: 2855 - DNA, 1134 bp, Listeria monocytogenes EGDe; identical to SEQ ID NO: 865

SEQ ID NO: 2856 - DNA, 1449 bp, Listeria monocytogenes EGDe; identical to SEQ ID NO: 1039

SEQ ID NO: 2857 - DNA, 1854 bp, Listeria monocytogenes EGDe; identical to SEQ ID NO: 1040

SEQ ID NO: 2858 - DNA, 840 bp, Listeria monocytogenes EGDe; identical to SEQ ID NO: 1041

SEQ ID NO: 2859 - DNA, 396 bp, Listeria monocytogenes EGDe
atgaagaaaaaagtatgtgttttagcgatagcattgcttacagtgttatcaccgatgggcgctttagctgctcaaaatctaaatgaaggagagactagcttagattcattaatgagcgcaaataaaacaggtgaaaaagtgattttttctgagaccacaacaggaaaaaaacctctattaaaagcagcgcaatcagctggaggcggcactttctgggttacatggggacaagatagacattattcaaattatcagcatactaaaaaaacgcatagatcaagcgcttctaactatagagcgacggaaagaagtagctggaaagcaaagaataatctagctactgcatggattaagtcatcattatggggtaataaagctaattgggctacaaaataa

SEQ ID NO: 2860 - DNA, 309 bp, Listeria monocytogenes EGDe; identical to SEQ ID NO: 1043

SEQ ID NO: 2861 - DNA, 2271 bp, Listeria monocytogenes EGDe; identical to SEQ ID NO: 1044

SEQ ID NO: 2862 - DNA, 300 bp, Listeria monocytogenes EGDe; identical to SEQ ID NO: 1045

SEQ ID NO: 2863 - DNA, 1296 bp, Listeria monocytogenes EGDe; identical to SEQ ID NO: 1046

SEQ ID NO: 2864 - DNA, 1917 bp, Listeria monocytogenes EGDe; identical to SEQ ID NO: 1047

SEQ ID NO: 2865 - DNA, 984 bp, Listeria monocytogenes EGDe; identical to SEQ ID NO: 1048

SEQ ID NO: 2866 - DNA, 1923 bp, Listeria monocytogenes EGDe; identical to SEQ ID NO: 1049

SEQ ID NO: 2867 - DNA, 831 bp, Listeria monocytogenes EGDe; identical to SEQ ID NO: 1050

SEQ ID NO: 2868 - DNA, 384 bp, Listeria monocytogenes EGDe
ttgaaaaagaaatggataataatactaggaattgtaataatagttatttttgctataggagtaaaattctatatggatgagaaaagattaaatgaagaaatgatgaatgtgatttatagtgatgaagcgaaagaagcgtttgataaagatctaaaaggaatggactcaaaagcttttacagaagaaggaaaagttcactcctatgaaatagtgagagaaagtattaggcgtaatccaatgggaggaatcaacgtcgagttaataataaataatgattcagagatgggtatagaatatactatggacaaatttaatgggcaactaaggtgcggaggagcaagtatctctgaaaaacttgcaaaactattaggtatttggaagtga

SEQ ID NO: 2869 - DNA, 381 bp, Listeria monocytogenes EGDe; identical to SEQ ID NO: 695

SEQ ID NO: 2870 - DNA, 2556 bp, Listeria monocytogenes EGDe; identical to SEQ ID NO: 694

SEQ ID NO: 2871 - DNA, 423 bp, Listeria monocytogenes EGDe
atgacgaatttaagaaaacgactttcgcggttatatgccgaagatgtggtagatagtttggcagctagaatcgaagcacgggtacagcaaacgcaacaacgaaagttaacgcgaaaagatcagtgggacgagaaagatattgttttaattacatatggggaccaatttaaagaggaatcccaaaaaacgttaacaacttttaaaaaaatgtatgatagttatttaaaatcggcttttgagatagtgcatttcctacctttttatccttattcttcggatgatggattttcggtcattgattataaagcggtgaacccagagcttggtgattggaaagatattaaggaaatggaaaagtcggcgcgattgatgtttgattttgtttgtaatcatatgtcggcgaaaagtgattggtttaagtga

SEQ ID NO: 2872 - DNA, 794 bp, Listeria monocytogenes 4b
  misc_feature (1)..(end): n can be any nucleotide: a,g,c or t/u
ttgccnnnnnnnnnnnnnnnnnnnnnnnnnnnnnnnnnnnnnnnnnnnnnnnnnnnnnnnnnnnnnngctatatcccacggggctaaattagcagaaagataggctcccgctcgtccagtagcaacatccatatattccagtgaagctgctccgtgtaatcgtaatcctctagaagcttttaccgcctcccacatggttgggaattttcttgtcacgctcaaattagcaattaatagcgtatcttttaggtctattgctgggtcaagtttagggatagttctgccgtttactgtagcaccttttcctttttctccaaaatacagctcatcgcgtgcaacgtcataaatataagcaagctgccctattccatcttcataaactgcaagtgaaatcgcaaaatcgcgttgctgttcaacaaaattcaatgtcccgtcaattgggtcaagaatccaaaccactccatctaaatctgttacatctgacgccattccttcttcaccaaataaacgatggtcaggaaaatggtctttaatttgttgaacaaaaaaagcttcggtttctttatccatattcgtcactaaatcatttcgaccggatttgacatcaatgtctagtgtttctttgaaagattgtttaattntcgctgcggcttccatgatccataaccttgctaaataatctatnttttcgctgtccattaacacacctcttcgcactctttnntgttattttatcacanaaatgaattatctgaatagaacaagattctttcacttagaacttancttncgtn

SEQ ID NO: 2873 - DNA, 769 bp, Listeria monocytogenes 4b
  misc_feature (1)..(end): n can be any nucleotide: a,g,c or t/u
gtcttgccggcacnnnnnnnnnnnnnnnnnnnnnnnnnnnnnnnnnnnnnnnnnnnnnnnnaatttcctgtacgaaaaaaagaatccaagttttgcttggattctttttgagcggtcccgacgggatttgaacccgcgatctcctgcgtgacaggcaggcatgttaacccctacaccacggaaccatatgtataaaaaatgaataaaaaagtgacccgtacgggattcgaacccgtgttaccgccgtgaaagggcggtgtcttaaccgcttgaccaacgggccagataaaaaacgaaaaatgaatatatattcaattgaattcatttctcttacaccagcttttttattataacataatctgagtgactgtcaacggctttttctaattttatttacatttttttcatcggaagttttttatacatttttacctccataaaacaaagtcagctatgctttacgggcatgctgactttattttacttttctcggtggtcaaccataataaaacttctcgtatcatagcgatgtcttgatctagaatattccactggtctaccatctttcaaatacactacttgctccacttctaaaactgggtcgtgttccccgcacgctaaatattcttgatcatattcagatggcttatcggcattaattttccgaaaggcaccgcttagcacgagtccaagtgaatcttgtaagtatgcataaatcgaaatgatgcaaatttctttcgttaaaccaggaactaaatctgcccgcatg

SEQ ID NO: 2874 - DNA, 758 bp, Listeria monocytogenes 4b
  misc_feature (1)..(end): n can be any nucleotide: a,g,c or t/u
ncctaannnnnnnnnnnnnnnnnnnnnnnnnnnnnnnnnnnnnnctgctggaaatattaaaaaaagaaaaaagtggcttgggacagaatcgaactgccgacaccttgagcttcaatcaagtgctctaccaactgagctaccaagccataatggcggtcccgacgggatttgaacccgcgatctcctgcgtgacaggcaggcatgttaacccctacaccacggaaccactctattgcgggggcaggatttgaacctacgaccttcgggttatgagcccgacgagctaccagactgctccaccccgcgacaataatattataaaattaatggtggaggttaacgggatcgaaccgctgaccctctgcttgtaaggcagatgctctcccagctgagctaaacctccataattactattttactctaaaaacatgaaaatgtctctagtaagtttaataataaatgacccgtacgggattcgaacccgtgttaccgccgtgaaagggcggtgtcttaaccgcttgaccaacgggcctaagtgaaaatatgatgcattattatgtgtaaacggagagcaagggattcgaacccttgagacagcttacaccgactacacggtttacaaccgtgctccttgggacactgggacaggtgtacacgaaatggctgcacaggcaggactagaacctgagaccgatcggttgacaaccgattgctgtaccaactgaactactgtggcataatgaattgcacggagcaca

SEQ ID NO: 2875 - DNA, 766 bp, Listeria monocytogenes 4b
  misc_feature (1)..(end): n can be any nucleotide: a,g,c or t/u
ncgtaaagtaacntattctnnnnnnnnnnnnnnnnnnnnnnnnnnnnnnnnnnnatcgggattatgaagcatgaactatgtcattatcaccttcatttagagaaaaaaggctatcagcatcgcgatcaagatttccgtgagttattaaaaaaagtagacgcaccgagattttgtgcaacgataccacgtgaaattaccatgcatgaatatacatgcaaaagttgcgggaagtcctttttaagacaacgcagattcaatgtgaaccgttatcgctgtggcagttgtggtggaaaattaatacaaacaggttccaagaaaatttatacagaaaacgcatgaaaagtcttgcaattttactaagttctgcgtatactagtggaagtcagataattccacagtagctcagttggtagagcaatcggctgttaaccgatcggtcgcaggttcgagtcctgcctgtggagtttggggaagtactcaagtggctgaagaggtgcccctgctaagggtataggtcgctcgcgcggcgcgagggttcaaatacctccttctccgtgataacttataaagacattgtttaggaaactaagcagtgtctttttttgcggaaaatagcgatagatttgcgtctatatgtgtgctaaaggtattcggaaagaatagctcaagttcaaatgacatagcgtaatacctggacgtgcaattgaaggcgtggcttgtatagtgaaatgcggactatgggtgagactctaataatattaaataa

SEQ ID NO: 2876 - DNA, 779 bp, Listeria monocytogenes 4b; identical to SEQ ID NO: 1069
  misc_feature (1)..(end): n can be any nucleotide: a,g,c or t/u

SEQ ID NO: 2877 - DNA, 765 bp, Listeria monocytogenes 4b
  misc_feature (1)..(end): n can be any nucleotide: a,g,c or t/u
atgtctgcgcggcacnnnnnnnnnnnnnnnnnnnnnnnnnnnnnnnnnnnnnnnnnnnnnnnnntattatatttattagttttattcagaaaagtgtataaaaatagcctcgcgttagcaaggctctaaataatattaaagaataaatcttagtacatagaagataagtgctgcaattgttgctgaaataggaagtgtgataacccaagtaataatcatacgttgggcagtatcccatttgacacctttgacacggtgagctgttccaacaccaaggatagaagagctgattacgtgtgttgtactaactggtaaatgaatgaaagtagcaccgaaaataatgataacggaacttaaatcagccgctacaccattaactggtttgattttcatgattttaccggcaacagttttgatgattttgcaaccaccaatactcgtaccaatcgccatggcaatcgcacaggatactggaacccataattgcacatgatgcggctgggggggaaaccactagcaatgaatgccattgggatgatgcccattgattggggggcatcattagtccccggtgtgtcacattgctccgcaccgggggcgactgtgatcattcttattcctcttttggtccttgcttgtttgcgtgcccgcggatgtcctccttcaccgctctcttctttcctgcttttccttgcgcccttcctgtcatcctcgtcaatcctcccgggccccgttctttacctattcaccatcacttaatataaa

SEQ ID NO: 2878 - DNA, 809 bp, Listeria monocytogenes 4b
  misc_feature (1)..(end): n can be any nucleotide: a,g,c or t/u
actttannnnnnnnnnnnnnnnnnnnnnnnnnnnnnnnnnnnngcactgcaaaaggcagatgttattgtatacgatcgcctcgttgaaccagcgatgctccaagaacgaaaagctagttgtaaactcatttatgtcggaaaagaaccacttcatcatccaattacccaagaggaaatcgagcaaattcttgttaaagaagctgcgacaaatgagctggttgttcgtctaaaagcaggagacccttatgtgtttggtcgcggcggggaagaaggagagacactctataaagcgggaattccatttgaagttattcctggaatcacatccgcgattggtgggcttgcctacgctggaatcccagtaacacatcgtgattttgcttcgagttttcacgtgattaccggacatttgaaaaaaggactctgaaataaactcacctgagggtaatagcgtagaaattgattttaattacttaaaattaaatccgattaaaagtataaaaggtcagaacgtggaaaaagaagcgataatcagtgataaagttttgaatattattgttcctaatagtaagaagggactagagaaagatataaaaaacacttttctcgattacttctattttcaaaaagtagaagtggcgaatatttataacaaagctttagacctgcctgctgtggcgctaagtagggagacttangtgttatattattatgcgaaatatcaatatntcttgatgatctggattagatgattacgtcatgcatgttacgattgctttaatgcctagacttgtatgatagctactcct

SEQ ID NO: 2879 - DNA, 776 bp, Listeria monocytogenes 4b; identical to SEQ ID NO: 1076
  misc_feature (1)..(end): n can be any nucleotide: a,g,c or t/u

SEQ ID NO: 2880 - DNA, 783 bp, Listeria monocytogenes 4b
  misc_feature (1)..(end): n can be any nucleotide: a,g,c or t/u
ctttgaaatgaactcagctaannnnnnnnnnnnnnnnnnnnnnnnnnnnnnnnnnnnnnnnnnnnnnngattacgtattgaaatgttcgcatacgtttaacttactagatgctcgcggcgttgtttcagtaactgaacgcgcacagtatatcggtcgtatcagaaacttagcaagacgtatcgccaaaacattttataaatatttgttaagcggataatgtcttgtttatcttcttcttgccaatttaaataatcagcaagcattaatgccactttttgcactcgtttcattttttctgtcaaagtgcctaatttttcatggaaaacgatattttgtaatttagcaactgcttcatcaatggttatttttaaatcttcttgatagaagaaatcagcatctgacaaacgagcgcgtagtactttttcgtttcctcgtgccactgtatctagattttcatggttaccattacgaacggttacaaaatgaggcaacaattctccttcttggctgaaaactgggaagtaacgttggtgttctttcatcgtcgtaattaaaacttcttcgggtagttccagatattctttttcaaaattacctgctagtacagttggatattcgacaagattagttacttcttctaataagtcgtcatcttctctgatttgccaattntccatcgtttctagttcacgtaattgttctacaatagcctgtttgcgttcactagcattaacaacgacaaattgttctaataatgcatttggatagtcgctcggttgtta

SEQ ID NO: 2881 - DNA, 732 bp, Listeria monocytogenes 4b
  misc_feature (1)..(end): n can be any nucleotide: a,g,c or t/u
gnnnnnnnnnnnnnnnnnnnnnnttggatgtctccaaatggaactgtttcacctactttgtttagcgcactatcaaagttatcagttgccgtccatgtatcacccaaatacaaaatagaatcatgtacattgacagttgttaaatctttttcaactttcacttgaataactacttccgctgttttcccatttttagcaacttgataggtcaacgggtaagttccgccttggttagagccttcttggatagcttttaattgcttggcatccacttttacggaactagtacaatcttgtgcagtagaaagtacacctgtcttcacttcttcaaaactagctgtttttgctaaagtaattgcttccgtttcagttagcttatttgaatctttgtattctaaactaaaattcaatgcgccaaggataagtccctctttttggtctatcgtagcacttggctcagttatatatacaggtgcagtagattttttctctgtatcaaaaatatctttgattgtaataccaatatcagttgttgcgattgctttgtttccggcagaaataccaacaattattccagaaccatcattagcagtttgtgtagttgctaaagtcgtatcattgctagtccatttgtaaccatctgtaatcgcttgaatattgtgaaagaaacgacggctcatcgtatcttctaccgcttctccactagttgctcttactttcggcaatgttact

SEQ ID NO: 2882 - DNA, 769 bp, Listeria monocytogenes 4b
  misc_feature (1)..(end): n can be any nucleotide: a,g,c or t/u
catnnnnnnnnnnnnnnnnnnnnnnnnnnnnnnnnnnnnnnnnnnnnnnnnatcttttattgaagggaagccttatagagcggaattagctcgtcaaggaccatttctgcctctttaatgaagtctttccctggggataaatggctatcatctggtagataaattttcccaactaagaattctccttttttcacatcacggaatcgttcaagcgtggcctttagttgtccgtcgtgtaccggatacgtcttttcctctgtgtgatctggagaaatggcaaagttatccggtaaatcagccaataatttcttttctttcaagaagcgattggcgattttcgcgctttcttcattttcataaataaaagcgagccaaatgaataaataattatcgaatagacccacttggaaatgagggtgctttttatatccacgtttatcatggcaaatggccagccaagtgctttcgggtgggttaactgaacgtctttggtgacgagcaatatgtaaaaacatttcatcgccaagcttggcacttaaataagtagtcaattcttccccaacagctctgaattttggttggatatccgtttgaattccgttcatacgtgcttcaagcccaggaatttgcattgttttaaaatctttcttactaaatcctttaaaagtcatctgttttcctcctaattttgcatatagtttcattatacggaagttaagttctaagtgaaagaatcttgttctattcagataattcatttttgtgataa

SEQ ID NO: 2883 - DNA, 740 bp, Listeria monocytogenes 4b; identical to SEQ ID NO: 1075
  misc_feature (1)..(end): n can be any nucleotide: a,g,c or t/u

SEQ ID NO: 2884 - DNA, 779 bp, Listeria monocytogenes 4b
  misc_feature (1)..(end): n can be any nucleotide: a,g,c or t/u
tgaggtgtntctttgnctttgnaaggactgcgtcactggctnactttnaccgtataccggccgccagtgtgctggttcatgccacctaattatcgctttttggccatgggctaattgaaattcatacttaacaccattcttcaaggtatctgtagttttaaaagtgtttggtgttccttttggtattatatcacccaaatcttttaagcttatttctcctctttctaaaagatgttcaaccactaatcgtgcttgatctctatttaaggttgctacagaatatcttccaagatcaacttctactttttctgatttcttagctattatttttttattcctcgccgccgcaataccaaagcctaatcctaatgccatatgggttagtccagcgtcatccatcgcatccttcacgctagctacgtaagcagaggacctcagagtcgcctcggaaaacccggttactttttgaccatttaagtagttgacgccgtctttccatgcatcatttactttgcgctctagttcatcaccggaaagatttgtgtacagaatacggtctaactcggctccgttctcctctcgctatactagaaagctaggagttctgtattactgggcacgttgngccattcgcgtttccaatagccacatgcgngacgggtttcgcctttgtcattcacataagtatagagcagataactgatagctcttgaatgcctccgggaagngatcattggcgtttgctttgcgtgctttatccatcgcttttctcatcaaat

SEQ ID NO: 2885 - DNA, 771 bp, Listeria monocytogenes 4b
  misc_feature (1)..(end): n can be any nucleotide: a,g,c or t/u
tttgnnnnnnnnnnnnnnnnnnnnnnnnnnnnnnnnnnnnnnnnnnnnnntaaaggaagtattaatcctaaattagataaactaatttcaagtctagacaattttgataatatcaataagaaaatgggcactatagtaggtagccaggagattagtggggaagcagcagatgctttatctgagagcctattagtgctagtaagttatggggaacaatatagtttagtaattagaaacctaaaagaagtgatagtcgactattgtaaaagtgtggaagaaattgataaaacagcagcaaacgcagtaagtaaaggcgtttaaaaagaaagaggttaaactatgaaaagtagaaattggttaaaaggattgggagtaacaatgattgtcgttactttaattttaacgggatgcggaaatggagacgctgaaaagacagatacaaaggaacagactaaaagtgttgaagaagaaggaaaagaagtaaagattgagagtaatgaagggaagccacagcatgaacaacttataacagtgaagttgccgccagaagcagagtatttaaatgatgaaacgttagaagtgtatgagcaagataaaaagaagtatgaccagacagagcanctaattactaataactcagttacaattctattaggtgatttttgctattatgagccggcatggagcagtcttacatgttctgcaattcttgtgaatggaactgacacaaatattgaagaccttagcttcaaagctgaaataatgaataag

SEQ ID NO: 2886 - DNA, 789 bp, Listeria monocytogenes 4b
  misc_feature (1)..(end): n can be any nucleotide: a,g,c or t/u
gaaggttgnnccgtttgnctttttgatagggctgccagttacgtcccctactctgatccgnnnnnnnnnnnnnnnnnnnnnnnnnnnntgtcacatcgcttaacgctatatcagtggcaccttctttatttgtcgcactatcaaagttgtcttttgcttcccatgcatctcctatataaatagtagaatcatgtgcgttcaccgctgttaaatctttcgctaccgttacttgaatagttactgagacagttttgctatctttagttatcgagtaagttaatggatacacactaccttggttggaaccattttttattgcatctagttgtgtttgactcacttgtactgaatctaaacgatcttctgcgcttgaattaacaccatcttttacttcttcaaaagcggctgttttcgcgagagttagtgcctgagctttcgttaattcagtggcttctttatactccatcgaaaagtcagtcgcacccatagtgtaaccgtcttgttgcgcaacctgtccctcggttccagtaacatatactggagctgtggagctttgttctgtaccaaaaatatcttgaattgtaatcgttaaatccgttacgtcaatcgttttattgtttgtggaaacacctacgacagcagctgatccatcagctatcgtttgtactgtcgctacattggtatctgcaacagtccatttgtagccattggttgctgccttatattcttaagaaagcttggtcaatgtatcttcgcagttttccaggggtggagctcttttgaaaaaga

SEQ ID NO: 2887 - DNA, 747 bp, Listeria monocytogenes 4b
  misc_feature (1)..(end): n can be any nucleotide: a,g,c or t/u
tttcttgnnnnnnnnnnnnnnnnnnnnnnnnnnnnnnnnnnnnnnnnnnnnnnntgtgaatacagcagtagccggtgtttatccagtgacctacacttacaatggcgtctctaaaaaaattaatgttactgtcaaagctataaaaacagcagtgaacgcacatgattccacaatctatacaggtgacacatggaatgcgagagataactttgatagtgcgcttgataaagatggtaattctgttgcctttgctgatgtaacagtgacaggaagcgttaatacaaatgaaactggtacaaatactatcacttatagctacgatggcgtttctcaaactattacagttactgttgtagaaaataaagaaggtatcagtgcacatgattctacaatctatgcaggagaatcatggaatgcaaaagataacttcgacagcgcttttgataaagatgggaatgcggttgacctagaagacgttacagtcacagaaaaaccaaccgttgatacaacaaaagcaggtgcttacgaagtcacttacaaatatggaaaagtatcgaaaaaaatcactttaacagtgaaagctaaattaacagcagtcaacgcacatgattccgcgatttacatcggagatacgtggagtgcagaagataactttgacagtgcgctggataaagatggcaattctgtcgcttttgctgatgttgaagttaaaggaaccgttgatacagacaaagctggaacatatcc

SEQ ID NO: 2888 - DNA, 698 bp, Listeria monocytogenes 4b
  misc_feature (1)..(end): n can be any nucleotide: a,g,c or t/u
aaggactgccgacactgcccgagcgctgatcgctagacccggccgccagtgtgctcggaaagttattcaaattaaatttgtactgtattttcatttgtgctctgttttacctgttgaataatttcttgcacttcagattcagaaagctttttattttcatatggaggttcccaattcttcatagaatctttaaatacaacaaattcacctccaactaacatttctccatctgctttcactacatatccattctctaaatcaaatttcacctgtgaactattacctgtaattttcatttcacttacttcctttcaaaaattattttttcaagtcctgttttaggatcaatcgttgttattttcgttacgttaggattattttttaatctaggtaactcaacattttcccaaatatttccttttctcaaatccgaaccaactactgcacgaacttcaccagaaacttgttctgcataagaaccagaagccaaatcccatgctttcattgactcaggattattaaaatcccagtctggcatttcaatatttttatttcctattgttgattctaaagtaacgccacctttacttttagctatatcagccccactggctttcttgggagggaaagtttatttgtttttatgtacgaaatttattatcctttctgttgctaaaaagttttaaatatatattaca

SEQ ID NO: 2889 - DNA, 470 bp, Listeria monocytogenes 4b
  misc_feature (1)..(end): n can be any nucleotide: a,g,c or t/u
agtactaaaaacggacgtagagttttagcaagtcgtcgtcgtaaaggaagaaaagttttatctgcgtagaccactgaaaacgactcagtggttttttttttgaaaaatcgctgaggcaaacggccttatactaagatatgtaagaagatggagaatgtatgaaaaaaaaatatagaattaaaaaaaatgacgattttcaaaaagtattccgaagaggaaaatcttttgctaaccgtcaatttgttgtttatactttaaagcaagaaggatcgaatcattttcgaattggtttatcagttagtaaaaaaattggaaacgctgtctgtcgaaatcgaattaaacgttacataagacaatcattccatgaattagaaagccaaatcaatcctgaaaatgaatatattatcatcgccagaaaaccggcggccaatatggattttcatgaggtaaagaaaagtttgattcatgtt

SEQ ID NO: 2890 - DNA, 761 bp, Listeria monocytogenes 4b
  misc_feature (1)..(end): n can be any nucleotide: a,g,c or t/u
agcatggatagtaagcgcgatgtcttcagctgtaatacctgattcgattgctaagccgatttctgaaataatatcagaagcgttcattccggcaacttgtgcaccgataactaggccatcttctttacgagtaactagacgaacaaatccttcaggtgcatctaaagaaagcgcacgaccgttaccgccgaatgggaatttagcagcttttacatcaaagcctttttcttttgcttctttttctgttaaaccaactgttgcaagttctgggtcactgaaaacaacagctggaagtgctgtataatcgttttctgctttttcgccagcaattgcttcagcagcgatttttgcttcatagctagctttgtgagctagaggaacaccaggaacgatgtcaccaattgcgaaaatgttaggaacgttcgagcgaccttgtttgtcaacttctactaaaccgcgttctgttactttaacgccagcttgttctaaaccgatttcgtctgtatttgggcgacgacctactgtcactaaaacataatcagcttcgatagttttagtttcaccgttagcttcatacgttactttaacgccgttttcagtttcttcagcagattttgcaagtgctttagtaaccatttcaacgtttttgcttttcagattacgtttaactagggaaaccatgtctttttcgtatgttggtaagatttctggaccaccttcaaggatagntagntctgtaccaagttagcgaatgcntcact

SEQ ID NO: 2891 - DNA, 1201 bp, Listeria monocytogenes 4b
  misc_feature (1)..(end): n can be any nucleotide: a,g,c or t/u
gttacgggtaaatgatactcgtaatttagaatataactactttgcaacccttcccatgtaatctcgccatttgcataaatacccgcatgacttacttttgttggttgtactctgctgccattttcatccattactggagcgggtaaaatcaatggattatctacgtcaaccgcatctaatacacgcgtttggttctcaagttctaacctagttaaattggtcaaatttttcaggggtgaaatatcaattatttggttgaaactaagagttaatgtctcgagtgtagttgacgttgttaagctactaatatcgctcacgtgattcgcttttatatcgaaatcttcaaggctagtaaaatttttagccacactcacatccttgatttgattcccaaataaacttaaaccaagcagtttgggcatatttttgagcggcgtaatatcactaatattatttctacctgcccaaaacatcagcatattagacagattttcaactgacgataaatcacttacctcacagtctcttatggtcaaaaattccagttgtgtcatgtttttaacggcactaatatccgaaataggatttgcgctaacattcagttctaacatgttcgttaaattttttatcggttcaatcgtttgtaagttattaaattcaaaatcaagtgacattaatgctgtcaaattcgaaatgggtgttaaatcacttatttggtttcttggcatctggatgatttcaagttgcgttaaattacttaatggtcctagatcactcacttgattaccatagccaaatacttgcgtgagattttttaaatattctactccttcaagactttgaacaccttttgaatcaaagtgcaaagatttaattgtattcaattggctttgcgtaaccatgctagtcgcagatggaagctttaaccaatccgccacaacttgtgcgagctttggatcaggaaaaatttcattaattggacttggatttgtaagcgaatagactgtgtctgcttcaactgcgagtgcggcgggttaaaaacccccgcttgctaaatacacaagcaaagcttaaaaagtaaactggttggaatcttggatagttttttcatagtatcctccttgattgccaacaacataatactctgttataatatcaatccacagataaggagccatttttctgtttaggaaattttttt

SEQ ID NO: 2892 - DNA, 612 bp, Listeria monocytogenes 4b
  misc_feature (1)..(end): n can be any nucleotide: a,g,c or t/u
gagttccgaaaaagacgatgaaaatttgaattagaagtggcgtaccacggacaaattcaatataacatgctgctggccagcgtaaccatcttgttttcgccagtttcatgagcgctagtaatgagccgagaatggcaccacataatacaccgatagcggcaagggcaatagtgattaatgtaccagtgataaagtaattaccatatttctcgtaaaagctaccatcttggaacattaatttattggcttctttttgatattttttcagtaagccagtatcttgtatatctttaatagaagcgttgactttttcttgtaaagcagtggaaccttttggcattgcgatggcggtttctttgctaccattagcaaatttgatatccgccatagcgagtgtcttatcttgactaatataagcttcagcaactggaccttctaaaacaaccgcatcgactttgttgcttttaaggttaagaataaggtccggtactttttgaagggaaactacttctgaaccaactagctcattttgagctaattcttcttgtgtcgtttgcttttgggcaccaactttcacgccactaaaatcattcacacttgtaaatttatctt

SEQ ID NO: 2893 - DNA, 744 bp, Listeria monocytogenes 4b
  misc_feature (1)..(end): n can be any nucleotide: a,g,c or t/u
aactgaaagcaacctatctgtatgctcgagcggccgacgtgtgctggaaagttcgttcacttcacagcgatccaaggtgatggctacaaatctttagaagaaggccaagcggtaacatttgaagtagtagaaggtaatcgcggcgctcaagcagccaatgtagaaaaagcctaatccagttgccaaatagacacggacttaaaaccggtatccttttaccggtttttttattgcaaaaaaatagctttccttctataataaagccacatctattcatctaaataggaggcacataatatggaagttttcgtggatggtgcaagtgcgggaaatcctggaccaagtggggctggaatcgtcttaaaagcagaaggtatttatgaaccattgccattccgctcgcagttatgacgaatcatgaagcagaatttattgcgattaaactcggactggaagaagccataaaaaaacaagctacattaattcgtctatactcagattcgaaagttgcaatcgaagcaattcataaacgacatgcgaaaaatcctttattcaagccgcatttagaagcaattttagaaatggccgatacatttgaattgttttttgctgaatggcgtaatgtaagtcaaaataaacaagccgaccaacttgcgcgccaggctataaaaaaacagaagcaacctggagtcaaataaccagattgcttctattttttattcgatatcgcgcgttaacgttttt

SEQ ID NO: 2894 - DNA, 894 bp, Listeria monocytogenes 4b
  misc_feature (1)..(end): n can be any nucleotide: a,g,c or t/u
tgtgcctggaaataatcttttaaaatataagtttatcaaggaggaactccatggaaatcacattacaacaacctacatcagctgactttcccttcattgaatggttgtggggagatttggcaacgacagaaatactcggtggaccattttcttttccggaagaaacgcgaatggactggctaaagtcaaaatcacaagcgagcaatgcttattttattataaaaaaaggtacagaatccgttggtgaagtcagctttcgcgattttgaaaaagggacagctcatttaaatattaaagtggctgcatgttataggggccagcgaatcgctcaaaaagctttgcaattattcttggatttttttcaaactgattgcggtgggctcgttttgttggatgaagttagacggaaaaatgaagcaggcattaagtttctcgtgaaagctggtttcgaagttatagaagaaaaagaatggacgatggtgctcaaatggagtgctcaagcagaaggaggttttgaatgagtaaagaaagatgtgcatgttgtaactgcttaacaattgatgttagaggcgagtttgagatttgtccgatatgtttctgggaagatgatgcttattttgtctttgataaggaagagatttattctcattatcaaggcagttcctcgatagaagatttgttaaatattcgttctagcgctaacactacttacacattattctaaccctgtatagagaagccacggccaaaatttttaacccccagtttggcccttggtagaccttggcatatgaaaaaaatatggtaagagaagccactggcagagggaattttaatcnaattagcagggtaagtttagatttaaaagtctaacttacttttttagtagtttaa

SEQ ID NO: 2895 - DNA, 899 bp, Listeria monocytogenes 4b
  misc_feature (1)..(end): n can be any nucleotide: a,g,c or t/u
acaactaattcgaatcgatcggtacggcttcttccgcagcatgtttggcatcatctggttctgcagttgttgcgtgcgcagatgttacatagcctgcttgctctaatatcgaaaggacatctgcaagatttttcttgatgatttctcttgcagatgtgggattataaataactcgagcgtgtttttgcattatgttcgtgctctccttcactcaaacagcgttgttcaaaagaaaagcgcgttttgacacatgatagtaatattatagcaaatttaactataaattcctaataaatataaaagcagcgaggcaaaatacctcactgctacattgtttaacgtttgttcatttcttctagtaataatttattaaccattggtgggtttgcttgccctttggttgctttcattacttggccaactaagaatccaaccgcacgatccttaccatttttgaagtcgacaatagattgctcattgttatctagaatttcgctaatgatagtgcgtaaagctccttcatcggaaatttggacaagtcctttgtcttttactacttgctctgcatcgccaccattttgcgctaattcgcggaaaacttttttagcgattttagaagaaatagtaccagcttcgattaatttaatcatgccagcaaggttttcaggagttagtcctgtttcatgaagttctttttgttctgcgtttaagtaggcagaaacttcgcccattagccagtttgatgcttgtttcgcatctgctccagctgcaagagttgcttcaaaaaagtcagacatttcttttgtaagcgtgagaaccattgcatcatatgctggcaaaccaagatcgttaatgtaacgaatttgacgtttgtctggaagttcaagaatttctgcacg

SEQ ID NO: 2896 - DNA, 752 bp, Listeria monocytogenes 4b
  misc_feature (1)..(end): n can be any nucleotide: a,g,c or t/u
gcgtagggcacctagcagcatgctcgagcgccgacgtgtgctggaaagaggtgaagacaaattgaacgtaaaatgtatctggtgcgagcgtgtagatgagctagacaatcgcgaatttaaaacaaaacaattacgtaataaacctattagaatgtatctatgtcctgaatgtgaacatcgagtagctattaacactatcagtcgcgttaattctggtcatttcaattttcataaacctagtagtaatgtcgaatagtgagttaaagaatttaatagaaagtgctggaaaatagagaaaatccgccctttatcgggcggatttttttattttactgggaatgaggcaactacatcatcgcctgcattagcttcagaaacacttgcatcaaatttatcaggatttggaacacctatttttgagtcagctgctaaatcattgtacacagcttctgtcattgtgaatgtgagaagcccacgagctggttgtgcagcggggaaaatgtggggatctgctttgcttgctgtgggatgaaaatgggaaggaacaaaatggtctaagcgtgctgctgcaaatgggatgggctgctgtgcggggggtgggggctgctggggcttgggtgtgtgcggnggtgggatgatgctaggtgctgcggttgtatcttgtctgcctcctatnnnntcnnngnngncncgcnngnntccgggctgccggcggtgcttctttggcgccctgcaaacaaaaaaaaaaaaaa

SEQ ID NO: 2897 - DNA, 820 bp, Listeria monocytogenes 4b
  misc_feature (1)..(end): n can be any nucleotide: a,g,c or t/u
actctggtagactaaattcgctccttgaatgcggttcggggtgcaaaaacattgcataaataaaacgataatttacaagtgcatacagaagcgtcatataaagcatgctaagtaaaaatcgaatattcacttgttttttcttgaaaacatcgtacaaccaaatacatccaaccattactaaaaagaaacaaaatcctaatattaaactagaataaaatggaagcaacgtcagtataaccacattccaaattcgccgtttattattcctaatatttaaaaatgcccatagagcaagcggcattccaagcgtactcaacatccctgatggccaaaatggtgttagcgcaaaagctaaggaaacaaaataaagtggcacgagatattttttatctttaataaggtaatcccttgcccataaaaataatcctaaaaatgcaaaaaaacgtgtaattaactgactcatcgcaaaggcaatgggtgtgctgaaaatcatgtaaagccaatcaatcccaacaaactctgaatcaaatgaatctctggggacactgtcatccattatttggtgctatatttgctgtcccgactttagcggtgtatcacccgcttccaaaaaacaccattgtggaccgaagctaattacaaaaccaaccaagaataaatgcattcctgacttgcgcgccccccgaataaaataagtggcgggcgccacaggantccccanattatatcaccgccttatttcgccccttatgcttcttacaaatagtcctcccccttcatatctctactattatgtacccgaaaaactatttcattatat

SEQ ID NO: 2898 - DNA, 973 bp, Listeria monocytogenes 4b
  misc_feature (1)..(end): n can be any nucleotide: a,g,c or t/u
atcacataaaattttctaaattcaagtatagagattttaagggagagataaagagatgatttactttgaccatgcggctactacgaaaatgagtgaagcttctttacaagtttttatggatgcatcgcgagaattctttgctaattcggagagtttacatgatgctgggactaaatcggcggcccttttagaaaaatgccgggaaagtttttctgagttattacaagttccaaaccgcgggattttatttacgagtggtggaacagagagtaatcaaattgccatccaaacgctaatccatacaactgataagaaagaagtgctcgtaagtccgctagaacacgcttcagtttggcagcaactaatggcactcgaacaagcggggaagtgtcggattaaagtattaccagttgattcgtttgggcaagtaaatccagctactttagaaaaaatgatttctgctgagacggggcttattattattcaacatgttaattcggaaatcggaaccatccaaccaatcgcggaactagctcatattgctaaaaaagcaggtgtcttttttcataccgatattgttcaatcctttggaaaaattgatttagatttaagtgatgccactagttttagtatttcatcgcataaaatttatggaccaaaaggggcgggaatactttttatgaaaccagattctcctttgcaggcagttttgccagatgtacatcatgaatttggctttatacccggggacagtatatgttccagctattgctgcctttacaactgccgcctatgatataatagaaaatagagaacaagaagcgattagagctatgaaactaaaagctgcatttgcgacacattagagcgcgagagagtggaggtgacccatcatgcgtattagactctgcaattcaggtagactactgtcacaatctagtatgccgtctcattncancaattcaattacaca

SEQ ID NO: 2899 - DNA, 807 bp, Listeria monocytogenes 4b
  misc_feature (1)..(end): n can be any nucleotide: a,g,c or t/u
ggattaaacattaaataaattccaagaccaatcatcgccacaccgagaattaaaacgaaatacgtgtataactttctcatggttttgccccctttttagtgattagtaagtaatgaccctgccgcttcatcaataataaatacgacattcggatggttacgtaaaatcgacgctggacaactttcatcaattggtccctcaagtaaacctttaacggcttctgcttttcgttcaccagaagcagtgactaagatttgttttgcatccatcatatcagctaatccaagtgtaagcatttgggatggcgcttcgtcttcttttaagttgttgtacatgatggtgcttttgatagtagattcatcgctatctgccaaaaacaatcgcgcatcaaatggtgttccgggttcattagccccaagatgtccatttacccctaagcctagaatttgcaaatcgcgctcattttcagccaaaattttcttatagcgggcaatttcgtcagtaaagtcagctaggcttccgtccaataattcgactctttttggcattttgttaattaaatcatagaatttttggtgcatatatgtgtaaacagtgaaggaagcatcgcgtttagccacatactcataaaaattcattaaaaatactttttcgattggaatttcgcctgcattaattccttttacaagtccctcgaacattccatcaaaacttgctccggtagttgtattaattaccggattatcattttcgttaatgacttgtttgacaactacgagcgcttcttatgacatttcttcgtatgta

SEQ ID NO: 2900 - DNA, 711 bp, Listeria monocytogenes 4b
  misc_feature (1)..(end): n can be any nucleotide: a,g,c or t/u
aaatgatgatgaactcctcagcgaacgcctcaaaacattaagcaaactattacaagaagcaggttattaaggacgtgaaataattgaataaagacaatcgtaaagaactaattcgtgcatacaaagaaaaatctccagatgccggcgtttaccgttttatcagtacaaaaagtggtaaatccttaattgataacacaatggatttaaaaggaatcgccaataaacttgctttcggagtgaaaattggagcgggaaatatgctaccaccagaaatggcaaaagaagcaaaggaatatggtattgacaccattcaatttgaaattcttgaaaaagtagatattaagcccgaaatgacaaaagaagatattaaagaagaaaatgatgtactccttagtttatggctagaacgtgaagatatctgagacctttcacttgaaaggtctttttttattaaaattgtacaataaaaagataattgcaataaaatacacgaaatgtctacattttctagcaaaattaatgttatactaataaatgactattttaaaagggaggtttatatcataatgaatccaagaaaatcagaatttgttctaacattaattgcaggaattacaggtattattgctggtattactggaatcgcgggcggaggtttacttgctgctctctctggcagtgaagaattatctaacgcaactgcgatgactg

SEQ ID NO: 2901 - DNA, 609 bp, Listeria monocytogenes 4b
  misc_feature (1)..(end): n can be any nucleotide: a,g,c or t/u
atctaattttgatacaactgaaattaagcctggcgaaactgccaaaggaaaaatcgtttttcccgtagataatttagacaaagtttctgatatttcatggatttcttatagttttctaagctatctgaaagattcatccacaccaatcacgacagaaactggcaaaatcgaactaaaataaaaacaatatcccgaaaatgggatattgtttttttgtcattattctgctacgttcattacttcttttagatactcatcataagaaatttctttattgtaaaattggtcttttgataagttaatgatgcgcgttgcgattgtttgtaataactgatgatcatgagaagcaaaaatcattgcgcctttaaatgcttccaagccgttattcaatgctgtaatggattctaagtccaagtggttagtaggttcgtctagtaaaagaacgttagaacctgaaagcatcattttggataacatacaacgaactttttctccaccagataagacgcgtacttttttaagtacttcatcgccactgaatagcatacgaccaaggaagccgcgtaagaatgcttcactgtcatcttctggagagaattgacgtaacca

SEQ ID NO: 2902 - DNA, 1327 bp, Listeria monocytogenes 4b
  misc_feature (1)..(end): n can be any nucleotide: a,g,c or t/u
gatgaaagaagcagtactcgaacaattaggaggaaactaatgttaacagctacacaaaaacgttttttaagaaaagaagcgcataatatccaacctattttccaagtaggaaaaggaagcgtattaccaaacttaattatccacgtaaaagaagcactagaagcgagagaattaattaaaatctcgattctacaaaattgcgaagaagataaacaaaccgttgcagaaaaaattagtgctcgttcaggcgcggaaatcgttcaagtcattggcagaacgattattctgtacaaaacttctgtaaacaagcaacaaattaagttgccataaatcgggaggaacctacgatgaaacataaagtcggcatcttaggtgggacttttgatccgccgcatttagcgcacctccgcatggcagaagaggctaagaagcaactaggacttgagaaaattctttttttacctaataaaattccgcctcataaacatatcagtggtatggcttcaagtgatgagcgtgtagaaatgcttcaattaatgatagaaggtatagattcctttgaaattgatacacgtgaactcatgcgcgcgggaaagtcctatacgtatgacacaatgcgtgatatgataagcgaacagccggatacagatttttatttcattatcggcggggacatggtagaatatttgccaaagtggtatcatatagatgacttagtaaaaatggtgacattcgttggggttaatcgccccagttatcagacggaggttccgtatgatattgttaaaatcaatatgccagaaacgacgatttcttctacggaaattagaaataatattgagaacgcgagcacctttttaccagaaaaagtatggtcatatataaaggagcatcaactttatggaaagaaatgaaatgctaaaaaaagtagaagcagctatgcctaatgctcgatttaaacacactttaggcgtagaaaaagcagctgtagaacttgcagaacattatcatatggatgtagaaaaagcacgaataaccgctttgctacacgattatgctaagtactatgacgatgataaagcgagaaaaattatcgaggacgagggttatgatccgcgtttactttcttttcatcgttcgctgtggcacgctcctgttggcgcctatctggcagaaaaagaatttggtattactgatacagaaatactagaagcgattcgtctgcatacgacaggaagcgcgacgatgtctgatttcgataaacttatctacttagctgactatacagaacaaggaagaacatttcccggcgtatataaagcacgca

SEQ ID NO: 2903 - DNA, 731 bp, Listeria monocytogenes 4b
  misc_feature (1)..(end): n can be any nucleotide: a,g,c or t/u
ggttttatttgaactacaactggtcctacacctgagatggacttggggctgtgcttacggatgcaaatgtggtgggaattgctccgataccgaccaattctctcatcgctgggaatagtgtactggcaacatgcgtctgatggaaggacatgaaccatttgatctggactcaggttgctgacagccgatgtcagagatcattaccggagtcttggaaatccatcatggacggttgtagaacctataaaggcatgatacgaactgaaataagaccccttgtaatggctgttttttactttgaacgatgttaaccatattcgttactagttctgactctgagtctcaggctgggtcttgcacggcttcaccagcattttacttgaatactgcgtaccatctgcgtgccatctgcgttagtctgtgtaggcaactattgcaccgccttggaccgattaaccatcatactaactgattacttcctctgttagactaatagactaccggcgcgtaccactagagatactaccacctaagatgtaacatgtggatatgcgactagaactgctgaacatgatcaagaactatttgattgactaatggcgtcatctgacgctaaagatgggatctcaagcgggatgagcagcatactgcaatacctctttagtgctgttagacagcgcaacgatgctgtcgagcgatcttgatgcactgcataattatggccatttgcg

SEQ ID NO: 2904 - DNA, 969 bp, Listeria monocytogenes 4b
  misc_feature (1)..(end): n can be any nucleotide: a,g,c or t/u
taaccaaattcataaaaaagataaaaaataaaaaaagagacgacaaatgaaaattttgtcatctcttttttacatgcatttaaaagtacagcttgtaacttttggcaataggatttaaagaatttaaaccaactgctttatacactgcatttgtcgcacggcgataataacttaaataatattgtttcgtttgataatgcattttatcgaaaagaacttttaagaatttcaaataagccgttccaaattgtttatttttctcccaatgagaatactctttcactggaacttgtatataaaagtaacctaacgaaataagttcactcacaaggcgtttattattcgtttcaagaaaaacagtaagcgcatcaattgcatcaactgcctctgttaaatcttccgccattaatttcttttgaaaaattggacctagtttggttcgaatcaaatagttaaataaatttttgtcaaaatcaagtaactctaaacttaaagaagtatacttgttttccaaatttcgataatacgaccaacaatcaaccatatcattgatcaagtaattatctggaactttcattttctcttcgtttttcttcgtttcttccaaaacactatgtttccaaaccatattggctttatgaaaaatattaattaattcatgcgtaatctctgccttttcaaagtacgctttcaaaaaagcaacattatacaaaatatattgccccacttcttcaagcaacatatgtggatcacgttccaaataagtgctagttggattcggaatcgtttcctctaaaaattggagtgtatccgtcatttcataactatcttcatttggcaattttcgtaaatgttgtacaaaaagagggttttgattaaataaatggatatcagcaccgaccatattatcagcgaaacgagcgagatagtcttgtatttgcgaaagaatattttgatcgcttttcgaac

SEQ ID NO: 2905 - DNA, 621 bp, Listeria monocytogenes 4b
  misc_feature (1)..(end): n can be any nucleotide: a,g,c or t/u
gtgcgtggtcgatctacagctgcgcgacgggccacagtgtgctggaaagttgttaccacttcgccccttccgtctaaaagttgcacagtatagtagcgatttttaatttctggtacttctaaaataacggcattttcgtcatctacagctatccaagcttctgaataaaccacatcaaagttcggatttacaaaatttgcatctgctggtgaaatcgaattgtgcttaagtgtgttatatggaattttatcttcttttgtatcaaaattttcttggcgtaaaacgagatatcgcgataataaataaacataggattcttttacaacctcagcatttacttctaaattcgcattcattatcagtataaccacctttaatttagattaatttaagtatagcattgtatcctctcgaaagctgttcttagctttttgcaattccaatcatcgtaccaccgataattactaagacaaccccgataatgaccagaataagttctttcttggttttcttctctcctaggaaaaggattccaccaatggtcgaaatgacaacacccatttgtgagagcgaaaaaccctgtagcgattccaactaatttatttgagaatagtagaggca

SEQ ID NO: 2906 - DNA, 648 bp, Listeria monocytogenes 4b
  misc_feature (1)..(end): n can be any nucleotide: a,g,c or t/u
tggaaagaaacatccttacccaaaaattgattgatacacgaacggtgttaatttacggggaaatcaatcaggagttagccgaagacgtttctaagcagcttttactacttgaatcgatcagtgacgaaccaattacgatttttgtaaatagccaaggtggtcatgttgaagctggcgatacgattcacgatatgattaaattcattaagcctacagtgaaagtcgttggaactggatgggttgcaagcgctggtattactatttatctagccgctgacaaagaaaaccgttatagcctacctaacactcgctatatgattcatcaaccagctggcggtgtccaaggtcaaagcacagaaatcgaaatcgaagcaaaagaaattatacgaatgcgcgaaagaattaatcgcctaatcgccgaagcaacaggtcaatcgtacgaaaaaatctccaaagatacagaccgcaacttctggctttctgtaaatgaagcaaaagattacggcatcgtaaatgaaatcattcaaaatcgtgacggaataaaataacataaaaaggttcacttacaaaatgaagtgaacctttttatttctttaaaatggaggaattaccatggaattaacgaaagaaaattttcaaaaacttgac

SEQ ID NO: 2907 - DNA, 1296 bp, Listeria monocytogenes 4b
  misc_feature (1)..(end): n can be any nucleotide: a,g,c or t/u
gagtggttccatgtattttttgattggtccgaaattactataacgtgtattgccaacatagccatgtgctccggcgccaaatccgtagtaatgttcattgctccaataagtgatattgtgtttactctgaaatccttctttggcaaaattactaatttcatattgtttacgaccgtgcttttccatttcgttgagaagtaaatcgtacatatttgcctcggcatcttgaccaggtaagaaaagctttcctttttgcataaggttataaaaaatcgtttttggttcgatgattaatgaataggcggagtaatgcggtaaatcaaggtcaagcgcttgttttaatgtatcttggaaatctgcttctgtttgaccaggcaagctaaagattaaatcaatacttacattttcaaatccgattttgcgcatattttcgacggattgataaacatcttttacggtatgaatgcgtccaatttttttgagaagttcattgttgaagctttgaactcccatactgatacgattaacgcgatgatcttgcatggcttgtaatttagatagcgaaagatctcctgggttggcttcaaaggaaaattcgatatcttttttgagcggtagaatgttatggatggctgtgcaaagtctcgcaatttgcgcttcgttcagggttgtaggcgttcccccaccaacaaatacagtgtcgactggcgcaataggtccttttgcagcagttaattccatttctttaattagtaaatctacgtattcgtcgaccggttgtccttctaagaatactttattaaaatcgcagtaatagcaaatatgttcgcaaaacggaatatggatatataccgcggaactttccttactcgattggttcgtatttatcatttttatcaattccttgcacttaaaatttgcttcgttgtccattagtcagtttaacatattttccagtgctttggtgcaggattcgcttttaatctaataaaccatactttgccaaactatccactgcagcaagaacggcttcttcttttgtcgaaatcggctgccatcctaaaagatctctcgcttttgaattgcttatttgccgattcatattaatcatcaactcgccttctttggcgtgtttactaaatatagcagctgctcttatagcggcatttggcaatgtttttttcggcattttactcactagttcaggacgctctcgttgaagcaatgtgcatatctgcatctattctcgcactaacataacgtctcgttgctagatatcatgccattgtatcgcac

SEQ ID NO: 2908 - DNA, 755 bp, Listeria monocytogenes 4b; identical to SEQ ID NO: 1363
  misc_feature (1)..(end): n can be any nucleotide: a,g,c or t/u

SEQ ID NO: 2909 - DNA, 759 bp, Listeria monocytogenes 4b
  misc_feature (1)..(end): n can be any nucleotide: a,g,c or t/u
ctctttgggcaccctcctccatgcttgagcggccgacagtgtgctcggaaagaaaatccattgttaacttatttaaactgcgcacgcaacaccttaaccgaaatagatgtcagccacaatacacaattaactgagctagactgccatttaaataaaaaaatcaccaaattagatgtgacaccacaaactcaattaacaaccttagactgtagctttaataaaataactgcattagatgtaagtcaaaataaattactgaaccgtctaaactgcgacactaataatataactaaactggacctcaaccaaaatattcagctaactttcctagattgctccagtaacaaattaaccgaaatagatgtaaccccgcttacacagttaacatattttgattgtagcgtaaatcctttaactgaattagatgtgtctacgctttcaaaattaactacactacactgtatacaaacagatttattagaaatagacctaacacacaacacacaattaatatattttcaagctgaaggatgtagaaaaataaaagagcttgatgtcacgcataatacacaattatatttattagactgccaagccgctggtataacagaattggatctttcacaaaaccccaaattagtctatttgtatttaaataatactgaactaacgaaattagacgtttctgataacacaaagctgaaaagtttgtcttgcgtaaatgctcacatgcaagacttctctttgtaggtaaaattc

SEQ ID NO: 2910 - DNA, 491 bp, Listeria monocytogenes 4b
  misc_feature (1)..(end): n can be any nucleotide: a,g,c or t/u
attatctgtcgttttggttttggcggactctactttctatgccgcagtatcccaagccccacctttgaagtgtaacgcataatttgacaaaacgattttccttattggaacacccccacttttgtaagtaaaaacgaaaggtgaaaatttcgcattttagtattctaattccaagcaaaacaaaaacccttgatttctcaagggtttcagccgttaaatgattaacgaatttctttaatacgagccgctttaccacgtaggttacgtaggtagtaaagtttcgcacgacgtactttaccacgacgaataacttctaattttgcgatacgtggagtatgtactgggaaagtacgttccacgccaacactgttagaaattttacgaacagtgaaagtttcgctgattccagctccgcgacgtttgattacaacgccttcgaataattggatacgttcgcgagtaccttcgactactttcgcatgtacacctac

SEQ ID NO: 2911 - DNA, 776 bp, Listeria monocytogenes 4b; identical to SEQ ID NO: 1126
  misc_feature (1)..(end): n can be any nucleotide: a,g,c or t/u

SEQ ID NO: 2912 - DNA, 741 bp, Listeria monocytogenes 4b
  misc_feature (1)..(end): n can be any nucleotide: a,g,c or t/u
tgcgctgctactttgtagaattcgttcattgttactggttgggaagttccccaaactttatttttagcatctgttaatttttttgctgccgcttcttcgtctttccaagtccagtcagctgtcggatattcaacgccggctttatcaaaaaggtctttattgtaaattgttacaacgttggagaaactttctaccataccgtattgtttgccatcatatttgaaagcatcgtaggcttgtttgttaagtgtagatggatcaaaatctttatctttttcgatatagcttgttaaatctgcaagtacacctttttcagcatattgcatgaatgtttcgtagttaagttcaaaggcatccggagcatctccacctgcgatttgtgtttgtagtttagtgaaatagtcgttaaatgcgattgtttgaacgttcactttaatatcagggttttgcttttcaaattcttttaccatttcatcaagtgcttttccatcagctggtgcagagaattgataatacgttatttctgttttatcgccactactactgccaccgccgcaagccgaaagaccaaatacagacagtacaactaccattaacaataataaaccttttttcatttgtaacactccttttttgttggttttttattctttcattccgctcattgccattccttggatgaaatattcttgagcaaaagtcctgtgatcgatacactatagtcacgctgctagcgatcga

SEQ ID NO: 2913 - DNA, 751 bp, Listeria monocytogenes 4b
  misc_feature (1)..(end): n can be any nucleotide: a,g,c or t/u
aaattggtggcgggaattaaggattaacccctgaattcctcttattagaaggaatttaacttggtgggttaattccttttttaagcgcggtttaccggaacccaatcctaaaagaattaccaccagtttccacataatttgggggtaaccccttggttctttcttaaccctttcgcgggttaacattttttatttgggccggacatgaatagtctttttaaaaatttgggttttttccgtacttttacttaccggaaccatattttcatttaaaaaaactttaatcaatcccggaaccttaatattaaagtggttttccaactcccccattggggtttttaaccattggggggggcgttgggttaattgaatccttatggaaaatcccattttttggcaggcaaccagaatcccacccccaatttccgaccacttaatccaaaggtttaattttccaaagggcttgggaaccgttttattagcccctttaacaatggccgcattccgggttttaaccaccttattcaaccccaatttgggcaaaaaaagggtggccgccaattccaactggaaccgattagccgaattcctcttaaattttacaacttgaatttggcaaccatttccttccggcctaccgattaccaaaggcaacccggggatatctaaaaaccattcctcattcctttaaccttaattaaattaagccggaacataacgtctaaaatgggttggatcatcgcattacttt

SEQ ID NO: 2914 - DNA, 1262 bp, Listeria monocytogenes 4b
  misc_feature (1)..(end): n can be any nucleotide: a,g,c or t/u
acggccgacatgtgctggaaagtcaaatccctccttctccgttttaacttataaagacagggggtaggaaactaagcagtgtctttttttgcggaaaaatagcgatagatttgcgtctatatgtatgctaaagttattttgaaagataagctcaagttgcaaataacataacgtaaatactcggaggtgcaaaatgaaggttatccattgggggggtgaaaatgcggactatggctgtttctctaatttctctttacatccaattgtcatagacggcgtgacttacccaaccacagaacactatttccaagcacaaaaatttatagataaaaaaattattaaaaaagtaattaatacgaaaaaaccaatagatgcagcaaaattgggtagaaatagagacttcccactgcgaaaaggctgggaaagtatgaaagacgaagtgatgttaaaagcaatcagagcaaaagtagcgcatcattcggaagtgaaagaaatgcttttatccacagagaatgctattttagtggaacatacggaaaatgatcattattggggccacggcggagaccgctctggaaaaaatcgtctaggcaagattttaatgaaagtcagagacgaatgaactctaaatagtgggaggtagcttaaatggaaacaataaatcatttttttgaatgggctaaaaataataattggcaagtagatttgtctgctgtagagaaaaacttgccagagcagattttaaagaggtatggaaagttgccagatgcttataaggctttttatagacaacttaacctctgtagcaatgcgggtgacacttgttggtttttatcggaagaagattttttagagaatgaggttgacgccttttcgtggaattcttttgaacaaatgagtttagaagcagcagaaggcgatacaaacttagaaaatgaagtaaaactattttggaatgcgcatttaccaattatgatgagtgttggcggttgttatgaatattatgctatcactttaaatgacggaaatattgttcatggttcggaaccagagtttgaagaaagttcgattgtagcagagtcgttcgcggattttttactgaaaatcgtggctggagaaatagtgataagttaaaattaattaggaaatttgctataataagaaaaacgtttcagaaaggaatcgactatggataataaactagaatttacaacgattgatgaatatattacccaagcgccaccggaaacaaaagaagtgtt

SEQ ID NO: 2915 - DNA, 772 bp, Listeria monocytogenes 4b; identical to SEQ ID NO: 1096
  misc_feature (1)..(end): n can be any nucleotide: a,g,c or t/u

SEQ ID NO: 2916 - DNA, 1048 bp, Listeria monocytogenes 4b
  misc_feature (1)..(end): n can be any nucleotide: a,g,c or t/u
ttacccacgcttgttgctttatttgcgctaattcttttcctttttcttctgaaagttctagtgtaaagaaagcccaatttttttcaattaattggatcattcgctgtttaatcgtatctggagcctcttgatctaaagctgatataagcaaattttctggttgatcgggtacaaacgtggctggtgcatgatccattttattgtaaatgactagtgtcggcagatggttcatttcaagttcctctaataaagaaattaccgttgtttcgtgttgcaaatagtctggatttgatgcatcaactacatgaattaacacatctacattggcagtttcctctaaagtagagcgaaaagctgcaattaaagtcgttggcaaatcttgaataaaaccaactgtatctgtcaaaagcgcttgaaatccacccgaaaagcgaatttttcgtgtggttgggtcaagcgttgcaaataatttatcttcttgtaatgttgtttcattcgttagacggttgaaaatagttgatttccctgcatttgtgtaaccaattaaaccaaaccgaaaaacggattgtatatttcttcgttcaatgattcgcttgcggtgttgttcaacatgtgttaattgcgctttgatatcatgcattttttcgcgaatatggcgtttgtccatttctagtttggattcaccaggccctcttgaaccaatacctcctccaagttttgataaggaaacaccttgtccgctaagtcttggtaacagatatttatattgcgcgtatgcgacttgcagttttccttctttggattttgcgcgcatggcaaatatgtctaagattaactgtgttcggtcaattattcgcgcatcaaccgccttagaaatattgcgcacttgagttgcactaagttcactattaaatataacaacgtccgcctcatgcatttccactaaagtagcaagctcttccagtttaccagaaccaatgaacgatgcttgatttactcgttctaatttttgaattaattcatctactacttcaccgtttgccgtttt

SEQ ID NO: 2917 - DNA, 962 bp, Listeria monocytogenes 4b
  misc_feature (1)..(end): n can be any nucleotide: a,g,c or t/u
cctatgggccacctagatgctgcttgagcggccgccactgtgctggaaagacgtggtcaaaatgcccgtttagcagcaaaactaactggttggaaaattgatattaaaagtgaaacagttgcaactgaactaggcatctatcctcgtaatgacgtagaagcgccagaagtggaagatgcagagagcgaaacttatacagaagatgaagagtaaaaaggagaattatcatgcgtaataaaaaaatcccccttcgaaaatgtattattaccggtgaacgcttgccaaaaggcgaacttcttcgtattgcgtattcgaaagacggagcgcttacgatagatcctacaggcaaagcacctggacgcggtttctacattattaaaagtgtagaagtatgcgaaaaagcgaaaaagaaaaacgccatttttcatcaactaaaaatgccggaacaagagtccttttatgatgagttaattacttatgtgaagtctctcgaggaaccaacgaatggataaaaaagcactttccttattaggcctcgctaaccgagcacgtaaaattaccactggtgaagaattagtactaaaagcagttagaaatgggaaagcaaaaatggttctcatttcagaagatatatccgaaaaaaccgagaaaacaatccgcaacaagtgtgaatactacaatgttgtcgtgaaaaaagccggtacccgggaaatgatagggggtgcaatcggcaaagacacacgtgcaatagttgccatacttgataaaggatntgctgttaaattagcagaattactcggttgaatcttatacggaggtgtacgacatgagtaaagttcgtgtatatgaatacgcaaaagaacatcaagtatcaagcaaaaaagtcattgaagcattaaaagacttaggtattgaagtggcnaatcacatgtncacgattaatgannatgcattaagacatt

SEQ ID NO: 2918 - DNA, 704 bp, Listeria monocytogenes 4b
  misc_feature (1)..(end): n can be any nucleotide: a,g,c or t/u
ggcttttagttctgcttccggtggcgctgtaatcacataaacctctaacggttttttcgcaggtattttgatgtccgctttttctagcgccagtaaaatacgttccacaccaataccaaagcccattcctggtgtatctgggccaccaaactctctcactaaaccgtgatatcttccgccaccacaaagcgttgttttcgcaccaaatccttcttctacgctcataatttcaaatgtcgtatggttataataatctaaaccacgaaccatcgttgaatcaatttcaaacggaatctctagcgcatttaagtatttttttacattttcaaaataggcaacagattcttcatttaaaaagtccagaatagatggtgccgattgaattagtggattgtcatgatcttttttacagtctaaaatacgcagtggatttttgtgtaaccgcacttggcattccgcacaaaattcatcaatatgtggttcaaaatgcgcaaccagggcttcccggtgttttagacgactttctttatcaccaagactattaatgaccaatttaatgtttgttagaccaattttgccgaaaaactccattgctagtgaaattacttctacatgaatagaaggatcatgacttggcagcgcctgaatggccatgtgagtgaaactgacgtggacttgcggcttggaggggggataacgaaaca

SEQ ID NO: 2919 - DNA, 1297 bp, Listeria monocytogenes 4b
  misc_feature (1)..(end): n can be any nucleotide: a,g,c or t/u
gtacaaggaacagaactaaaaccagctatcgtgaaaaaaggatttattattaaggatggctatgcgactagcggcgtaacaattccgggctatacattagtggcaacaccatcgaacaaaaaaggaacatttggtgccagtaatgtaacagttaattatgtatataaagcgaatggttatgcattaattacaacatataaagacacacaaggtaaagacttaaaaccactagccattgatacaaaaacatacaatattaacgacccatacactgcaaaagctctaaacattccaggttatacattaacaactacaccagccaatgaaaaaggtgtatttggcgcaagtgatgaaacagttaattacgtatataaagcaaatgattatacgttaacaactacctacaaagacgcaaacggcaaagaactacaagcacctaaagtagacgcgaaaacttatcatatccaagacacatacaaaacaactgcagcaatcattccgggctatacattagtggcaacacctaagaatgaccaaggtacttttggagcgagcaatgtaactgtgaattacgtgtaccaaacaaatgattacacgctaacttcgacatttaaagatgctcaaggaaacgaattaaaagcagcagaagtagacgcacaaaaataccatattcatgacacttacacatctaaagcagccgtgattccgggttacagtttagaaaaaacaccaacgaacgaaacgggtacttttaatgcaagtgtttttcaagtaagttgtgtgtgtaaagcaaatgattatcaacttttttttacttttaaagatcaacaaggcgncgaagtggcgttaccaacagttgatgcaggagcttatcacattggtgacgcttgtacaacgaaagctgggttggttccaggatgtgggctggtgggtgcgcccggcaaccaacatgcgcgcttccggaacacgcgccgttcccctgctttctgtgtctgcggctgatggtctggtcgggcctctctctcctcccctctcggctgtgtttgccgtcgccgtcccgcgtgccggtgtggtccgtactcggctcccccctcttctcctgcctcgcgcgtggcgctcggcgtcccccccctcggcgtgtgcgtgcccccggtgcctcccgctgtctcgccggcctgtccttgctctgtgtccccccccccctgtgcgtcgctcctcctctgccgccccgctccctccgctccctcgtctcccgccgccttctctctcctcccctcacaaatatagaaaaaaaaaa

SEQ ID NO: 2920 - DNA, 819 bp, Listeria monocytogenes 4b
  misc_feature (1)..(end): n can be any nucleotide: a,g,c or t/u
ccatcttttttcaattctttttaaagtttgtgaattaggttaacctatgcatttattatatgctgatttcgaaagcgtttacaaggagatttcacatgttaccgataacaacattttttcggtaaacatgtgaaaaattcctttacgccattgatttagctgttttctttaataacaagaaatccttttgctgggacaacaagattttctgttacagctcggttgttccaaatatctgtcgctgtattttcaaatgaaattgtgaaatctttatcttcttttgcttgattgaaaaggaaatgcagtttttcaccatttaattctttagaaaatgctgtaatgcccgtttcgctacttgcacctagccaagttaattcgccggatgtgataattgcttggttatcttttcttagggcaattaattgtttcgtaaacgctagcatatcttggttttgcttcgtttcatcccattccatacacttacggcaacctgggtcatttcctccgtccatgccgatttcagttccgtaataaatacacggcgaaccagtgtgcgcgaacatgaaggcaagcgcttgtttcactttatcctcatcattattagcacgagttaaaatacgcgccgtatcatggctatcaagcatattaaacattacttcattcacttgatttgggtagcgcatatattgttcattaataccagaaaccatttgctccggtgtgattttttcttcaataaagttctcaataatcgtttgtgtaaatggatagttcattacggcgtggaattcatctccaagtaaccaaatccacgaatca

SEQ ID NO: 2921 - DNA, 853 bp, Listeria monocytogenes 4b
  misc_feature (1)..(end): n can be any nucleotide: a,g,c or t/u
atattttgtgcaaatccacaaagtgatgaaccaataataaaaataattgtcgcaatcacaaaaatattttttcgtccatacaaatcagacagttttccgtaaatcggaaccgtcactgctgatgttagcaaataaacagaaaaaatccagttcattaactctatgccgtccaactgacttacaatcgttggcatcgcagtactcacgatggtaccttcaatagctgccataaatgttgcgacaaatacggcgatggtaacggcttttacttttgtttgttccaaaaaattccctcccttttcgtctaccgaattatagcatataaaaggactaaattgggaaaaaagttaatcctaagaaatgcgcatattcaagataagcgctataatataatagaagaaagcgaactaaaggaggaatttttttgtcatacgaaccaaatacaaaagaaacaatgcaaaaaattaaagaattaacatctatcccaagcccaactggcaatacagggaaaatcatcgaaaaactggcaaaagatttagatgcttcaaaaatcccttaccatttaaacaacaaaggtggattaatcgtaacgcttcctgggaaagacgacacgaaacaccgtatgctaaccgcccatgtggatacgcttggtgcaatggttaaagaaattaaagcagacggacgattacttttaaccttaattggaggctaccgttttaacgcgattgaaggcgaatattgtaccattgagaccagtgatggagatttgtatagtggcaccatattaatgcatcaaacttctgtccatgtctataaagatgcctggactgctgagcgctatgacaaaaatatg

SEQ ID NO: 2922 - DNA, 1166 bp, Listeria monocytogenes 4b; identical to SEQ ID NO: 1145
  misc_feature (1)..(end): n can be any nucleotide: a,g,c or t/u

SEQ ID NO: 2923 - DNA, 1173 bp, Listeria monocytogenes 4b
  misc_feature (1)..(end): n can be any nucleotide: a,g,c or t/u
gactgggacccgggcacgccggaaccagacgacacttaatgaaagatcgcataagacggaaaccgaatcataatcctatactaccttccgacatccatgccacgagccacgcgcttggtgacaccgccgacctccttaacctcaagaagagaaggacaagaagggaggcgagggagcggcggaatcggcagacagtgggacgcaagcaaacaaaggagacatgggtaacgagagtggccagtgccagaccgcggacgaggtggagagcggggactaggtggacgagccagcgaacatccgaacattgggaatagaccagagcctattttacttcataaccgatgccccaccaagtggttggtcttccaaagcttggcaggaaaccagtaacccgcctttgattttttccataacagaattgcccaccgatactcctcctctatactgtgtttcagtgtaaagtatgcgttttcaaacagactatatcacaagaaaatgattttatcaatatcaattaaatgaaaatgattttcatattttagtgtggatagttgcggaaactagctttaaaaaatgacgttgctgttaaaaataaaaagtcctttcgtttgaaaggactttgttagtttattcgattggtaatttgttgggtgttccaggtttgcgtggatatttgttgggggtttcttttgttttcgtgatgacgtagatattgcgttcgctttcttctactggtagggagaaagcgaagtgttcctcgacttttacgccgaatagtttgatggctttttcggctgtttgcagctcttgctcggcttgggctgctttcattactaggaacgaaccgccttttttgacaagtggcatgcacagttcggataatacgctcattcttgctacggcacgtgcggttacaaggtcctatttttagcggtgcgctttgttttgaccaaatgtttcagcgcgatcatgataaaactgcacataccgtatgcctaattttcctgctcgtgctcaaggaaagtcctcctttctttcaggagtctaccacgcttactctcagatgctggaagcccatctcatggggagactgggaaactcatttctgtctcgcctcctcaaccctcctacttgctcgacccacctgaatctggccgacatgcaccgccaagg

SEQ ID NO: 2924 - DNA, 856 bp, Listeria monocytogenes 4b
  misc_feature (1)..(end): n can be any nucleotide: a,g,c or t/u
ggcaaacttagtggcttagcacattgtattgctttcgctaacaaagactttttaactggagattatttagaagtagatcgtaaaagcttcttacaggcacatgaaattagtgcttactcattcacagctgttgctcgtgcactaaaacacttagaaatgttgacagaagatgcaagtttactaacattaacttaccttggtggggaacgtgtagtagaaaactataatattatgggtgtagcaaaagcttctctggatgcaagtgttcgataccttgctatggacttaggggcaattggtgttcgtgtaaatgctatttctgcaggaccaatcagaacggtatctgctcgtggcgttagcggtttctctgattctatttcactagtggaagaaagagccccactaaaacgtgcgacacaagcggaagaagttggcgacacagcatattacttattcagtaatttatctcgaggcgttacaggcgaagtaattcatgtagatagcggttatcatattattggattttaaagaaaaaagaccgtaagtagttaaaaactacttacggtctttttttggtccattttctggatgttctttaaagtaatattcttttggtgttggtttatagtttgtttgcattggttctttaacgaagtctgctaatacttggtcgatttttacccaaacgcgccagcttaaatgaatcggatcttctaagaaaaaagcatcattttgatattcttctagagagtagtaacggaaaccttgactctcaatttgttcttttgttttagcataatagtcatctaaaccttgtttgtccataccaatgtaatcaatccattttccattgata

SEQ ID NO: 2925 - DNA, 685 bp, Listeria monocytogenes 4b
  misc_feature (1)..(end): n can be any nucleotide: a,g,c or t/u
aaggaaagtcatacgttttttcaaggagtctacgatgcttacttttagatgcgggaagcagattttaattgggagacttggaaaaccagcgccagccccgacatcacaaatcgtatcgaacttagtaaagtctacataaaacgcggcagagatagaatcgtaaaagtgctttaaatacacttctttttcatcagtaatagctgttaaattcattttttcattccattctactaacatttcgaagtaatcgtggaattgttttagttgcgtgtcgcttaattctattcctttttcagcaagtgctgtttggaattgctctggattcatattttttcctcactttattttcgcgatttttgccgtgtttaggatggtagacgggtttggtttatacttttaaacaggcttgtaccatatattttagctcattattttcaagtataagtattttcgttctttttagcaagttcgtattacgtttaacaattatcaaacttgttggcattctctttaaaactttttttggcttgatttacccattttccttctgctgtggtggaaagtccatctatgtaaccctgacaattgctttttatatctgctattttgtcccgtttgatcattttgaacattcgtttgcgattttctgatgttgcatgagtttggctcgccacanacataccaa

SEQ ID NO: 2926 - DNA, 719 bp, Listeria monocytogenes 4b; identical to SEQ ID NO: 1209
  misc_feature (1)..(end): n can be any nucleotide: a,g,c or t/u

SEQ ID NO: 2927 - DNA, 695 bp, Listeria monocytogenes 4b
  misc_feature (1)..(end): n can be any nucleotide: a,g,c or t/u
gctatattttagtaacaggcatcatggtcttaattatgttactatcacttattttatcagggctggcaaacgggctggcttacgataatgcttcatctgtagcagataacggggttccatattatgttctcagcaaagacgcccaagacaaattatctcgatctcagttcccagaatccaaactcgctgatgtgaaaaaagatgcgaatgtaaaagatgctgcggttctcggtcaatctatgcaaacgttaaaacgggaaagtgacgataaaaagtttagcgtcgcacttttcggtattcaaccagatagctttctcgctccaaaaatttctgatggagctaacatacaagtgacaaaacctgacgaaatcgtcgttgattcttccttgaaatcagacggaatcaaaattggcgatgttttgatggatgatattttgaatagagaattaacggttgtcggctttacggaaaatcaaaaatatagccatgctcccgttgtttatattaatatcgcgacttggcaagaaatcaatcctgttttatatcaccaaaaaatcccgcaaacaagtactattgcgattaaaacagaaaatcctgataaaggcgtaaccctttcggataaagatttaacaacgattgatcataaaggtttcttaaatcaaattccaggttattccgcggaacaaatgacgctt

SEQ ID NO: 2928 - DNA, 964 bp, Listeria monocytogenes 4b
  misc_feature (1)..(end): n can be any nucleotide: a,g,c or t/u
tactgtgggcacttcctcgcatgctcgacggccgacatgtgctggaaaggaatacctttaggaacgaggaatagaagcagtgtaatgactgtcagtgctatgaaaataacgaatttggtcttagtcatggataattttcccttggtccattcggatactcatatcacaaagtggttctatgtcttctttatgatgacttgcaataataatagtggctccgcgtttcttttcttctaaaagtaattggttaattagttcaataccttgatcatctatcgcatttgtgggttcatcaagcaagatgacagcgggtttttcaaaaacggcctgtgcaatattaagtctttgcttcattccaagcgaatattttttaacttttttatcaatatgtggagataatcctactctatcaatggcattatcaatatcttcatcgcttgcaatatttttaattttagataatatttttaaatttgtccgcgcatcaaattggggaagtaattccatattttcgataataatgcccatacttggcggaaaagaaatatcatgatgaagttctttattatcaatgaatatcttgccacttgttggtatgattaagccagcaagcgatctaagtaacattgtttttccagatccattttttccgaaaactccgtagattttcccaggctcaaaagaataattaatattagtaagcacttccgtcctcttgattttttttgcaaattaacaattttaatcataaaaatcctccgttatcataaaatgtctgttgttttaaattttttaatagcgactataaacacgcaaagtaaaactactagcaaaataattaaactggtaggtactgagattagtaaagtagatgtattagtaaacggaattaatccagttctaaagcccataccataattaggaagtaataaataataaggccaagtaactgttgtgttttgat

SEQ ID NO: 2929 - DNA, 704 bp, Listeria monocytogenes 4b
  misc_feature (1)..(end): n can be any nucleotide: a,g,c or t/u
agaaaataataatgattctgcactgatactacttgatgatacgatgggcgtcattatcgaacaaaatggaaaaagcgtctatcaatcacagtcaccagataccatttctagtgcatctgctaataaattaattcaagataagacattagataaagctttagaaaaagataatagtgtaacgatgaaatataattttaaaacagaaaaaagctccttaccggttgaaatttctgcacagaaattcaaactagcgaacggtgaaactggtgttgtttacgtttatcagtcttaccatgatattctaaaagtgaacgaaaaaacgatgagtactttgattatttcgggtattattgcgatagtcatcacgtctatcttatctttcgtcttttcttctgcgcatggctttcccgcttcgtgaaatgaaaaaaattgcgattgctgtttctaaagggaactttgataatcgcgtaccaacttatacgcatgatgaaattggagaactcggagtagcttttaacgatatggcaaagcaatggaagtataatgttagcgcccttaagcaagataaggaacagctatccaatattttagttgggatggctgatgggtgttattaaatgtagtgtggataaaacgatcattcttagtatccgccggcagaagattttttacataattggggtctactcacctgaaaataccgg

SEQ ID NO: 2930 - DNA, 1385 bp, Listeria monocytogenes 4b; identical to SEQ ID NO: 1379
  misc_feature (1)..(end): n can be any nucleotide: a,g,c or t/u

SEQ ID NO: 2931 - DNA, 1344 bp, Listeria monocytogenes 4b
  misc_feature (1)..(end): n can be any nucleotide: a,g,c or t/u
ggattatacagaagacccagaagataaataataactaattttaatcagatagatgcgtccatttttgtggaaaagtgtctgtctgattttttttagcctacttaatggattgatggcggtttcataaaataaagacttgacttctatcgccatcattagtagtattttatttgggctcccttttatagggacggatatttatgagaatcagcgctcccttacttttaaaagtaggcggagtgttttttattttggtttacaaaatacttgaaattgtgatttgtgtgctagagagataatcacaatattgttttatctggcaatttcccaccccagcaggaaaatcgtcagaccctgcaagtttttcatttcaggaaggagtagatttttttaacatgacaaagtatattttcgttacaggtggcgtagtttcgtcaatcggaaaaggaatcacagcagcatcactcggacgtttgctgaaaaatcgtggacttagtgtaaccattcaaaaatttgatccatacatcaacgtagatccaggaacaatgagtccataccaacacggggaagtttatgtgacagatgacggcgcggaaacggacctagaccttggccattacgaacgttntatcgatattaacttaaataaatacagcaacgtgacaactggtaaagtttactcggaagttattaaaaaagaacgtcgcggggattacttaggtggaacagtgcaagttattccacacattacaaacgaattaaaagaccgtgttttccgtgcagcgcgcatgaccaattcagatattatcatcactgaaattggtggaacagttggggatatcgaatctttaccattcttagaagcaattcgccaaattaaaagtgatgttggtgcagaaaacgtactttatatccacacaagtttaattccttacatgaaagcagcctggcgaaatgaaaactaagccagcacaccatactcgcaaaacagcctttcgcacttacgaattcaccgcgacacctatcgctgctccctcacaccccctcactccaccccaattgaccgatgtgacggcggtcttggggggctgtctgagcttatggtgtttacttggtcctttggcgtcgcgcctttctttggcgcgctgctctgtctcgtgttcggcccgggggtttgctttttctgtttcttttccccttttccccctccccccctccctcccgcccgtcccccgcctcgtccccctccctcgttctcggccttctcctctcttcgtctttgctgtcttcccccccccgccccccccgccccctcgcgctcccacagcctcccccacttacaca

SEQ ID NO: 2932 - DNA, 642 bp, Listeria monocytogenes 4b
  misc_feature (1)..(end): n can be any nucleotide: a,g,c or t/u
gggttgccaagaaaacaagaggagcggagacgcgcagggaaaggcaagcgaggctcacaataggggcaaaggaaccctctaaatgcaggctcgaacgaccgccagtgtgctgcaaagatgttttgcgttatagtatagtagccataggacaaaggcgactgcccggaatacaaatatttcagggtagtttttttgtgaagtggggtcttggagatgtattttttatatgtaggggtttttggcgcattaggtggtatgtgccgatatgcaatgaacttgtggcttggtggcggggattttccttctgcgacattagcagttaatttaataggttgttttttgttggcttttcttatgcaatttttggcagaaaaatctcgtatttcattggtaattttgaacgggattgggactggttttattggcgcgtttacgactttctcggcttttagtgtagacacaattcaactagtgcaaagtggcgcatggttatttgcggttagctatgtgttagctagtttcattggtgggcttattatggtgaagtttgggcggatgcttagcaataagcttttgaatcgaggtgagcatcgtgttagttaatttcgtacttgtaggatttggagcggctcttggtgcgat

SEQ ID NO: 2933 - DNA, 783 bp, Listeria monocytogenes 4b
  misc_feature (1)..(end): n can be any nucleotide: a,g,c or t/u
acatagctcgctgctcgagcggccgacatgtgctggaaagcggctaccatatcgccatagacgatgttagttgcggattgaacagcctagagcgagtgatgagctacctaccttacataatagagattaaattctccctcattcatttcaaaaatataccattagaagatttgctactattcattaaagcttgggcaaattttgctcagaaaaataagctcgattttgttgttgagggaattgaaacgaaagaaaccatgactctactagaaagtcatggcgtctcgatttttcaaggttatctcgttaataagccgtttccggtttgaaaactatctatttgattgagtagattctcgtgcgagctaatggtgatgggctttttggaaagcagtagtccgctttcccgtagctcttctaacacttcagttactctagctcgactcgaacgacaataatcagctaagaaagtttgcgtgacatagactggaagctcaattgccccctctgtttgatgcaaatgaagtaactcaataatttccaccaaaatacgcgttactttgactatgggtgcttgattaatattcttgtaattttttgatgtaaataaatatctgacaataacttcatcaagtataagatggaaaaattgtgggtttgcatataaataattgagaagaaactcgcggtcaataaatagaacggtaccattttctaatgcgcgaacacgatattcagtaagttcaggtgctgttttagtttcgagtaaactttccattccaa

SEQ ID NO: 2934 - DNA, 952 bp, Listeria monocytogenes 4b
  misc_feature (1)..(end): n can be any nucleotide: a,g,c or t/u
tggagttgtttctaatttatccgcaatagcaagaagtaattcgcgaagtcccgtttttgttaccgcagaaattgggaataccggaatatcttcagcaatttttgttttaaattcgtttaaattttcttctgcatctggcatatccattttattagctacaataatttgtggacgttccattaggcgcaagttgtactgttcaagttcattattgatagccatatagtcttcgtatggaacgcgtccttctgagcccgacatatcaatgacatgcacgataacacgtgttctttcgatatgacgtaagaattgatgccctaaaccaacaccttgactagcgccttcaattagacccggtaaatcggccataacaaagctacgaccatctcctgcgtcaaccattcctaagtttggaacaatcgtcgtaaagtgatacgcagcgatttttggtctcgcagcagaaacaacagataatagggttgatttaccgacacttgggaaaccaactaaaccaacatctgctaacactttaagttctaattgcacatttcgttcctgtccaggttctccgttttcagaaagttctggagccggatttgctggtgttgcaaagcgtttgttaccacgtccgccacgtccagcttttgcaataactgcgcgttgaccatgtgcgactaaatcagcaataatctcacccgtatcaatatcttttacaatggttccttgtggtactttgacaactaaatcttctgcgccgcgtccatgcatacttttactcatgccatgttcgccgagctctgcttgatagatagattcggttgaaaagcggaaatcaaccaatgtacgcagaccttcatctactacaaatacaacgtctgctcctttaccaccgtcaccgccagcaggaccaccgtttggtacaaatttttcgcgacggaatgctaccataccg

SEQ ID NO: 2935 - DNA, 768 bp, Listeria monocytogenes 4b; identical to SEQ ID NO: 1082
  misc_feature (1)..(end): n can be any nucleotide: a,g,c or t/u

SEQ ID NO: 2936 - DNA, 800 bp, Listeria monocytogenes 4b
  misc_feature (1)..(end): n can be any nucleotide: a,g,c or t/u
cccgtgcatgggccaccagtgtgctggaaagtgtcgaacattatcgactaaggagttgtaacaggcgatacagactacatttggagcactggaatgcaaatgttacttatatcatttgcttcagttattttgtcggtcatcgtcgtttatctcgcatccagaatttcgatgggattcgggaaagatttacgcgataaaatttttacaaaggtagaggacttttccttacaagaatttgataaagtaggaacttcctcgctgattacgagaacgacaaatgacgttgttcaaatccaaaatgtactttatatgatgatgcggttaatggtgatggcgccaatcatgctactcggcggtattattatggcagttggacgagatgcgaaattatcgcttatttttgtcgttgttttaccgctactacttctattagtagttattcttggcggaaaagcaatgccgatgtttaaatcgcttcaaaagaaaatggacaaattaaaccgcgttattcgtgaagggttaaccgggattcgtgttgtgcgttcctttaaccgcaatgaagatgaactcgaaaaatttgaagaagcaaacgctgactatgctactacggcgattaaagttaaccgactgctatctcttatgagtgcattaatgatgctactgatgaacttaactgacattgcgattggctggattggttcgatttttattggcaatggtgatatgcaagtatgggacttgatggcggtgattgcatgccgcgatgcagatgatgatggcctggatgatggctgggtggg

SEQ ID NO: 2937 - DNA, 870 bp, Listeria monocytogenes 4b; identical to SEQ ID NO: 1345
  misc_feature (1)..(end): n can be any nucleotide: a,g,c or t/u

SEQ ID NO: 2938 - DNA, 732 bp, Listeria monocytogenes 4b
  misc_feature (1)..(end): n can be any nucleotide: a,g,c or t/u
accgaagccgtaattcaaacgatttcattaaataataaatcaagtaatccatgccttgaagtgacaaaaatatcactacaaagaaagtatctaaaatcgcagcagtaatcgagttttgtgtcccgtaagaaggatcaatcaagtttacttgcgaaaatcctaaatcataatcaatcataaaaccagccatttttggaattaccgcaataatttccaccaatttcgccagcgctaatccaaaaaccacttcagacgttacccggagtagcaaatctggtagcgtcgttataccagaaacatcgacccctgttgccactggaatggaaatcgccatcccaaaaaccactttgacactgttcggaatgtttcgcccttttaaaagcggaaagaagaataaaaaactggcaactcggctgaaaacaatcactaccgcaaggaaaaattcaaactccatgtttacaccctaatcatcaggggtaatttggaaaagattcctacaaacaaatccgtcatgtgttcaaacatccacggtccaagaataaatagcgccactacgaaagcaacaatcttcggtaaaaacgtcagcgattggtcttgaatttgcatcattgccatcaatatcgccaccacaatcactaccacgatacaaatgagcgacaccggcaaaataagcgccagcccactatagaaaaaatcttgaaaaatttgcgtaatcggcgttaaattcatttt

SEQ ID NO: 2939 - DNA, 513 bp, Listeria monocytogenes 4b
  misc_feature (1)..(end): n can be any nucleotide: a,g,c or t/u
acaggacttagtgccgctagaaatagatatgttaacggaagaagttattttgaaagatattgttgggtatgagtatgtaatcgaatttagagatattatagatgtggaattattgtaggaacagtcgtttattcgactgtttttcttgtcaaaaaagtaatcagtatgtataatggttgttatgacaattattgttacgacaatagaaatgaggataaatctgcgcgagaaatcccagcaaacattctttcacaactcgcctccacgatatcgcggagttcattcgtctcttttctccctttgtccgttaaagataaaagtgaaatccgtctatcttctgtactcacttcccgcacaacaagctctttcctaagtaaaacatcgacaatccgattcacggttggcgtgtcctttttcgtccaaagagcaatctctttttgcgaaatcggctcgttcgcctcaatcccctctaaaaccgaccattgctctggtgtcacatcataacttgcaatc

SEQ ID NO: 2940 - DNA, 527 bp, Listeria monocytogenes 4b
  misc_feature (1)..(end): n can be any nucleotide: a,g,c or t/u
tgtggtaaaacaacgctgtgccagaaattacatggatatgatattttatataaaaaaacacaagctgtggagtattttcaagaaatgattgatacgccaggtgaatttgtacagcatagacaactctacagcgcgctcactgtgactgcggctgatgcatctgtaatcgcaattttacagagtgtaacggagaagaagcagacgttttcaccgatgtttgccagtatttttgctaaaccggttattgggattgttacaaaagtggatttagcggaatcagaaaaagacatcgagcgagcagagcgggaattacgcatggctggcgcgaagcatattttttatatttcttcggtagaggaaactggaatagaagagcttcgggcatatttggaagattaattttaactaagtgggggttattttatgcctcaagtgagggatttatctgtaattgatgtgcctggtggctgtgttttgacgagctgtgatattagcgctgggtttggtgagaaagtgcatgatggttt

SEQ ID NO: 2941 - DNA, 1326 bp, Listeria monocytogenes 4b; identical to SEQ ID NO: 1332
  misc_feature (1)..(end): n can be any nucleotide: a,g,c or t/u

SEQ ID NO: 2942 - DNA, 775 bp, Listeria monocytogenes 4b
  misc_feature (1)..(end): n can be any nucleotide: a,g,c or t/u
ttaccgtctgccagtgtgctggaaagagtgtgatgcttcgagagattagagagacttaaaaagtttcactgtatttgtgtatcgaaacttccaaacctctctagttctctagggaggttttttattggcaaaaaatggagaggataaggtgataagtatggtaaaggcaattagttcaaacttggggtatccgagacttggagagaaacgtgaatggaaacgtgcactagaaaagttttggaatggcacaatttcagaaaaggaattattggcggaaacaaagattctaagattacatgcgctaaaaaaacaacaagataaagggattgatttgattccagttggtgactttagtttttatgatcaagtgcttgatacgagtgttacatttgggattattccaaaacgttttcagcatgatggagggaaagtttcgctaaatacatattttgatattgcacgtggtaaaaatgacgcggtggcctctgaaatgactaaatggtttaatacgaactatcactatattgttccagaactcgctgatgcggagccgaaagtgttggataatcgggcactatactattacgaagaagcgaagaaagagcttggtattgaaggaaaaccagtgcttgttgggccaattacttatttaaaacttggaaaaaatagcgatgcnnnnnnnnnnnnnnnnnnnnnngttctacggtcagtagtagatnagtagctaagtgacgtagncnaaaggaaagccctntcntctcttcttctngccccc

SEQ ID NO: 2943 - DNA, 721 bp, Listeria monocytogenes 4b
  misc_feature (1)..(end): n can be any nucleotide: a,g,c or t/u
cggtggcgtagtcctcaacctgatacgcctgataggctaccgcacgatgttgccaggcgctcggttgtcgttgttcggcctgaagccatgcatacaacgccacaccgggtagcgtgtcccgataacactttgccagacggttccaggcggcggcatcgtaggaaggcgacatatcgcccagcaagcgaactattgccgggcaattatctgcaatacccggcaactgactttgccactgacgttgctccgccagcggtaagggtttcgataaaatcgccaccttcgccggcgttgccaggtaaggatgactttccagcagagacgccagtcgcgccattaaagtctggctgacacgcgcatcgccctggaaaggatagcgttgcagcaataaatcggcagcttcgcgtgactgctcgttctgcatcagttgccaggttagttgatccaggcgggtaagatttgccggttcttgctgatacagcaatcgtgccagacgcagagcttcagccttgttacgggtcgccacgctgacagcataacgctcctcaagcatttcattggcggggagggtggcgagcagtttttgcgctgcgtcgtactgaccttcttttaacagcaccggtagcgtcgcgccaacaacatactggcggttgtcggcaaactgtaccgtataattcgccaacgcctgaacggggttagcgctgtatttagataacagata

SEQ ID NO: 2944 - DNA, 1234 bp, Listeria monocytogenes 4b
  misc_feature (1)..(end): n can be any nucleotide: a,g,c or t/u
ctagcaagtctttgttaatgtatttcacacctatgatgttattatgggacctagttccccgccaacagcatttagaattgacgcaatgattaatgatccaattacaatgtattccaatgatattttgactgttccaattaacttagcaggcgtaccagctatttctgttccttgtggattctcggatggtttaccagttggcttgcaaattatcggtaactactttgaagaatccttactttacaaagtagcgcatgcttttgaccaagaaccaccattccataaagaaaaaccaaacttataggaggcgtagcaatgaattttgaaacagttattggacttgaggttcacgtagagttaaaaaccaattcaaaaatattttcttctgcgccagctcattttggagcagaaccaaatacaaatacaaccgtggtagacttaggtatgccaggtgttttaccagttttaaataaacgtgcagtggaatttggtatgaaagcggctatgccgattaactgtgaaattgctaaacatacaaaattcgaccgtaaaaactatttttatccagataatccgaaagcataccaaatttctcaattcgataaaccaattggcgaacatggctggattgaaatcgaagttggcggtaaaaagaaaaaaattggcatcactcgtcttcatttagaagaagatgctgggaaaaatacccatacttctcatggttattcgttagtggatattaaccgtcaaggaacaccacttatcgaaatcgtttcagaaccagacattcgttctgcagaagaagcttatgcctacttagaaaaattaaaatctatcattcaatacactggcgtatccgatgtgaaaatggaagaaggttcaatgcgctgtgacgccaatatttctatccgaccaatcggccaagaagaatttggcgtaaaaacagaacttaaaaacctaaactgcttcaacaacgtacgtaaaggtgtggaatatgaagaaaaacgccaagctgaagtgcttaagtctggcgggattatcgaacaagatactgcgtggggtggaagaagcaactggaaaaacctgtgggatgcgaatcaaagaaggatgcgtcgatgctcggcgtgggccagaaccggatgggcgggatggatgcatggctgacgctggggaagaacgtgtagcggctgaatgtcgggtctcgccacttactttatttagcaattataaatat

SEQ ID NO: 2945 - DNA, 702 bp, Listeria monocytogenes 4b
  misc_feature (1)..(end): n can be any nucleotide: a,g,c or t/u
cagctggtactgtcgttcaaccatatgatcgagcgtattgaggatgtctttacccgccagtccaatttctcagcggatatcgctcacgaaattcgcacaccaattacgaatctcataacgcaaaccgaaatcgccctcagccagtcgcgcagccagaaggagctggaagatgtgctctactctaatctcgaagagctgacgcgaatggcgaaaatggtcagcgatatgctgtttctcgctcaggccgataacaaccagctaatccccgaaaagaaaatgctcaacctggcggatgaagtcggcaaagtgttcgattttttcgaggcgttagcggaagatcgcggcgtggagttgcggtttgttggcgacaagtgtcaggtcgcgggcgatccgctgatgctgcgtcgggcgctaagcaacctgctttcgaacgccctgcgttatacgccaaccggagagacaattgtagtgcgctgtcagacggtcgatcacctggtgcaagttatcgtcgaaaaccccggtacgcccattgcgcccgagcacttaccgcgattgtttgaccgtttctatcgcgttgacccctcccgccagcgaaaaggtgaaggtagcggtattggcctggcgatagtgaaatcgattgttgtcgcgcataaaggcacggttgcggtaacgtcggatgcgcgggggacaaggtttgttata

SEQ ID NO: 2946 - DNA, 955 bp, Listeria monocytogenes 4b
  misc_feature (1)..(end): n can be any nucleotide: a,g,c or t/u
agcgccttatctcctgaaaatttttgaatttccactttaccattcgtcgttattcccgcatccatatcaaaattctcactttttaaattaggtacatttactgaagctatccctgttttatctggcttggaattaagcgtcgtatcattgccttgatttgcttttgtttaaataaaatcattattcggtagggtaaatttcacttgatagtcccccggcaaaacatctgtgaataaataagagccgatattattcgtggtcgcactttctttaaacacaccatctttcgttaataaatctacctttacgaaaggagcaggttcttcgctatcttgttgaataccatccccattaaaatcgtaccaaacaacatcgccaatttttgcgccatttacattaatatacaactgaatatcatccaaaaaatttccgctggtaagtgagccacttgctgttgaaataggattgaaagttagccttgtgatagtctgtccttcaggcactatataattcccttcaaaactcccccatgtttctccatcagaaactcgcgacacttcggtttgactttctggtgagccaataagtaaatcagccgtgtctacccccatgcgcccccggtgtgagaacttccaagttaaattggaacctgggattgtccgaatgtcttgataaactggaccaataccatccgagtttaattcaataaaattgtttccagaaaaagcaggcacattgtatccattaccattttgccatacttcaatattcccagttggattagttgttccccaggcctctacacctttttgatttacttgccaaacatctgtcgtaccagcatctacaccataatcctcgatatcaacatcttcaaaatcattatttttaatggcattatgcacattaatgtgaactgctttaatgtcaatagaaatataacctattgtccacg

SEQ ID NO: 2947 - DNA, 696 bp, Listeria monocytogenes 4b
  misc_feature (1)..(end): n can be any nucleotide: a,g,c or t/u
tccagtgtgctggaaagaatgaattatgaagtgaatgtaaatggcaaatcagcttatacagttgccaaagactatttgaaagatcaaggtattattaaataaaaaagcgaagtggtttttacgccacttcgctttttttattgtctaattaagtttttgactttattaatgtttggtttgtaaaaacgacaatgtgtttcaaattctttgttgaattcagcagctctttgggttagtgattgctcgtgatcaagcatcaagccttcttcaagtagtggtctaagtgaaataatttgatcgaaaacaagaccggcatttgtgtcacttagaacagataccattttacttaacgctttttgtttgtcagtaggtaattctttttgatgaagatggaaccattttgctaattgtttgcgattttttcgggttgcttctaaataaatactttgcgcataagctgctttagcaaatgcaatcgataaattttcagcagattcccagtcttcttctagaatttcaccttgcattttgattttttgattgagtagagtaatatcttcttgataaacatccattttgcgttgttgttgcttataaacctccatcgctaaattaagttcatcaatagttggctgcattttttcaccaaaaatagtattatcatttgaaatcaattgtgtttgaaatattttttca

SEQ ID NO: 2948 - DNA, 1155 bp, Listeria monocytogenes 4b
  misc_feature (1)..(end): n can be any nucleotide: a,g,c or t/u
ccgagatagctgataatgtcttcaatgatacagtcgacatgccagcggaatcgcgcgtagtgatggatttcacgaaagtcccagccccgcgtcgtctaataatcatgccttcttgtacaagcatatccagtgcttttttgacagtgagcttgctgcaatcatacgtgcgagccatactgtccccatcaggcaatttctcgttaatttcgtatttgttttggttgattttatcacggatatctatgtatatttccatgtatttagccattcccgacattttattggctcctttactgatgtaataagcatagtataccatatacttttacaaaaaggtatccctataaacaaaagtatatatcttttaataaaagtattgttttttaaataaatgtatgctatatttattttgacaaaagggaggccataaaaaatgaaagaattattaacgtttccaaaagatttttggtggggatcggcgtggtctgcggaacaagcagaaggtcgcggcgacactggtaaggcaaaaactgtttgggagcattggtttgaaacagaaccgaatcgcttttacgaaggcgtaggttcagaaattacaacagatcattttaatcgttgtaaagaagacgtgcagtggatgaagaaaacaggacaaaattcggtccggatttcgatttcatgggcgcgaatgttggctaatgatggcgttggcgaagtgaacccgaaagctgttgcgtgggatggggatggactggctggaatgaatgaaggcggggttgagcgctggggcggctggtgtggattcctatgttccctttgggcttcgttatctcctgcggctgcttctttttaatcttccttttcccttctgtttttcttcttttttctttcctcgtttgtttgtctggttttcctcgctcgctcttgctttctctctgtttgtgcccgtcctgtctctcctctttctccctctctgctcttctgcttgctgtttcgctctttttctttccctttgtgtgctgtcgtgtctgtcggtcggtttgcgttgttgtctgtgtttttttcctttcgcctcttctgggttggtgcggcttttgttcgttgtgcgtctttttgtggttggtgtggtatttaataataataaagataaaaaaa

SEQ ID NO: 2949 - DNA, 995 bp, Listeria monocytogenes 4b; identical to SEQ ID NO: 1194
  misc_feature (1)..(end): n can be any nucleotide: a,g,c or t/u

SEQ ID NO: 2950 - DNA, 817 bp, Listeria monocytogenes 4b
  misc_feature (1)..(end): n can be any nucleotide: a,g,c or t/u
gcgctcggaaaaattaacgaaagaaattttcttaacttgaccaaatacacttatcgctcgaaaaccgtcactccatgtccgaaattatcgctattttaagcgaatcttatattgaaatcacgcaaagtggtgttgttaaagacttttcctattacaaatcgctaactacacttggcgatagcgctctagaaatcataaattacgatataaaaattttggatgaaacaaaggtcttatcatattataaactaaaaaatctaagtgaaaacagctatacaatgcgaagtaacatctggattatcgaaaatggctcgtggaaactcacctttcaccaaggcacaaaaatcgtatagaaaaggaatttgactaaaagccaaattcctttttttattttcgtttacgcaataatatcacactagaaactgctaggattaaacccctaaataaactagaagtcattccactatcccctgttttcggtaaatttctattctctttagctactatcggattaattgcagtagtctgtttcagtaaagtttcagtagcttgaataactgatttcactggatcaattgaatttacctgattcgacgggtttactggagtgactgggtctaatggatctaccggatctaccgggtctaccgggtctaccgggtctaccgggtctaccgggtctaccgggtctaccgggtctaccgggtctaccgggtctaccgggtctaccgggtctaccgagtctaccggagtaatcggatcaacaggctactccaacagtggctgggtgatcgtaccagaatacgttgctgctaca

SEQ ID NO: 2951 - DNA, 983 bp, Listeria monocytogenes 4b
  misc_feature (1)..(end): n can be any nucleotide: a,g,c or t/u
agcaactgcgagcggccagccagtgtgctggaaagagaacaatttgtgaaagatgttgttggatttggcgaaaatatagtagctaagcctacttcatttatctcaggtgcagttgatggagtggttgatttaaaaaacacttatactgaaaaccaacatctaaaagaacgtttagaagaattggcacaacttgaaagtgaagttgcagacttaaaaaaagaggataaagatttaaaagaaagtcttgatattacggatagtattcgtgactacgatccacttaatgcttctgttatttctagaaatcctactaattggaatgatcaagtagaaatcgacaaaggttcaagtgatggagtaaaaccggatatggcagttacaacaccaagtggtcttattggtaaagtaacaacgacaggcgctaaatcagctacggttgaattattaacttcgtcggatgttaaaaaccgtgtttctgctaaagtgcagggcaaggaaaatgcattcgggattatcaatggttatgacagtgatactaagttattagaattaaaacaattaccgtatgacatgaaatttaaaaaaggacagaaagttgttacttctggactcggtggaaaattcccagcaggtatctttatcggtacaattgaaaaagtagaaactgataaaatgggattatctcaaaccgcgtttattaagccaggtgctgacatgtatgatctaaatcatgttactgtgttgaagcgttcagcggaagcagggacaacggatgacgatacaactagttcagacacgactggaggacaataatcatgaacgttaagaaaaacattgcacttcctgcaatcatggttggaacctttattcttgagggtgtttctagtcttcagtttgcgaatggtctgtttaatgatagacatctttttattccacattttttacttattatgntgacgattatgacttggttttataaacga

SEQ ID NO: 2952 - DNA, 989 bp, Listeria monocytogenes 4b
  misc_feature (1)..(end): n can be any nucleotide: a,g,c or t/u
tccgcttactttgggtgtttacttggaagcaagcactttgttgtatttttccaggcattatctttatttcgcttgcacttacaaaattgattgatattccttttattgcgcgctacgacttacttttgattatttgtcttggaacgcaagtgctacttataaaattcggtttagaaacatgggatgaacttaaggtaattatggtttttcatcttattggacttggacttgaaatctataaagtacatatggggtcatggagttatccagagcctggtttaatgaaacttttcggtgtgccgctttatagcggttttatgtattcaagtgtggcgagttatatttgtcaggcttggaaaagatttgatcttaaaatgacaaattggccaaatatctggttagtaagtagcctttgcataacaatttacgctaattttttcacgcatcattttataatgttttttcggtggattttgattgttttagttctcgttttattccgaaaaacatatgtttatttcaaagttagttcgactcaactcaaaatgcctttatctttttcctttttatgcatcgcctttttcatttatcttgcggagaacattgctagtttttacggagcttggtcttatccagaccagctgattgcatggcgtccggtgcacgtttcaaaaattaccagtcggcatttactcgttattattagcattataatccgcgcccacctcatatttcctcatcgaaaatctcaccacacttctgtccaaccccaaagcgaggcccccctctttttctgttctccctcttccccctattgcccaacacccattttgccttctcccacttaacgcctcgtctatctttcgcactccttatgcccctatctctacctccctctctctcctcgcgccccggcccttaccgttaaacttccctgtgtactccacctcttccacttccccactgcatccgcccaccaaccaaaaaaa

SEQ ID NO: 2953 - DNA, 1182 bp, Listeria monocytogenes 4b; identical to SEQ ID NO: 1161
  misc_feature (1)..(end): n can be any nucleotide: a,g,c or t/u

SEQ ID NO: 2954 - DNA, 671 bp, Listeria monocytogenes 4b
  misc_feature (1)..(end): n can be any nucleotide: a,g,c or t/u
aagcagttgctgaattcttaaagtcagtgatcccagcccttgcaaaagaacctaaatacgaagcaaatggtattttagaacagttaacagaacccgaacgccttatcagtttccgagttccatgggtggatgattctggcacagtacatgtaaatcgcggttaccgtgtccaattcaatagcgcaattggtccatataaaggcggtcttcgtttccacccttccgttactggaagcatcgtcaaattcctcggttttgaacaaatcttcaagaactccctaactggcttaccaatcggtggcggtaaaggtggctctgactttgatccaaaaggaaaatcagactcagaagtaatgcgtttctgccaaagttttatgactgaactacaaaaacatatcggtccagatacagatgttcctgctggtgatattggtgttggtggtcgtgaaattggctacttattcggtcaatacaaacgtcttcgcggtgcgtatgatgccggtacaattacaggtaaaggcctttcttacggcggaagtttagctcgtacagaagcaaccggttacggtcttgtttatttcaccgttgaaatgtagagcaccgtgaaccattccgcaaaatgcgtctgtcagacgtcatatgatgaaacacatgctaatgtgatgttagtc

SEQ ID NO: 2955 - DNA, 789 bp, Listeria monocytogenes 4b; identical to SEQ ID NO: 1179
  misc_feature (1)..(end): n can be any nucleotide: a,g,c or t/u

SEQ ID NO: 2956 - DNA, 1357 bp, Listeria monocytogenes 4b
  misc_feature (1)..(end): n can be any nucleotide: a,g,c or t/u
agaaagagtggagggggggggtgaggagaaaggaaagagggggtggggggggggagaaaaaaggaagggggaggggaggagtgatatgagggtggggggcgggcgggcgcgggaagagggggatgtagaatactaatagtaatcaagcgtggggaggagaaggagagggggaggaaagaataccggaagcgaaagcgtaacggtaaagagaggcgagcgcggggggaggaagggaggaggggatagaggaggggagaggggaggggggtgggggggagaggaagagggagagaggggagacggcggggggtggagggagcgggcggagagatttggtgggggggggggggaggcggaatggggggggaagaaagggggaggtgggggcgaggcgaggggggaaaaggggaggagggagataagaagaggaagatagggggggagggtacaaaaagagggggaggtggtgtgtgaggggggggggtgggggagggggggaaatggggggggggtaagggtagtaagatgcaaaataaaaggaggacggagttcattaatatatagaataagcaggatgcccacccaggaaaacatgggcagaactttttcagattgcggtgtgaagctcggaaggatttagcgcaaacgccaagaggcatcctacaggcggaatgttgctttttccaggtcattcttttgtcataaaaatgccccctaactatggattacagccagccaatattacttaactggtactaaaagtgtgtagaactgaaatagatcatccttctctttcaaatcatagctgtactctagtcactgtaactgttctgtagccagcacttgtcagttcttaagttgtatactagggagaataggtgagatctattttctctcttcttacgcgacataagtatgtgcagccgcaatacatagagaatcctatatgtttgcagcttacatacgttcattacgtaagacacgggcagcggcaaagcgccaacagacatatcttttaccgtcaactcagcattgccattatcgacaacttccggtgagaatttcaagcgtagctcgactggttcaccaaaaataccagcttctgcagccaaattaacattatttgcgacgaaaactttataaccgatatcttgatctttgctaaaatcttctatatcagaactaatcaattggtttaagtcagcttttgttgtactcgttagaaattcaaccattgatttattgctaataagggatggcgagggttcatcttgcgggctgagtttgaatactgctacataaatccagccagcagaaattagaagtacactaattaatgtgatacatacccatttcc

SEQ ID NO: 2957 - DNA, 1173 bp, Listeria monocytogenes 4b
  misc_feature (1)..(end): n can be any nucleotide: a,g,c or t/u
actaattgaaacaggcgaagtaacgtttgaaaatcgtgaatgggaacgccgcggtgatgtagcgcgaatttttgatcgtgaaacaaaagagttggcgggatataacatctttaatagctccaactattttaatattactgcaaatggtaaggtggatttgacggaggaattagtagcgcaaatgaatcaagtaattgaaaaagctggattcgaaccggaaatcgtggctgatttatctcctaaattcgtcgtcggttatgtggaatcgaaagaaaaacatcctaatgcagataaattaaatgtatgtaaaatcaatgtaggggatgaagtattgcaaattgtatgcggtgccccgaacattgacgctggtcaaaaagtagttgttgcaaaaatcggtgcggttatgccaagtggtttaattatcaaaccatctaatttgcgaggagaagattctttcggcatggtatgtgctgcgcgtgaacttgcgattcctgatgcgcctacggaaaaggggattatggttctggaggaatcggctgtggttggagaagcttttcctgttaatttctaaataaatgtttaattttgagcgtctgatgctatatcgggcgcttttttagttgctatttattagatattgtgaaaacgccttaaatgtagaacaataaaatgttaattgtatacaaaatatgcataaatcgcacaaaaatgaatcaattttacctttataacaaaaacttataccgcgtttgaaccctctattaccaaggtattataacgaatatggctcgaaaaaaggcgaattcacaattttgtcatagattattttgtttttgtctgttaaaatcaaacaagaaaattaaatttagggtgataatgaatgggatggtttaaagattttttctttggcgatatggatgaggaaatagatacatacgaagatacgtcttcacgaaaagtagaaaagaaagcaaaacaacgagcaccagaagtagtgcaaaaatcaaatgtaacagcaattaaaacgaaagaacgtactataaggaacgaacgaccagttgcttacaaagcagctccgaaacaaaaacatatgcaaccagtgaaacgacaaatgaaaacgcaaatggtaaccagtatccaaaaggcgaatttcgttttccgttaattccagat

SEQ ID NO: 2958 - DNA, 703 bp, Listeria monocytogenes 4b
  misc_feature (1)..(end): n can be any nucleotide: a,g,c or t/u
ttttatgacgcgattgtctggggtgatcattttgattggtttagttgtatgtggtttttcgacattgccgagccgttcaattcgtttttctaaagctttgatggtactgtgttgtttcttttgttgtgtgccttttccggctttaaacgcgctggcttctttgttgtttaggcgttttccaggtttgacaatgcgacctgcttcgatttcatggtgtgtttgggaggcttgtagttgttgctttttgtttttaaattctttgtatacgagttccgcttggttttcttgttgttgtttttgttctaaatacgcgtggtagtttcctttgtatacgtgaattttttggtttttgatttcccatatttctgtacaaagtgcatctaaaaaggtacggtcatgcgatataattatgagcgcaccgtggaaatcgctccactgacgttctaaatgtttgacgctttcgacatcgaggttgcttgtcggttcatctgctaggagaacacttgggttttggcgcatcgcatgttgaattgcttttcttgttttttcgccgccgcttttcgtacttgtatcagtggaaagttgtttgatgtaagcaagttttccttgggtagtcaccgtgccagatgttgcttctttagcgccagcaatcacttccattagtgttgtttttcctagaccattttgaccgatgatgccgatt

SEQ ID NO: 2959 - DNA, 724 bp, Listeria monocytogenes 4b; identical to SEQ ID NO: 1100
  misc_feature (1)..(end): n can be any nucleotide: a,g,c or t/u

SEQ ID NO: 2960 - DNA, 706 bp, Listeria monocytogenes 4b
  misc_feature (1)..(end): n can be any nucleotide: a,g,c or t/u
acataaagacggcgcgattgagaaagaggcggggtggcgtgccgatataataggggggaggacaggggataagaggggggggggacggaggggaggggcgagggagagaagatcataggggggaagagatgggtgggtatgaagatgcaggacaggtgagatgatgagggcggggggatgaataaggagtggaaaggatgtttattcagaggggggggatgaataattggattctgggaaagggggtgcgaggttcggttgtgcagccagtttgttgggtgagcgcatttcttccacaagctctgggtgattatgatcgcgccatgtattcatttggcactcaccacgcagtacatcatggagtggtacatcatccagatatttatccacaagtgcataaagaatcatacttgtttttcaactttcaaaggtttgtgcaaatcttgttttagaacttctactgtacgtttaccacgttctagtttcgcacgagtagctgcatctaggtcagagccgaattgtgagaaggattctagctcacggtaagcggcaaggtctagacgaagtgttccggcaacagttttcattgctttaatttgcgctgatccacctacacgagatacagaaagaccggcattgatcgctggacgtactccggagaagaataaatcagattgcaagaagatttgtccgtctgtaatcgaga

SEQ ID NO: 2961 - DNA, 845 bp, Listeria monocytogenes 4b; identical to SEQ ID NO: 1294
  misc_feature (1)..(end): n can be any nucleotide: a,g,c or t/u

SEQ ID NO: 2962 - DNA, 717 bp, Listeria monocytogenes 4b; identical to SEQ ID NO: 1136
  misc_feature (1)..(end): n can be any nucleotide: a,g,c or t/u

SEQ ID NO: 2963 - DNA, 756 bp, Listeria monocytogenes 4b
  misc_feature (1)..(end): n can be any nucleotide: a,g,c or t/u
tatatttcgggtattccagaaactgttacagtcacgctttcaggccctcgtagcatcgttcagtctgccaaagctcaacaagactttaccgtttatgcagatttgaaaaatgcttccattgggacccaagaagtaaaactacaagtgaaagatgtatctgaccgcctaaaagtaaaagtgaatccagcaacagtcaacgtcaatgtacaagaaaaagtaacgaaaaaattctctgttgacgtagaattgagcaaatctgtcgttgcagatggttatcaagctggaacgcccatcattgatcctaaaaaagtctctattactggtgcaaaagatactatcgaacaaattgcttatgtaaaagcaacactcgaaagtgatggcaaacataaatccgaatttaccgataaggctaccgtctctgtttttgatagcaatttgaacaagctagatgtcgaagtaaatccgcaagaagtggaagtgaccgtgccagttgaaaaagtcggcaagtcagttccagtgaaaattaagcaagaaggcacgccaganagtgatattgaaatttccagcatgacaccagataagtcagaagtagttgtagttggtgaaatgcggccttgaaaataagaatgaatcatgtgttaatacaatcacaaaaatgcaagtttgcatctccggtgtttggtttctaaaaacattncccacgtccccaccnannaagggacctgactcggccttcgactcgaattgaaaccaaat

SEQ ID NO: 2964 - DNA, 775 bp, Listeria monocytogenes 4b
  misc_feature (1)..(end): n can be any nucleotide: a,g,c or t/u
ccggctgccctaaatcaatatcaaacccataaagccccagaccttgatgagtaggcattcgtgaaactaactcaaacggatctcctgttgaaagttctaacttcatatcaaaatgttcaaccataatatagtcttcaatatatttcgttaacctttctcgctgcattctgttatcttcacaaataaaaaccggtagcataaattcatccccattcttctacataatttctaattcttgaataacttctctatcggtcactttcgtatctaaggcaacgtgcgaatatttcttcataatttcccgcaaactagcaaggcctaatccacgaccctctccttttgtagagaaaccttcttcaaatattttataaatcggtggcatatttactggtaaactattcgcaaatacaataattatactatcaccttttttcacaaaagcgattcgtataactggattttcacaagttagcgccgcttcaaccgcattatctagcaaaatcccgacaactttgcacaaatctatgctatccatcgaaatcttatcaatcggttcaactacttctaaaattgcatcaattttcaactcttgagctcgtattaatttaacagctgctagcacaccctttagttcaatcacatgaatattttgaagcaaagaaatcttatagttgttagattcaattgttttatttataggtacaatattattttcaagtaatacttcaaacccggcatatcattattatcatatatccacaagtgtngcaggagg

SEQ ID NO: 2965 - DNA, 889 bp, Listeria monocytogenes 4b
  misc_feature (1)..(end): n can be any nucleotide: a,g,c or t/u
ttgtttcaggtgataagtattaatccacttacttacaaactattgaaaaggaggtatcggaactatgaaaaatatgaataaatcagttggtaaattcctttctagaaaactagaagaacaatccatgaaagttgcggattcttctatgagtaaagcttgtttcatgtttgtatacgaaccaaaaagtccatttgtgaaaatgcaagagaaaaacgaaaataaataaatttaaaactgtataacatcaaaattcatgctaaaataaaaagaaggcaaacttacatatttaaacatagatattttagacagtggaggattaatatgtttagtattttgatggcaattatacagataacgggtatttttattgcaatccagattttaacaaacaaagttttttcaattaaagagggattggttactatagcaattgctatgctagccttccctttatttacattagttcaatactggtcgatgatttttgtattgattgtttttgtaagccttatattggaaaaataaaaatgtagtagtttcagcttctattacgcttgtggttattattttacttactattagtgattctatagtaggttttattttagtaccgggcttgaactttaaatatgatgagatatttaatgaactgttaccaacgttaatttattgtgcgggaatgttggcgaatttgttggtattttcgtttcttcttagaaaattgattgaaaaagttaatatttctagatttgtagaacatagaaaatatgcatatattattttttctatcgttgctcttactgtcttagcattctatatgaacatttatgcgggatcaatagcgggattcgatggatcagttttgaagattaatacccttatttttaca

SEQ ID NO: 2966 - DNA, 736 bp, Listeria monocytogenes 4b
  misc_feature (1)..(end): n can be any nucleotide: a,g,c or t/u
tcggctctgctttaagtaaaaaacggccaacaaaacgctttccacatggtttcgggcgaatggttaacttagtgctacttggcgctgtcattgttgttgggataatggcttttgagacgattcgtgaaggttttgcgcatattatccatccaacaagttccactggtttccttataaaccttactgtgctcctactttgtaccgtgctagaattttctgttttagtaaaagcaatgcatgagattgcgcacgatgttggcttagaatcaaaaggacttcgcttatttaaagacagtatcctaaatctaggtaaagcaaaagctgcaaccaaactcgtattcttggaagattccgttgcaactggtggtggacttcttgcgatgattgcggttattatttctcactttacccctttccatcaagcagaaggtattgcatccatgttaattggtgtaatgatgtttatcgtcgttggtaaagtctttttggacaatgcggctggagttattggcgaatcagatcaaagtatgcatttaactgtcggtcagctcgtaatgagtgatcctgatgtgcgcgatattcaagttctaaccgttcttaaagaaggcgatgttttccatgtcgatgtggaagtggaattagatcccatgctcaccctcgctgaagtggacgatattaaagaccgtttggaagaaagtatcggaatattacgcggtgttgctgatgtacttattta

SEQ ID NO: 2967 - DNA, 701 bp, Listeria monocytogenes 4b
  misc_feature (1)..(end): n can be any nucleotide: a,g,c or t/u
aaaacgttcgcgcgcttccaacatatagtctttcacacgtggatgcgtaatttcatttaacttttcacgcttttccttatctttaaaaataatttctcctaatttagctcgatttaatgtgccatctgcaagtaaaatttcttccccaaaataagcaacgatttcttttagtccttctgtgccacgctccactacttttctagcagcaatatctgcatctactaatggaatacccgcttgctgaatcatgttactcactgttgatttccctgttgctacacttcctgttaatccaatcgttttccccatgatttcagctcgctttctatttttggcaattcgggcaaaaatgtgtcccgcgtccgtttaatttaattttttcaattggcgttccacaaaccacacacggttcgtctgttttgccgtatacttttaatttatcttgatattgtccaagcttcccttgcgaatttacatatgttctgacagtggagccaccaagtgctacagcttcagtcataatacttttcgtcgcttcaaaaatacgtttgatttctttgtctgaaagtgagttagctgctctttccgggcgcacttttgcttcaaaacaaatttcatccgcataaatatttcctactccggctactaacttttgatcaagtaaagccgttttgatggcgcggcttgtttttttacccaga

SEQ ID NO: 2968 - DNA, 710 bp, Listeria monocytogenes 4b
  misc_feature (1)..(end): n can be any nucleotide: a,g,c or t/u
ttctccgaagttttgaccagtttttgggattggaatataaagttcaaaagtggttgcttccccattagatgcgttagtgatttgaactgtgtattcagcatctgttcctggtgtgaagtaagaaactgtactatcatcgccttcagtataagctgctttttctccttctccagctatgctcaagaaagtttccactgcaacggtgtcttgttttggaacacttaaagtactactgttaacagaaagtaatttttcattgtctttgccatttttattaacatctagacctacatctgaaaagttattattggcaattgcggaagcaacattggggccgccccatgcaaggacttcttgtgcatccatattgatactcttagctaatgttacatcaaatgttgtgtcgtaactgatatttaggaatttactcttagccgggtatcccgtaaatgcccctacggaaacatccgttgtctttaatacataaaccttatctccattatttgccgtttcctgctgaatggagaaattaacatctttcccatcttggtctgtcagtttaatagaagaaggcagaacttttgtaccttctaaagcacgtaaatatacttctggattattgagtacagttctagtcccataaggatagtctgataaaagtaatgttgcttttgttttaatggtttctcctggactagctgtttttacta

SEQ ID NO: 2969 - DNA, 668 bp, Listeria monocytogenes 4b
  misc_feature (1)..(end): n can be any nucleotide: a,g,c or t/u
agtaagcactttgcttggagaaactgttatggtttcaaaggttgatgacgtaaaagcgatctccgaaaaactggagattataaacttacagcttgcacaaagaaagaccgccagacaaaaaatgctttattggctatttatctcgatgtgtaccgttatagcaataatttcagcggtctttataatactaaatagtccttacttaggttgggattatagtgaccctgaaactagcgttatcggagtagcttttcatacatttgaatggttgtttgtcagattagcaccgattatccttataggaggagtcgttggaatttttttaacgcggaagaacgtatgaaattgtattaccaaactttatcaatcagtcagttcttgcaagatattgccgcacaacgcagccaaacatatccaatttactaaccgaacttgtagaagaagaatttttggtcaacaaaaaaagcccttaccggattgataaggactctttggatatatgagattgatattaatttaataacttaaatcatttccattagtttcaattacttttttataccaatagaaacttttcttcttcaaacgtttatagctattatctttatcaacatcaacaaagccatatcttttctcgaaaccttcacgtgttgaataaagagctatta

SEQ ID NO: 2970 - DNA, 1042 bp, Listeria monocytogenes 4b
  misc_feature (1)..(end): n can be any nucleotide: a,g,c or t/u
tgagttattacttggaaaatccgaaacaatttgggaaaatgctagatttatctgcgcaaaatagtttttcgattcgtccatttgagatggggaattttgaaaaggcgacagggtataaatttaaagagaaaacgcattttttctccatctatagtgatgtaaaagaaaaattggctccagcgaaatttacgtttttaattttatgggcgcttgtttttctaatttgttatggggtgagtgcttttaaacatttccgggagaaaaatattcgtggaatgcttttatttgatttagttgttttgctgattggttctgggtttgcggtgattttagtgacgatagttggcgacggggaagcggatttaacgaaacataatttcttatttaatgtgtgctttgatttgacgatgttaattggagcggctctctgctggaagtttacatgaagaagagaggtgagcggaatgcgtaaaaaactgattgtaagtattctgctagcattcatgattttcgttgttggtgggcattccgcaattgcaaaatcggatgacggtgtcgttgttttttatgatagtttggcgacaggtacagagaatgaaggcaatatggatgcgctacttcgaatgttaaatagcttgggcaaacgagtgacgatttattcttgggaggaaaatcctgatttaagtcaaacaagcgaaatcatcgtacttcaaaataaaaaagacggtttatccaataaatggacgaataaattagccaaaagcaaagcgaaaatagcatacataggcggaaatcccccaacatttttaacggataaattgcaactgaaaactaaagcaattacagaggcttctatcacaattcaaacgcaagctggattgtctggaaaaccacagctggtgaacgaaacaaatctaattacttcctataaaggaacaagctttggtgaaatggacgcagctgaaaatggacaagctgcatacggcgttcaagcaggaaattacgcgtacgcacctctttttcaagcagataatacgagtga

SEQ ID NO: 2971 - DNA, 627 bp, Listeria monocytogenes 4b
  misc_feature (1)..(end): n can be any nucleotide: a,g,c or t/u
tcctccttcgactgctataatcgcattatctgaaagtcgtcctatcaaatgcattaagtcatctttttccttttcactaaaattcgctgttaaaagtgcggaccattcggctgtcacttcttcaattaaatcgcgcatctgaaaaccagtttccgtcacaaaaatccgctgaatacgtctatctttcgcatcaatttcgcggcgaatcatccccagttcttccaaacgcttaatatgccttgtcacacttgctttatcaaccataaaccttttagccatagattcttgggaaataccatcttctttataaagcgtccataaataacgtaattgacctatattaagaccagtttctagtaattttttatttttaaaagtgctttctgaacgatgaataattgcgatggctttcgctaagctttcctgtctatctgccatttatccgactcctcgataaaaaatgccgcccataattagtttgcggcgtggacccttatagcatagcaggattgtaggtgacctgccaccttattccgcatatnactcttttctgtaataataagccactttctnntnnnnnnnnnnnnnnnnnnnnnnnnnnnnnnnnnnnnnnnnnaaaaanaaaaa

SEQ ID NO: 2972 - DNA, 835 bp, Listeria monocytogenes 4b
  misc_feature (1)..(end): n can be any nucleotide: a,g,c or t/u
actacttagcaacttagatctatgccctgagcggccgccactgtgctggaaagagaaaaaagttgttttatatgctccaacatggcgtgataatgatttttatgaagctggaagatataaatttgatttaaaaatcgatatcgcaaaaatgcaagaaaaattggggaatgagattgttttacttgttcgcatgcattatttagtcgcggaacattttgatttcacgcaatatggtgattttgtccgcgatgcttcaaaccatgaagatatacgcgatttatacttagtgagtgatttgttgattactgattattcctctgtattttttgattatgcgaatttacagcgtcctatgcttttttatacgtatgatttggcggaatatcgtgatacgttacgtggcttttactttgattttgaaaaaaatgctcctggtccgcttgtggaaacgaatgaagaattaatgagtgaacttgaaaaaatgcttgaaaatccacctaaaatagaagacagctttttggagcagttttgtacttgggaagatggtcatgcagcagagaaaacagtgaaaatcgtttttgctgaaaaataggtggtgggaattttgaaagaagtagcaatttatatttatatgcttgctgttaagataactggctgtttggcgaggatttttccagttaaacaaaaagtggtactgttagttagctttccggaaaattccactgcaattataaagcaaatgaacgaaatgaaagttacgccaaaaacggttgttttctatgatccaagagtggatgtgaccggttttaattttgattttatccaattaaagcca

SEQ ID NO: 2973 - DNA, 686 bp, Listeria monocytogenes 4b
  misc_feature (1)..(end): n can be any nucleotide: a,g,c or t/u
cgccagtgtgctggaaagtggtcgtgaacctgtcattttaacaaggcgaaaagattttcgatttggctttgtgcgagttttggaaagatatcaattggacgtgccggtgctctccattagtgaactgtcgccggaaacagaagtggagcaaattgcactgattgaaccaacttgatgagggaggtaatccgtagaaatgggaaaacatttagtagaaaagatggaaatttttaaggcgaactccaagcgagaaatacataaaaaaattcgcttagtcacgaatgagccatataaaattacggatgaacgtgtcacaaagcttgggatttttaagaaacagtatgaagtgacggcggtcattatgagtgaagtggcgatagcagatggtcgaatggactttcaagaaacatttcaaaaatcggttgtcaaaaacagaccgaaaacagacgacttattaaaaaaagaaaaattactagaaatgcttgctgcgggagcggaactagcacagtcaacgccgcttttagaagaacgaaaaacacaggaagaagaattgtcagcgatgcgtctcgaactagcggctttaaaccgcgagcttgcagtgaaaatgcgcgaggagcgtgaacaaaacagtgatttcgtgaagtttttgaagggtcgcggaattagtgatacgtatgtggcggact

SEQ ID NO: 2974 - DNA, 679 bp, Listeria monocytogenes 4b
  misc_feature (1)..(end): n can be any nucleotide: a,g,c or t/u
caggacaataaataatataagctgcgcacaaaagtccagagacatgccaacaacccaacacagtcaaattgggcccttaatatgcatgcagaaacgaccgacagtgccctgaaaaggtatcaagatccattctttccaccgtttatagtagataaaattaagcaatgtattttcgacacggttcaatttttagaacaagggaatcatgatacagaagcgattcaagctaaatttgatgaaatgacattagcaattaatgcattgcaagatgagttttatgaaaatgagagcgaattagaaacaggagcaagggattccattgctgaaacaattatcccgattttagctcattataagatagatatcgatattgaagaattacttagagagcgcgagtggtaatatatgataaagacttcaactgctagacagttgaagtctttgttttgtttcgaagtaaaagcgaggaccaaattaaaggcttctccctcctttttgcgttataataaacataaatcataacgatagagagggtggcagttgatggtaacaatcgggttaactgggtggagtgatcatgattctttattacaaacaaaaaaattaacattggctgattatgtggcacattttcctgtggtggaggttgatacgagtttttatgcgattccttctccgc

SEQ ID NO: 2975 - DNA, 928 bp, Listeria monocytogenes 4b
  misc_feature (1)..(end): n can be any nucleotide: a,g,c or t/u
aaatgtaaatgaagtcttagcgcgtggagcaaaaacttgtgtatttgcaatggaaaacgttgcgcaaccaggtgaccgctttgttattccgcaagtgcatccattattaacaccactagcgagcgttatcccgtgtcaattattagcttattacgcagcacttcaccgtgactgtgatgtcgataaaccaagaaacttagcaaaaagtgtcacagtagaataaagtattcaagaccttttcgagattagaaaaggtctttttttatgtaatcaataaatttgcacgacgcccttgttatactataaacttagagaggaatgggggaaatcagccaatggaagtatcacacgtaacactcgaaccaaataaagatagccgccccgcagttttaacaatcggcaaattcgacggggtacatatcggccatcagaccattttaaatacagccttatccataaaaaaagaaaatgaaatattaaccgctattagtttcagtccacatccgctttgggctttaaaacaaatcgaaatataccgcgaaatgctcacaccaagaatggaaaaagaacgttggctcgcgcattacggtgtcgatcatttaatcgaaacagcattcacacctcggtatgcggaaacgacaccagaagagtttgtcagagaccatttaaccaatttgaatttatcgcatatcgtcgttggttctgaatttaattttgggaaagggcgcgattctgacgtagatttactccgggacctatgcaagccctatgatattggtgtcacatctgtcccggttattgaaacaaatcaaaccaaaataagttccaccaacattcgagcgtttattcggcgaggtcattttcaagaagcggaagagctcttaggccatccgtggtatattactggaattgtagaaaatggtgagat

SEQ ID NO: 2976 - DNA, 700 bp, Listeria monocytogenes 4b
  misc_feature (1)..(end): n can be any nucleotide: a,g,c or t/u
ggggacaaaggttcggccggctatgatttcttctctaatgaaacagtaaccatcttaccaggagaaaaacacattttttggacagatattaaaagttatatgcaggaagaggaggttttgaatatctatgtccgttcttccattggtataaagaaaggtttacttctgtgtaacggtacaggaattattgattcttcttattatagtaatccaggtaatgatggcaatattgggattgccattaaaaacttctccaatgaagcagtagctattgaagcgggggaacgtgttgctcaaggcgtatttcaaaaatacttagttgcagatacagatattgtcgcaaacgaatcccgtgttggtggggtaggaagtacaggcagataaaaaaagacccgggattccgggtctttttttaaatactaacaggtgctagttttttgtataatttttctgtggagaaaatccaaccagtgtaagatgaaacaatttttaaatcatcatctaatttcaccactgctacaaatggataatgtccattgctacgataacgtaaatcggtaaatgttacataagtcccatctagcttttcctcaatgcgccagttgtaaactttggagaatgagataaaagcagctagatttttatcttttttcgcagaacggatgatttcattatcaggaacaggtaatcggtcaaattt

SEQ ID NO: 2977 - DNA, 1045 bp, Listeria monocytogenes 4b
  misc_feature (1)..(end): n can be any nucleotide: a,g,c or t/u
aactttacaaaaatattttttgaccaagataggggcaagtgaataaccgaccattgttactttggcatggcaaaaaagacgatgtggtaccttttgcgtacagcgaaaagttataccaaacattagtagaagaaagcttggcagataatgtgcaatttatcatcgacgacaatgcgaaacacagggtttcggtcgaaggaatgctacaaggtgtaagctttttcgagaaattcttataatgaaaatcattctcatatatgatacaataaatgtacaaaatggcaaaaaggaggcatatgcttcatggatgagcaactgaaagaaaatttaatgggcgcactagaacaagttatcgatccagaacttggaattgatattgtgaatattggtcttgtatacgatgttgaattagatgatgacggcctttgcacagtatcaatgacgcttacaacaatgggatgtccacttgctggtattttgactgagcaagtacaaatggcacttagtgatattccagaagtgaaagatacaaatgtaaatcttgtttggaatccaccttggactaaagatcgtatgtcacgctatgcaaaaatagcgcttggtatacgttgaattaaataaaaataagcaggtaggacgtattttgcgttatacctgttatttttatatgactgaatagaggattaaaacgatgaattatgaaatgataagtgattataaagataataaaatgtatcgtgatagttttaataaacttgcggaaagtacatttgacattaattttgaagaatggtttagaagcggtttttggaatgacaagtatgtttgttattcttatatagataataatgaagttatctcgaacgtctccattaacaaaatgaatttaatttatcaaggggaaaattatagtgcgttacaaattggaacagtaatgacgcatccgaattaccgtggacagggtcttgctaagaatttattaaatcatgtgatagctaagtatgaagaccagtatgattttctttatttatttgcaaatgatact

SEQ ID NO: 2978 - DNA, 630 bp, Listeria monocytogenes 4b
  misc_feature (1)..(end): n can be any nucleotide: a,g,c or t/u
aatggatattactgttcgtgatgcgagcgattgtgcagatgtagatatcgctgtaatcactgtaactgctggtcctttaaaagaaggacaaactcgtttagacgaactgagaagtacttcaagaatcgtttcaagcattgtgcccgagatgatgaaaggcgggtttaatggtattttcttaatcgcgacgaatccgtgtgatatcatcacataccaagtgtggaaattgtccggtttaccaagagaacgagtactcggaacgggggtatggcttgatacagcaaggttacgccgtttactcgcagaaaaactagatattgctgctcaaagtatcgatgcttttatccttggtgagcacggagattctcaattccccgtgtggtcccattcatctatttatggtaaaccagtgaatgaatatagtgtggaaaaactaggcgaggcactagatttgaaacaaataggtgaaactgctcgggatactggttttgaaatctaccaccaaaaaggctgcacagaatacggcataggtggtacgattgtcgagatttgtcgccatatatttagtgggagccagcgtgctttaacggtgtcttgtgtgctcgatggcgaatacggagaaagtggtct

SEQ ID NO: 2979 - DNA, 776 bp, Listeria monocytogenes 4b; identical to SEQ ID NO: 1256
  misc_feature (1)..(end): n can be any nucleotide: a,g,c or t/u

SEQ ID NO: 2980 - DNA, 714 bp, Listeria monocytogenes 4b; identical to SEQ ID NO: 1210
  misc_feature (1)..(end): n can be any nucleotide: a,g,c or t/u

SEQ ID NO: 2981 - DNA, 1341 bp, Listeria monocytogenes 4b; identical to SEQ ID NO: 1220
  misc_feature (1)..(end): n can be any nucleotide: a,g,c or t/u

SEQ ID NO: 2982 - DNA, 929 bp, Listeria monocytogenes 4b; identical to SEQ ID NO: 1406
  misc_feature (1)..(end): n can be any nucleotide: a,g,c or t/u

SEQ ID NO: 2983 - DNA, 737 bp, Listeria monocytogenes 4b; identical to SEQ ID NO: 1355
  misc_feature (1)..(end): n can be any nucleotide: a,g,c or t/u

SEQ ID NO: 2984 - DNA, 759 bp, Listeria monocytogenes 4b
  misc_feature (1)..(end): n can be any nucleotide: a,g,c or t/u
aggcaacctagcatcgcatgcttgagcggccgccactgtgctggaaagacgcaattgcgactagtgtctctacaaaagccttaaaaccacgacatgcgattattcttgctgccgtaatgaactttgtgggtgctatttcattcacaggggttgctaaaacaattacaaaagacattgttaacccattcgacttagatcacggcgaacttgttattttagcagcattactttcagctattgcttggaacttaatcacttggtatttcggaattcctagtagttcctcccatgccttgattggatccatcgccggtgcagccattgcatcagccggatttgcagcaattgaatacagcggatttactaaaatcattgttggtttattagtatctcctgtacttgctttcgtagtcggttacacgatatattcactcttcaaggttttcctgaagaacttaaacttagccacgaccaatcggcgcttgcggatgattcaagtcggaactgctgcgctgcaatcttacacacacggaactaatgatgcacaaaaatcaatggggattatcacaatggtctcaattgctagtggcttgcaaccaccggtgatgcgcaattatagcgttcaagttgctgtgccattgctctggttatctgttctagcttttgcgggtcggaaatgtttccctctgtcgggcgtccctttccgcgcttcgtcttttccttgctctcttttgtgcatggcacaaataaaaaaaaaaa

SEQ ID NO: 2985 - DNA, 726 bp, Listeria monocytogenes 4b
  misc_feature (1)..(end): n can be any nucleotide: a,g,c or t/u
ttgcatttggctttttactactgggacttgcgagaggaattgaatgtaaaacaaagaaagcgtatattattacagtaattgttctaggttgcgcgattttcaacacacttgctcgcgtattttcaatgaagcaggcgatctttttaggaattgtgctattatgtttattcttagctcgaaacgaattttaccgagaaaaactagtttatacatggagtaaagtaattattgatagcattattttcatcgtatgtctagcaggttacattgttattggtatttacaactgaccaaatgtgaaacattgcaaagaaattgctgactatttacgcattgcctgagaacatttatggttacttggctttgttggcgtatttattgctggtggtggtttagggcattattgatgtttatttatgcacaacaaaagaaaaattgggttctggctttggagctgtggggnggccggggacatgggggggaactggggtgcgggtggacggcgcgtgtccggtgcggttgcggctattttgctgctcgttcttccgcgctctcccgcaactccctgcgtctcgcgcctgcctgctgccgctcccccctctccggtttcgcccttcttctctccccattttcttgctttggccctcttccccccccccgtgaccgtagcgtttgggtccgccggcggcggggctcttcgcggtcgcgtacatccgaacaattaaa

SEQ ID NO: 2986 - DNA, 752 bp, Listeria monocytogenes 4b; identical to SEQ ID NO: 1183
  misc_feature (1)..(end): n can be any nucleotide: a,g,c or t/u

SEQ ID NO: 2987 - DNA, 791 bp, Listeria monocytogenes 4b
  misc_feature (1)..(end): n can be any nucleotide: a,g,c or t/u
agctactccccggttcatcaaatgcgattctgtttacatcatatgttaagcgtttgatgtagtcaattagtggattggataagccttcaacatctacagcttctaaatcggaaaaatctccaaaaaagtcttttaattgaataatacggctgattctaccgtcaatccggaaattttcaaggactaataaaaaaggaattgtgattttaaaaatttttccttttgacataagttccacatttccattgactggctcgacttcatggacctctaattcaattttgttttcgaattgctcattttcttccatgattgtttcaaaattatacttttctacgacaattttattagttacgatatccataaaatccacctcatttgtagtatgtaccccgtatattacacgataactaagttcctagcaaatcaatactaccacgtaatttcgatgcgattgccttctgggtctagcacgacactttcgtagtatccgtctcctgtcattcttggttcacccgcaattgcaaaaccatcttgtcttagtttttcagttagctcatctactgcttcttttgttcctgttgaaatagcgatgtgcgcccagcctaagttttccccagttgtttttcctgttacatccgtccgactcataatttcaagtcttgctccgtcttcaaacgaaagaaagtaagaattgaagccttttgttttgttttcatataaatcattggccgttgcaccaaaataagtgacgtaaaattgcttcatttgttctaaattaaaaagccata

SEQ ID NO: 2988 - DNA, 623 bp, Listeria monocytogenes 4b; identical to SEQ ID NO: 1235
  misc_feature (1)..(end): n can be any nucleotide: a,g,c or t/u

SEQ ID NO: 2989 - DNA, 1175 bp, Listeria monocytogenes 4b
  misc_feature (1)..(end): n can be any nucleotide: a,g,c or t/u
gcatatttttttgtggatttttcacttcttccgcggcacttgatacagcatcaaagccgatataagcaaagaaaactgtggaagctcctgtaatgactccttgtacaccaaacggcaagaacggcgtccaattatcaggtttcacatagaaagctcctactaaaataaataatacaaccactgcaatttttactaacaccataatattattcactcgtgtggattcacgaataccaaaactaagtaaaataccaattaccataactactacaaatgcaagtaagtcaaaataggttccggcactcgggtcataagctgaagaaatcaccgttggaatatgtaagtcaaatcctgctagtagactcttcatataagaagaccaaccacttgcgattgcagcaacagccagaccatattctaaaatcagcgaccaccctaaaatccatgcaacaccttccccgaacacatggtaactgtaagtatatgcgctacctgcgactggtaatttagaagcaaattccgaataacataatgccgccaaacagcaagcaattcccgcaataataaaagaaataataattcctggtcccgcaatgacagaagctacctgccctggaagaataaatattcctcccccaacaaccgctccgactccaagcatcgttaaatcaaacgctcctaacgttttgttcagatgatgtttatctgtcgctgggttatgaaaactcttttttctgaaaaaagaattaactttcgtcataaaaattcctccttcttaaattccaattttcagttaatttatatgtgtatttttaaactaacttgaaaactattattcatagtaccataaatagattgaaaaatatacaacatttgtagattttcgtacaaaaaatgttcatatatggtgtaaatattttttcttggttttttcgtgttatcctttagacctctaaaaaagaaaggactgaatacattgagaaaagttttcatgtttttaagcacagctttattattagccattttgtcactaagctttactggtttagatctgaaggcaaaagctgcttctgattgatatccactacctgctgcaatggttgatgtcgtcccagatgatggattagccggagatgtggctggaaacttaacaaagactatgagatgatgagaaa

SEQ ID NO: 2990 - DNA, 694 bp, Listeria monocytogenes 4b
  misc_feature (1)..(end): n can be any nucleotide: a,g,c or t/u
acatgactaaagccgttaagtcgataccaagcgtataattgcgatcatttggccgaagcagtcgttaatttaaacgaataaactgcatcgtctaaatatttttgccatcttgcttgttttaatggtaaaccttcacgtaaagctggctcatccacttggataactttaatgccattacgttctaacgcttctacttctttacgaagcgcaagtccaacctgatttgcaactacactctccggcacatcatcacgaacaaaactccaattaataattgtcaccggcgccgttagcattcccttcactgggcgcttcgttaacgactgggcatagacactttctttcacggtaatttcctctgtaaaagcaacatccccgtagataagtggtggacgaaccgctctcgaaccataagactgtacccatccaaatttagttgcttggaaaccagccaatttttgcccgaaatattccaccatatctgtccgttcaaattccccgtgaactaatacatcaatatccaaatcctcttgaattttaatccagcgagccgtttctttttcaataaaagcattatattctgcatcggttatgttcccttttaaccagtcagcgcgcgtcttccgaacttccggtgattgtggaaaacttccgattgttgtcgttgggaaaagcggtaatttcaaccaagcat

SEQ ID NO: 2991 - DNA, 848 bp, Listeria monocytogenes 4b
  misc_feature (1)..(end): n can be any nucleotide: a,g,c or t/u
gcgcatcgcaaactgtgtgctggaaagttcgtcttttatgcttcaaaggttacttttttctcgtcaggcacttgttgcataaatacatctacattttctttttgaagttcttttaacttcgctacttcttcaggtgttaaattgattgctttggaaaaattagctgttccttctcgttgctttgttccgcctagatttaacatcagggattttaccattcgtaccatggattaatttgtaagcgtcttcaactgattcgacaacaataagcatgttgtatttgtcagtgacgccggaattaatcgcttcgatactttcatcgatacttttcatgactagttttgccgcctcgggtttagcaagacgtattgccgacttacggaaatcgtccgccgctaccccatcatttgccactaaaattgtatttacatctaaagcattaaaccaagacacagctacttgtccatgtagtaaacgatggtccactcttagaaattgaatcattttttcttcctccttcgtattagttaaaatcaactacatatttggtcgactcagcatcttcataatgatattggatggcaattggcatctcgttttctgcataaaagacactactcaatttgaaaacaggatcattttcgtctatatgcatatttttgatttgctcattcccagctaaaataagttgaagttcctgctcaagctcaaataatttatatttacctgaattaacaagctcaataatattaataatttgaaaatcctttgcttgtaaatcagggtataaacttaacggtaaaattaagcgatctagtgtgacaccatgctcactttcttagacaaac

SEQ ID NO: 2992 - DNA, 694 bp, Listeria monocytogenes 4b
  misc_feature (1)..(end): n can be any nucleotide: a,g,c or t/u
cgccagtgtgctggaaagcaaatggaaaatctttccatgctgttgcagaataaaacattgctgcagggtaaatggcatagccgattgaaatacaaacaccaatccaaatatgcgcgcccatttttacaagagtataaatagcaaagccaacgattaatgaaacaacaattatttgagaaaaaatgtaactcgaaggtgagtcgtaaatcgcacttgttgtttctatccacaaagtgtgtaaaagcggatgccactgactatattggcgaataccgtgagccattccccattggtaataggagtcaaatgtcatttttgctggataataggctagaaatgaaatcatccagaccacgaatggaatactcgtaaatagtgcgaaaaatggccattttactttgcgattcggtcttgctttatattccgttcgcatttcaagtaataaaagtaaaacaaagatagtgattacaagaaaagttcctgctaaaataatactattaaaaacaaaattcccgccatatggtccaccattgaatgatgaagccatccaaaataaactaattattagtgaggttatcaatgttgaccattgaaattgaaagtttttctcttgtctaaaataaagaaccgttaaaactactgcaaataacaaccagcttaaagttagtttaaaggtttctgaataatagctaat

SEQ ID NO: 2993 - DNA, 778 bp, Listeria monocytogenes 4b
  misc_feature (1)..(end): n can be any nucleotide: a,g,c or t/u
cgacatgtccccgaaggtaaggactccgtatcgttttaagattttagtttaggggctgagagtgctcaatatttagaggtaatcaagacccacagcatatttatagcctccatagttattttcttgttctaaaaaaccaaaaaccagttacccaccaaactcctggcgtaactggttttctaaatctcacccaaaattaagctgccaaaacaccccaaactggtccgtcacctgcgcataggtcgaaccccagaacgccacttgcaactccatttccactttgcccgtagcactcaaaacttcataggcgtacttaatatcctcctctgtttcaaagttaatcaagattgtcacccgattgccaattgtaaaaccatcataaggcgcatcggtaatataaataaattcttccccattttttgctaaacgactatgcatcaatcgctcaccaaaaacggcattgccatcaaaattgttcatctctttaaaacgctgaacgcttgtaatctcagcctgaaacacatccgcataaaatgttagcgcatcttgaccttctccgttaaaaactaagtatggaactgcaaaagacatctcatcatctcctatacaattaatagctttagtataagcctaatctactgcgaagtcatgtctcaaaataataaggatttgtgaataaaaacaaaatacttgcaaataaacgtgatatattatacaattacactaagaaatcggatatatttaaattaatatttttttgcaataaaataaagtaagt

SEQ ID NO: 2994 - DNA, 1072 bp, Listeria monocytogenes 4b
  misc_feature (1)..(end): n can be any nucleotide: a,g,c or t/u
acggatcaactagtatcatgttctatgtctgagcggccgacatgtgctggaaataatcccttttttaccgacttgctctcgacctgcttcaaattgtggtttgataagtgtcatcacatcgccaccggttacaagcacagttctaagtactggtaaaattagtttgagtgaaataaaggatacatcaatcgttgcaaaatctgctaaaccttcggaaaaatcagctggcgttacatgacggaaattagttctttccatcacagtgacgcgatcatcgttgcgcagtttccatgcaagctgattatagccaacatcgagcgcataagagtgtcttgccccattttgtaaagcgcagtctgtaaaaccaccagttgatgctccgatatccagcataagtttatctttcacttcgaaatcaaatacttgcaatgctttttctagctttaatccaccgcgactaacataaggcatttgctttccttttacttgaagttcgctatcaatagggattttttctccaggtttatctacacgttcttctttccgataaacaattcccgccataattgcacgttttgccttttctcttgtttcaaatagtccttgttctactagcagaatatctgcgcgttctttttttattgtcatagtctcttcgcccttaacttcccgctttgtgcgagcatttcttttatttttaatactattccagttgttgatatgccaaatgattccaaaattatggatacagaaccatggctaataaattcgtctggtaaaccgattcgatgcattacaacatcgctataattactcgcttctataaattctaacacactcgcaccaaatccaccttttaatagtgattcttctactgttaaaatgggaattttttgctttaagatttggtgtaaaagtgcttcgtctaacggtttaatatagcgcgcattaattactccaacgtggtatccttctaactctaattgttcagctgcttttagcgctagccggatggtagggccaaaggttaaaataacagcatcaatcggctgaatgattgtttcccactttc

SEQ ID NO: 2995 - DNA, 763 bp, Listeria monocytogenes 4b; identical to SEQ ID NO: 1138
  misc_feature (1)..(end): n can be any nucleotide: a,g,c or t/u

SEQ ID NO: 2996 - DNA, 591 bp, Listeria monocytogenes 4b
  misc_feature (1)..(end): n can be any nucleotide: a,g,c or t/u
ggtagagaatatacgattgttggcgtagaaacaacagaccacttacgtaaagtagctcgcgaggtcgatgaaaaaatgcacgaaatcggctcccaaaatcatgcactagatagtggtaggcttgctgtactgacagctgtgaatgcgacacacgattacttaaaactagaacaaaaatatctagagttagagcaagaactggctcgaattaaaggaagagattaatgattttaaatgcgattattttaattttacttgtttgcggctttttcgcaggatttagaacaggccttatcaaacaacttatcttattattaggttatattttggcattttttatctcgtatacgtattacgaagatttagcgccacatttaacgtttataccttatccaggtagtgatactgcagatggattatccattattttacaagaattacgaacagaaacggcctattataacgtacttggatttgcgattatttttattgtcgcaatcattgtcgttcatatgcttgcatcacttgttggtggcttgactaagattccagtcctgcgccaaattaatggattgttagcagctgtttttg

SEQ ID NO: 2997 - DNA, 690 bp, Listeria monocytogenes 4b
  misc_feature (1)..(end): n can be any nucleotide: a,g,c or t/u
aaaactggctatgtttccgcatattcctcctaagagaagaattagaacatatcgccatttaccataaatacgctctgcccaagcacctacaatataaagcataactgcattggaagctaaatgcattaatccactatgaagaaaaatcggtgaaataaagcgccaccattccccagcatatataagggggttgaatttcccgccccatttaattaagttaaatgaattggtagttccaccttggaaagaaagccacaaaaacgctacaaccaaaagaccaatgaacgtatacgtaactattggttttgaattcctagcaactttttggtcttcatttactttagtagtaatatacgagattacttgctctcgttcttttgctactagctctttcgttatttcatttggaagaacaaatgcttcttctggtaattctaaagttttaacgagtgtggctagatgatctctcatttggtcgttcgcgagtaaaatattttctaatttcactttttcatttggagaagcaattgactggccaaaaaaaggcgaaatatcacccattggttcaaatggggtgatataaatattcacaagacgcaatttcaagcggcccatttgcttacgaagattttcggtaacgtgtgaagggtgtggcacatggggtgccaccacattagcccaacttaattt

SEQ ID NO: 2998 - DNA, 685 bp, Listeria monocytogenes 4b
  misc_feature (1)..(end): n can be any nucleotide: a,g,c or t/u
gttttcacagtcgtcaggttgtaagatgtcggcacgtcaattgtgatacagctcaatataggtctaatgacctcctcaagaagcagtgtagaccgaccgccagtgtgctggataggtgtactacgtactattatcattttaatattaggaattgctgcaatgaatgcatctagttttccatttattagttttctgacaactacgctcgttgctatcgctattggaattattattggcggagctcatcaattaattagattgattattaaaacttatcaacaaacgaaggaacgcatagtctctcaaaaaaagtggcaaacactataaaatgactcattacatattcataataaaccaagcattttcagacttttaatgagaatgctttttttgtgggttaattcttatttttttttgtgtaaaagatggtacaataaggaagattatgaatggaggaggttggagatggggactttagcagatgttgcgaaacgggcaaatgtctccaaaatgacagtttcacgggttattaatcatccagatcaagtctcagatgaactgaaaatgcttgtttatagtgcaatggaagccttagagtatgtaccgaagttatgctgcaagggcgcttgttcaaaataggacgcaagttattcaatctttgattttagaagaaattgatacagtt

SEQ ID NO: 2999 - DNA, 878 bp, Listeria monocytogenes 4b
  misc_feature (1)..(end): n can be any nucleotide: a,g,c or t/u
acgtgagttttttaataaagatatctctaatgaaaaaaatttaaatggatattatattgtccgcgagaatgattttgtttataatcctcgtatttcgaattatgcacctgtggggccaattaagcgtaataaactaggaagaattggtatagtctctcctttgtattatgttttcagaacatttgatacaaaccaaagcttcttggaatattactttgatgggacagtttggcataattttatgctattgaatggtgattctggggcaagagcagaccgatttgcaatcaaagattcagttttaaaagaaatgcctattccatattcaactttatatgaacaagaaaaaataagtttttttttagatgagataactatcattataaatcttcatcaaaataaactaaagaaactctcttctctaaaaaaagcctatttacaaaatatgtttatataatttaatccccatctattcttatgagatggggattatttatcacattaacattgataaatggcgtataattctatcattatcttgattctccaattcctgaataatatgaagatatgtttcctgggtagtagtcatacttgaatgacctaacctattcgcaacactagcaatcgaaactccagcatataatagcaaagatgcatgggtatgtcataaactatgaatcgtaatagttggtatatttgcattctgacacaacacttttaaacgattattaatagtagaattgaatactctactcttaacagagataggtctatcagaatctttcattgtaattaactcgggaaattgcattgctaattgccaatcaatntgaatcttactatcggaagattcgatttttgtcggctgacaagaa

SEQ ID NO: 3000 - DNA, 640 bp, Listeria monocytogenes 4b; identical to SEQ ID NO: 1092
  misc_feature (1)..(end): n can be any nucleotide: a,g,c or t/u

SEQ ID NO: 3001 - DNA, 698 bp, Listeria monocytogenes 4b; identical to SEQ ID NO: 1085
  misc_feature (1)..(end): n can be any nucleotide: a,g,c or t/u

SEQ ID NO: 3002 - DNA, 718 bp, Listeria monocytogenes 4b; identical to SEQ ID NO: 1290
  misc_feature (1)..(end): n can be any nucleotide: a,g,c or t/u

SEQ ID NO: 3003 - DNA, 1194 bp, Listeria monocytogenes 4b
  misc_feature (1)..(end): n can be any nucleotide: a,g,c or t/u
ttaatcggtgctccactaaatggactagtaattggtgatgatggtgttacagcttacgaccttacagattcagggccaaaaaaatcttcagaccgttatagtgaattcatgaaaaacaaacaaaaaatccctactaatttgcacgtattaaatattgcaggtgatactttaaacggaacaaaaagcgatggtagtgtttctgttgcgagtgccttatctggcaaattcatttttgaaggccaggcagcaagttacgaagaaaaaacattcacaggtaagaatgcagctcatagtaaactccacgaaaataccgatgttgatgctgaagtagctgactttttatggggaatagaaaaagtagattaaggctatcgcctaatctacttttttcttgcgtccaaatattgttcgtttttttaagtcttctgcatttctcacttctaaaatatctaataagaatacaaagactggaattcctacgattagcccccacactccaaagaatgtttccgagaaaatcaaaataataaatgtgtaaaataccggtaagttcgttttagatgacattaattttggatttaaaatgtaggtctctattgcatgaacaatgacaacggtaattaaaatgtactccacatcttgaaatcctccaacagaataagctataagcaccagtggaatacaggaaataatcacccccgcaacggggattaatcctaagacgaaaaccataatggataaactaagcaactgtggaaagtccattaaataaagcgcgattgtcgtaataaatgtgtttactaaagcgatcattaattgcgcctctaaaacgactccaaaagtcgaaacaaatttctttccaaaaaacgcagcctctttaaaaataaagcctaccttacttgtcattgaactgcccagtaaaagaagttactcgttctttttccaaagagaaaaataaactaagaattaatgctaagaagaagatatcncaatcatcgtgacataacctattttaaatcnnnnnnnnnnnnnnnnctnnnntnnnnnnnnnnnnnnnnnnnnnnnnnnnactnnnnnnnnnnnnnnnnnnnnnnnnntnnnnnnnnnnnnnnnnnnnnnnnnnnnnnnnnnnnnnnnncnnnnnnnnnnnnnngnnnnctnnnnnnnnctgnactccttnccttcatcgtttaa

SEQ ID NO: 3004 - DNA, 951 bp, Listeria monocytogenes 4b
  misc_feature (1)..(end): n can be any nucleotide: a,g,c or t/u
ataatcctaaaaaagggtttgaagaaatctatcgggtgatgtcacaaaaaggtgttttaatagtgtcgtctgaaaaagataaaattgattatcatatggacgaatataaaacaactgccactctaacagtactcttaaaagaaattggctttagagaagtagtggagaaagaaaagggatattgggttttgtatacaatcagaaaataattgcgagttatattatcttttgaaatatctgttacaatgaataaaactctctaatacagagtccaattttatacatcatgaggtgaaaacatgttaaagctatacaaaaaagaacaaaatcaaatcttgtatgctaagtactggataaataatgataaggcaattgtgcacttcggtaaaattggtaaagtaggacagaaagaagaaaccagcaactatctggaaaaatacaagagcaaagctgcgttccatgaggcgtttattaatcgatttgtcccacaaagttatagcgaaaatcctccaaatgaaaatttctggatattaattcaatatccgctcaaaagtttaacaagaacaaaacgtgatatttggctgaaagatcgagtaacagatgttttaaatgacgatttggggtggaaaggtttagggattgtagatggttttgacataggtcaaaccgcgaatcctaacaagcaatttgctttaaatatattttgtgtcgttgttgatgaagaaataggtattaaagtgattaaatcagctctaagaaataataattgtgattatactagagtaaaaattgcttccagaccattttcggatgatgctgaatatacgttgaatttttcagcgaagaaaaaggatgtaactntttatgtatgaataaagttttgaaataagaacgataaaaaatccgaaagtcttgatttatcaggtgctttcngatttttctgagcgccct

SEQ ID NO: 3005 - DNA, 740 bp, Listeria monocytogenes 4b; identical to SEQ ID NO: 1108
  misc_feature (1)..(end): n can be any nucleotide: a,g,c or t/u

SEQ ID NO: 3006 - DNA, 702 bp, Listeria monocytogenes 4b; identical to SEQ ID NO: 1417
  misc_feature (1)..(end): n can be any nucleotide: a,g,c or t/u

SEQ ID NO: 3007 - DNA, 695 bp, Listeria monocytogenes 4b
  misc_feature (1)..(end): n can be any nucleotide: a,g,c or t/u
ggggctaatgcttttatttgtagcaaacgcgctaactcagcttacaagtaaagtaacaatggcgattatccagtggcataaatatgcggtaaagggaggcggaaaaaatgcgtaaacatcacttaagtaaaaaattatttttcgctggtttggtactatttattatcggtgctatcggtgtagcattaacgatgaacaaaggtaatatgatagaaaaaggtgaaccacttacaaaacagtgggacttatcagctgaaaatattaactccattgctttttcttccgagcgcgacgtaacgtttgaatggaaagaaagtacaaatggaaaaaattacatcgaactaaaaggtaattactctgctaatgataaaaaagccattcaaaaattagatccagtttcggaagatggaacgtcctttaatattacagttcctgaagaagaggattggtataacggctttggcaaaatatacgcatacggtcaacaaaaagtaaccgtttatttaacaaaagatactaaattagctgatctagaagtgaaatctcattctggggatatcaatgtagctgattttaaagtaaagaaatttgttagttctaccaactcaggtgagttaaaagtaagtaatttggaagcaaatactgctcaaatggctacttcttctggggacttggaattatcgaatatgaaagca

SEQ ID NO: 3008 - DNA, 997 bp, Listeria monocytogenes 4b
  misc_feature (1)..(end): n can be any nucleotide: a,g,c or t/u
caattgatttagtattatctggacatgcgcacggcggtcaatttagactacctttaacagaaggccttttcgcaccgggacaaggtctcatgccgaaatggacagcagggattcaccgggctggcggtaaagcgcttattgtgagccgcggcttaggaaatgtcacgaaactaccgcgcttatttaatgacccagaaatcattcgaatgacacttagagcaaaaggggatgcataggaaaagtgatttatttagataatgaagatgtactcgatcaagcgtacaactttgcgatggaagaatatgcgcttcgttctttagatgaaaatgaaacgtattttatgttttaccggatgaagccgacgattattgttggtaaaaatcaaaacacgctggaagaaatcaaccatgcttttgtcaaagaacatcatatcgacgttctccgccgtttatctggtgggggagctgtctataacgacgaaggcaatattagctttagcatgatcacaaaagatgatgggaatagttttcaaaatttcgcgaagttcacagaaccagtgattcgagcgctccgcaagcttggtgtaaatgctgaactgagtggtcgaaatgatattgaagtgaatggcaaaaagataagtggcaatgcgcaatttgcaacaaaaggtcgactatatagccatgggactttacttttcgatgtcgatttatccatgctcgaaaaagcattacaagtggatccagagaaatacttatccaagggtgttaaatctgtgcgcagtcgtgtaacaacaattcgcgaacatttagcagaagatatcgatattctaacctttaaacaaattctactggaatctatttttgaaacgaaagatatgccacgtgatacttttacgggagctgacaagcaaggaatcgaaaattacgcacagaacgttaccggaaattgggactggacgtttggtaaatcaccanaagcccctattaaacgcaaaaaa

SEQ ID NO: 3009 - DNA, 616 bp, Listeria monocytogenes 4b
  misc_feature (1)..(end): n can be any nucleotide: a,g,c or t/u
aatgatgatttaaaaaaagagttttcgttcgttaaaggcattttgccaggtattttttccggaattgtcctttatattattttttacataggcgcttttattattaaagtaatgccaggcggtctagaaaattctgtagaagctgcttttaataagtattcgacgcattctttgataatttggctactgcttatcgtggccattatccctggagaagaaattttctggcgcggcttcgtattaaaacgattaaaccattatttcaatccttggttttcgaatgtttttgcagcgttactatgtatggtaatgatgttcccaagtggcaactttgcagcgattatcggtatctttgtcgcttcgctcgtatggaatatcatgtactcctatcgcccaagcctactcatgctatatttatcgcatctaacctttgcgtttttgttactcgcagccttaccaatttattaaaaatagcacaaaaacgctcctttttaggggtgttttttttataaaaaaaaataagcaaaatacttgaaagtcaaaataggtcagtatataataaagtcataaggtcaaagatagtcaaagtcaagacctttcatttctcatttttaaa

SEQ ID NO: 3010 - DNA, 709 bp, Listeria monocytogenes 4b
  misc_feature (1)..(end): n can be any nucleotide: a,g,c or t/u
aggctgtttctttaatactcaaaaataccactcctcaaaaaatttttctgcacgtgctctcgttgcttatagtagtgttttccacaaatcgaaaaatttaatcaggattttctttttcaagtggcaaaatggtttttggaaaaagtcattctatcgcaacatggcgggaacgagaacagtctctaaaaaactttaatttttttcaaaaaaagctagctacatcgaatgtaactagctttttcggtcttaactttcttcaattggttggtgtatttcttcttttacttttttaggtgcgtttttcttataagcaaggaagtagaataagctaacaaaaactgctccaccgactacatttcctaagtacactgggatgacgttccaaatgaaatccgcccatgaatagtaaccagcgaaaattgcagctgggataataaacatgttggcgacaacgtgctgaaatccgatagcaacaaatgccataaccgggaaccaaataccaaggatttttcctgcgaaatctttagccgcgtagcanagccaaaccgcaatcccaacaaaccagttacaaccaattccgngaacaaaaagcacccagaaaggatcgttaattnttgcaccagctgtagctagcgtttttgggtagaaatcgccttctgttaagcccacgaaantgtccgagaagtnaagcgacaanaatgcacccact

SEQ ID NO: 3011 - DNA, 980 bp, Listeria monocytogenes 4b; identical to SEQ ID NO: 1098
  misc_feature (1)..(end): n can be any nucleotide: a,g,c or t/u

SEQ ID NO: 3012 - DNA, 689 bp, Listeria monocytogenes 4b
  misc_feature (1)..(end): n can be any nucleotide: a,g,c or t/u
aagagcggagatgcatcgtacattttatttaactttctcaccatagtaagccttccttctcaaattgtattattgtcatcacaatgaatcatagcataagcttatccaaaattccaatataaaaagtagagctattaagccctactttttaaactattctactgcaactcaatcgttaaatcacctgttttgaggcgttcctttttaataagaaacggtctgacaataagtgcaataacacctggcaagacaactgctaccaaaataaaagcagcaagtgtgctgaatccgtaatttgctattaaataaagaggtgcaacaaaggcgcataagccaaggcctgcaacttcacttgcggcttgaatgtgaaataccatcacaccaagaggtccagcaattagtgttgttaatagtggtactaacatgaggctaggctttctaataatattaggtgtttgtaatttaggtgtacagataagttgggcaaaaaatgcaccccagttattatcccgataacttaacaccgcgaatgacacgaattgaaccgagcaacctatcaacgcggcagcacttgctgttggatcaagctgaagcgcaatcgcgagcgcagctgaagaagctgggctaagtatcagtaatccaaacacaaaagcaataaccatcgatgaaatcagcggcgaaccaccaat

SEQ ID NO: 3013 - DNA, 1124 bp, Listeria monocytogenes 4b
  misc_feature (1)..(end): n can be any nucleotide: a,g,c or t/u
actgatggcacctattcgatgcctgagcggccgccactgtgctggaaagtttcattgctttttctagttcatagatacgttgttttagttcaaagttttcttgcatccactgagcagcaacatcttccagttctttttctaattgtttattgtcacccttttgtagaaatgaaataacaaacagcgcaatagcagcaattagtaagataattatgactgtggtcatgggttttatacacacctctcttccataaactctactactagttatagcataatttacctcaaaacaccatccgaaataaggttttgtaaagaaaataaaaagaaaatgcatagagtccttgcaacaactgattaaaaatgatattattatacaggtttagtaaataaattcgtcagtcggagttggagggaaaaataatgcgcgttaatattactttagaatgcactgaatgcggtgatcgtaattacatcactactaaaaataagcgtgaaaatccggaacgtattgaattaaaaaaatattgtccaagattacgccgtgtaactttacaccgcgaaactaagtaagcagcaggatctccattctgttgctttttttattaacaaaaagggggaagccaaaatggaagacaaacgactgatacgcgagaaaatcttacggaatttgaatagccttgatagagtagaacatcgcgaacgttctattagattagcggaaaaactatttttattaccagaatgggaaaatgcaaaggttgttggtatcacattagcaagacaccctgaaatcgaaacagaagcaatcatcctacaagcaaaaaaagaagggaaaaccattttaattccaaaaacatattatcctagcaaaaaaatggagtttaaaaagatggattcgatacatcctttaataaaatctaagtttggtattttagaaccaaatgaattagcagaaacagttgataaaaaagtaattgacttactaattgttcctggagttgcctttaataaagatcattatagaatcggttttggcggaggattttacgatagatttttaacggattttcaaggacatacagtgtccttgtacctttatgaacaacaaatagagtttacac

SEQ ID NO: 3014 - DNA, 736 bp, Listeria monocytogenes 4b
  misc_feature (1)..(end): n can be any nucleotide: a,g,c or t/u
gcctggttgtttgattaatcgattgggaaccagtggaatccgtagcgttgaatgaggactgatgcttctttaggccccatggaaccggattccgaattcgggaaatgatctttcatatttgtccaaacatctgctatatggtcaataaagttccatgatagtgatacttgatcccagtgagagaagtaagacgcatcaccgctaagacagactacaatcaatatttcgtaagcctcaagcgtgttcatgccgtctggagaggaatgaatataatttaagttgactggcattgtaaccataccttgaccaggttctttgacgttcaaatgaagtgtaataccttcgtccggttggatatgaataacaagcacattaccaccaagcgattgttgttgaccaaataaattcagcggtacatctttgaactgaatcgcaatttgggtcgttttcttcgcaagacgtttacccgtgcgaatataaaatggaacgccagcccagcggaagttatcgatttctagtttggctgcaacaaacgtttccgtattggaatgaggatccacattatcttcttgacgatagcctttgagttctttgccacctacttcaccaggaccgtactgaccacgaataaagttttggtgaacttctttaccttcaaaaacgcgtaaggaacgaagcgcgcgaactttttcatgacgaatctcgcgtgtcgctaagttaattggtggctccatca

SEQ ID NO: 3015 - DNA, 727 bp, Listeria monocytogenes 4b
  misc_feature (1)..(end): n can be any nucleotide: a,g,c or t/u
ttgtggggctgaagaaacaatccatctattctcattttaaagataaagatgatttgtttttatccattatgaaggacgcgaaatcaacagaaatagattactaccgggcaaaacttcgggatagtgatttatccagaccagatcttgttttgtctagtttactttttggtgtgaaggaattatacgatacggacgaggcctatcaattttggttgcgttacgggttttatccgccgaagcatttgtatgaagtggtccaagcagatattaccgagaatgtgctacaaatggaacatgaatttactaatttatttagcaattggatggagcaaaagttaattccaatgcaagatgtggaaacgatgaaagaagcttatatgggaattctcgacgcagttatcgtagacattgtgtacgtgaacgacccagaaagaacggaaaagaaaattacagctttatggcaaattttctggagaggaattacgctaaaagctttgaattagaggtgtagtatggcaaaaaatatggaaattttagaaacagattcagttaaaaagatttactttagatatttaattccttccttagtgggaatgttgttaatgtctttaatattgtgattgatgggatttttgttggggcatatcccccccgantgacggtcgctggctggcataatataggcgtgcctgttttaccattttaccgcgattcctattggattgga

SEQ ID NO: 3016 - DNA, 704 bp, Listeria monocytogenes 4b
  misc_feature (1)..(end): n can be any nucleotide: a,g,c or t/u
cgttgaacaaattataacttgcgaaagaagactacgaagggggttatcgaattagtggaaggccctggggaagaagttatttcggaaccacaaattttctgggacgtaagtgttgcatatcaggaaccagaacaatataataaagcaaaagcaaattatgaactggcatactcgcactttacaaacaatcctactttcttaaaggaatatggtttatttttaagggaagaaggagagtacgcgaaatcacaagaagttttgcgtaactatttagaactagagccagaagacacagagattttatctttatttgattaaatgctaaaaagaatacaggaagggactgaggaaagatgaaggcatccatttcaatagacgagaagaaagattttattcgctggtttttaaataaacaccagatgaagactagagaagcaatgtgggttttaaattatattgctggccatgatcaaattgtaaaatatgttcattttgttgataatttggaagggtgtgcgcgtgggctttcacttagtgctcacggcgttgaatccgaaccgttcctattttttaaaggtaacattatgacgactgatccagaaaaagcatttcatgatattcggttaaattgggacgaagagttgtatgtagaacttcattttgaagaggcaatgtcttcgcctgaatacgcacttgttcgtgaa

SEQ ID NO: 3017 - DNA, 790 bp, Listeria monocytogenes 4b
  misc_feature (1)..(end): n can be any nucleotide: a,g,c or t/u
atggcactttgagcaccatactcgctgtttgagcggccgacagtgtgctggaaagacacttctttgaaagctgaatcacgctcagcacgcagtccaaagtcagtcatatcttcgcctttataatcatcgcttttcacaaaacgctcaaaagcccattcattccaaatattattattatgctgtaaaaggtagcgaatattcgtatctccatgtaaaaaccatagcagttcacttactacaagtttaaatggtacccgttttgttgtcataatcggaaagccctcttgtaaatcaaaacgcatttgataaccaaatgtgctgattgttccagttccagtgcgatctcctttttgtgttccattctctaaaacgtacttttctaaatccaaatattgtttcatcgttcgcactccttattccgcgtattgtgataaaaattcccagcgttccatcatttgttcgagctccgtttcttttgccgtgatgagttcgctaatttctgctgcttttgtaaagtctgctccggtttgttccaatgtttcattaagcgattcaatggtttgttctaattcactaatggcatcttcaattccgtcccactcgagttgttcttggtaggtgagtttaactttctcttttttctcaggtgctgccttttcgaccgaagtattcgccatttttttcattgatttcgctggttttgctttagcctncagctctttcaataatcactatattcaccgtagaaaatttctacttcaccaatcgcccggaaaacgagacatttggt

SEQ ID NO: 3018 - DNA, 1523 bp, Listeria monocytogenes 4b
  misc_feature (1)..(end): n can be any nucleotide: a,g,c or t/u
cagaagagagcccgaaaaatgaggaaaatgcggagcctcaaaaaattagcattaaagatataaaggttaagataaaggatattcaatataaagcagttaaataggagggagaaagatggcaaaagaaattaaggtaaatccagattttttgaagaaggttgaaagcaatgtaacaaattacattgatgcncagaaagaggtttctgttgaattactagcagttaggaccaacttagcaagtaatttttcaggtattgcttgcgacgaaataaaaaattatatancagaattaatgaatgatctagaaaaagaatttggtgtatttattacaaagaatcatgaaaaagttaaggcgttaggggaaagttataaagaacttgatggtcagttgggacaaacctttaactatggaatggagaggactaaatgagcggaaaaataaaattcaatatcgccgaagctcaaaatattagtcttgagctgaaaattgcagcaggtaggtatacgcaagaaacagaagagctattaaaagtgctgaaaaataatagtttatgtgataaagaccaagatgtcgttgaacagagggggcgaatagagaagaataaccaaagacttatagaatatgagaaatttgtaaacacaaatctcgctaaatctaattcagttatagaagaattgtttatgagtgtagaagtattgtatgcacagcaagtttctgagtttagaaaccctaattctgcgggttataaagaattaatgggaaatgtgaaagcgatatcatatcaaaaaaaatttcacagatttcaggattgggagaaatgcttacatcgaaaggttcggtgggagcaattaaagatatcagagacacactacttggaacattggtagatgatacttacttgaaattaattgatgatacagttgaatatcaaggagaaaataaaaatataactgatttatatggggataaaatatctaaagtggggtcaaggagaaaaaaattggacactccaaccaaatacctttcaacagcctacctcatctcagacacgctaaaaagttttaacagttatggaaatagcaaagattcctctcgacttgcaggagatctaaccggtgtagcaataacaaaaggtgcggattttgctgttgggaaattagctactacggcattatctggttttggtgtaagtggtgttaaaggcgctatcgcaggcgccattatttccgcgggctgcggatgaaatcatggctgcgccggccgcatgtctctaacacagcccggcccaaccccatagggatcactgccaaacacaaggcctctctccccgctgctcccccgcgccccatccccgccctcactgtgccccgtccgccccgcccctccttccgctcgtttttcctcctccattctcttctgtcgcgccgcctttttgccccgtcctcccccccccccccgttttgccccccttcgtgcgtcggtgcctgcttccgtgggcgaggaggagccgaaatacaaaaag

SEQ ID NO: 3019 - DNA, 1231 bp, Listeria monocytogenes 4b
  misc_feature (1)..(end): n can be any nucleotide: a,g,c or t/u
aattaataaagagtgatagtacgattcaactagcaaaccagtaaggtcgatttagtggccgtttatgatataatattagaaagtagcgatcatgctgctttcttatttttattctatagaagaaaaggagaataacgatgctagaaaaagctaaaatagatcgtattaatgagctttctaaaaagaaaaaagccggaacattaactgctacagaaaaagtggagcaagataatttaagaaaagaatacatcaagtcttttcgtacgcatatgaaggggacaatagaaaatacaacgataatcgacccaaatggaaaagatgtaacgccgcataaagtgaaacaacttagaaaaaataagcactaataattagtaccaaataaacattaatgagcaaatgaacaaaaataccaatcaattaagcaatttaaagcaattattagttgtgttaattgctttttaggcttattattaaaagtagttaaaattatattgaagagaggatgtttcatttgttcgataacacagatagtttagcagtgaatacaattcgtacattatcaatggacgcaattcaaaaagcaaattctggtcatccaggattaccaatgggagcagcaccaatggcttacgcactttggtcgcgtgtattaaatactaaccctaagaattcacattggtttaaccgagatcgttttgtactttctgctggacacggctcaatgcttttatatagtttattacacttaagtggattcaaattagaattagaagatcttaaaaatttccgtcaatgggaaagtaaaactcctggtcacccagaatatcgttatacagatggtgtagacgcaactactggtccacttggtcaaggtattgcgatggctgttggtatggctatggcagaaagacatttagaagcgaaatataataaagatggtttcccggtagtggatcattatacttatgcactatgcggagatggtgacttaatggaaggtgttgcttcagaagcggctccttatgcaggtgatcaacaattaggaagattaggtgtgctctatgattgcaatgatatctgctcttgatggtgatcgagacaaatgcttgctctgacatgtgaaacaccgctccgaagcttatggctggcaacatttatgatcgaaagacggcggtgatcccaaccgaaatcccgccctggctgtcgaaacggcacgcagaccctcgcgagc

SEQ ID NO: 3020 - DNA, 707 bp, Listeria monocytogenes 4b
  misc_feature (1)..(end): n can be any nucleotide: a,g,c or t/u
acagcggcagttacaatgggactaattaatacctcagctggtgtttacgaagttctttacgcagcaagtgatgccctcttttactttatgccaattatacttgggttttcagcagggaaagtatttaaaacgaatcaatatctttctgctgcggttggtgcagcacttgtttacccgacgcttgttgatatgtatagcagcggagctcatttaacatttctacatatccctgtaattttaatgaattatacaatgtctgttattcctgttattttagctatttactttatgagcaaactggaaaaagtattagtgaaatttattccgaaaagtttacaattgatttttgttcctctcttattacttttaattgtggtgcctgtatctctaattattatcggacctgtttcaacatatgctagccaactacttgcaaaaggagcattgggactttattcgcttagtccaatgattgcaggattcttcctggctggtatttggcaagtggctgtcatgttcggattacactgggcatttatcccgattttcattaataatatttctgttttagggtacgatccaattaatgctatgctttattgtactgtattcgcgcaaactggtgcggttctggcagtaatgcttaaaacccgaaaccaagaattacgttccctttctataacagcaactatttcaggatttttagg

SEQ ID NO: 3021 - DNA, 1015 bp, Listeria monocytogenes 4b
  misc_feature (1)..(end): n can be any nucleotide: a,g,c or t/u
acgaaatggtttcgccacctggatgaattccgccgttccaaagatcaacccattcaccttctggtagataaacttctttttctgtttgaccttcttgaacgattggcgctacaagtaaatcgtcaccgaacatatactgttcatctaaatcacgcgcattgatatcttccggataatccatggccatttggcgcatcatcgatttaccattatccgccgtatcttttgccgctgtataaatatatggaagtaaattcattcgtgtgtatagatatttttggaatgtcggtaaaattgtttcgtcgcctgttctggctactgcattccaaggtgaacgttcttcacttggcgatggatctgatttttccgaatggaattgcataatcggtgcaaaagctgccatcgcagttgcgcgtttatatagttctgctgttggatagtctcccgtaaatccagccatatcccacgcccagtaagaaacacctgaagttgaagcactaagtccagcttttaatgaagcttggaaagagtcaaatgtggaagtttgatctcctgaccagtaaataccagatttttgtgctccagaagttcctgaacgactaaacgaaactgcttctggattaatacttttcgcaaaatcaaaataacttgaaacgtagtcagttggataacggtttctcatttcttgtcctttttcgccgttagagaaagttgtatcacgtccccacaccatttctccaccatctgtcttaaatccgtcaatacctacttctgttaataaatactcacgctgggacgtccaccaatctacagcatctttattagtgaaatctagtaatatcccatttccaaaccactgagatgccggaactcggtaaggagcccctgttccatcgtccgcactatacccttggcttatcatgtatgcttcatcattatctctttgttcatatactgtaccgtcatcttttaatactggaacttgccataaaacgatattcatacctgcatcatg

SEQ ID NO: 3022 - DNA, 1179 bp, Listeria monocytogenes 4b; identical to SEQ ID NO: 1584
  misc_feature (1)..(end): n can be any nucleotide: a,g,c or t/u

SEQ ID NO: 3023 - DNA, 937 bp, Listeria monocytogenes 4b
  misc_feature (1)..(end): n can be any nucleotide: a,g,c or t/u
tctgaataattgtttcatcttctcctaaaaatctctcaatgccataagaagattcggtaactacggcagcttttcccaacaacttgtctaacatttaacccatcctttttatttacattattttattctacaaaaagcctctttcaatcaaaagtctataacattagaaaaaaataactcccccgcttaatttcttcccagtgagtaaaattttaatagttagaggatgaatataatcttattatattcgctagttcggctttagtctagtgtcattttcgaacaactaattatttagaaagtattatcaaaaatagaacagatttcttttaatttattaaaaaaataaagctgtctttctcctatgttccaggaaaaaacagctttatttttaaaacgccttactaataacactcaaaccaataaataagaaaagaaccgccataatcactgaattgttttggataagccatttacgcgtgctatccaatgcgttgttaagtttgctcccagctaataaaaaagcaatggtaggaatataaatcgaacaacaagcgataatgccaaaaataatcgttgccgttgtttcttgcccaccagataaattcagcgccccaacgctcactcccgctgtaagtgaaagcaacatattttttggattcactgctgaaagcacaaacgcaaacatgatcgcgcctgccggtttaatattgctcattttttcaaaccattttggtgttgcagcctgctccccgttttaggacgttgtgtaaagtcatgtgcgcctagaagggtgagtgaagccccgcgggcaatgagggccactgggaccaagggtgactgatgctgcggcgaactagccggtgggctgtgggggatgacgcggtgggggaaatgggtgtgtggtgcaccatggcacctaccgcgtaagaatact

SEQ ID NO: 3024 - DNA, 816 bp, Listeria monocytogenes 4b
  misc_feature (1)..(end): n can be any nucleotide: a,g,c or t/u
taatatagcttgttttttattaactatttttaccaataaagaaaaatgttgcagattgcgccgataccttgaacgatgaagaaaattgcaacgacaaggacgataccaattgcagagacaactggattgaatagagcgataaaaccaacaataatgccgataataccgattgttaaaatccagccccagccttgtacgttgttttgtttggcagtgaatgcgccaattgtacgcataataccagcaaataatacccacataccgaaaagtaatacgagtgttaaagttccgtcaaattcattaaataatagcaagaaacctagtaagatggataaaatcccgtcagctagtacccagccagaaacattttgtgattttctgtctgaaaagtaagagattgtgtggaaaataccagaaatcagtaataagaaaccaaacattaatggggaggttaataatgaaattcctggatggaataagaaccaaacccctaggataatcattgcaatccccgctaataaaacaagaattcgtgtaaaagtcttcattctttatttcaactccgctttgttttatctaattcaaccccatcttatgaatatagtagtcttaacttataggtacaatgatgtaacttatactttcnacgggcatacagcatactacatatagaaaggnnnnnnnnnnnnnnnnnnnnnnnnnnnannnnnttncatcatggacattattatttttannttttnnnnnnnnnnnnnnnnnnnnnnnnnnnnnnnnnnnnnnnnnnnnnnnnnnnnnnnnnnnnnnntcttcttncta

SEQ ID NO: 3025 - DNA, 1088 bp, Listeria monocytogenes 4b
  misc_feature (1)..(end): n can be any nucleotide: a,g,c or t/u
cctttgtaaatataaacgtgttcgatacgacaaccgggcgatgggccttttttgatagcatcaatgaatttatttaagttttcttcttcagcaattgcatgaatttcaacggaaccgtcatctaaatttttcactgttccactaatgtcatatttgtaagcaacatgtttggttgtgtaacgaaatccaacaccttgcacaaatccagtcactctcaaaatcgctgtatctctagccataacgaaaccaactccttttatttttccttattactagtgtatctttttttagcattactttcaaaaatttgcattccagtatttccagaaagcttatgctataataagtgtattatatttactgttgggagtttttgatatgacaaaatggaatgtctatctaactaaaggagaatacgagccttggtggtttttcgaggaatggaaacttccattcaagccgactttgctttttcagataagcaagctgcctttctgaagtatcaagagttagcagacgagttactacggaattatcctaatcatcaaacaaaaaaagattgtttgttagcagcttggaatgaagaagaagttgagtactgcgaggactgtgaagatgatattcaaacatttcacgggcttattttattttctgatggggaagtgtatcaaccaactcccgaagaaaaagagacgatttttaaacctgttttaacctttgcttgaggcgaaaagaaatttggaggattaacacatgcagaagaacgatgacttattaagagaacgtcgaaaagacgaacacgtggctcttggagtaaaacagaatgagcagttagcgccatcgagtttagaagatattcaactgattgaaacttctatcccgcgctataatgtgaaggatatcgatttaaccacaactattgtggggaccaatgtgcctttcccattgtatattaatgcgatgacaggtggaagtcggcatacgaaaaaaattaatgccgaacttgctgaaatagcacgcgaagcagctatcccaatggctgttggttcccagtctgcagctcataaaaaatagatagttaatagata

SEQ ID NO: 3026 - DNA, 991 bp, Listeria monocytogenes 4b
  misc_feature (1)..(end): n can be any nucleotide: a,g,c or t/u
cgattatattgtattattgactacgctatcaagatatacagcgatatcttccttttagtcaaatgaatgcagatgagcaagtaatgaaatacttcccagccagattaactcaaaacgaaagtaatgcatttcttgataggattcaagaagaattaaagtcacttggatatggtctctttgctattgaagttaaatcgactggcgaattcatcggttttactggatttcatgaggctacttttgaagctacattcactccatgcacggagataggttggcgattaaaacatagcgcttggaaccaaggctatgccaccgaagccgcacttggcgcgttagcatttgctgaagaaatcaacactattaacgaaatatacagttttaccgccgcactcaataaaccttcagaaaatgtcatgaaaaaaatccatttaacaaaaatagctacttttgaacatcccgctttagtaaatggcgatccactaaagccccatgttctttataagaaggcataataaaaccccctgtacattctggtacagggggttttaattccaaataagcagtgaaaaatatagtccgacgagcgttatgaataaaactggaatagtaatcacaatgccaattttgaaataagagccccagcttatctttatccctttctgcgctagaacatgtagccaaagtaaagttgctagcgagccaattggtgttattttcggacctaaatcagaaccaatgacatttgcatagactaacgcttctttcatcacgcctgtaaatgacgtatgatcgattgcaagtgcatttatcattactgttggcaaattattcatgacagaagacagtattgcagcaataaatcccattccaactgttcccgcaataaaccaaagtgcgcaacatatgtaattgcttctgataataattttgtgataccgacattttgcaaaccatatacaactacctacataccaaccgangaaacaca

SEQ ID NO: 3027 - DNA, 856 bp, Listeria monocytogenes 4b
  misc_feature (1)..(end): n can be any nucleotide: a,g,c or t/u
gccatcgtcaacagtgtgctggaaagtgatgggataaataaagcggctctggccgaattatataaggaatggaaataaggaggaattcaattgttaaaagtagtttttgtctgtttagggaatatttgtcgttcaccaatggctgaggggttatttcggaaagaagttgcagaagctgggttaacgaatgaaataaaaattgattctgctgcaactggtacttggaatttagggaaaccgccacaccgcgggacgcaagcagtgttgaaaaagcatggtgttgattatcgagagatgcgagctcgaaaaatttctgatgttgattttaacgaagctgattttattatcgggatggatcagcaaaatttagcagatttaaatgcacttaataataatccagatgtcatcgttcgctcgcttatgtcctttgtgcctggtcaagaggataaagatattccagacccatattatacaggggattttgatgaaaccgaacgcatggtaactgagggagtaaaggcccttttagcttatatcacaaaaaaatagtctgtttttagccctaatatgtttaaagactgacctcacgggaatatataagagtacaatcaaaagtgcagaaagaggtttttatacatgttaggaattatttggggaatcatcgtagttttattagcagtgtggttacttggaattattttccatattgcgggtggattaattaatatcttgttagtaatcgttttaatactcgttatttggaacttaattcaaatggctagaaataaacggaaataaccgaaaaagaacggtacggcgcgattaagataatgcgccgtaccgttcttttattttt

SEQ ID NO: 3028 - DNA, 763 bp, Listeria monocytogenes 4b
  misc_feature (1)..(end): n can be any nucleotide: a,g,c or t/u
cgatttggctttatttaactatgagccaagggggacattagtagataggattcttgttttcatcgagtgtgaaaccttctcccatcacatcatgaacgacactgacggaaacaaaggcatgtgggtcaattgcttgaacaatattttttaattgaattatttcatttttcgcaacgacgatataaaggacgtcttggtcttttttagagaagccaccgcgaccttccaacactgttaccccgcgattcatcgcgagcatcacatgggaagcaatcgcgtcattatctttagaaataatgagcgcaccgcgagccgcataagctccttcttgaacaaaatcaattacgcgagagccgatgaatacggcgacgagcgtgtacataacttgacggacatctaaataggagagtgaggcaacgagaacaattgcatcaatagcaaatagcgtgcgccccatgctaatgcctttcgtatgatttagcagtttggcgataatatcactaccaccagtcgtcccaccgtagcgaaacacgaggccaagcccaataccactaaagccaccagcaaaaagggcgactaaaagtaaatcgctatgtaaatctagcgtataaggtattcgctggaaaatccataaaaataaggacaaactcaccgttccgatacccgtataaatgagggaacgattgcctagaactcgccaacctaatataaacaaaggtatatttaaaattaagttagagtacgctggatcaatttggaagaa

SEQ ID NO: 3029 - DNA, 670 bp, Listeria monocytogenes 4b
  misc_feature (1)..(end): n can be any nucleotide: a,g,c or t/u
tgttgtggattattactacttctcggagcttgcgaggatacacctgagaaagccaaaacaacgactatacatatttcagctgcagcaagtttaaaagatacgatagatgacgtaaagccactttttgaaaaagctaatccaacgattaaattatcctttgattttggtggttctgggcaaattcgcgaacgtgtcgaaagcggtgcaccaattgacggcgtccttttagcgagtaaaaaagatgcggatacactgattaagcaaaatttagcagaaaaaacgaaagaatttgcgggaaatgaactcgttctaattgaacctaaaaacgtggatcagaaggcagggatgaacttagaacaattacttaatgatgcatccaaaatcgccatcggggatccagaatcagtaccagcaggcgcctatgccaaacaaacgctcgaaaacttaaatctatataatgcagaaaaagcaaaactcgttcttgccaccgatgttcgtcaagtcttatcctatgtggaagctggaaatgcagatgcaggcttcgtttaccagacagatgctctattaagcaaaaaagtacaagtgaaggcaaaaatcgatgagaaactccatgatccaattgcttactatagcgcacaagtcagtgactcggataaaaaagaagaaaccg

SEQ ID NO: 3030 - DNA, 1007 bp, Listeria monocytogenes 4b
  misc_feature (1)..(end): n can be any nucleotide: a,g,c or t/u
ggactacagttatctctccagctcctgcgatcgggcaacagtgtgctggaaagtagcactggacttgactggccgaccgcctttttaacaggcatggtacctttcattattccaggcattatcaaagcggtttttgcggcgttattagggattctcattcgtgatcgtttgattaaagccaaattacttcgagcatcctaagtcccattaatacacattttgagtcttctcctatataatgataatgattaacactgagaaaaggggactcggtacatgtcattactgaatgaggaaaatagcttttacaacgtagatttactcaatttattaaaagattctagtgaagcagttcttccatataaaagaattcgctttaggcgcaaccaacagattttagctgaaggtgcggaaactgattatttctacatcattgaagatggtgtcgtttctatgagtaaaaatacttgtaaagaagatagcattattaacttcttaggtaaacaagaatgtatcgggccgcttacacttcttggtggtgcaaaatcaccagtaaattacacaacgataagtgaagtgagtgtttatcaatttgaacgtaaatatgttcttaataaattcttaagttcaccagatgttttttggcagatgaatgcacttatgcaaagtatggttacacctatgttagaacgggaaggttacgttaatttaccttctagcgagaaagttttagcgggattaattgcttgtggggagagatttggaagaatcgagtcggatggttcttgtttgattccctattatttcacccaaaaaatcttgggaaattatctaaatttagctcgagcttacgttgcaactaacctgcgaaagctcgaagaagatggcattattgcgctttcgccaaaaccttggcgtgttaataatttcgagattcataagcaaaaactaaaagaaaatcacgaaccttacatatgagtgcaaaatgaatacttttttctaattgt

SEQ ID NO: 3031 - DNA, 618 bp, Listeria monocytogenes 4b
  misc_feature (1)..(end): n can be any nucleotide: a,g,c or t/u
cacagtccgctggaaagctttagctagatttcgagttttcaagcatcgaaaagccattatcaagcaagcagctacttaatcatatatattaatgccacgctatttagtgaattctaaaaattcagtgtcggcgaataattcttaattagaaatggggtaaagtcatatgcgtagggacaaaataaaaaaaggtgtcgaacaagctccagcaagaagtttgctgcatgctacaggtcaaattaaaagtccaggtgatatggataaaccatttatcgctatttgtaactcttacattgatatcgttcctggtcatgttcatttgcgagaattagcggatgtggctaaagaagctattagagaagctggcggtatcccatttgaatttaatacgattggtgtagatgacggcattgcgatgggacatatcggtatgcgctattcccttccctctcgtgaagttatcgcggatgcagcggaaacggtaatcaatgcgcactggtttgatggggttttctacatcccaaactgtgacaaaatcacgcctggaatgcttctcgcttctgttcgtacaaatgtacctgctatcttctgttctggtggcccaataaaagctggatt

SEQ ID NO: 3032 - DNA, 1683 bp, Listeria monocytogenes 4b; identical to SEQ ID NO: 1485
  misc_feature (1)..(end): n can be any nucleotide: a,g,c or t/u

SEQ ID NO: 3033 - DNA, 966 bp, Listeria monocytogenes 4b
  misc_feature (1)..(end): n can be any nucleotide: a,g,c or t/u
attttctgcattaatgggctgctttccacatccaaattatttcatctccaaccaaaaaattttcttgtgaaattcacaccttgtttattgtagcatgtttttaatttgatgcaaatagttttcagaaaataaaaatgagttaagcgttaccatcttgaatttttttctatctgggtgttttatgttgttaatttccccgttttcacactcttaaaacacaaaaaacgagaacagatttctctgtcctcgtttgaaatatttttatttactaaaccaatgttttttagcagaatcttttgcttttccttctgtttcttgtgcgcttttgatttcttgagctacgatagcttcatccatacgttgcacacgcccgtgtaactcatccattgctacgtcgtttacatttgctaattcttgttctgtcgcaataaggatgacacctgtagaaccttctggaattgtttttaatgttctttcaaatacatttaaagcatctttcacttcgccagcatctcgcatggaaccaacgattgcgccgaccatccaaccaattaaaataccaaatggaccgcctaaaataccaattaacataccaataaggctatctttcatatttttatcggcaccagtaaaatcaagaaaatcttgtgcaacaagtttatttcctggctcatgttttacaaccgccatttgataaccaatgattttgcgttcttggtgtaatcttttcatttcagaaaaagcttggtaagaaatactttcttcatcgaaattcataattaacactgttttttcttttttcatctgttgtacccctctcgcctcataaagtattatattcagatactatttatcgtacctatctttcattttactcgctctctcatgtaaatagcaattaatagccatgtcaagataaaataactactttntacagaccttttttaccaataaaagggaaaaatt

SEQ ID NO: 3034 - DNA, 693 bp, Listeria monocytogenes 4b
  misc_feature (1)..(end): n can be any nucleotide: a,g,c or t/u
ttattgtatttattttcttacacgttagcagcggcagtcgggaatttgggtggagagataattacagccggaattatagcgattggatctattggtagctttttatacatgtttccaggcgcattgactaatttaatcattggttttaaagctttctttactggaaaaacaatagtggatattgatggtggagcatttatgctgtataacgcaatacctacgccaattttacaaggaactacagcgttaagcgaatgtgtcatattaattatcttatcaataggaatgttaaccattagctggtatgcgatgaaaacagcttctttggaaaacgatggtagatttttaatgaataataaatgaccgggtccctatacttatcattggctctctttatgtgactatttggctaagtgggcattatgcaagttttaattacgatcaattaattccgacgggacaaggtataagtttaataatgaacattatactgattttagctgcatctgttattgctttttggatgctcatgtacacatggaatacgtcgcggttgcctcaaaaaagaccgagacttgtggaatcgattctcggtctttcttatacatgatctcgagcaaatgctttgtttcttgtgaataccaccattaagtagagcgacgccgaaaatgctcattccaacatataaataag

SEQ ID NO: 3035 - DNA, 939 bp, Listeria monocytogenes 4b
  misc_feature (1)..(end): n can be any nucleotide: a,g,c or t/u
atatcgtgacaaaaaacttacgtacaacagcagcaagtaaaattttagaaaacttcgatccaatttatgatgcgaccgtcgtttctaaattaaaaaatgcgcaaacaattaatatgcggaaaattaaacatggatgaatttgcgatgggatcttcgacagaaacatcgtatttccacaaaacacataacccatgggatttatcaagagttcctggtggttcttcaggtggtagtgcatccgcagttgcagcaggcgaagttttattctcgcttggtagtgacactggtggatcgattcgccaaccagcagctttttgtggggtagtcggaatgaaacctacatatggccgtgtatctcgttttggtttaattgcctttgcgtcttctttagaccaaatcggcccaattacaaaaaatgtagaagacaacgcttatttattagaagctatttctggtttagatgcgaatgattctacatcgattaaccaaccagttgaacgcttctcaaatagcttaacaggagacattaaaggcttacgcatcggtgttccaaaagaatatcttggcgaaggcgttgatcctggcgtaaaacaagctgtattagatgcgcttaaaacactcgaaaaactgggcgctacttgggatgaagtttctttacctcattctgaatacggtgtagcaagttattacattttagcatctagtgaagcttcttctaatctatctcgttttgacggcgttcgttacggataccgttctccaaacgcaactactttagaagaactttatacaaaaactcgttctgaaggctttggcgatgaagtaaaacgtcgtattatgcttggaacatatgcgttaagctctggttattacgatgcttactacaaaaaagcacaacaagcgcgtacgttaattaagcaagactttgttaatgtattt

SEQ ID NO: 3036 - DNA, 695 bp, Listeria monocytogenes 4b; identical to SEQ ID NO: 1538
  misc_feature (1)..(end): n can be any nucleotide: a,g,c or t/u

SEQ ID NO: 3037 - DNA, 1010 bp, Listeria monocytogenes 4b
  misc_feature (1)..(end): n can be any nucleotide: a,g,c or t/u
aaaaaatagttcgctaatagatacctataaaattgtcagagaaatcaatccgaatgggatgattttagcaaatattagtccagaagtagcccttcaagagggacttcgggcgatcgaaatgttagaggcaaatgcacttcaaattcatattaacccggcacaagaattagttatgcaagaaggcgaccgttcttttagtcattggctaactagaatagaagagtacgtcaagctttcgccagttccagtagttgtaaaagaagttggctttggaatgacgcgtgaaacagtaaaaacgctagctgatatcggcgttcaaaccgtagatttagctggaaaaggcggaacaaactttgcccaaattgaaaatgaccgccgccgtgatcaagcatatgatttcttacttgattggggtatttccaccggacaggctttaatagacatgcaacaccaagatgcgccaaagattgcttatttagcgtcaggtggtattaggaacccgttagatatcgttaaagcattagcgctcggagcagatagtgtaggtatggcaggacaaattatttattcactaaaaaaagagggcgtcaccaaaaccattgaaaaactggagctatggaaagaacaactacgtggcttatttgttcttgcaaatgcgaaaaacatctcagaattaaaaacaacgccattaatcataagtggtgaacttgctaaatggggcgcattacgagaaatcgatttagtcaaactagctaatagaaaataaaaaccagctgctattcatttagcaaagctggttttttatttattgaaccatttctggtaaagtttcatcgattgcttgaagacgttcagtgaattcttctttagataaatgtttcgtataaagatttgcgggatgaacgcggncatcatgcgaacaactacgcaaatattttttctcattttcgatagaagctaggatttgcttatttgcatacgggttagcacaattgatgtaacgttcgcag

SEQ ID NO: 3038 - DNA, 799 bp, Listeria monocytogenes 4b
  misc_feature (1)..(end): n can be any nucleotide: a,g,c or t/u
caaactacatccattattgtccctaaaaatttgaatgaattaccagattacattgtgcttcgcgaccgtgccagtcatacaaccgaaaaactcaccgatgatggtgcgattattacggaaaaactagctaaattatttgacgtaaaaccaggcgatacaattaccgtcaaaaacgctgaaaatgacaaattccaaataaaagtcagtgccattactgaaaactatgcaatgcactacatttatatgacaaaatcatattatcaacaagtatttaaagaaaaacctacctacaatttagacttattaatgttaaaagatacctctgaaaaagtagagagcaattttgcggaaaaattaacagatagtaaagccattttaaacgttactttttccaataatgttagttcattgttaaatgaaactttggatagtctgaatattgttatcgtggtactcattacgtctgcggcattacttgcgtttgtcgtgctttacaacctgacaaatattaatgtttcagaacggatacgagaactttctactatcaaagtactcgggttttatccaaaagaagtgactatgtatgtctaccgggaaaatattattttaaccttaatgggcattgcggctggatttgtccttggattcttcttgcaccggtttatcatcaccacagcagaggtagaccaaatgatgttcagtccggcaattagttggacaagctacctattttccggcatactcaccctcgtttttgcaactgttgtatgggtggcatgcacattaaactaaaactttg

SEQ ID NO: 3039 - DNA, 1273 bp, Listeria monocytogenes 4b
  misc_feature (1)..(end): n can be any nucleotide: a,g,c or t/u
acatttgtatttatattaacaccgatgcttttatatatcaacctttttattttgaattattcataattatgcttaaaaatacattttcaaataaaaataatcatttcaaatagtaataaattggttcctgttcgtaaaactgctatacttgttaatgaagttatattgaaggagttgagcgaatgtgaaaaatacaataaaatggatcgctatcggttttgctgggatcattctacttccattattaatcgttttctttatttacaaaaaagcggttgggaaaaaagaatataatcccgaggtactggagaatttagatgaagcttcacaggaatttgtgaaaaacacttcaccgttatccgacgtagattcgcgatataaatatatgagactagcgacaaaagcattaccttcagcaaaagatatcgaaattggcgatgttgaaaataaaaaaattgatggcccggctggcaaaattccaattagaatttatacgccgcaagaagacggaccttttgaaattatcgtttactatcatggtggcggatttgttctaggcggactgcaaacgcatgacgcgattgccagaaaacttgttcaaacaacaggcgctcgcgttgttactgttgattaccgacttgctccagaaaatccattcccagcagcagtggaagatgcctatgccgcgctactatgggttcaaaatcatcgtactagcttgcgagctaaatcctcagacattatcgttgcaggagatagcgtaggaggaaacttagcaaccgttgtgactcaaattgctaaatcaaaaggtaaaccaaatatcactgctcaaattttactttatccagcgacagatattttcagtcgtgatgcgtctgttctttatccttcaatggatgaatttgcagaaggctacgtgcttacgaaagaatcattagataaattctttaaattatatattgcgaatgcaagcgatcgtaaatacgatccactcgttgcaccaatacgtagcanagatttagtcggacttccaaaaacatttattgcgactgctgaatttgatccacttagagatcaaggggaagcatatgcgaagaaattaaaagacgcccgcgtagaagtatttgccaaacgctgtgaaaagttgcacatgggctgctgacaactaactcagaagcgaccgatgagacatacgaattgattaccgagcttttagaagaaaaatacatccatgaatgcactctttattagagggattttctgtgacaagaat

SEQ ID NO: 3040 - DNA, 948 bp, Listeria monocytogenes 4b
  misc_feature (1)..(end): n can be any nucleotide: a,g,c or t/u
accagaagtcatgaataatatcaaggtaaaaagcctttatgcaccaaaatccacaaacacaacagccgcttacaaaaattttgtgaacacggcgaaaaagaaaaaactaaccattaaaaccgcaaaagcaggcgtaaaactccctgtcaaaggagtaaatgcgcagtttgttggtcctgttaaaacttacggaaaaacagatcgaaacaactggagtgctgttctccacgtcgcatataagaaaaacaccttccttttcacaggagatgcgcaaacaaaagcagaaaacgatatgattaaggcaaagaaaaccttacgagctgacgtgttaaaagtaagtacacaaggttccaaagctgcaacaagcaaagcgtttgtcaatgtcgttaaaccaaaatacgccattattagcgttgggaaaaatggatatggccaccccacttcacaaaccgttaacacattgacaaaagcaaaagcgaaagtttatcgaacagatcgtaataaaaccgtcgttgtaacaggcaacggctccagttattctatcggaaaataatttatgcttatacgaaaagccaataataaagatacgactttattattggctttttccaactatgcgtattggttaacctttctgagttagaaataactcaaatatgacaaaaatattgcggttacattggctaaaaaagggtattttcataaaaaagaggttttttagaagtctatttttagtacttgtgcaaacttttncgatgatncnntgtntttgtnttaggncnnctgnttctgnnggngncgnagtnnnnnntggcctatccctttctcnncccagngtaagttgcnatgatggnncnatctttccagcncntgtcggcgctcgagcagctgtaggtgactataacncnncnnaaagnttaactcatatctacccgcagccggctctcc

SEQ ID NO: 3041 - DNA, 1286 bp, Listeria monocytogenes 4b
  misc_feature (1)..(end): n can be any nucleotide: a,g,c or t/u
cctttagggccacctagcatgcatgcctgagcggccgccacgtgtgctggaaagatcccaaagctggtgaagatgttacattaaatattactacctggccaattgaagatggacaaaatgtttgggtagaatggactaaaaacggggtagcacaagagaatgttacagcagcttatgattataatagcgggaacaatacttactggaaagcagatttagggaaatttgaaaaaggcgatgaaatcacttatacaacaaaaggctctactgacggaggaactgcttatgaaagtggtccgtttacattttacgtgacagactgggagtatgtgcaagatgttagtagcgttgtagataatggggattctattacattaaatatgacagccactgcaggtgaattcactccaaaattatatctttcatttgaggatttagatacgcttcgtatggagctatcaccaaccggtaaagaaactggacatgctggaaaaactggttacacagtagatgatggtgcagataaagtaacagttacaacggaggatttacgagtagaaattcaaaaatctccttaccgcatggaagtgtaccaagcagacggaactttacttacaagcgaatatacaactgccaacagcttaggttggttaacagatggaaaaaatgtcatcaatcaatatcaaaataactttatgacaccgagagacgaagcattttatggttttggtgaacgttatgacccgattaaccaacgaggaaaagatgtagagacatacgtatacaatgagtatcaagatcaagcgcagacagaaagaacctatttagcggtaccattttttgtaagtgctaataaatacgggatgtatgtcaattctgatttccattcacagttccaaatggcttctaaagtagaagataaatatagctttgtattggacaatgatggcgatatgacgaatatgcttgattactatgttattagcgggaaagatcaaaatgatatcgtaaataactacacggatataacagggaaaacgactttgctaccaaaatgggcttttggactttggatgtcagcaaacgagtgggatagagaatccgatgtaagctctgcactttctaatgcaaaagcaaatgatattccagcaacaggttttgtattagaacaatggagtgatgaagaaacttactatatttggaacaatgcgacctatacagcaaagaaaaacggggaagcatttagctatgacgattttactttcaacgggaaatggactgatcct

SEQ ID NO: 3042 - DNA, 757 bp, Listeria monocytogenes 4b
  misc_feature (1)..(end): n can be any nucleotide: a,g,c or t/u
tacagctgactggcggccgacgtgtgctggaaaggaggaaatcgtgatagtgtctttatccaaacgaaaggcgcgcatccagttcgggaagcaagcgacgtgccgcgggttactccggaagcaattcacgaagatatttcggttagtttagatacgctacaaacagatcatgttgaattattcgcacttcatcgcgacaatccagatgtatattcgggtcctattatggaggcgatgcataaagaagtggaagatggccgcgtttatgctatcggactttcaaactgggagctcccgcgtattatcgaagcgaatgaatatgcagtgagccatggattgacgccactaagctttaacagccctaattttagtttggcaaaagtgaatcgaccacgctgggaaaattgtgtttcggcgagtgaagagatgattcgctggcatgaggcgacgaatttgccactattttcttggtcatcacaagcaggcggatttttctctggtagattttctgaggaagacacgcgcgatacggaaatggtcgaagtttattatagtgaggcaaactgggaaagatacagtcgtgccaagcaactagctaaccaaaaaggttgcactccaatccaaatttcgcttgcttatgtattaacgcaatcattcccgacagccgctgtcatcggtccggaaaatgctacggaacttcaatcttgcgttgcagcggccgggattaaattaacagcgtctgaggttgattggctga

SEQ ID NO: 3043 - DNA, 1129 bp, Listeria monocytogenes 4b
  misc_feature (1)..(end): n can be any nucleotide: a,g,c or t/u
ctttcctctctctcctctgtccatagacagcaaaaaagaaacaaagagccaggcatcgcgccataccaacaccacgcccacgagagcccgggaccacccgcagtcatagcaccccgcccgcatttccaccacatctcatctttcttcccacttcattcaactaacatccatccccatcacaatggcccccccagtcacccgcatgtcaccccatgttcccatgcccacagcatcatagaatttgcctcatgcaaagttggggtagataggcacatcgtttttgccgaaaaaggagtaattttgcaatacccagtgtgcatactatttatttgtgacaaaaaaacaaacaactttttttcttatttacgaggaattcaccaaatttttttagaattattctagaagaaatatcattattccatctctatggagaaaatctgccaagccgcacatggtaacataagttgagttctcgcccaacttatatatcgcttactaaattattttagaaaaggagtgggctatagtggaaaagttatttacatataaagagtttgttgacatgatgcaaaaatatgggattagacatacgaaacgcaagctaagacgtggcgaaaatttaatggagaacgcttctaaatttagtaatgttgttttactaatagatggttatataagcagttatacatatgaatctccagaaaaactcttatctatatttgaaccaggtatttttctacgttattccattttagaagatcagccagagtttgtgacaaatattgctctctcagataactgtgaagtatacgaatataaaaaagaagatattgaatatgcattaacattatttcccgaaaattttggttttcagtatttctttctaaagagaatcgggcggcatttatattatcgagcattacttaacggcaaagagcataaagataaactatattatgccatgaaatatttgggagaactcattggtaaaacggatgaaaacggaaatgtttcgttgccaccagaagtgacattgaaagtcttaattgaatacagtactttatccaaagcagctttttatagacaacgaattcacttattggagcaagaaattntaaaaccgcatgaa

SEQ ID NO: 3044 - DNA, 1251 bp, Listeria monocytogenes 4b
  misc_feature (1)..(end): n can be any nucleotide: a,g,c or t/u
aatcccacggacaaatttttatcccctcgattaatcccttctaccttcaattcagtagcttcatttaaggaaatagaagctggaataaccaccgtataattttctacccatttagcgtagagggttgctgaaacagttgctggtaaagaaaaatcaaacttattagtgaaattttgatcaagataccacccgtcaaagtaatgtccttcttttactggaatcacttcttcccagtactccccagaaattttactttgtactttttgttcctccgcgtcttcaaattctccacccatcgcatccattgttagagaaaggaaagcgccttttctgtagcctgtaggttcactttgtttccggtgatatgtctgtagttgcgagagattagaaaactgcacccaattcttttcgtcataccagcttgtattttctaagctagtaaaagtacttaaattgtgactgacaaacaagtaagttaaggaggtggttcccttaaacatatctgtcataattgctgcatccgtaaaattatccagatataaagattttaacgctgtacaatctttaaacatggtacccatgttagtcactgaactggtatcaaaggtacttaaatcaagcttctccagtttttcattatcagcaaacatggcacgcatatcagtcactgaactcgtatcaaaattacttacatctaacgcttcaagactagtacaaccataaaacatggcattcatatcagtcactgaactcgtatcaagatgacttacattcaatttctcaagtgattcacagtatccaaacatgcctgacatattagtaacggaactcgtatcaaaattacttaaatccagttcctcaagtgagttacagccaccaaacatgttcttcatattagttacagcactcgtatcaagaccactcacatcaagctccgtaagtttgatagcatgagaaaacatatattccgtagtaagtaaagatgatgttgtgggataatcattgtctttgataataactttttcaagtgttaagtgattattaaatgcggttctaaaagacgtcactccagacaaattacactgttcaatcctcacgctttccagtgctggaaaagcgctattgtcaaaatacgatgcaaacttcctgccagagtagcttcttcaatctctatatgtgcaatgtatttaaataactattccaagcggttggtttactgcttggcacgttgccaaacatacgcatgctata

SEQ ID NO: 3045 - DNA, 1237 bp, Listeria monocytogenes 4b
  misc_feature (1)..(end): n can be any nucleotide: a,g,c or t/u
actaaccgttagctcgacccacgtttttccagttgcctcatcctgaaaaaacgcttttggttccccaaaacggcttgagcgaccaccggctaatacaatgccgacattaactttttcgcttttcaaggcgtccctctcgcataactaaaatttcttcggtcatcatttctgcttccgaggcataatgcgtgacaaaaataacggggatatggaagtctttggccatttgaccaactaatttcatacaaatcaaacgcgtttcttcatctaaaccattgaaaggttcatccagtaaaagtaattttggctccgtaatcattgcccgagccatcgcaacacgttgtttctcgccaccagataatttctgaacggaagaataaagcaggtgagaaatttgtagataatcactcatttttcgtacttgttgctgaatttctgcttgttcttttttcttctttttcttcactttcaagccaaaagcgatattttcatacacattcatatttgggaatagagctaaattctgaaataaataacctactttgcgctctgttacaggaagatgtaacgaaatattggaatcatcccacggagtcccgtcaaattcaataatgccgccgtcaatacttttcaagccactaacgcactgaaatagagttgacttgcctgaaccacttgcgcccatcatcgcggttactggcttttcaaacgtataatcaatatttaaatcatgaaaaggaagttttttatgaaattgtaatcgtagcataattacatccccctcgttaaattactctggcgtatagttaatacatgaatgacaagtaaagcaaacacgccgataatgacgttaattaatccaagataaatcgcagtacgcatgtctccttgttgcaccataaaatagatgcttgaagcaatggtatccgtcttgccttcaatataaccagccaccatcaaacttgcgccaaattcacccatcgcccgacaaaaactaagcaaaacccctgctaaaattggttgccagcaattcggtaaaataatttttgtgaaaatttgttttttattcgctgaaagagtctctgctgcccatacaagttcgtgatcaattgataaaaatgctgatttcaaaccttgatacataatcggtcaaatcataattgtcgatgcaacaattgcgccgctaagctttccagcacacgtcggcccgctcaagcatcgtcaagtgccctcagtt

SEQ ID NO: 3046 - DNA, 830 bp, Listeria monocytogenes 4b
  misc_feature (1)..(end): n can be any nucleotide: a,g,c or t/u
tgaaacaaattcaaaaaatgcaaaaggaaatggcgaaagctcaagctgatttagaagctcaagagttcactggaactgctggtggtggaatggttacagtaaaagctactggtaaacgcgtcattacagatgttgttataaatgaagaagtagttgatccggaagatatcgaaatgctacaagatttagtacttgcagcaacaaatgatgtattaaaacaaattgaagatacaacttcacaaacaatgggtaaattcacacaaggattaaatattcctggaatgtaatattgtttggtttgagactcttggcttatttacaagagtctcaactatttttcaatagaatgttccacgtgaaacatttgtattttgaaggtgagaggaagacgaattatgcattatcctgagccgataacgaaattaatagatagttttatgaaattaccaggaattggaccaaaatcggcagctcgactagctttttatgtgttagatatgaaagaagacgatgtgctagattttgcaaaagcccttgttgatgcgaagcgaaacctaagcttttgttccgtttgtggtcacattacagataaggatccatgttatatttgcgctgatacgtcacgcgatcgaagtgttatctgtgtagtacaagaatccaaagatgtcattgcaatggaaaaaatgcgtgattttcatggcttataccatgtacttcatggaacaatttcgccaatggatggaattggaccagaagatattaacattcctgatttgctgaaacgtttgcaagatgacacaattgaagaagttattttagcaaccaaccct

SEQ ID NO: 3047 - DNA, 1163 bp, Listeria monocytogenes 4b
  misc_feature (1)..(end): n can be any nucleotide: a,g,c or t/u
agtacaagcggaggctccagttattagtgcagaagataaaactatcaatcaaaatgaaagttttaatccactaaatgaagtcactgcgtcagacgaaaaagacggtgatattacaaaggacatccacgtaaccaaaaatacggtagatacgactaagagtggcaaatatgatgtggattatagcgttacaaattcaagcaacttaacaacgacaaaaagtattaaagtaaccgtaaccccagcagcaataagcaaaaatacagccccagttattaatgcaaaagatcaaacaatcaaagttggagatgtgtttaatgtgttaaaaggagttactgcgaaagataacgaagatggtgatttaacagcaaaaatcaaagtgaccaaggatacagtgaataattcgaaaaaaggtgtttatcaagttacatatactgtgacagattctggcaatctatcagcttcacttacaattaaagtgactgtaactcaagatggaaaactaatagtaaatccaagtgatccaacaaagccatctatcacaaaaacacctgtggaaccaacaaaaattgaaaaagatcctgaaaatagagcgacttccgttttgaaagcaagtaaaataccaaaaactggtgatagttcaatgatatggctagtatttgtcggactcggcttaacagctattggtattagttcttatcaaaaaaaaacaaatctttcaaaatgcaatatgatgatgacgaggtgtaaagaatgattggagaacatcatacaccatgggcaaatgatagatcggaagaatgaccagtcgttgacataaatctcccagaacatttaagcggtcagcggcaagaattatgcagaaatgataatgcacgtcatataaatatttgctgcagccgaggtctaattattagcggcatgaaaaaagctgatgacgataattactatattgtcatcgatatgatcgacagcgtgctcgtgtcgctgctcaatacagcgattgaggccgacgctgattatcgacgattagttggtagagatgctatattactagaaggatgtcgtgaacaaggatgaagagcacaacattatatagactgcgacccatgctgggcgaaactacgtcatacacactgtctactaactgatcctacgttctctac

SEQ ID NO: 3048 - DNA, 945 bp, Listeria monocytogenes 4b
  misc_feature (1)..(end): n can be any nucleotide: a,g,c or t/u
cgtctggtgtagaggtggttgttttaacagacgtttgttgtttttctgcattggtattgacggaaagaacgtttgacataccaagtgtaaatattgctaaaacagcaacaacaccagcgatactcaaccatttaccaacaggtttatttttccaaatgaaatagtttttatctttgaagcctttaaaataattgataaaaccattttttcgaatgggagtttcaataaagcggaacgataactcagcaataataaaagtagcggcaacttgtaggatagctcgccatatattaggttgagtaatttctagtacaggtgttgtcaacgttataattggataatgccataagtaaataccgtaagaccttgttccaatccatctaagtggtttaaaactgaaaatcttgcttagataagaggcggggtgtgagatagttgcaatcatgataacgccgagaattgcaacgaataacaagccaccgcgatataagaaaggttgatattcacttacaaaagctgtgaatagaataaaacataaaatactgattgttcctgcaatattgagaactgccttacttttccttggaactacaggactaaggcgattgaaaggccagacaaatgcaagtgcacaacctgctagcaaatcaaatgctctcgtatccgtaccgtaataaacacgacttggatctgtcccaggaacgtacaaaatcgtcatccaaactgcggagagaaggccaaggccaatgacgatttttaataatagttttggattttttacccatttgagaaataccagtaaaaaagcgggccatattaaataaaattgttcttcaatggctagtgaccataagtttttaagtggtgatggaagtccaaatgaatcaaaataagaaacattgtggaaaataaaccaccagttacttacataaaagaaagaagcaa

SEQ ID NO: 3049 - DNA, 1216 bp, Listeria monocytogenes 4b
  misc_feature (1)..(end): n can be any nucleotide: a,g,c or t/u
gcatagccaaccggtgtcttttcaaggtagcgtccgttaaaagttacgtccttcaatctttcttgattgagggactttttttttacctaaaaataaatttgaaagaggtgagtcgaatgacaataggagaactggagaattttaacagctaggaagagaagcggagactctcatttctctattaaacagagaatgaggaatagaaatgctaacattaaaagggaaatatcacgaagcgaaagtttttacagatgatgtggacgacnataccatcgggccaattattacgctgtagtatcaacccgttgcgaaggatagttagatttggatcatgcccgacacgcacgggggtaaaggctgtgtgattggatcgacaatgacaattcaagataaaattgtaccgaatttggttggagtagacatcggttgcggactgtatgtagtgaaactaaaacctggcaagttaaaaatggactttgataagctagataaagttattcgcgaacgagtgccatccggaagcaaaacgcacgataagcctgtagatgaatttgatttggaaggtatagttgcgccaattcatcacggctgggcagctagaagtatagggacgcttggtggcgggaaccattttattgaagtgaatcaaggttctgatggtatttaccttgtaatccatagtggaagtcgggtgcttggtaaagaaatcgcagaataccaccaagaagtagcttataaaagattagacatattgcgtaaagaattgaaattagacgcaactgctgcgaaaaaacgcggaaatttagaaatggccaacaacttgaacggtgagcgtgagcaagtgaaattggattatgacttatcctatgtgacgggctctgatttaaacaattatttaaatgacatggaaattgcacaaaaatttgcagcgcgtaatcgttacgtcatggcagaaactattttaaaagcgatgaagtgggataaagcagttgtttcagcgtttgattgtgtgcataattacattgatattgataaccacatgcttagaaaaggtgcgacatctgctcagcttggagagcagattatcgttccgcttaatatgcgcgatggcagcattcttgcaacgggtaaaggaaatgcagattggaattactcggcgccgcatggggcgggaaggatgctaagtcgttctaaagcaaaagcgcaaatcagttta

SEQ ID NO: 3050 - DNA, 1340 bp, Listeria monocytogenes 4b
  misc_feature (1)..(end): n can be any nucleotide: a,g,c or t/u
ctggggaggataataagacacggaacgccggggcaaaacgacaacaagacgacatagcaacgggcgacaccaacggcgacgcgggagcgcgtcgtgcgaaggaagacggggggacgaaagacgacagagcaaatacggggtggcaggcaaaacgagcgacaagcaggaatgtacagatgatgtaaagaccaagcgtcagtaagcgagaaacatagcagagaagaagggaagcgaccgagaaaagagaaggggaaagcgattgcccgcttgcagaagccgaaagaaagggagatcggaagtggggtgcccataaaggcggcaggacgaacgcacggacagtgaataggttagaatgaccagactacgccgagtgcccctacccatctgcgcgcccatggtcggtccctcggttgctgcgcttaaagaagaagcagcaatgtttcggacaattcatttgcacgttgtcgaatggcgcgttcacttttttgcacccgtccaagatttagctaaagtggaagctgcgctagatgaaattcgcacaattttaccagaaacaccgattttattcactttccgcagtgcaaaagagggcggcgagttagctgtcagtgacgaattttattttgaattaaatgaaactctagctggaacgggaaaaattgatttagtagatgtggaacttttcaatgaagaagcggacgttttacgcttaattgaaacagctcacaagaacaatgtaaaagtagtgatgtcgaaccatgattttgataaaacacctgcgaaggaagaaatcgtttctcgtttaactcgcatggaagcacttggcgcggaccttccgaaaatcgccgtcatgccaaaatctgctggagacgtactaactttactagatgcaacgaatactgtatctgaaaaagctaatcaaccaatcattacgatgtcgatggcgggcactggtgtcatcagtcgtcttgctggcgaagtttttggctccgcaatgacatttggcgctgcgaaaaaagcatcggctcctgggcaaattgatgttaatgagttacgccatgtccttgatttactgcacaaacaattttaataaatactaaaaaagtagcaagtttctttgatgaaaagaaacttgctactttttttatctagaatgaattattttgttaatagactactttttataaacgaaaataattcttgaagcagtgcattttcgctctgcttataatggctgcgacatattctggcatccgtcttctgatatctatttatatgactatttatgtctatatgcgacaagtactaagtgctactaactaactgtaccgnaattttcg

SEQ ID NO: 3051 - DNA, 752 bp, Listeria monocytogenes 4b; identical to SEQ ID NO: 1590
  misc_feature (1)..(end): n can be any nucleotide: a,g,c or t/u

SEQ ID NO: 3052 - DNA, 378 bp, Listeria monocytogenes 4b
  misc_feature (1)..(end): n can be any nucleotide: a,g,c or t/u
gttacaacgcgtgaacttacgattactttcttaaaagatggcattcaagaaggcgattatgatgtgaatatcagtacagccttcaaagtgtttacctcaacagaagaaacgatacaggaagttgttttcaagacagctgggaaagatactgtttatcaaatcgaagttgtaccagtagttaactacccaacaactgtaggaattacggcgaatccaggggtagtaaatccgacaaaaggtcaagtagatgccaagttcaacttaacaaaagaaaaagatgctaagggtgagctgaaacttaatgattatgcttccggtggaacaacaactattgataaagataccatcaaagtatattcgagtgatgttagtgctggg

SEQ ID NO: 3053 - DNA, 1099 bp, Listeria monocytogenes 4b
  misc_feature (1)..(end): n can be any nucleotide: a,g,c or t/u
cttttagttttgtttctcgagggccactcgcaagcatcagccagcgcgcaatttatgaaacaccaagcgtggcatgtaagaaaaaatcacaagcagcaagtttacgcaaattctaattaaaaggcgatgatttcgttgacactgcttgacaagttaaatgaagatatgaaacaagcgatgcgcgataaagagaaagaaaaactgtccgttattcgtatgttaaaagcagctttacaaaacgaagcaattcaccaaggtgtgaaagatcttactccggatgatgaagtaaccgtgatttcccgcgaactcaaacaacgcagagattctctagcagagtttgacaaagctggacgtaacgacctttctgataaagtccgttccgagattgtcattgttgaggactacgcgccaaaacaattgactcctgaagagcttgagaatattgtgaaagcaactatcgaagaagttggcgcatctagtaaagctgatttcggcaaagtaatgtccgcgattatgcctaaagtaaaaggtaaagctgacggtggtgctgttaaccaattcgtaaaaaaatatctttcataaactaattcaaactagttttgaaacattaagaaacaggattacttcctattttgtggaggaaatcctgtttttttatgcctatttttacttgaattgcgttgttgctatcgcttcgtttttcaagcaaggcaatttcgtgtataatataactaatcaaggcacttataacaggtgaaggggttagccaatgctaaatgaatttaatgaagtagtcgaattatctgatgacacaaatattcaagatttattcggcaataataataagaatatcgaacttttagaagagttacttcaagtgaaaatcattactcggggagagtcactatctattacaggcgaggaagagcctgtacagcatacgactgccgttttaaatgaacttattttgacggtaaaacgaggtattcatattgatggtcgagatatcgctcaagcggtaaaaatgcaaagaaacggaacacttatttactttcataccttatttgaagaagaattacgaagaatgcanaaggaatgc

SEQ ID NO: 3054 - DNA, 701 bp, Listeria monocytogenes 4b
  misc_feature (1)..(end): n can be any nucleotide: a,g,c or t/u
acggcaaatccgttaaaattaatattgttggtaaatcagcccatgcaatggaaccaaataacggtgtaaacgctggtcttcatttagtagctttccttggtaaattcaagctgactggcgcggcaaatgatttcgtaacatttggtcgcgattacctattcggcgattcccgtgcagttaaattaggtattagctatgaagacgaagaaagcggcgaactaacaatgaacgttggcgttattcgttacgatgtagcagaaggtggaaaatacggacttaatttccgttatccagtaactgctaatatggacaaattgaaaaataaaatgcaaacagtggtttatgagtacaatgcgcaatacacgcattacgaagattccaaaccacttttcgtaccaaaagatcatccgctaattcaagttttacaagaagtgtatacaaaacaaacgggtgaagaagctactttactagcaattggtggcggaacttatgcgcgccacatggagactggtgtggcgttcggcgcactattcccaggccgtgaagacacgatgcaccaaaaagacgaattcagctattttgatgatttgttaaaagctactgcaatttatgcagaagcactttacaaattagcgaagtaagggttataattgaaaaaattaactgctgcaaagcttagttttgcggcagtttctttgttt

SEQ ID NO: 3055 - DNA, 745 bp, Listeria monocytogenes 4b
  misc_feature (1)..(end): n can be any nucleotide: a,g,c or t/u
atagtcaaaatcttgtacgcttgttttagcttgatcgtctattaagtaaatctcggctggtatttttttaaaaagaactgtctgaatgtagagattttgtagattacttctgccgataacgacaatttttttcttcttagatggcatatgcatctcctcctcatcaagtctcttattgttattttagcatgcttccgaggcaaaaataaaataacttgaccacataaataaaaagcaatgctcattcgctttgctttttacaaaataatcttattttaagccatttcacgtcgttttacttttaaataatgcgttgcaaaacagaagaaaatcggtaatacataactaacgataatcagaataattacttctaagattcctttaccgatgtagccaccagtcattttgacaaagcctgtgattggagtttcgagaatttgaataacggaacgccatccacctgtatcatgcatgtgatgaataaatcctacaataaaggccacaatcgttaataaaaaacaaattcctgctactacatacgcaaaccaaaatagagctttcttccaagttgctgtttgtttctccattttttcacctgattcaattagatttgacttgttacattcacttgttacattatactccttgcctctcaaacggatacataaatttgcgggnntaancttccagcgcncgtcgnccatcaggctngtncagntacccagtccctcncacaagntcactc

SEQ ID NO: 3056 - DNA, 1192 bp, Listeria monocytogenes 4b
  misc_feature (1)..(end): n can be any nucleotide: a,g,c or t/u
tttgcatctgtgtcttggaaagctttaccaaaatattccgtttttggcgcggcgtattgcggtttggtatagtttaagacttctgtaacatcactactatcagcaagtgcacgctgtgtggatgattcggtacttttcactgcgtcatagatttgatagttagtcataccaagatatttaacaatataatttctatcaaacgttcttgggggaagttgtggacgatcaatttctgcaagtcccaagtttccaaagaacattgcgataccaagcgtcagaaccccaactacttttcttgcacgaatacgggctgttttgtttggttttacaaagcggaaagcaagtagtgcaattaaaatgataatatccgcgaagtaaataatatcgtgccagctgagtaacgctgtgatactacttcccatgtcgcccatgttttgcatttgttttgcgtttagattcggaagtgtaatgaaatcactaaagaatcgataatatacaatatttgcgtaaagaataaaactcattaaaaagtcaatgacgataatccaaatgaatgaacgacgtcccttagcaaagagcgcaagacccataaagaaaatggccccacttaatggattaatgaacagcaaaatttgctgcatcagattttctatgccaagtttaaattcaagttgatatgcaatatacgtttttagccaataaagaatgacggctagaacaaaaaatccataattcttgcttaaaaacgtttggatttttattttccaatccttcatgaaacacctctcctacacactatttactcgttttaattgttattttgaaatgaaaaaaagaagctgtattatgtaacaagaaacattttcatacagcacccactttaacataattctaacacaagattaataaaaggcaagttataacctatacgtctgaagtaggattttaggggaaataggctgatataactagtcaaaaaagaaccatttggaatagaattctgctagaataaaaagaaaacattgaggtatgaaatggaagcgattattacgaaagaattttttgaagataagacaacaatcgattagcgagagatatcttggtatgcgctagtacatcaacggatagggattcttctggctatagtgacagacgactggacattgtgctgttaactcacacacaagagttt

SEQ ID NO: 3057 - DNA, 1024 bp, Listeria monocytogenes 4b; identical to SEQ ID NO: 1550
  misc_feature (1)..(end): n can be any nucleotide: a,g,c or t/u

SEQ ID NO: 3058 - DNA, 954 bp, Listeria monocytogenes 4b
  misc_feature (1)..(end): n can be any nucleotide: a,g,c or t/u
ggtatgtaggattacttgtcgcaatatgtatgcttgttggctttctttatacgggaggaccttatcctattgcttatacgccatttggtgaaattatggcaggattctttatggggggaattattactttcatttccttctatattcaagcagaatttattagttcgtttatcgtatacgtatcgattccagtaatggtgctcgttggtaacttgctacttgctaatagtattcgtgatttagtacctgataagaaaaatggtcgtttaaccttagctatcttgctaggtcgcaaatgggcaaccgttctttttgcagctgcttttctattcagttacgtatttgaaatcgcccttattttcacacaagatgctccgtggtggacgcttctgattttacttagtttgccagaagctattcgcgccgtgcgtcgtttcatcggcaaaacttcgccgattacaatggtcccagccatgaaatccacatctaaagcattaactatctttggtattacattggcccttgcttaccttttaagtctattatccagaaatttattcatgtaaaaaaactggttgtcctcgtgacaaccagtttttttatttagacccaatttggacttgctgtttattttgggcatatttcgctaattctatcgataaatcatatcgtaaaaatggcgtaataatataaatcccttggaaatgctcacaaatggcatgcactaattcacgagcaattgccatgccttctgcatttgcatgaccgagctctgccgctgtatgattcggttccggacatgatctgtgaaacgaatggcgcgaacccgattttccacaaattccccggcgcccctggaccatattgggttccccccatataaccttcccctccactcttccctccttccggttgtacgtccttggctccccgctgctcctccttttttcgcct

SEQ ID NO: 3059 - DNA, 710 bp, Listeria monocytogenes 4b
  misc_feature (1)..(end): n can be any nucleotide: a,g,c or t/u
aagaattccggtttgaattcactttgtaaaatttgcattacatccgattctaattccggtgaaatttcgccttcttcggttctttcaagtaataaattagagccaatatttgacgtcataataattactgtatttttaaaatcaattaatcgaccttgtgaatctgtgatacgtccatcatcaagtacttgtaatagtatgttaaatacatctggatgagctttttctatttcatcaagtaggacgattgaaaaaggatttcgtcttacagcttcagtaagttgaccgccttcttcatagccaacatagcctggaggagctccgacaagtcttgatacggaatgtttctccatgtattcagacatatcaattcgaatcatatgatcttctgaatcaaacatattaaatgcgagtgctttggcaagttctgttttaccaacacctgttggccctaggaaaatgaatgagccaattgggcgtttcggatctttaataccagcgcgtgcacgaagtacagcatcactaactaattgaacagcgtcatcttgaccaattactttttgatgaagttcatctgctaatttaagcagtttttcgcgttctccttctactaacttggtcactggaattcctgtccaacgtccgacgatttctgcaatttcattttctgttacttcttcttgtaaaatccggtcttcttgtgcagtttt

SEQ ID NO: 3060 - DNA, 1403 bp, Listeria monocytogenes 4b
  misc_feature (1)..(end): n can be any nucleotide: a,g,c or t/u
aatgaaaagttcgatttgaaaaagaaaaagagcccatgggaacagtctccctaggctcttttgcgtacaattatttatcgtcgttttgaagaccttttaatttatcaccaattaaatcgctcatttggaatccagtgttttcttctggaagttcataatcagcttcttcaactggagcatcttttaattctttaatgcttaatgataaacgtttgtctgcttcatttacttcaagtactttcacttctactgtttgcccttctgaaaggacttcttgtggtgtcccaatatgttcatgagaaatttgagaaatatgaaccaaaccttctactcctgggaatatttccacaaatgcaccaaaagtaactaggcgtactacttttccttctaaaacagaaccaactggcgctttttcggcaatgccgtcccaaggtccaggtaaagtcgctttaatagaaagagaaatacgttcattttcaggatcaatcccaataactttaaccgttactttttgaccttcttctaacgcttcttgtggtgttgcaatatgtttataagaaatttgtgagatgtgaactaatccgtccacgccaccaatatcaacgaatgcaccaaaattagctaaacgttgaacagtaccttcaatcacgtcgccttctttgatttcgctcagtagcgcttgcttttgactagctttttctgtttccacaactgcacgatggcttaaaatcactcggttattttctggttcaaattctactactttgaaagtaagagtagttcctttgtaatctgcgaaatcttccacaaaatggtcttccactaaagaagctggaacaaacgcacgaacacctaggtcgacaactaatccacctttaacaacatcactgactactgcttcaaaaacttcaccagattcgaatttagctttaatatcatcagatgctttttctgcatccacttttcgtttagataaaacaagtatatcgtcttctactttagtgacaatcaaatcaagtgtgtcgccaacgctcacaacgtcagaagctgtctccacatgtatattggaaagttcacttattggaacgacaccatcaagtttgctacctggaataccaacataaacttgtttatcttccacgcttgtaactgtgccagtgactttgtctccttcttcaaaatttctaacttccacatcaaataaatcttcagacatgtgtagccctccattcgttagtcgaattttaggaatttctaattcagaagcaaccttcacgcttgcttcatctgcttgactagttttcctagataggcaaattccgattaaataaagaaaaatatcaaatacacctctttccagcacacggtcggccgctcaagcagcatggtaagttgccactagt

SEQ ID NO: 3061 - DNA, 713 bp, Listeria monocytogenes 4b
  misc_feature (1)..(end): n can be any nucleotide: a,g,c or t/u
aacctgtagttttcaaagtgaaattacacgaaatcaaaacaaaagaagttccagctcttgacgatgagcttgcaaaagacatcgacgaagaagtagaaactttagatgaattaaaagaaaaaatctctaaacgtttacaagaagcaaaagaagaatctgttgctcaagctaaacaagaagaagttattgcgaaagctgttgaaaatgcagaagtggacattccacacgcaatggttcaccatgaagctgatcatttaatgaatcactttgcacaagatttacaagcacaaggtctaactcctgaattatattaccaattcactggccaaacagaagaagctatgcacgcacaaatggaaaaagacgctgaaaaacgcgtgaaaatgaacttagtgcttgaagcaattgcggaagctgaaaacattgagccaacggaagaagctattgacgaagaaatttctacattagctgaaaaatatggtatggaaaaagacgcagttcgtgctgcacttggcgatatgagcgaacttaaatctgatcttaaaatccgcaaagctatcgacgttttattagatagtgcagtggaaaaataagctacgactgatttaataatttcattaaaaaatggggggcatgagttatactcgtgtccttctgaatgtagaaatatgaatacagatgattggcatttctaataaacaaatgatattatt

SEQ ID NO: 3062 - DNA, 1339 bp, Listeria monocytogenes 4b
  misc_feature (1)..(end): n can be any nucleotide: a,g,c or t/u
ttgcagaatcaagtaagccgctaatgcttaaatcggcatctaccatttgcggtccaccttggccgcctcctggtccttgtgtttcggttgtagtggatgattcatcactcgaagatgatgtatcaccggaagactcgattggatcaaatccggatgctaaagcttgtgtactggaataataattgtaacttgctacatgatttaactttgccaaatcattagcatcactaacatctatcggactactttgaaattgcggcttggattcagttgagctactatcactgcttgaagcctcgtctcgcattgtctgcatttgtttttctcgatcaacagttagcgtcactgtaccaccaagctgttctcgcgccaactcactcgctttatctgcagccgattgaatagtaaaacctgataaaataagtacacagacgactgtgaatataattagttgtaaaacagatcttccttttctcgctttcatgctgagccatgctctcttaaaaaaattcatgtgatttcctccattcggtttctactccactaagattactggggagttatgaagaaagtatgaacaaactatgatgcatattttaaactttcgcgaaaaaaataatttggcttgattattgggtctaattaggctagttttaatgtaagaggagtgaatacaaattatgaaattacttatgatagaagataatgtaagtgtttgtgaaatgatagaaatgttctttatgaaagaagaaattgatgctacgtttgttcatgacggcaagcagggttatgaagcgttttttaaagactaatatgatattgcaattattgacctaatgcttcctaatatggacggtatgaccatttgccgtaaaattcgtgaagtaagcgatgtaccaattattattttaacggctaaagaatcagaatccgatcaagtgcttggccttgaaatgggtgcggatgattatgtaactaaaccatttagcccacttactttaatggcgcgaattaaagctgttacacgccgcaaaaatagtgccacttctacagaaaataatgaagatatcctagaaacaacttatttcaaaattagtaaacggacacgagaaattttttatcaaggtgagcggggtacgcatttcatgagaaacatcagcaataaactggcgtctccgcttctcttgtcgttctttttcttcttgagatgtttcaagggtttgtgtcattttattgaaatcaatggcaagtgcaccaatttcatcaaaattattttccttcatcgagcttgtattgcctgatacgtctttgcgtgtcgagtgtgtcatactgagtgaca

SEQ ID NO: 3063 - DNA, 1008 bp, Listeria monocytogenes 4b
  misc_feature (1)..(end): n can be any nucleotide: a,g,c or t/u
acggccgccactgtgctggaaaggctgcaaatctaaagcaacatttttatcgaaaaaaggatcatcaagaatttgttttatttttttcaaagggaaatcgagttctttaaagaaaagaatttgttgtaatttgtcgacatcgttttctgaataaatacgatagccattccggtcatctttttgcgggacaagtaggcctattttatcgtagtggtggagtgtgcgcacacttacaccagtgagttcagctaattcttttatttgcatgagtgattcctccttctgcttttactataaagtatgacgtcgcgtgatagtcaagcttgaatttgtgtttattataacctttttagtggaaaagaaaattagttgtagtcaacttctttaaaaaaaatgaataaaagcatggaaaaaaagtgggcattctcgtataatgaaatgtaaatgtgtctattttgtgacattggtctatcgtaaataagaaggggatagcatcatgatagggaaagttaaatccattagtatgtggctatggcaccatttaacaccgcaaatatttgcggttatttgtgtttttattattacgctcatagcgctttttgtgccaccgtatattggtatggctgataatggagactttttccgaatcttctcgagtaatggtttatttgtcaataatacgaattatgacgcgctgcaatttgggcattttgtgaaggagtttgggatttatcagtactttaatgaaaaccaagtagctatctactcttcgcaaagtatttttattcaaatggcgcttcttttaaataagcttttttggtcaacaacggtttttgatgtgcgttttttaggtggcttgcaattagcgcttcttttgccggcgatttatttgttagtggcgggattaacggcaaaaatgaaaggctggccgggttatgtggttgcggcgctgacggtatttattttcgctagatacggcattatactgcttactttaattcctttttc

SEQ ID NO: 3064 - DNA, 930 bp, Listeria monocytogenes 4b
  misc_feature (1)..(end): n can be any nucleotide: a,g,c or t/u
tgtacggtaaggttctgtctatacagcattacccttcacattttttactactgcgtcaatagcaactgttttattgtattcctcttgatcatacagtgtaatagcgtttctatctaaccaaccaattgctttcccatcgatactgatattgtaataagtaccatgttgagtttcgatttgttggctgattttcacatctttatttgcatatttcgtagcctgcgccacagaagttgttccttcaagtttgtacgctttagtccaaataccatttccggttggattagtaatttgtccgtcaaggttcacatttttacttgaaataatggaatcatacggatagatagtgagagctcgtttatcaatccaaccaatagttttattatttatgctaaattggtaataagtacctttagcagtttgtgcttcgcgtaaaagtttaatttcttgttgtgcgtaagttgttgcattcgtaacaaattctcttccataaacattgtatggtttagaccagataccgttacttactgggctagtaattttagcacgtccgacatttactttatcataattgacactatcataaatagttaatgctttgccatctacccaaccaactactttaccattatatttaaattgatagtacgtacctctctttgttgtagcaacagatactaaatcgatatccttgttagcgtatgtgctagctggactaacagattgcactccttttactttatacggtaaagtccatacaccatttccagtcggacttgtaacagttgcttttccggaagtggatttttgagtaagaattttgtcgtataaaacatcatatttggctaaatcataattctcaattacttgaattaagctagcaccatatgtaggagaggttgcatatccagctttttgaagctccattgc

SEQ ID NO: 3065 - DNA, 1130 bp, Listeria monocytogenes 4b; identical to SEQ ID NO: 1535
  misc_feature (1)..(end): n can be any nucleotide: a,g,c or t/u

SEQ ID NO: 3066 - DNA, 1017 bp, Listeria monocytogenes 4b
  misc_feature (1)..(end): n can be any nucleotide: a,g,c or t/u
cggctcccccccgcgcccactcacccccctgcccaggccgcatccgcggcgccatcccgactcccgctcacgaccgacgaccgcccacccgtcacccccccccgatcggtgaaaagcggcggcacccattatacagttacgcccgcatttcgtttcaatcgccggcgcgcccgacgattggtcccgccattcattcaatgtttaatccaagcgcttccgtgcaagcactagctattttcattggcatcattttagttttaaatgggattaatcaagtcatttcttattttggagaacaacaatattggagtatttccaaatggataatgtttgatgggattttatcaatccttattggtggatttgctattttcgagtcaaatatggcggaacgtgttttcattattatattcgcgatttggatactagcttcagcgatattacgtattttaacggcgtttgctgtaaaaggtttcccaggatggacagtactacttatcatgggaattataggattgattattgctgttatttccttgttcacaaacatgctagtagcgattgcagttgggattatacttggaatatttttcatttttcaaggtattacatgtctttctctttggtgggttattcgaaaaggtgaatctcggaaataaagataattttttatattgttttctgttaaaatgctaagaaaattacattaataaaactgaaaaagtgattttgtcacaaaatggacataagaagcgagaagatggttctttgagaactctttgctcgctttttttttattatgataaagagagatgaattgatgtgaggattttgaggaggcgggataaatggaggaaaggtttacaacggaattaatgttcacgtcaactaataattcaaggtgggaagaaggggtcgaatgggcgtatgggaacgaggaggaaatcgcgcatggcccacaaaacagtgaatgtgtcgtgtgcatctgactagggcaatgtcacacatcgtgctgcg

SEQ ID NO: 3067 - DNA, 1069 bp, Listeria monocytogenes 4b; identical to SEQ ID NO: 1630
  misc_feature (1)..(end): n can be any nucleotide: a,g,c or t/u

SEQ ID NO: 3068 - DNA, 713 bp, Listeria monocytogenes 4b
  misc_feature (1)..(end): n can be any nucleotide: a,g,c or t/u
gtgctggaaagagcaaggaagatacaggggcatcttgaacccagaacgaccataatggatttactcacaggactctgatctacattcaagaatgtcggcatcttttaaatctactagtaattcacctaagttagcgtggaaacggccatctacaccaactgctgcgggtacaaccacatcaatgttacctgcaccagtcgttgcttttaagaaagtagcttcatttccagttagttgataattcacattaccatttttagtttgtaaattggaaggagtaataattaccttttactgctacgttaccgttgaatgttttcagtgcaacatcacgaatttcaccattttggatacgaacattaccattaattgactcaatttctgccaaagtagcatttaaagtaccaatactaatattaccattggttgttttcacaaataaatcacgaccggataattcatccatatggaagttaccattaagcattttaacggaaacataatcgtactcacgacgaggcaagtatacagttaagtttgtaacgatttgttttgatttagactcaaaacgtaaagtttcttcatctacacgtaaagttgttttatcaaagaagattttaagtgcttcatcttctggatattctttgaatagtttaatcatcgcctttccagcacactggcggcgctcaagcatgcagtagagtgcctaacgg

SEQ ID NO: 3069 - DNA, 831 bp, Listeria monocytogenes 4b
  misc_feature (1)..(end): n can be any nucleotide: a,g,c or t/u
cgaacctgtgctggaaagaaaaaaattatttaattttctgttataaacaaagagttggtgtattgtgataattatattgaaaacgatttcacaatgtgataggatgaactaagggataatttattccaaaaaataaaaaggaggcatttgaatgaatattaaatcacaatcatcaaatggctacagtaataatgctgtaggctctgaagcaatgaactatgcagctggatgttgctcatgttcttgttcaacttgcacatgtacatgtacatgcgcatcatctgctgcaaccaaaatgtaaattttagaatgaaaaagggatacatttgtgtcccttttcaataagttatgaggtgcatgtgcatatgaataatattttggaaacgaaaaatttgaaagttacaataaataataaagtaattctatatttagataaagaagtttgtatttcagaaaaagacaaagttgccattctaggagacaatggagctgggaaaaccacgttagtaaatagtattcttggtgaaaagaactcttctggagaaattaccaaaaagtttaaaaaaaatgactgtggtgtagtgtttcaagaaaatgcatataatgatttgatgaaagtttatgaattgattactttagttctgccacatctaaagaaaaaagagagagcgcagtttttacacaaatatgaacttgaaagtttgagaaaaaagtacattaaagacttatctggtggagaaaaacaacgactaacactatgtttagtactagaaagtcataagaaattatatatctttgatgagttaacttcaggattagattataagaaga

SEQ ID NO: 3070 - DNA, 781 bp, Listeria monocytogenes 4b
  misc_feature (1)..(end): n can be any nucleotide: a,g,c or t/u
gggccatctagtctatgcctgagcgggcgaactgtgctggaaagtgtatggtggggttaagttcacttttaattggctatgtgttggcggcttattatacgtactttttatttggagaactagcgatcaattctttaacgcaggcattttttgtgtacgccatctggtttattttcgtaattagcttggttgtttttgcgagcgcggtttttgatagtaatgccgttgttgcgatgattagcgtgtttatagcaattgttttaggggtaatcagtggttttggcggctggattcaaatgtttaatccagcatatctaagtaaaaatgcaacaatgctaattatgtctgataagacgatggattattttattccaacactttgtattactatcttatggattttcgcatttataagtctaactatcctaatgataaaaataaaaccactcccaaaaacggaatagcgaacatttttcatgtgttttgcgaaaacatccgctttatactaaaatagaataaaaaggggtggcgacatggaacgaatagagcgagatacgcttggagaaatttctgtagatgcgacgaaatattggggagcgcanacagaacgaagtaaaaggaactttgctattggtgataatcctatgccgatagaaattatatatgctnttgctcaattaaagaaagccactgcaaangtaaacgcagcagaaggaaaactatccgaagaaaaagcgatagcgattggccaggtttgtgatcaatcattcaaggagactag

SEQ ID NO: 3071 - DNA, 1021 bp, Listeria monocytogenes 4b
  misc_feature (1)..(end): n can be any nucleotide: a,g,c or t/u
tggaaagaatgaataatattcaagcgatacgaaaaaaggtggaaacacaaattgatgatttgcaaaataaaacagacgaaattgctgaatttaatcaagcgaaagttttagatgcgtttcaagagaataaagtgagtgattttcattttcatccttccactgggtatggttatgatgatgaaggtagagatacattagaacgtgtgtatgcgactgtatttaagacagaggcggccctggttcgtccacaaataatttcaggaacccatgcaatttcaaccgtattatttggcatccttcgcccggatgatgaattactttatattactggtcaaccctatgatacgttagaagaaattgtaggaatacgaaagcaaggacagggctctttaaaagattttcatattggttatagctctgtgccgcttctggaaaatggtgatgtagactttccaagaatagcgaaaaaaatgacgccaaaaacaaagatgattggaattcagcgttcacgaggttatgcggatagaccttcttttacaatagaaaagattaaagaaatgattgtatttgtaaaaaatatcaatccggaagtaattgtttttgtagataactgttacggagaattcgtggaatatcaggagccgccagaagttggagcagatattatcgcgggttcattaatcaaaaatcctggtggtggcttagcgaaaacaggcggttatattgcaggaaaagaagcattagtagatttatgtggttatcgcttaactacacctggaattggcagagaagcaggtgcatcactctatagtttattagaaatgtatcaaggtttctttttagctcctcatgtgacagctcaggcaattaaaggagcacgattcacagccgccatgcttgcggagtttggtgtagaagctgacccagtttgggatgcgccaagaactgatttaattcaaagcgtttccttccataacaaagagaagatggttgcatttgcgcaagctattcaagcagcctc

SEQ ID NO: 3072 - DNA, 951 bp, Listeria monocytogenes 4b
  misc_feature (1)..(end): n can be any nucleotide: a,g,c or t/u
ttcgcctaattttttacgtaatatgtaaagaatacccttttgtgcttcgcggtgagtgattcaaatatatcagagaaagaagatgtaacggatagttcggaatctttttctagtttttgtttggcttttgcaagaatgtctttatcagaagagaaggaaatgaattttagaatggttaaatctttattgcctaaaatacgctctacatctggaatttcgtgaacgtccttcgattcaaaacgttcttctactttgtccataatggtttctgcgggaacgtctgggtggatgcgtttgtgcatttcaatcataaattctttgccacgagctttgtctgttgtgattgggcccatgtcagtgaaaaattcggtatacatacctaattcagtcagcgtgttgtaagtgtttcttgctaggtttctatcaatcggatgttgcaaaattattttgccgtgttcatcgcggatttccgcaccattcatacaaattgctggtgcatataaattagctttattaattaaccccattgcatcgtcatacatacgtccggtgcaaagaacgaaatgaattcctttggcgcgggctttttcgattgcctcgacgttttcttgtgcaatctcgatatcagagttaagtagtgtgccatccatgtctgaagcaataactttaatcataatattaaattcctccccaattttacctactccactagaatatcatttttttaagaaaaatgcacaaaaggtagctgcgcgtngttttttagtgacatacttactttttgatattgttatgaaaaatagatcnnnnnnnnnnnnnnnnnnnnnnnnnnnnnnnnnnnnnnnnnnnnnnnnnnnnnnnnnnnnnnnnnnnnnnanngctatctacacaactcaccgaaatctccgagtctgaaaatacatcatgatcagcgcacgtactgaaatcctt

SEQ ID NO: 3073 - DNA, 665 bp, Listeria monocytogenes 4b
  misc_feature (1)..(end): n can be any nucleotide: a,g,c or t/u
atgactaacgatacattatccacatctattccgcgccctgccacatctgtcgcaattaagaaacgggatttgccacttttaaaatcatccattgctcggaaacggtcttcttgtcttaaacccccatgaattttactaacttttacatcaagtaaatcggtgagttcatcgacttgatttttcgtattgcaaaatattattgcgctatccggattttctgtaatcaaaacatcttttagcgttttttctttattatctgtttgcatctccacgtggaagatagggtttgttttttccgatgccatttcgattaccattggatcatcttggtagcgtttaatcaaatcttgcatttcttctggcatagttgctgagaaaaatagattttggcgctgttttggtaaacggctaagaatatcttcgacttgatcaataaatcccatgcttaacatttcatctacttcatctaaaactaaatgggcaaccttgtcgacattcagtgatcctttttcaatatgatccagcaggcgaccaggcgtcccaacgacgatatgattcttttggcttagttctaatttttgtttcgcaaatggtgattgtccgtatattgctgcagctctgacacgtttaaatcgtncaatattcgtacattctgtcttgacttg

SEQ ID NO: 3074 - DNA, 811 bp, Listeria monocytogenes 4b
  misc_feature (1)..(end): n can be any nucleotide: a,g,c or t/u
gaaagcagtttgacagattctaagaaattaaaaatgataactggcttgtagacattgagttcaaagtttccttggctggcggcaacattaattgtcacatcatttcccatgacttgagccgctaccatcgtcattgcttcacattgagtaggatttacttttcctggcataatggagcttcctggttcattagctgggattgttaactcacctatgccgctacgtggtccacttgctaataaacggatatcattagcaattttcattagatccgaagcaaggctacgaatggatccatgaacaaaattaatcggactatgactagttagagcaaaatacttattggaatcagaagtaaaaggatatcccgtttgtttcatcaattcttcggcaaccttatcaccaaaatcacgtgaggcatttaagccagttccaactgccgtcccaccaatcgcaagtggcaaaattgctttcatacttgtttcaagatagtttttattatttgtaagacatgcttcccagccactaatttcttggccaagtgttaatggggttgcgtcttgcaaatgtgttctgccaattttaacgagatgcatgtatttatttttcttctctgccaaaacagcttccattttagttatttcaggtaaaaagttttgttactaaagccccgtatgcagcgatatgcatcgctgttggaaatgtgtcgttcgagctttgcgacatgttgacatcatcattcggatgaatttgtccttcgcctaaagttaagttggcaacatgtgcgataacttcattgacattcatggtg

SEQ ID NO: 3075 - DNA, 1096 bp, Listeria monocytogenes 4b
  misc_feature (1)..(end): n can be any nucleotide: a,g,c or t/u
aaattaaatgcattcatgaatggtaaaaggaattgaccacattgttcgaaagctttaacaatgatattagcagaagcagctttttttggataagcttccataagggcggggtaggttcctgtatctaagatggaatttgctatcccagcataaataccaaacatgtgtgcgatcatcgcattggggctgagtaatataccgcctaaaaagataatatagaaaaacacgccgagaataacagacaactttctaccgaatttatcggatagtcttcccgaaataaatacagctaataatttaccaatcccaaaggaagatacaacgccggcagcaccagccaaatctgtatgccatttttgagataaaaaatcaatattttgtgcaatgatgattaacgccataccatgaacaaagtagttcatataaagaccaagtgatgtagataaatatttgtttttcatagtctgctctcctttatgtaatgacttatgaggactttttattaaaaataccctctttttcagtgagttcatatagataaaatacataagtttgtgctttacttcacaaatgatatgtaagttcaactgagcatcataaatgctcagttgaataataaattatttagtagcaattttagattcgtttttgtaacgcatattgacaaagattgctagtaggataccaataacagttatcgctacattgaataataacacatatttcggaccttcgataccaccagctttagtaatataacttgcaacgtttaaaacaatatagtttgctagactggaagaaatcatgacaattgaagtgattttccctttgtttgttgggaaaaactcattggcagttgatacagctagttgtagaactcccccagcagcagcgtatgcgataacaaatgcaccaattaagcaaatggttggtgtttgtacgatataaataattagcaacattgaagtggcaattgctggatataggattagaattcggactggcaaataaatgctttacgagaacagcggtgattacaatggcgcacatgggggctagtgagcccgatgatggaataggacttgcatccgcgtag

SEQ ID NO: 3076 - DNA, 1151 bp, Listeria monocytogenes 4b
  misc_feature (1)..(end): n can be any nucleotide: a,g,c or t/u
aaaaaagaaacctaaaaggaatcgatataactcaaaagcaaacaatcaatatattgcaaatgaattccatgagcagccaattgccgggagaacaaaaagtagaagtaatgtcacaagaaatagtagctggcaaagacgaggtgaaccactttttaaacttaagtgaagataagccggtgtttaaattggttcggcgaagaatagttgataataagccgttttcctatgaaatatcttttattgatagcacgagatttgctggtattgagaaaatcgatttaaataattcctcgttatacaatgtgttagaaaagcagtttgctattaaacctacctacgggcgcgaagaattgcgctttgtatcagcgaatgaaaagctagcagaagcattaaaggtaccactaaacacgccactttttgaagtagtaagtaaagcatttgatcaaaatgatgaaccttttgagtacagtaaacaatatctaattggtaatcaaatcaaatacaaaatcaatgcgaaaaacatatttgattacttggaggatgagtgaaatgggagctaaaaagccactttttgaagtaatagcttcagaaataaaagatagtattaatcgcgatgaatataagccgggaatgctaatgccgaacgaaacagccttgcaagaaattttttctagcagtcggacaacgattcgccgcgcggtagatttattagtcgaagaaggtttagttgttcgtccaaacggtgttgggctgtccgttcgcccccgcctaacagctcgcaacattttacaaatgacaggtgttctgaggnccggcgccggcgggcctctgcgcgccgacgtctcccactctcacgtccgccctgctgggccctcctcccctctcatctcccgccccgccccccgccgcccgccgccccccccgtcccccccccccccgcccccccccngctcctccctcccctcgcctccgctccgcgtcgtcgccgcgtgccccccctccctcgtctccgcccctcctcgcgcgcctgtctccgtccgtctgctcccccgcgcctgcggttcccgcccccccccccctctccctcccgctccccgccgcttccctcgccccccccccctcccccccgccccccacccaccacaaaaaaa

SEQ ID NO: 3077 - DNA, 842 bp, Listeria monocytogenes 4b; identical to SEQ ID NO: 1461
  misc_feature (1)..(end): n can be any nucleotide: a,g,c or t/u

SEQ ID NO: 3078 - DNA, 732 bp, Listeria monocytogenes 4b
  misc_feature (1)..(end): n can be any nucleotide: a,g,c or t/u
aatgatacagctgaaattttagcagcaatcgaaaaagcgaaacaaaacacttctcaacctactatgattgaagtgaaaactgttatcggttttggtgctccaaatgccggtacaagtaaagttcacggtgctccactaggcgatgaaggtattttagaagcgaaaaaagcttatggttggaactacgaagagaaattctttgttcctgaagaagttactgctcgctttaaagaaacaattggcgaacgtggtgaaaaagcagaaacagcttggaatgagttatttgcttcctataaagcagaatatccagagcttgcgaaacaattagaagatagcttgaacaacaagttaccagctgattgggatgaggatcttccagtatatgatgattcaaaagcacttgctagccgtgcttccagtggagaagttatcaatgcgttagctggaaaaatcccaactatttttggcggatctgctgaccttgcaggttcgaataatacaacaattaaaacagacggtgaatttacaaaagcgactccagctgaaagaaacatttggtttggtgttcgtgaatttgcgatgggcgctgcattaaatggtatggcacttcacggcggattacaagtatacggtggtacattcttcgtattctctgactatgtacgtgctgctattcgtttatcagctattcaacatttaccagtaaccctatgtatgacgcatgatgatagt

SEQ ID NO: 3079 - DNA, 781 bp, Listeria monocytogenes 4b; identical to SEQ ID NO: 1168
  misc_feature (1)..(end): n can be any nucleotide: a,g,c or t/u

SEQ ID NO: 3080 - DNA, 917 bp, Listeria monocytogenes 4b
  misc_feature (1)..(end): n can be any nucleotide: a,g,c or t/u
tgcagcaacgtcttgtttttcaacaagagatttgttaagtgctgggatgtattcttttggaccagtaccagatttagctttcatgtttttctcgtagtcagcatcgtctgatttaagtttgccgtctttgtcaacatagttgtagtcagatttagtgattttgccatctttaacatccatgctgaatactacacggtaaccatgtgcgtaattttgttcttcaagtttataagttccatcttccattttagctaagttgttgatggaaattgtagttgtatcagctttttgagctgcttggattaattggttagcatagttgatgaaagcgtcagaagaatgagttgctcctgaaactacttctacagatgctgcagattgatttttaactaaagaatcgcttaattgtttcaagtattcttgaggaccagttcctactttatctttcattgctttttcgtagtctgcatcttcagattttaatttgccatctttgtttttgtaatcgtagttagcttttgtaattttaccatctttaacttcgattgacatgaaacctttccagcctttgtcgtcgaaattcttttcttctaatttgtaagtaccatcagtcatagtaccatcagttttagctgttttctttgtttctgtttgttttgtgtctgtgctctttttgtctttgctgctgtcgtcactgctaccgcaacctactagtaataaacttgaagccattaccacggtaatacccattgctacttttttcaatttcatgttttgctcccaccttttgttttattgattaactttgtttgtgatttcgtgaacacaaaccgatagtctgcgaaagcgactttccagcacacgtcggccgctcgagcaacgaataaggtgaccngagtcccctncnaaaaggncag

SEQ ID NO: 3081 - DNA, 873 bp, Listeria monocytogenes 4b
  misc_feature (1)..(end): n can be any nucleotide: a,g,c or t/u
cgttagttcacgttctttacgttctaattctgcaatccacgtttttccattgcggcttgcatcgcggtacgtatctaactggctattataaccatctttaataatcccgccttcccgaatggaaatcggtgcagaatccatgattgcttcttctaatttttcggttagttcttcacatggatctaattggttggcaagttcggtgagactctcgctactcattgacaacagtgtcgcgcgaatacgaggaatctgatataacgaattacgcaattgaattaagtctcgtgcattcacattgccgtatgcaactcgaccagcaaggcgttctaaatcgtagacgtttttcaagttttctactaactctaggcgttcgaaaaagtgtgccattaattcgctaacatcattttgtcgatcaatgattttttttcgatctattaacggacgatcaatccattgtttgagcattcttccgcccatagcagtttgggtattatctagaagccaaagtaacgtaccttgacgacctttaccacgaatcgattctgctaattctaaattacgtttggaatagtagtccatcttcatataattgctcgtttcgtaatggacagcttgttgtaaatgccctaaatcccgcttttgcgtttcttttaaataatggagtaacttaccaatggcacgtttttcggataatgacatgtggcgggttactaatttctcgttttcgacaggaatcgtatcttcttcgtgtacagaaaaagttaaacctagttgctccttcatgacatctgaaagcacttctttttccgaggaagaaacaattaattctcttgttgaaagtgtcgttagttcattaatcaaacgatcttc

SEQ ID NO: 3082 - DNA, 1342 bp, Listeria monocytogenes 4b
  misc_feature (1)..(end): n can be any nucleotide: a,g,c or t/u
acttaaggcactgtctccatgctcgacgccgacatgtgctggaaaggaccgtctacttcaaattgtggataaaaacacgccaatgcttgaagctttccgtgaagcagataatgttttacgtcaaggtgtacaaggtatttctgatttgattgccgttccaggtttaattaacttagactttgccgatgtgaaaacaattatgactaatcgtggttctgcccttatgggaatcggtattgcaactggtgaaaaccgtgccgctgaagctgcgaaaaaagcaatttcttctccacttcttgaaacttctgttgacggagcaaaaggtgtcctaatgaatattacaggcggatctaacctaagcctttatgaagtacaagaagcagcagaaatcgtatcaagtgcatcagatgaagatgtaaacatgattttcggttctgttattaacgacgaattaaaagatgaactgattgtaactgttattgcaacaggttttgatgaagaaaagcaagcgcaacaacaagcgcaagcaaatcgccgtccaaatcaatctattcaagtaaatcgtcctaattatgctgtacaagacgaacaacaaaatgattacgcgcaaaatgcgccacagcaagcaaatgcaccagttcatgaacaacaagctgaaccacaacaaaatagttcagatgttgatgtaccagcatttatccgtaaccgtaaccgtcgcggataatacttataacataatttcacccggccacttttgaagcattgccaagtgaccgggtatctgattataacaagaagcgttttaaataaagcacttcgggaattatataaggtgataaaaaatgacaaaacaagctaatttacaaaaagtaacggcacaaatagagcgtgcctgtgaagaaagtaatcgtcagccggaagatgtaacgttagtagctgttacaaaaacgattgatgtagctggaatcacagagctttatgatttaggtatccgtcactttggtgaaaatcgtgcagacgttttccaagaaaaaacagtagcacttgcagataaagaagacatttgttggcattacattggttctttacaaacacgtaaagtaaaagatggtttaccaaaaatcgattatttgcattcgcttgacccacccatcggtagccaaggaaatccaaaagcgagctactaaacaagtggaatgtgcccttgagtgaatatccgtggtcagggaaacccccctggccctccccagaacaggcctctgcccggcgccccaagcgacgccccgccctgcgcatcgcgccggccacccccccccctgctgtcgagccccccatcccccag

SEQ ID NO: 3083 - DNA, 799 bp, Listeria monocytogenes 4b
  misc_feature (1)..(end): n can be any nucleotide: a,g,c or t/u
actttggctagttcgctcgtatagcctttttggattaaatccgtgataattttttgttgaagcatttttttggcgcttttgttatttcgcttcataatttttattgcttgtttggtggcattttctagctgagcttcatccgaatattcttcgataacttgagtaattatttctctagttagtcctttttcgactagttcgcgttcaatggtccgcggaccttttagggttgttttgatttgcgttttcgtatacagttccgcaaattcgagatcattaatataatccatgtcggctaatttttttaaaatctcgtcaattgcaaaagcttccatttcttgctttcttaaataatcgcgaatttctttttccgagcgaacacggtgggataagaagttgatggctttatttagcccttttcgaaccatatcagcttgcttaatttcttctattttggcctcggttagaactttacctttcatcagctggtagcgggctaaaacctcttcgtctacgctaaagttgtatttttcatcaataaaaatgttgtagcgttctttgtttttctgctggacacttatggacgtgattttcataatccgcctccttctcctatctatcataccgcaaaaattggttttaatactactaaaaagggaataaactagttaggacaatgaagaggtgataaaattgcatatcttacttacaggcgcaacaggttttattggtgatcatttagtgcatgaattagaaaaatctgatcacgagctttatattttaacaagacaaaagctaa

SEQ ID NO: 3084 - DNA, 703 bp, Listeria monocytogenes 4b
  misc_feature (1)..(end): n can be any nucleotide: a,g,c or t/u
acttagatgcatgcttgagcggccgatctgtgctggaaagtcggggctggtagcgtggttaaagttgctgctttaacctcattattaccctgaatacctaataccatgaacaaaaggctcaagacagtcattatggaaattaattgtttaaaaaaattatttttcgctttcattttagtaccttccttcaactaagcttacttacaatcattattatggcttattgattgtaacaccgtattttgaagtagttgtctaattttaatatgcaaatttccgcttcttatttttgtttcttagatacctaagtagcaaccatgaaaacacgtgacataaatttgacaataatttttaaattagttggttcaaacaaaaaaacacactaatcgcttagtgtgttttaattcggcacaattaaatctgtatcggggtctttgctttttttgtttgtcgattttatctctacgaaaactttatgtggtaaacaaacaatggtgtcaccggctttggatttccagcccattttgacgcctacttggtctggactgttgtcttcttttattcgaatccgctcgccatctacttccatcaaattatattgcgcgccttttcctttaatcgtaaactgctcatttcctttgtgcccagttagcgggatttcccgaaccactttgccatcttgtgaaataactgctacgacatc

SEQ ID NO: 3085 - DNA, 1215 bp, Listeria monocytogenes 4b
  misc_feature (1)..(end): n can be any nucleotide: a,g,c or t/u
aataaaggttttctctctcaagatataggagttcttattgataacttatttagtaactcaagtaaaaataaagcaagaaatataattatttcaataaaagaagataaaaaatattgttattgtgaattttaaagatgatggtaatggattaccttcacatataacggatacagctgagctttttgaatttggaaaaagctatactattcgagggacaggggtaggtttagcacatattaaagatatagtgaatgatatggatggaaaagtatatattcctaaggataataaagaagggtttgaagtagagatgagattaacaaaatgagagcagacttatcaattatgtgggttgaagatactacttcatggtatacagaacaaaaagatcttctaaatatggacatagaaagcttgggtatagatattgaatttactcgtatttctacaattgatgatttttataaattggttaggaatgataatacaggttttagtaaatatgatattttttttgttgattatgcattatcctctgatactgaacaaaaaggaagtaacataattgttaagttaaaagatatgggcttaacaacagatattcttttctattcttcaaaaaatataagagaaataagggaaattgtgaaaaaagatattgaacagtttgagggaatatatctagctgatagggataaagatttcagggataaaagttttcaattagttgaaaaaaatattaaatcattatcatctataaaaaatattagaggtctattaatggatcaaacttctgaaaacgattttatagttaaatcttatatttcaaaagaaataaatgaacttttacctgaacaaaaagaaaaaatatataaatggtttgagaaggaagtagataaaaatatagaagaaggtaacgaaaacaattaaaggttatgtagagagaaagcccagtactatagaaaaatatttaaaattaccaccatgtatattattaccagttaaactacaatataatttattagaagaaattataaatattaatggagtagagacttttgttgattcaactattgattattatttgaaaaaagtcgcgagtcatacaaataaattagctcatacaaaattagctatgtgtgggcacgaacagcatttatccccnggtaataatgttattcccgcggtaattgatgatcgtaatgagggggatat

SEQ ID NO: 3086 - DNA, 713 bp, Listeria monocytogenes 4b
  misc_feature (1)..(end): n can be any nucleotide: a,g,c or t/u
actaatcgtgtatcccattgctccaagtaaaataatcgaagtaatccgcgatttggaaaagacaatcccaaccaacgtcactaaaatcactgccgctaaaacaaaatcaacaactgtcactttcgtcatacttgagaaattgaaatcaagtgcttgtgtgaaaatcatgaccgaagccatcattaaaataaaagccgataacatgtaattcaagtaagtccgaagccaaccagtcataataaacattgtcatacgatacgagccttgttctaaataatacatcccattatcatacgttttcccaattcgaagtgcttttggaaccttagtcgtaatccaaggtttccagtatttatgtgtaagaaacaagacaatccccactgcaacaacaccgaacgtcattaacagagcaggcgtaaagccgtgccacaaactaatatgaatcgagaaatccgtagaaagcccaggaacaattgctcttacagcaggctccaaaatcggctccgcaattaaattagggaagagaccaataccaaccacgaaaatcgataaaataatcggtggtaaaagtagtccgaatggcgcttcatgcggttttttcggaagtaagtacggtttcacttttccagtaaatgttttaaagaaaataatcatactataaacaaacgtaaacacactagcaacccaagctacaacagggagcagaacgcccc

SEQ ID NO: 3087 - DNA, 935 bp, Listeria monocytogenes 4b
  misc_feature (1)..(end): n can be any nucleotide: a,g,c or t/u
tattttgaagaatagccagttcactttcagttaaagggcggtattcgccgagtccaagtgactcgtctaattgtaaattccccatcgaaattcgttttaaatagctgactttcttaccacgtgcggcgaacattctttttacttgatggaatttcccttcttggatagtgacgtttatttcgtttggtgtaataatttctaaacgtgctggtttgcaagtgtatccatcgtcgagttcaattccagctgcaaaagcttctacatcagctagagtaacatcaccatcaattttagcgtagtatgttttatctatatgttttttaggtgagagcaaattgtgcgcgagtgtgccatcgttcgttataattagcaagccttctgtatctttgtctaagcggccgactgggaatggatcagtgagcgtgtcttcttgcgcaagcaaatcgatgacggtttctgacacattatcctcggttgcgctcacgacattttgtggtttatgtagcataaaatagacgaattcttggtaaacgactggtgttccatggacagttacttggtctttatcagggtttacttgggttttgctatctttctgaatcgtgccattgacgacaactgccccagatttaagcaaaggtttcacttcttttcgactcccgaaacctgtatgggacaataatttatctaagcgcatggtttcgctcctttttttcttttattgtaacaaaaaaacgaagcttcctcaaaggtgctccgttttctttctattatatagtttcaacaacttgtttattttgaggtattgttaagccgaggttgcctcttatgtcgtagctggatattcatttcggtataaacctcgactttgcagaagaggaataacttgttccacanaagtttcaaacgttccaggaatatcagaaagcatataa

SEQ ID NO: 3088 - DNA, 719 bp, Listeria monocytogenes 4b
  misc_feature (1)..(end): n can be any nucleotide: a,g,c or t/u
aatcgctgctatcgtagcgccgaaaactaatatatcaagttttgagatatatgtcaaccgaattatgcataaaattaaataaaaatgaaaaaaattgcaaaaaacacaaaaaaacacctagctaggctaagtgttttgattaattatttgattgtttttctttacaggctggacatataccatatacttccagtctgtgattatctatttcatatccggtcatatgtgctgcgaaatgttctacttcatctaaacctggatattgaaaatcaactatttttccacacacattacaaattgcgtggtaatgattagatgtagaaaaatcaaatcgactagatgcatcgccataggataattctttaattagaccagcatcccggaaaacgcgtaaattattatatacagttgctacgctcatgttagggaagtttccttctaaagcccgataaatatcatccgcggttgggtgtgtatgtgagttaattaagaattcaagtatagcatgacgctgaggagtgattcttactcctgttttctttaagacatctactgcctcttttagagttgcattagacaccgccatgcactcccttccaaaaataattattatctttataataccggaaataacgcttaactgtcaatagaatggcagaatttatagcttaataacctttattcaaatcaatttcattccgtaatttggtattttctta

SEQ ID NO: 3089 - DNA, 879 bp, Listeria monocytogenes 4b
  misc_feature (1)..(end): n can be any nucleotide: a,g,c or t/u
acaacgctacagtatcgtattctaattgttgaaaaggaaaatcgcattgtcaaacgcgacgaagaaatcattgacttaacaaaacgagagtatgaacttttacttacgttaatggaaaatgttaatatcgttcttacgcgggaagtgttactcaataaagtatggggttatgaaacagaagtagaaacaaatgtagtggatgtgtacgttcgttacttacgaaataaaattgatcatcctgacgaagaaagttatatccaaacagttcgcgggacagggtatgtgatgcgtacatgacgacaagcccattttccttaaaaagtcgttctttgaaattcaaatggacttttggagctagtgcagctatttttctaacttttttcttattttcctatgccatttaccaaggaattgggcaaatgttgttaaatgaagaagaaccagaagtaaaagaactgcttctagcaacaacgagcactttaacgaatcaagatttgaccgataatgaggaaattaagtatttatttaataacgataaaacggtgaatcgaaaattacaagatcaagtaattaatctgtatgataaagacggccattttattaataagtattatttttcaagaagtcaagatattactagcattgatttttcgcagtattttgttagtggtacggacaagtttattatgaataaaccaacgattgacggacagaagatgatgacggcgcaaatgcccattgtagcggacgacaatacgaccgtgattggttacgcgcaggtggtaaatccgctcacttcctataatcggatgatggaccggcttctcgttacgatgattttacttggggcagtggcgctctttattagtggaatgctcg

SEQ ID NO: 3090 - DNA, 1358 bp, Listeria monocytogenes 4b; identical to SEQ ID NO: 1618
  misc_feature (1)..(end): n can be any nucleotide: a,g,c or t/u

SEQ ID NO: 3091 - DNA, 775 bp, Listeria monocytogenes 4b; identical to SEQ ID NO: 1540
  misc_feature (1)..(end): n can be any nucleotide: a,g,c or t/u

SEQ ID NO: 3092 - DNA, 642 bp, Listeria monocytogenes 4b; identical to SEQ ID NO: 1568
  misc_feature (1)..(end): n can be any nucleotide: a,g,c or t/u

SEQ ID NO: 3093 - DNA, 1058 bp, Listeria monocytogenes 4b
  misc_feature (1)..(end): n can be any nucleotide: a,g,c or t/u
tcggtacaagtagctcacgcgcggtgaagttctcgactgttttcataatatacgtatgaactgggtggaacatcgttagtttatccacattttcgagtgattcgtccgctaaagcaatataatcgccttccgctttcaagccatcttcattcgtaataatccggtaaactttctttttaccaggagtcgacactttttcggtgttactcgaaagtttaatcgaatcttgtaaaatatcattttcatcagcaattgccgccattttgtaaacggcacctaatgctggttggtcgtaagcggtgattagttttgtgccaacgccccaagaatcgatttttgctttttgcgcttttaacgataaaatagtatgttcgtctaagtcactcgaagcaaagatttttgcttctgtaaaaccagcctcatctaacatttggcgtgcttttttagataagaaagccatatccccgctatctaaacgaatgccgataaagttaattttatcgcccatttctttcgccactttaatcgcatttggtacgccagattttagcgtatcgtatgtatctactaagaaaatcgaatcaaaatgcgtttttgcgtaacttctaaatgcttctagttcgtcgcgataagcttgaaccatcgcatgtgccatcgtaccagacacaggaataccgaaaatttttccagcgcgaacattactcgtcgaatcacaaccgccgatgtaagccgctcgtgtgccccaaatagccgcatccatttcttgtgcacgtcttgtaccgaattctgcaaacgtttcgtcatcaataacagaacggattcgcgccgcttttgttgcaatcagcgtttggaaattcacaatattaagcaaagctgtttcaattaattgtgcttccgccaagcttgcttctacttgaaggattggctctgttttaaaaacaaattccccttctttcgcagcaagaatatttccttctaatttaaaattacgcaaatatcctatatagtgggggcataggcccctcagaacccaggtcgtcagtgtaaataagcatttc

SEQ ID NO: 3094 - DNA, 1290 bp, Listeria monocytogenes 4b
  misc_feature (1)..(end): n can be any nucleotide: a,g,c or t/u
tgtttcgcagcactgctttcagggaaactattaacaactatttaaaccgaagaaagaaggaagtcccatggtaaaaatcacgagttatcccgctgaaccttctgatgttaaacattatatttctggagaaaaaatgaaaaatgaccaccatttgcatacggtacttaagtttgataatcatttaaatatagacgttctaaaaaaagcagtgatgcagtctactaaaaaacttccgctattactttgtcattttaaagaaacgaaaaaaggtgctttttggcaagaaagtgttttttctgcggaggatttggttttcttagtggaaacgcaagcgccagaaaccgaagtggaccgagcacttgtaacgaagctttccacagaaaatgggccgcaaatttgctttactgttgttcgggctgatacttctgatcagcttgtggttattatgaatcatatgttagcagatggcgctggatttaaggaatatctttatttattgagtgagctttattctaatctgcttgaaaatccggattatgcggcgaatttgagcttaggttcccggagtttaaagcaaatttttgatcaactttcgcgtaaagatataaagtccatttttacggaaaaaacgaagcaaaaagctgtccataacccaactttccctcttaaaggtgacccgaaaaatccgaaagttatttggactaagctaccaaaagaggatttttcggaaatcatccactttgcaaaagagcacgaggcaactgtgaatgatgttctgttcgccgcaatggcgcgcactgttcagcaaacaacagggcaacaagaaatgtcaattgattgcccggtggatctccgtaagtatttgccgagtaagaccagtagcggaattaccaatctcaccgccaatattacatgccaaatcagcgcaaacgatgacctaacgtcatttgaaagcacactccaagccgtcaaaaattcactcaatccacaaaaaaacagctttgcacctctacgaatttattatttattggaactgattttcaagaaaaagaactactctgttgcaaaaaaagcttctgaaaaaatgtattctattccgaaaacaagttttacgaatataggtattatcgatgaggaaaaactcgtttttgaaggtagcactttaacagattgtttatttgtggttctttaaagtatgcgccgtttttccaagtcgctgctacaactttccgcggcgagctgacactgagtactaatttgcatggtactacgcaagatcatgcttggcag

SEQ ID NO: 3095 - DNA, 816 bp, Listeria monocytogenes 4b
  misc_feature (1)..(end): n can be any nucleotide: a,g,c or t/u
aagaaagaaaggatgatgaattatggcaattgtaaaaatggaaaacctcataattaatacgggggtattttacctatagaatgctcccaactacaaaggagcgaaaacattgacattagaacaatacggttttacaaatttttttaaagaacaaaagatagctgctacctcctcttatggtagagttacggcggtatttagagattattatcgcgttattacggagaatgaagaatttttagcatcattgaaacgtggaaatttttatgaactatcctctacttcccttcccgctgttggtgattttgtagaggtcagtagcgatgcgcaaatactctctgtactagagcgtaaaacggtcttttctcggatgaataaagactcagaggaacaattgattgcagcgaattttgattatgctctcattgtgatgagtttgaatcatgactttaatttgaatcgattagagcgttatttgacggttgcttgggatagtggtgcaacaccgattatcattttaacaaaagcagatttagtggaggatttaacagcctttgctcagcagctcgagacagttgcttatggcgttccagcatactatgtggataatttatcacatcatggttttgaagctttagaacgcgatttaaagccgaatagtacgcttgttttgcttggctcttccggtgtcggaaaatcttcttttattaattcgcttgcaggtactgatttaatgaaaacttctggtatccgcgaagatgatagtaaaggaaaacatacgacgacacatagggaaatgcatttgcttacgaatgg

SEQ ID NO: 3096 - DNA, 879 bp, Listeria monocytogenes 4b
  misc_feature (1)..(end): n can be any nucleotide: a,g,c or t/u
ctatgccaaagtttagaattagaagtaaaaaatgagttttatctactgcctcattatattaataagaataaattggcgctttatagtgatatttcgaggaaaagtttatacaaataccttcaaaatttagaaagaaagggacaaatcaaaatgaatggtaatcaaatacttgtccgcatttcgcgattcacaaatagcgagaatgtagattggttgtagaacaaaaaagccgcaattactggcaaaattaataattcgaaaaaacgacacatgattgatagtatggagtggattttacacatatttgtcctcttcgcctttgatatactttacaaatcaagtgagacctatacgataattacatcatttagataacttgaaattgtaaagttgaaggggcaaaaaaaatgaaattaggtaaagtaggagccttacttctcggtacggctttagttttccaggcaccattccaagttttcgcaacgagtgtaaatggagaagaacaggtgaaaaaagaagctgctgcgccaaaaatatccgttaacaagcaaaccttagctgctaccagtgatttagaacaaacggtaggggaagcaattaccaaaacgatacatcttcaagatcaagcattaccaaacaatgaatggggtagctatatttctgacgtgaaagtaacattatccaatatggacggaattagttatgacgtgaaatacggaccgctaagtgaagacggtacgcactatcaatatgcagacataacactttcaggagcaccgacaaaagctggaacaggaagcattagccttgaatattacgacggggcaggtaacggtggagtttacagttattctgtaaacacaaaatctaaaacaacta

SEQ ID NO: 3097 - DNA, 814 bp, Listeria monocytogenes 4b; identical to SEQ ID NO: 1464
  misc_feature (1)..(end): n can be any nucleotide: a,g,c or t/u

SEQ ID NO: 3098 - DNA, 883 bp, Listeria monocytogenes 4b
  misc_feature (1)..(end): n can be any nucleotide: a,g,c or t/u
ggattgtttattttgtttcggcgtctaagcaaaatgcggcgcttctggagcaaatgaaagcccatctgatttatcgtgagcttaatgaagtggaaaaggaacaatttgaagatgctttaattgaagcgaggcaactggtggaaatgacggggctgagctctcaaatcttacagcaattgtcaggtacatataataatattttgaacaataatttgaatgatacgatgaaaattttaacggcgctatccattttattgacggttcctactattattacgggcttctttggaatgaacatgccacttcctttagaacataatacgtttggttggattgtgacgatttttattagtgtgattctatggttcggactttcctttattttacgaaaattaatgagataacaaaaaagcccttctttcggatagaaagaagggctttttgaattaaataataccttgagaaatcattgtgtctgctactttgaggaatccggcgatatttgcgccgataactaggttaccaggtgcgccatactcgcttgcagcattgcttgaatttttataaatatctttcatgatgttttgtaaatgttcgtcgactgtttggaaagtccagctcatacgtgtgctgttttgtgccatttcaagtgctgatacggcaacaccaccagcattggcagcttttgcaggaccgaatagaactttattttcgtggtaaatatgcactggctcaagagtagaaggcatgttagcgcctgctgcggcgtcatnacccctttgtcgacaagggtccgagcttggtccgcgggggttgatttgagtgctgagcattctgacgctctcccaatggagtnanctctgnnnaaaananaaaaagaaaa

SEQ ID NO: 3099 - DNA, 1269 bp, Listeria monocytogenes 4b
  misc_feature (1)..(end): n can be any nucleotide: a,g,c or t/u
cgactgtgcgctggaaagacgcggagaaacttgtgaatttgaagcttactccattgctgaagtaagtaacttaattgacgatgcagatgttgtacttttaggaccacaagtgcgttaccagaaaaaaacagttgatgaactagctgctgggaaaattccagtagatgtaatcgacatggcagcttacggtacgatgaacggtgaaaaagtactaggtcaagcattagacttaatcaacggtttccaaaaataaacaataaaaaaacctgtgtggcacttaagccacgcaggttttttagctttcttgggtaagtattccgtcttccatacgatacacatggttgactaaatctagcatacgctcatcatgtgttaccatgattgctgttcggcttgtttgcacaacttcattccgtataagctcgacaacttcacgacttctttcagtatcaagactcgcagttggttcgtcggctaaaataacggaaggttgattaataagcgcacgagcaatagcgacacgttgcttttgaccgccagataaatcttttggatagaaatttgcgcgatcactaatgccaagttggcttagaagtgaagctgtatctttttcaagctccgccgcacttttcccagccatttttccaataaagctgatttgatcttttacgtgtaaataaggaactaagtgagctgcttggaaaataaagccaatttcttctaaacgaagagcagtttgttctttggaagataaattcccgactgattttccgttaatagaaatcgttccgccagtcggtgttaatagcgctccagccagagaaagcagcgtacttttaccagaaccactcggaccaacaatcgcgattagttcgccttttttcgcttcaaagtttgtttccttcagtgcatgaataattgaagggccggacgggtagtctttatatactttatcaaaagatagtagagtttccattattcatcacctcctcgaatagcatctaacgcatctactttagcaattcgtctaagtgatagaagggcgccgaacagagcaactaaaaagaataaaccactataaagcgcaatcgtcatcggacttaatctaaacggcatcgctgctggcataatacttggaagcaggagcgttacaccgacactaattaaaatactaataaaagaaataatcaccacttgagtactttccagcacaggtcggccgctcaggcagcaggtaagaaactgcagtcccctccaaaaggtcagcct

SEQ ID NO: 3100 - DNA, 717 bp, Listeria monocytogenes 4b
  misc_feature (1)..(end): n can be any nucleotide: a,g,c or t/u
gatacttccattttaccaacttccgtaccttttttaactggtgcttctattgttttttctttcattgttacctttgtatttaacttaggttcattgccattcttcggtacaactagcttcactgcatcttttgtaactagtccgactgtatcttcttttcctttatctactgcaattgtagaaggattttttacttttgatcctgctttttgcacttcttttactttgaaattattaaaagcataatcgagcattttgtttgtttcatcaaaacgagcacttgtatgctcgccaggcgctccaccatttgcatggagtacgactgtgataactcgcattccatcttgtacagcggttgcagtcaagcacattccagcataatcagttgttcctgttttcaaaccgtctacacctttgcgcccgtaaatcaagcccggtaataaccagttccagtttgtcatatcaatttggactgatgtacctttacagaactctttcttaactgaactaacggttttaagtacatctggcttttccaacacactgggccgctctccatacatgtctttaaccaggcacccctatgctccctcctcttcctccattttcgcccgccctcgccccactttgccgatcagcttacgatatatcgaccgcacccttatcgaccgtcccggtcgattcctcttaggtaatatactccttcctgccctcgac

SEQ ID NO: 3101 - DNA, 1164 bp, Listeria monocytogenes 4b
  misc_feature (1)..(end): n can be any nucleotide: a,g,c or t/u
gtgatggccgttcaatcgaaactattggtacttataatccattacttgatccggttgaagtgaaaatcgacgaagaagcaactttgaaatggatgcataatggtgcgaaaccatctgatacagttcgcaatcttcttagccgcgaaggtatcatggaaaaattccataaccaaaaattaggtaaataaggaggtctcggcgcgaatggaagaactcattctctcaatcgtgaaacctcttgttgaccacccggaagacgttgttatcacgccagaagaaacggatacatcgttaacctacaaattgtctgtcagtaaagaagacatgggacgcgtgattggtaagcaaggtcgtattgcgaaagcgattcgtacgcttgtctacgcagttggctccaaaaacgataagaagattcgtcttgaaattatcgaataacaaaaactcgtcaatttggcgagtttttttataactatttttaaataatcatcagagaagcaattacctcactaaatgttgtaaaatagaatagaaatggaggaattgtgatgaagccagttattggaattaccggaaatagattagtaaaaggtgtggacgttttttacggacaccgtgtgacttatacgcaacagcgatatgtagatgctattcaaaaagttggcggatttcctatcgctttgccaatagatgacccgtctgttgccgttcaagcaatttctctcgtagatggtttgcttttaaccggtggacaagacattacgccacaattttatttagaagagccgtcccaagaaatcggcgcttattttccacctcgggacagctatgaaatcgccttagttcgagcagcattagacgctggaaaaccgatttttgctatttgccgcgggatgcaactagctaatgtggcgttaggcggctcactttatcaagatatcacccaagcccaaacgaaagccctccaacattcgcagcgtgtccatgaacaactccgctctcatacaatcgatattgaacccccagcgaacctcgcccgcctctccccatccgacatcccccctccatctgctcccccctctatcccacatcatccccccctcccaaagccccccccttctgcgctgcgctcacccccccccccaggtccccacccgccctcccgcc

SEQ ID NO: 3102 - DNA, 805 bp, Listeria monocytogenes 4b
  misc_feature (1)..(end): n can be any nucleotide: a,g,c or t/u
aaaggaagtgatttttaaactacaaccatgaaaggtttgaaataaataatgaataacttacaaacacagtttccgcatatagcgattaaattaaatgaaccgttgtctaagtatacctatacaaaaacaggcggcgcggcagacgtattcgttatgccaaaaacaatagaagagacgcaagaagtggtggcctactgtcaccaaaataaaatccctcttactattctcggaaatggttccaatctaatcattaaagacggcggaattcgcggcgttattttacatcttgatttactacaaaccattgaaagaaacaatacccaaattattgccatgagtggtgccaaactcattgatacagcaaaattcgctttagatgaaagcttaagcggacttgaatttgcttgtggtattcccggatctattgggggagcactacatatgaatgcaggagcatacggaggcgaaattagtgatgttttagaagctgcaaccgtgctgacacaaacaggtgaattaaaaaaactaaaacgttcagaactaaaagcagcttatcgctttagtactattgcagaaaaaaattacatcgtattagatgctactttttctttggccttagaagaaaaaaacctaattcaagcaaaaatggatgaacttactgcagcacgtgaagctaaacaaccattagagtatccatcttgtggtagtgtattcaaacgtccaccaggtcactttgcgggtaaattaattcaagatagtggcttgcaaggcctattattggcggcgcgcaagttctctttcagca

SEQ ID NO: 3103 - DNA, 1104 bp, Listeria monocytogenes 4b
  misc_feature (1)..(end): n can be any nucleotide: a,g,c or t/u
catttcattggagatactcctaaaaaaatacttgatttggcttgtggaacagctgaatttgcgctacgtttaagtttttctggtcatcaagttactggtgtggatttatcaaaagaaatggtggcagttgctaaagaaaaagtggcagcggctgaaatcaatttgccgattatagaacaagatatgtccaagttagcattaaagcaaacgtttgatgtagttacatgcttctgtgattcacttaattatttggaaacagaacaagctcttgaggctactattcaagctgtatcagtgcatttagaaccaaatggcttatttttatttgacgtacattccgtctttaaagtagatcaagggtttaaagattattcatacggagatagcgatgaagagatttcgacgatttggaattcatttcctggcgaacatccgcattctgtcgaacatgaacttaccttctatattttagatgaagatgacacgtataatcgcgtggacgaactgcataaagaacgcacctatccaatcgctacttatgaaaatatattaaaaaaatatggttttacgaaaattgatatttatgccgattttagtcatgaaaaacccaataatacgagcgaaagaatctttttcgcagcaagaaagtaatttttcattattactttctttttttgtgcgattttcaccttaaactatcaaaaaggaatttgtcctagcatggcgaatagtatattaaggacggtgatatggatgatggacttagtaaaaaaacacaaaaattatatcttaatagggattgctattctttgtgctggtttagtttatatttggataccagatagtaaatctgatgctgtaactgccaatcaagcagtaacgaaagaagaaaaaccgaagaaagaagaaacaaaattatcaaatgaagtttatattgacattaaaggagcagtaaggacccctggtgtcttaaactgccatggacgctagagtcaagatgtggtgaaaattgcggagggctacagtgaaccattgagaattgattactaaactaaacaatagttcgtataaggaagagtcgaccagactaccaacagcgtaaac

SEQ ID NO: 3104 - DNA, 967 bp, Listeria monocytogenes 4b
  misc_feature (1)..(end): n can be any nucleotide: a,g,c or t/u
agtaatgcgttttctgagcggcgcgaaaaaaagtaaacaaattttgcgcgattttaaaccggatgtcgttatcggaacaggtggttatgtttgtggtccagtcgtttatgcagccgcaaaacttaaaattcctactttaatccacgaacaaaatagtgttgctggattaacgaataaatttttaagccgctacacagataaagtagccatttgttttgaagaagtaagtgattctttcgcatcggaaaaaatcgttttcactggtaatccacgtgcttctgaagttgtaggtgtggactcggaaggtgcactggaaacttacggactagtttcagggaagccaactgtgcttgtttttggaggcagtagaggagctcgcggcgtgaatgaagcggtagaagctattttgccagaatggaataatcgggattttcagctactttatgtaacgggcgatgtacactatgaaaaaataaaagattctttggcggagttgaatttgggtaatcatattagtgttcaaccatttatttatgatatgccaaaaattttaaacgctgtgacgctcgttgtttcaagagcaggagcgactacacttgcagaacttacagcgctaggggttccaagtattttgatacctagtgcatacgtgacagcaaaccaccaagaaaataacgctcgcgctttagaaaaaaataatgcaggtgtggtaattacagaagcggaattaaaaaatgccgattgaatggcgacagctgatgggatggtgaatgacgaggcgaaatggaatggtgtgaagctgagtgctgaacaaatggggcgcgcatatgcagtggggaaatgggggcaaggggggcttagcgtgatgaaatggatgggggaaaggaggcaatgagatgggtgaaaatgaacgaggggtggggatgggggaatgggtgcgggaacggagaagatggggcgggaaaag

SEQ ID NO: 3105 - DNA, 958 bp, Listeria monocytogenes 4b
  misc_feature (1)..(end): n can be any nucleotide: a,g,c or t/u
aactgtggcacttactcgctgcttgagcgccgacatgtgctggaaaggcactatttccgaacgattaattatgttaaaaaagaaaaaggttattttggagcaagagattgaagacttgcagaagaatttggatacagtggttaggaagattgggatttatgaagagaaggttaagactagacgagtttagctaggtgaatttttctcgtgtacagtaagagaccatttacaacagcatatagaaaaagacaacctgttatgggttgtcttttttgacgttctttttatcgtaaagcttttttgctagggaaaagataatagttattgcaaggaaaattaagagaaagtttatcattagattgggccattggatagttataccctcgtttcccgagaaaaacatctccgtaaatgcacctttcttatctgtcgtactaattacagttagccatctaaaaggtgctccatatatgtattcataaaaactcactttacttccatcagctatcgcaaatgttgggggtatgataaataacgtggtgattaggaggatagaggttgcaaataatcggttagttagccattgtagttttttcatgttagctccttttgggtgaaggttggtttttattgaattgttagataaaaagacagttcttgctgtttgaaattgcacaaaaaccgcttaaatacattgtttaggtggttttccgatatgggttgtgaaggtttcgaacccccgtccctctgattaatagttggttttgtgttaagcagttacacgcatttatgagatgaaaacggctatattatgcggtttatatcttttagagagctgttacaagaagctgcaagtattgttgttttgttctgccccatttatacccctctntataaagaagggcattttcactaaatctcacaaccaaaaccgctacatnggtangcgttcatatgt

SEQ ID NO: 3106 - DNA, 1318 bp, Listeria monocytogenes 4b
  misc_feature (1)..(end): n can be any nucleotide: a,g,c or t/u
ctttagggccacctagctgcatgcttgagcggccgccacgtgtgctggaaagtaataactgggactcacaagatgtggtatccggttgtacggagctaattcgaccatcttagggtcaatcaaaagtagtttcaattggtctggcgttgctttgtaaagtaaacttactagcaatgaattgatacaaacacttttccctgaccctgtagctccagcgattaaaccgtggggcattttttgtaaatcagtaataattggcgttcccgagatatctagcccgagtgccgctgtgagcggtgatgtagatgactgaaaagcttccgtattcatcaattcagaaagcattacgggacgacttgtctgattcggaatttctatccctactgtactcttaccaggtatcggcgcctcaatccgtatatctttcgctgctaaatttaatttaatatcatccgttaaattagtgattttgctaactttaacgcctttttcaggttgcacttcaaatctagttactgctggaccttgtgtacggttaactacactagcttgtacgttgaaattttccaaggtttcatctagcatctcttgctgcatttgtagccatgagtcgtcttctcgtttggagactggcggatggagcaaactaaacgacggaaattcatagttcgttgggtaagagactgtcgctacttgcgcttctcgaacagtattcgtttgttctgcttctacctcaactggttgttgcccatttatttcctgtgcttcttcttttcgaagtgcttgtttgtctttctttaccatcatgacattaaatggaattctgctttttagcaattgttcttgtctatttgattctacttgtttgcttctagtagttgttttcgtttgcgccggctcttccgttatttttttaacgcgtgctggttcttgctgttctactggttcccccggttactttcacttctggttgctccgtaatgacttcttaaaaaaacaggcactgacactatctcttcttctatcccccatttaaaaattgtcaaaaaaaattgtttccgnttttgatgaatttaataaatttantggagtaatagttaaatctttttgtattgtantaagtttttntgnttntgtaacagcaaantnaaattnanttggtngtnaaggaaaggcngcntttccnnnaccgtacaagcgtcnctctctttccnnacncnctagaggccaggttcnacctatagtagccgagcgagttctccatgttcatctatncnaaagcacaagcactnnancnccccttcctnncnggcgccct

SEQ ID NO: 3107 - DNA, 838 bp, Listeria monocytogenes 4b; identical to SEQ ID NO: 1471
  misc_feature (1)..(end): n can be any nucleotide: a,g,c or t/u

SEQ ID NO: 3108 - DNA, 633 bp, Listeria monocytogenes 4b
  misc_feature (1)..(end): n can be any nucleotide: a,g,c or t/u
tcaatccgtgatgattatgactatgtgattattgattgtccgccatcacttgggcttttgactttaaacgcattaacagcagcagattctgttttaattcctgttcaatgtgagtattacgcgctagaaggtttaagccagttactaaatacaataagaatcgtccaaaagcatctcaatgaggatttacaaattgaaggtgttttactaacaatgcttgatgctagaacaaatctaggtattcaagtaatagaagaagtgaaaaaatacttccaaaacaaagtatttaatacaattattccacggaatgtacgtctaagtgaagcacctagtcatggaaaaccgattttgttatatgatgcaaaatcaaaaggtgctgaagtttatttagaattagcaaaggaagtggttgcacatggctaaaggtctaggtaaaggaatcaatgcactatttaataatgtagatacgaatgaagaaaccgtacaaaatatcgctataaaagatattaagccaaatccatatcaaccacgtaaaatctttgatacgaaagcaatcaatgaattacgtgactccattaaaattcacggtgttttgcagccaataatattaagaaatacagataaaggatatga

SEQ ID NO: 3109 - DNA, 658 bp, Listeria monocytogenes 4b
  misc_feature (1)..(end): n can be any nucleotide: a,g,c or t/u
attacggcagatgaaaaaatcacttataaggtggatacatctaaaacagaagcagaatttttagcagacatcaaagcgaaaacaaatgatggaacagcgattacaagtgattttgcgactgttgttgatctttccaaaccaggaaaatatgtcgttacactaaacgcagaaaatgatttacaaaaagctttgccagtgcaagtgacggttattgttgaaaaagaaacaccaataccagacccaacgccaaatccaacaccagatccgacgccaaatccaacaccaacaccagatccaacaccggacccaagcccaacacctaatccggttatcaaaccaaacgtcaataaaccagaagtgccaagtcacaaaattccatctttaactgtaaatgagaaaaaagctaaagcagaaacaagcaaagaggctttacctaaaacaggggattccttgcctgtagcaggtgcaacagtaggatttttactaattagcttaagctggtttgtttctaggaaaaaataaaaataactatccgcccaattaagggcggatagttatttattcatgacgctagttaacatggcgacataagcttgagcaccagatttagttaaatgaacaccatctggagcaaagtactgagatagaccactagatc

SEQ ID NO: 3110 - DNA, 977 bp, Listeria monocytogenes 4b
  misc_feature (1)..(end): n can be any nucleotide: a,g,c or t/u
acctgaggcacttagatgctgctgagcgccgacctgtgctggaaagtaacacctttcgatcaccaagaagcacttccacttttacgtattgatgagccaacattgcaaatgacttttgttacaaataacagtcctttcgcaggccgtgaaggtaaacacgtaacaagccgtaaaattgaagaacgcttacttgcagaacttcaaacggatgtatctttacgcgttgaaccaacagcttctccagacgcttgggtagtttctggtcgtggtgagcttcatttatccattctgatcgaaacaatgcgtcgcgaaggttatgaattacaagtttctaaaccagaagtaatcatccgtgaaattgatggcgtgaaatgtgaaccagtagaagatgttcaaattgatactccagaagaattcatgggttctgttattgaatctattagccaacgtaaaggcgaaatgaaaaacatgattaacgacggtaacggccaagttcgtttacaattcatggttccagctcgtggcttaatcggttatacaactgatttcctttcaatgactcgtggttatggtattatcaaccacacattcgatagctaccaaccaatccaaaaaggacgcgttggcggacgtagtcgtggtgttcttgtatccatggaaacaggtaaatctactacttacggaacaatgcaagtagaagaccgtggtactatttttatagaacctggtacggatatttacgaaggtatgatcgttggggaaaacaatcgtgaaggcgatatcgctgtaaacattgtgaaagcaaaacaaatgactaacattcgttctgctaacaaagaccaaacaaacgtaatcaaaaaacctcgtcatttatcactagaagaatcattagaattcctaaacgaagatgaatactgtgaagtaacaccagaatccatccgtttacgtaaaaaaatcctaaacaaaaacgaacgtga

SEQ ID NO: 3111 - DNA, 1033 bp, Listeria monocytogenes 4b
  misc_feature (1)..(end): n can be any nucleotide: a,g,c or t/u
tactccatgcctgagcggccgccactgtgctggaaagttcaaaaagaaatgcaagtaatcgaagcgcaaatggagcgaatcccgtcattactgcatgaaacagataccattttgccagaagaaatgactaaacttcgcgctggctatgaagaaatggtgcgaaaaggttattatttagctcaaatggagttagataaagagatttctcgcatgaaaaatcaaattgataaaatgaaaaaaaatgtaattaatcttgatttagatgaagcggaacaaggagtagaagaattacataatgaaatcgatttgttttatgatacgcttgaacacgaagcagaagctcgccatttcgtgaaagaaaatcatagcccaacttctgacaagttacaacgccaaaatgccgtttcagatgcacttgctgaacaaattacagaagtaaaacaaacctatcatgttgctgaagatgatctagcggtttatttaaaaacgagcgctaaattgagtgaagcaaaagaaaactttgaacaattaactgctctaattgctagtggtgagattgcctactcggcagcgcaagatacattgaaagaaattgatgcagcgcttattacgattagcgctgagcaggacaaattcgctgaagaattgcgttctttgcgtaaagatgaactagaagcgcgtgatgatgctgaacggatgcgtcgtgcaattattacactagatcgcaaaatggaacgagaacgtttgccaggtcttccagaagagtatttatcgctacgagagcatatgggggaatccattaatgcgcttgagaaacgtttggaagagaaaccgctaaatatgaaagcagtaagccaagattggcgtattgcagaagaagatttaactcatttaactgaaaaagccgaggaaatgatggagaatgttcgcttagttgagcatgttatccaatatgctaaccgctatcgattgcgtaacaaagaacttgcagatgaactcgttcaagcagaaaaccatttctacaatgattatc

SEQ ID NO: 3112 - DNA, 761 bp, Listeria monocytogenes 4b; identical to SEQ ID NO: 1621
  misc_feature (1)..(end): n can be any nucleotide: a,g,c or t/u

SEQ ID NO: 3113 - DNA, 774 bp, Listeria monocytogenes 4b
  misc_feature (1)..(end): n can be any nucleotide: a,g,c or t/u
aactaataagaaagtaaagccaatcccgatggcagtaaaaattccgaaaaatcgctttttaaaaaattgataatctgcaatggttccgagtatcggagctaataatgaaataagtaatgttccaatcgagttcgcatatccccagtacgcggtcgatgtactgtcagcaatcccggcactcgctgctacccctttaaaataaattggtaaaatcgcagttgttatcatgattgagtaggcggaattcgcccaatcttgaaaaatccaacttttctcctcttttgtatatgccaagtgtgtttctccccttttctattcaaatatcgcttctatgacagagccagcagtatttggaaattgtaagtccaaaatgtgtgcaaatgtaggcgcttcgtcaactaaatgagcattgctgattttgtctccttttttaatgccaggtccattaaaaataatcgtggttttgtaatctggctttttaggagaataaccgtgaactgctttatagtaacctggttttccaagcatttcatcagtgactttttcgtaaaccggtccatctaaatcatccataaaataaaaaccagccctcccttcaaccataaaagtagcattaggatcagcaccacgaagtgctatttcttctttcggcaaaatttcttctatttcagccatgttttgaagtaaatgctggatttcttgattatgttgattggtttttgtgtaaatataactggaaccgtcacaacttttagcgtagacatcccattccga

SEQ ID NO: 3114 - DNA, 1070 bp, Listeria monocytogenes 4b
  misc_feature (1)..(end): n can be any nucleotide: a,g,c or t/u
tctaacacttttttattgctcatttccgttttttctgcagatttttttccttttcttctagaaaaaaagactaatttgcgtctaaaaattgtttaattaactgaaatccttgttttactgcacggcggcgattatggtttcgatctcttccatagacaaactgaaaagcctctgtttcataacctttaacgcttagtccaatccaaatagtgccagcaggatgaccttctaaactatctggacctgcaacacctgtaaaactgattccaatatccgtcttacaaaggcggcttacattttcagccatttccttcgcacattccgcactaacaacgcctttttcttttattacttggggagatacttgtaatatagattgttttgtttcttcactgtatgtcaccataccacctttgaaaattttcgaaatgccaggaaagcgggcaatttctgcttggaacaaaccagcagtgaaactttctgcggcagagatggtaagttctttttcaagtaacatcgccgtaactaattcagacaatgacacctctccatatccatataaaaaggtaccttctcggcgcaatatttcttcctcggtttccttcacaagtctgcttgcttcttcttttgttttagctgtcgctgtgatacggaccacaacttcattatcaccagcatatgtcgcaatcgtcgggttgacttgcgtgacaatcaaatcatttaaatcagcagctaattgtgactctccaattccaaaaaagcgcataattttggattctaaaatgttttgatcgccactttcgcttaaaagtaatgggttagcatagcttgtaaacattggtttcatttcagatggtggacctggtagcaaaacgtaagtatgattgttttctcttaagtacattccagccgcaaagccaaaatcattatttaatacgatggaatcttcaataataaccgcttgtaatttattattttcggtcatagtcctattcctagaagtgaaatactcattaattctattccatatggtcttcatcttccactaattgcttttgaagatgaacaga

SEQ ID NO: 3115 - DNA, 1269 bp, Listeria monocytogenes 4b
  misc_feature (1)..(end): n can be any nucleotide: a,g,c or t/u
tcgccgacgttccgcgatgaggaacttcatagtactacgcttcatttagatatcgcgaagatgaaacaagcactcggaaatgagtaccaattaattttaaaattacatccatctattagtaatgatttagatgaagtagtggatgattttgttgtctatgcggataaagaaacgccaatcgagacgatactaccagccgtagatatattgattactgattattcatctattccatttgaatttgctttattagaaaaaccaatgatctttttcacgtatgatttagaggaatatgataaggctagaggtttgtcggatggctttttagcaacgattccggggccattcgttcatacaacagaggaactaatacaactaattgagcaagaagcattcgatttagaaatggttcgtgcttttgcggcgaaatggaataaatattcagacgggcattctagtgagcgcttcgtttcctttttgaaagaacagctagaaaagtagcactgctaacaagtagagaaatttttgttttcttgatatactactaaagaaagtaggtgggctgatgaagaaagtaattacatatggcacatttgatttgattcactgggggcatattcgtttattagaacgagcaaaagctttaggtgattaccttattgtagccatttcaaccgatgaatttaatcgaatcaaacacaaagaagcataccataactttgaacatcgcaaattaattttagaggcgattagatatgtcgacgaagtgattccggaaagtaactgggaacaaaaattagaagatgttaaaaatcgtgatattgatatttttgtgatgggtgatgattgggaaggcgagtttgacttcttaaaaccttattgtgaagtcgtttatttaccacgaacagacggtatttctacttctaagattaaagatgatttaaaatagtcgtagcacaaaacaggcagaccagtaatgttcaattattaggtggtgggcttgttttgtgctattattatgtataaataataacgcaaagaactagttatgataggagcagaagaaatgacaaatttatttcaagatgatagtctaacgctgcatacagacttatatcaactaaatatgatgaaagcgtattttgacgatggacttcatgagcgtagatcggtatttgaagtgtttttccgagatatgccatttgattcgggttttgttgtgtttgcggggctagaacgaattattcattatatgcaaaatttacgttt

SEQ ID NO: 3116 - DNA, 1171 bp, Listeria monocytogenes 4b
  misc_feature (1)..(end): n can be any nucleotide: a,g,c or t/u
actatagttaaagcataaaaagagcggagtgtgttgtacgttgggaagatcattttatcattttttaatgacatatcgggacccgaagctaacagatcagaaaacggaatttgccaacaatgcataccgagatcatagttttccaaagcaaacaagaaactaccatattctttgtgattatctggagtttaatgcgccgtatttaccgggaatgtctatttttgatgaactttgggatgcttatttgctagatgaagagaaaaacaaacactaggaggaaaaaagatgagcgtacatatcgaagcaaaacaaggggaaattgcagaaactattttattaccaggagatccattgagagcaaaatatattgcggaaacatttttggaagatgtcgttttattcaaccaagtgcgaggcatgttaggatttactggtacatacaaaggcgaaaaagtttctgttatgggaactggtatgggaattccatctatttcgatttatgtaaatgaattaattcaaagctatgatgtgaaaaacttgattcgcgttggtactatgggcggcattcaagcagatgtaaaagtacgtgatgttgtcattgcacaagcggcatcaacggattcgcaaattaatcgcaatacttttgctggcgtagattttgcaccagtagctgatttttctcttctaaaaaaagcgtatgatgcaggtatcgaaaaaggattatcgcttaaagttgggaatgttttttctgcagaccgtttttataatgatcaactagacaaacaacaattagcagactatggtgtgcttggaattgaaatggaagcagcggcactttatacgttagcacaaaaatatggtcgtcgtgctttagctattttaactgtaagtgaccatattttcactggggaagaaacatccgcggaagagcgccaaactactttcaatgatatgattgttgtagcacttgaagcagcaataaaataattttaattactaacttagaattagacttaatgtatacaggaaggttgataaacagatatgagttctttattaacaattgctttagctgttagcatcagttgtgtacacacagtggaagatcaatattnttggtggcacanatgctgattgcatcgctaaagtggagcaaaatcgccaggcatca

SEQ ID NO: 3117 - DNA, 1424 bp, Listeria monocytogenes 4b
  misc_feature (1)..(end): n can be any nucleotide: a,g,c or t/u
ccccgagtgggcttttggccatatacgagggagtgttgttaatataactctccagcttcaaggatgttttagtagccctcgagggaatcgaacccccatttaagaaccggaatcttacgtgctatccgttgcaccacgagggctatatgtaggccagaaatgcttaccgtacgaataataattatagcgaaattcgtagtgttttacaagttttattttaaatgaagaagccagcgcctccaaagatttgctggctcaagtattaatttaataatgtccaaattgatgaactgtcaggcttctcgcctcgtacccaccatttcgcttggtatgtttttccgttatacgtaactttatctccgccattataggctttttgagcattccagatttggatatctctacttgctgtttgccaaacatcacttgtatctggagtgttcccttttgtccaccatttcgctgtataagctactccgttatagtaaacttggtcacctgcatggtaaatttggtccgatttccaggtgttcagtggatctagcggttttgttttaatagtgatttcattacttactaatgaacgattgccagatgtatctactgcatacactttataattatagcttgtattgctggctaattttgtatcttcaaacatggttttcgtggatgttgcaatttttgtattgttacgataaatttcataatttttcacttctacattatctgtggaggtttgccaacaaagagcaatagttgtctccgtttgtccatgagacattaaactttttggtgcagttggtgcttcattatctactgctggggcttcttttgtcgtcacatcaatactgtcgcttaatgtagatttgtttccggcgaaatcttttgctcgaacagtgtaagtgtatgcggtatttgattctacagctgtatcctcataagaagctgtttgactttctccgagtactacgccatcacgtaaaatttcataaccttttattcctacgttatcggtagaaacagtccaggtcaaacttacattcttagcggtagtagttgctgctaaattagtcggttctgtcggcgcttcgttgtcaacagctggtgctacactagaattaataatgtttgcatcaattacttgatagaatgcatttcctgaatcagcaatgaaacaaacgcccaaaataacgtagtatcctgaacgatcatctggaatattaatttcttgttttgttaaagcatttggtacgcttccatccgcttcaatcgttgtgagtggctctaatgatgctctagttaacggtttatttgggtcccaaccctttttagtaataaaatattgccagcctttccagcacnntcgtggcccatcgcaggtgctgctagagtngctgcaaggcggtncnacacggtaagcc

SEQ ID NO: 3118 - DNA, 1470 bp, Listeria monocytogenes 4b; identical to SEQ ID NO: 1661
  misc_feature (1)..(end): n can be any nucleotide: a,g,c or t/u

SEQ ID NO: 3119 - DNA, 1483 bp, Listeria monocytogenes 4b
  misc_feature (1)..(end): n can be any nucleotide: a,g,c or t/u
ctatagcacttcctcctgctgagcgccgacgtgtgctggaaagtgcttatattataggagaatttgaccaatatcaaaaagcgcatgacgacggagaaccaagtggaacagctggcgttccaatgctagaggtcttaaaaaagaagtctttaaaaaatgttgctgctgtagttactcgttattttggaggaacaaaactaggtgcaggcggcttagtcctttcatatggtaatgctgttagtgaagctattcaagcaatcggtattgtcgaatgcaaactagccactattgttgactgctcttttgcttatccacttttaggaaaaatcgaaaatgcgcttgaactaaaagcatatcaaatcgacaaaaaagagttcactgaaaaagtagtacttcatatttttgttgataacgacgaactgcaagattttttcaactggatcactgagatttcaaatggacaacttgaatataaagaaggaccacaaaaatatagagaaaaggatgtcacttagtatgtccacaaacgtatttatccaattaccagatactattcttactaaacgaactatattaaaaaaaacctctattgcagatgctactacattatttgatatttggtctgatgatgaggtagctcagtttatgaacatcgaaaaattctctactattcttcaagcagaagaaatgattcaagcaattgaaaatgaaccaaatgcttgcagatacaccattttcacaactgatgattctttacatgcaattggttcgcttggaattaatgatattaacaaaacgaaccagacaatcgaaattggctatgaactagcaaaaagtcattggcgccaaggttttatgtttgaaattttgacaacatttttaaccactgtaaagccctatcttccctataaagtgcttacagcaaaagttctaccagataatgtagcttcaatcaaactactgaaaaagcttggttttgagcttaccacaactgggcaagaactagatttacattctggtaggatttgtgaaatcagtaattatcgaatgctactgaaataggacaaatattacatttttgaaagatatcatcttttttgtattttttttcgagtaatttctgtataataacatcaaagtttaaaaattaaagaaaccgtaaatcgggcgtaacattctttaatgcaacaaatgatacaataaaacttagaaaagtgactataaggagaattaatatatgagtaaaggcactgatgatagccgaagaagcagcaagaaatacaaacgtagaagaaaaattttattctggattctaattcctgtaatgtgcttagtacttgcaggtgtcggatacggcacttatctttttagtaaaacaaaactcgcagcagataactcttatgataatgtaaggaacggaaaagcctctacacttcgaacaaatgacattgaacctataaaagatagtttttctattttaatt

SEQ ID NO: 3120 - DNA, 1212 bp, Listeria monocytogenes 4b
  misc_feature (1)..(end): n can be any nucleotide: a,g,c or t/u
gcctgccattgctatctccttccgccgtactaatttcttctccttattattatatagaactgtcaatgtgttgtctactagctaaaaatcattggtccaaataaaacaagcattagcgcaaactaatgcttgtttcattaaattgcaattatagaatacctccgaaccaatgaaggccgtaatatacaatccacgtataccactgagtcccaactgctagagaggttacttctacagcgtctttcggtatattataaccaatttgacctgcaagttctgtcattaaaggtgccgctgctcctgataggtagagggtgataatgacgataacaatacctgtgaaaatccctctaaataaattccctttggatggaacaatagcaaaaatcatgtagaatggaagcgccgttaaatcagctaaaggtaatactttatttcctggcaaaatgaacgctaaaatcaaagtaatcgggatcatgagtaagccaagcgaaagtacaaatggatgaccaatccccaccgctgaatctagtccgataaatagttcgcgacctgggaaacgtttttccatgaattcatgggcagcttccgagataaccgtaagaccgtccattagaagggaaaccatccgcggaataagtactaaactagcggcaatcgttactccggtttgcagtacttggctcagcggcatttgagcaatggcagcaagtccaccaccaataattaagcccataagcattggttcgccgaaaatacctaaacgtgattgcactttctctgtggaccaattaatttttctaacgccgggaatttttccgagtagccagttcattggataaccaacaagcgcccacccggtagtttgaatttgtggtaaagaaatcccctctaatcctaatacattctccacatctttttgtgtccagtcagcaattttgaagataattgccatattgataatcgaactaagaatcgcaataatcatgcttcctgttgttaagtaaagtgcactggcgatgaaaagtggttgccagtaattccaaatatctacgtncattgttttcgtccatttaaaggcaatcattaaaatattggttgcaataattgcgacganacaaatggtacgacttctgttcccatgcgagtgatgacccaactccccaaccgatatccgttgcggttaatttaaaattataatttctacaagtg

SEQ ID NO: 3121 - DNA, 806 bp, Listeria monocytogenes 4b
  misc_feature (1)..(end): n can be any nucleotide: a,g,c or t/u
gtagcatttttggtaactcatcttaaacttgattaattgcaataaaaaagaccttagataacaagtatctaaggtctttaagttaattacttaacttctacgttagcgccaacttcttcaagtttagctttgatttcttcagcttcttctttagcaacgccttctttaagagctttaggagcgttatcaactaattctttagcttcttttaagccaagaccagtgatttcacgaaccactttgattactttgattttagaatctccagcagaagctagttctacagtgaattcagtttgctcagcagcagcgccaccagcagcagctacagctacaggtgctgcagcagttacgccaaattcttcttcgattgcttttactaaatcgttaagttctaatacagatgcttcttttacggaagcaatgatttcttcaatgtttaaagccattttgaaattcctccaataatataattttttcggatttaaccgagatttgtttgtagggtttcccctgggtagaacagattatgcttcttgtccttctttttggtcagcaacagctttagtagcgatagcaagaccgcgaactggagcttgaagtacgttgcaaagcatagatagcaatccttcgcgtgatggaagtgttgcaagtgctttaatttcttcaagagaagcaactttaccttcaataacaccggctttgatttctagtgcttcatgatctttagcgaaatcgttaagaattttcgcaggcgcaactacgtcttcattactgaatgcgattgcgttaggaccagttagtgc

SEQ ID NO: 3122 - DNA, 1493 bp, Listeria monocytogenes 4b
  misc_feature (1)..(end): n can be any nucleotide: a,g,c or t/u
gccagcgctgtttttgaaaaaatcaatccgacattaagagattttatttatcttttaattgaccgtagcagagaagattatctttctgttattgcggacgtttaccaaaaacgcgtaaacgacttgaatggagttgcggatgcagatgtttattctgttgttccactttccgaacaagaacttacggcgctctcgagagtatttgctacgaaaatgaacaaaacaaagttaaacattcaaaatcacattgataaatcccttcttggtggagtcaaagtggttattggaacccgtatatatgatgacagtctaaaaacgaaattaaaggacatggaacggcaaattaaagcctagtttccgtttaacgaggggtgaaatcaatgagcattaaggctgaagagatcagctcaatcataaaacagcagattgaaaattatcaatctgaactaaaagtgagtgatgttggtacggttacctacattggtgacggtattgcgcgtgctcatggactcgataatgcaatggctggtgaattgttagagttctcaaatggtgtaatgggtatggcccaaaacttagaaacaaatgatgttggtatcattattctaggtccttacactgaaatccgtgaaggcgatgaagttcgtcgtaccggtaaaatcatggaagttcctgttggcgaagcgcttattgggcgtgtagttaactcattaggtcaaccagttgatggtttaggacctattgaaacaactggaactcgtccgattgaagcagtagcacctggtgttatgcaacgtcaatcagtaaatgaaccattacaaacaggtattaaagcgattgatgcacttgttccaattggtcgtggtcaacgtgagttaatcatcggtgaccgccaaactggtaaaacatctgtagcaattgatactattctaaaccaagctgaccaagacatgatttgtatttatgttgctatcggtcaaaaagaatctactgtagggaatgccgtagaaacattacgtcatcacggcgcattagatgacgcaatcgtcgtaactgcagcagcatctcaaccagcgccacttctagacttggctccatatgctggtgttgcaatggcagaagaattcatgtacaacggcaaacacgttttagtcgtatatgatgatttataaaaacaagcagccgcttatcgtgagctgtctctattactaaaaagtcctccgggtcgtgnggcnttcccngggggtgttttctncttgcnctcccgtttgcttgnncgtgctgcgnngttnnntgatcgcttaggtggcggntccnttncggctcttccnttcgtngnnncncnaaccgccgatctctctgcttntntaacnncnnncgttctctcnctactttccngcncncggtcgnncgctcaagcntggggtcagtnnactnacaagcccnncnnaaagagntttagctcttntttttctctcctcnnggggcgcgcc

SEQ ID NO: 3123 - DNA, 1741 bp, Listeria monocytogenes 4b
  misc_feature (1)..(end): n can be any nucleotide: a,g,c or t/u
actatagcaacctactgcatgttcgagcggccgacagtgtcgctggaaagatcactcttaaaacttgaaaaagcaaaaataaatcaattttctttttaaaaagagaattgatttatttttttatctactgtactatagtaactagtacaattagttctctatagtagaattcatgaaagcagggggagagatgtttacgattaacacaaaaagtcaactaccgatttatgaacagatcgtccaaaaaattaaagaacaagttgtcaaagggatacttcaagaaggagaaaagatattatctatacgtgaatttgcaagtagaatcggagtgaacccaaacactgtgagtaaagcgtaccaagaattagaacgacaagaagtaattgtcacggtaaaaggaaaagggaccttcatagcgaaccaacaagataaagtaagttcaccaaaaaaactagcagaaacaaaaattaaattaaaagaaacgattctcgatttagtttaccttggaattaacgttgaagaaatacatagattatcagacgaatatagtcaagacatcattggaggtgacatggttgaaggttgattcacttagcaaaaaaattgacggggaactcttattggataaaataacatttgaagtaaagccaggagaaattattggtatagtcggacgaaatggcgtaggtaaaacaactctttttcgaactattatgggtttttatattcctgatgagggagatgtgtacttagatgaggcattaagcaaaaaccctcaattaaagcaaaaattattcatgcttcaagatagtttaaattgttgggatggttataagattccgacgataaaaaaattctatcaaaaaacttatccattattcgacggagctaaatttgataacttactcaatcaagttaacctagctacagatgtaaaatttcaaaattattcaaaaggaatgaaaggtctttttgggctcgttcttgccctatctatcggagctgaatttattttgctcgatgaaccaatggaaggtctcgatataattgctcaaaagaaaattatgggcatattattagaagaagtggagaagcggaaattaggcattattatttcttcccatcgtttagctgatttagatccgattgctgactatattcatattttacaagataatcatattgaagagtcttaccatcttgaatcacttcgggaacaagctgttaaaattcagatcgcttttgaaaataaaaaaattccaccttttttactggaaaatggcaaagtaattaataagtatggccgtgtttacaccattttattccgagatatgaacacagaattatacgcagcaataaaaaaagaaaaaccaattttcatggatgaactcgcagtcacattagaagacttgtttatttatcatctagaagaactaggaggcgagaaatcatgagtgcagggcttctttggaaagaatggcgtcagaatgcgtgggtatttatatttattttaatcgcttttataggttctgaagctacgactgcaacgaacgcggttagtatgtttaatgacaactataactattatcagtctgaagaatttcaaaaaaataatacagcagatcacaaatgacgggtatgaataaaaatgattaagttaactcctttgattntaagggattanggtttctttggttgtttagtagtacgttggaacagtctgcacaattgactctaccgg

SEQ ID NO: 3124 - DNA, 1602 bp, Listeria monocytogenes 4b
  misc_feature (1)..(end): n can be any nucleotide: a,g,c or t/u
atattataatgttagcattcggttttcggaggattaatcgcggacaacagattgtataattcaggaaaaattactaaaggaaaagcataataatagaaagaaagagagaaaagcgccagagcatagttctgtgaaggtggaaaaatcgacgagcctaactaatcaaaagaaaagggatggaaggcgcgagggaagaaaaacaaaaagaaaataagaaaaagaaaagtggagagtgtcccaaacacaataaatagtattgcatgagcaagaaataacgatatggactcctgggatgtggagtgagacataataaatatcggttcgagttgcacattattatagacaaatgtctcacaggtcattggatctagcccatccgcaaaatagtccatcgtcatatcagccagaacatagtaacctgtattatcttgcatatccccgataattacaacgtcttgatacggtacggcaagcaccatttcccccgttaacttctcgcgcatttcgcgaaggaacgcttcattcaacaatctactagcatcgtaaccatcatttgtgcgaacgaaataaaagtcattaccattaacagaatctttttttagcgggatttctagattcgctaaattattaaaagcaacttctcttatttctttatgcgttagttgtgcttttttaagcatactctcttcaataaaacgataagatttccccaaatcaaccgcgtagaaaattttcgtttcagccgtatgatcatccgttaacagcgcttctccagcttttgtttcatcaggaaaagaagttgcacgtacaaccggatagatgctcgccttattattttccagctcaacatttcccgccgctgcccgaaaaccctcttccacataataaacaattttttccaccgctgcattaccatcattttcaaagttcgcaatgatttgcgggatagtcagagttacctttttaccattttgcgcaaccgttagcgtgtcattgtctcgattatatgaaaactgccgattcggcgcttgtaattctttttcaagtttttctttcatttttaatgtagtcatttttgccataagtgcctccccttccataaaaagcagtcactttttatatcgcagctagaaaatcattaatttcttcttttgtttttctatctttacttacaaaacgccccacttcttcaccgtcttcaaacgccaaaaagctcggaataccaaaaatcgctaaatcagcacataaatcaataaattcatctcgatcaacatggtaaaagacaaagtcctcattttccgcttcgatttcaggcattactggttcgatgaatttgcagtcgccacaccaatcagcactaaacataaaaacggatttgccttccgatttaatagcgtcaaattgttctactgattctaatttcttcatttccatacgctccttctaatctcatactagttaaatcctaccgcctaacaacactttcgtccagaataacgctcatgaaaaaagtccagccccaacgaaagagccaaactttttttaccgtactttagagcgcgcttttttcttttctaaaaaatcgnggaaatacccgaaaaa

SEQ ID NO: 3125 - DNA, 1012 bp, Listeria monocytogenes 4b
  misc_feature (1)..(end): n can be any nucleotide: a,g,c or t/u
acaagttttccattaattaatggttatttttactgagtaattcataacttcgccttcttctatataaggctctattccattaaaatcaattccaatagtgtattcacctttatcaaggttatttgttggcacaataatctgcttcgtcacttcgtcgtaatccacttttgccacgttgtaaatttccttctcatttgaatcacgaatccaaacttcttgaaaaccactaattctacctaaatcatctagttgcgtataaactggtagcgtgatatttgtatcctcaccaaaaacaacattttgatctggcaaagttccgatttgacctagtacgattactttatccacaatagtaggcggcaacacatttaaataattataacttaaatccatacttaccaaactgtccaaatgagtgaaatccgtcatttctgttctaaattggttcgtttgaaaatttactttctgcaaatttttcaagtttgtaaaatctggagcgtcttccgaagctagtccacaactgctcatcaacaaggtttctaatttaggaatattagaaaagttaggtaagcccccaacaatagttcgattactaagatcaagatactttaattctgggtagttttgataatcgggaactgtaatgttttcaggtagtacctcgcttgatagatttccttctgctctcaaagtatctaatttgggcaaggttggtaaatcaggaaagccagtaaacatggtttgtgtaggataaatcataatattatttacattggtaaaataagcatttcctagcatttgtaaatcttcatctgtgaggtaattggtaaaataacccaaccctagagatgtcaccgcatccacatcatcttgggtaattacatctgtcacatcttttttaccaaagttctccaccatatcttatgctaaattttcatctgggaaaacatcgattattctggctgtaatggattactctgactatttgacttcatctataagtgaagacaca

SEQ ID NO: 3126 - DNA, 966 bp, Listeria monocytogenes 4b
  misc_feature (1)..(end): n can be any nucleotide: a,g,c or t/u
ggaaatagtgctgtctcctgctgcgcgccaaattgtgtactgctttaattcttctaccgataacccggcgccttttaagtgcagtaaaaattttagccaattggcgtcttcttcgctgtatatgcgcaaattattcttgtcgcggtcaggggttattaagccttctttttcgtagaatctaagggtgctactgggaatgcctactagttcggaaaattcaccgatagaaaaagccatttaatcacctcttctgtgtgtttttcataaggataccattttgaataggaaatgcctactttccgatgcgtttattttcagctgctgagtatctatcaccaacaatttcaatctgcgataaagcatcagctattttttgtcgtgctccgtcatcaaaacgaatgtccgtggaggcgatattttctttaattctgctttgttttgttgttccgggaattggcacgatccaaggtttttggtcaagtatccaagcgatggcgagttgtgccgttgtgacattttgctcgtcggctatttctttcataaaagcgagtagtacttggttggcttccatggcttctttttggaatcttggtaagccaccgcggttgtcgttttcattgaagctagcatttatatccaatttgccagttaaataaccgcgacctagtgggctgtatgcgacaagcccgatgccaagttcttctaaaaccggaaatatttctttttcagcttctcgccaccagatggaatactcattttcaacagcagctagtggctctactttatgagcacggcgtattgtctttgcgctggcttcggaaagtccccagtgtagaatttttccttcttgttttaaattctgaatggttccggcaacctcttcaattgggatagaggggtcaattctatgaatgtaatataaatcgatgtaatacctttccagcgcnctgtgngcgttcagtacca

SEQ ID NO: 3127 - DNA, 691 bp, Listeria monocytogenes 4b
  misc_feature (1)..(end): n can be any nucleotide: a,g,c or t/u
tgaccgaagagaaacaacttgaaaaaatgaaaagcgattttgttaataatgtttcgcatgaacttagaacgccgatttcgatgttacaaggttatagtgaagcgattattgacggggttgctcagtcggatgaagaagtgcgggagtttgcacaaattatttacgatgaatcccttcgtattgggcgtttggttaatgatatgctagaccttgctagaatggaagctggttttaatcaaatggataatcaaaaattaccgctcgctccattgctgcgaaaagttatttctaattttgacgttcttgcgaaagagaattatgtggaactcggcttagagcttgaaactcccgatttagagtattcctatgaccccgaccggatggagcaagtattaattaatttaattatgaacgctattcgtcatactggaaaagaaggctatgatggaaaagtaattttaaaacaaaccattgatgaagctagaagcaatcttgtaatcacagtatctgacaacggtagtgggattgcggaagaagacatcccatatctgtttgagcgtttttataaagtggataaagcaaggaaacgcggaaaagcagttggaacaggtattggtcttgcaatcgttaagaatattgtagaagcacataatgggaaaatttcggttgaaagcgaattaggtaaaggatc

SEQ ID NO: 3128 - DNA, 1133 bp, Listeria monocytogenes 4b
  misc_feature (1)..(end): n can be any nucleotide: a,g,c or t/u
tacttccaattccagtgattttgtttatttacttcttaacatttatcccaaaaacgatggacggggcaacgattgtttcaatgccttggattccgcgacttgggattaattttacggtagtagtagatgggcttagtttgctgtttgcgctacttattacggggattggttcactcgttaccttttactctatttattatttagggaaaaagaaagaacgacttagcaatttctatacatttttatttatttttatgacggcaatgctcggggttgtcttgagtgataacttgattgtgttgtatcttttctgggagcttacttccattagttcgttcttattgattgggtattggtatcatcgtgagcgttcacggtacggggctcgtaaatcgatgatgattacagtcttcggcggactgatgatgcttggcggatttattttgcttcatattatgagcgattctttttccattcgggagattattagtaacgcggatgtaattagtaataatagtttattcattcctgcgatgattcttatcttgctcggggcatttacgaaatctgcgcaagttccattccatatttggttgccagatgcgatggaagctcctactccggtcagtgcctacctccactctgctacgatggtaaaagctgggatttatattgtcgctcggttcacgccactatttgcaagttcgggtgtatggttttggacggtatcactcgttgggattacgacccttttctggggttcacttaatgccacgaagaaaaatgatttaaaagcaattttggcttattcgacgataagtcagcttggtctcattatggcgcttcttggtgtcggtgctgcctcccttcactttgacacgcttagtgatgatatttatgtgatggcgattgtcgcagctgtgttccatctatttaatcacgcgacatttaaaggtagtttgtttatgatggttgggattgtcgatcatgaaacagggacgcgggatattaggcgacttggtggcttaatgcgaattatgccgattacggcgacgattgcgtttatcggaacgttcgcaatggccggtattccaccgtttaatggatttctaagtaaagagatgttttttgaa

SEQ ID NO: 3129 - DNA, 1189 bp, Listeria monocytogenes 4b
  misc_feature (1)..(end): n can be any nucleotide: a,g,c or t/u
gtgatgcgctttacaagcttcaggctggaaaatgaaaatacactttccaagatgcagaagaacttgatgtgaattttgaacggcttatagaggctaaaatgttactacaaggattcgctatttttcttgatgaagatatccctgttgaacataaatggaagaaagcggttgaacaagttaatatttttaaacaacacgtactgcacaaaggtggaatcattcatcatgtgaaaaaatggtgtgatttagaaaatctacctgaagataaaattggcgcgatgttgacgttagaaggcattgaaccaattggacgtgatttagataaattaacgcaattacttgatggtggcgtattatctgtcggactaacgtggaacaacgccaatttggcagcggatggcattatggaagaacgtggcgcaggactaacccgcttcggaaaagacattatccatcttttaaatgaaagaaaagtattcacggatgtttctcacttgagtgtaaaagctttttgggaaacgttggaacaggctgaatttgtgattgctagtcattcaaatgccaaagcaatttgttctcaccctagaaacttagatgatgaacaaatcaaagcgatgatcgagcatgatgcgatgattcatgtagtcttctatccacttttcacaacaaataatggtgtggctgatacagaggatgttattcgtcatattgatcatatatgcgagcttggcggattgaaaaacattggttttggttcagattttgatggtatcccagatcatgtcaaaggcctcgaacacgtcggtaaatatcaaagcttccttgaaacactcgaaaaacactacactaaagaagagatagaaggatttgcatcgcgcaacttcttaaaccatttaccaaaataaacgaaagtccaagcactgtaagaagtgcttggactttttttgaaatagaacaaagagaatctgctgtaatttgaaaaatggcatgttataatgaagacaataaatggaatttagtttggtataaggtatatcagacgaatttttaatggaggttttaatgtgcgtttagaatctaatttcgtccaaaagcaacaacaaagccgtcgcagaaattaaatatgacgccacaattggcccagtctattgcaatgcttcaatttgcaacggctgatctagtggcgttt

SEQ ID NO: 3130 - DNA, 1551 bp, Listeria monocytogenes 4b
  misc_feature (1)..(end): n can be any nucleotide: a,g,c or t/u
tacgacgtgcattattatgaaagaacgcgtagaagatattaaatatcgcggtatcaatgtgcgccacgacaaccttgatttcatttttgaactcaaaaaaagtgcagaagataaataccaactagaaatggaagacttacaacaagcaatcttttttgaagcctaccaacttcttttctttgacggtacctttttcataccggcaaaagaagtatgggaatcgttgaaaccattgatggaatttcataaagtaacgaaaaatgaagtggtgcaattttcagagtcgcaattaagtgaagtcatttcctacgtattaccagccttacagaaaagcgggaagttaaagctggatgactcgattgaagaccggattacgcaacagccacttgattgtaaattattcattgcactcgaatacggggagcatacgttgcgacttgaatatcattatggcaatcagcttttcgatccatttgcaacatcagaagaagaaaacgaaaaaatcatgatacgtgatgtcgaaaaagaagcccgtgtaatgaatattatcgaaagcgcccctgttcatttttctggaacaaaaatggtcgtcaataaacaagaaaaggatttgtatcaattttattatcgcaccattccaaaactagcagagtacgcagagatttatatggaagacggtctcgaagaaatggtagaagagaatgtgcgcccagttacgacactggatgtttctggtgataacgattatctttctgtttcgtttgatttcaaaggtattccggaagaagaagtgcaaaatgtcctagaatctttgcgtgaaaaacgtagctatcatcgtctgaaaagtggtcgtttcttatcgcttgaatcagaaaactacaaacaaatggaagatgtactccaaatgttagaagtgcgtaagaaagatgtccaagcaaacatgcaagtaccgctttatcgtgggatgcaaatttatgatattttaggagcaggagcacaagatgaacatcataaattcagtcgttctttccgcgaattgcttcagcatattagcacgcaatcgcaagacagctttgcgttaccaaaaggattaaaagcagagttacgtgattatcaactaagtgggtttgaatggatgaaatcccttgcgaaatataatttaggcggcattttagcagatgatatggggcttgggaaaacagtgcaaacgattagttttctagcatctgagttagaagataaccctaacttaaaaccagtcttaattattacgccagcatcactactttataactggcaaagcgaattagaaaaatttgcgccaactattccagtgaccgttttacatggaacgaaacaatcccgcccccccgaaatggaagaaatgaagcatggccatgtctacttgatttcgtatccatcgttacgccaagatattgtccattttgcagatgtcgctttttcaagtgttattattgacgaatcccaagctatcaagaattatcatatgaaggcctctccccctgcgcgcgctttgaaacgcaatcatgt

SEQ ID NO: 3131 - DNA, 1193 bp, Listeria monocytogenes 4b
  misc_feature (1)..(end): n can be any nucleotide: a,g,c or t/u
gttctttcaaagctagctggtacaaaattcactttgttttccgttttttgaagttccagtgcttctgcagcaagaggttccattttcacaaaccattgtagggaaagatagggttctactaccggtccagttcgctctgaatgccccactgaatgcaagagaggttcttgtttgataaataaacctaagtctttgaaatcttgaataattccttttctagctacaaaacggtgcaaaccatcatatttaccagcatttttattcattgtcccatcttcatgcatgacaataattcttggcaactcatgacgattccctacttcaaaatcattcagatcatgtgcaggcgtaattttaactgcaccagagccaaactctctttccacatattcatcagcaacaataggaatatctctattcaaaatcggtagcatgatggttttaccaattaagtgttgatatctttcatcttttgggtgaaccgcaacagctgtatcacccggtattgtttcaggacgtgttgtagctacttctaggtaaccagagccatcagttaatggatatttcaaatgatagaaactgccttcaatatctttatgaattacttcaatatcagataaagccgttttcgcttctgggtcccagtttattatatattggcctcgataaataagacctttattatataatgttacgaatactttttttacggcatccgataaaccatcatctagtgtaaatcgttctcttgagtagtctaaaccaaggcctaacttctcccattgttcacgaataaactcagcgtattcttctttccattcccaagtcttatccacaaagttttctcgtcctaagtcataacgagaaacattagattcttttaatttcgcttctactttagcttgcgttgcaataccagcatgatccattcctggtaaatataaagtgtcaaacccttgcattcttttcattcgagtaataatatcttgtaaagttgtatcccacgcatggcctaaatgtagtttacctgttacgtttggtggtggaataacaatactgtaaggttttttatccgtatttccttctgctttaaagaattctttttctagccaccatttatatttacctgcttctacgttactcggctcatattttgtaggcatatttatttcattgtgttcgattgtcataat

SEQ ID NO: 3132 - DNA, 932 bp, Listeria monocytogenes 4b
  misc_feature (1)..(end): n can be any nucleotide: a,g,c or t/u
tcgttgcctgagcggccgacactgtgctggaaagcattttgcctatttatttgaaaaaaatttctttttcacgagacatcactgcaataatgctatttaatatgctatactgaaacatacaataattctgttttaatgatagaaagtggggattttgaatgagtaaagatattgactggagtaatttaggatttagttatattaaaacggataagcgttacatttcttattggaaagacggggaatgggatgaaggtacgctaacagaagataatacgctacatattagtgagggttcaacagcgcttcattacggacaacaatgttttgaaggtttaaaagcatatcgttgtaaggacggttcaattaatcttttccgcccagatcggaatgctgctcgtattcaaaaaagctgtgagcgtttattaatgcctcacatcccaactgaaaaatttattgatgctgttatgcaagttgttcgtgccaatgaagaatttgtaccgccgtatggaacaggtgcaacactttatttacgtccatttgttattggtgtaggtgacaatattggtgttcatgcagccccagagtatattttctctgttttctgttcaccagtcggcccttacttcaaaggtggaatggcgccaactaactttattgtttccgattttgaccgtgctgctccaaatggtacgggtgccgcaaaagtaggcggaaactatgctgcaagtttacttccaggccaggctgcaaaagaacgcaattttggtgattgtatttatttagatccagctactcatacaaaaatagaccaagttggttctgctaaattctttggtattacaaaagctttccagcacntgtcggccgccgaacagctgtaagtgacaataggcnncnnaaagtttatcatttctacccccagccggccc

SEQ ID NO: 3133 - DNA, 880 bp, Listeria monocytogenes 4b
  misc_feature (1)..(end): n can be any nucleotide: a,g,c or t/u
aaaagatttggcaatttctttgtcacttgaagcatcagaattacttgaatgctttcagtggaaaacagatgaaatagcgttaaaagaaaatcgtgaagaacttttaaaagaagtagctgatgtgcttatctatgctcttcaaattgcagagagtatgggggcggacggcgaggaacttgttcgaatgaaattagcagagaatcgtaggagaacttggccaaagaaataaaaaaagctgctttaccaaatgatgataaggcagctttttattttaataagaataagaacgtttacggcgttttttggaacgaatcattgcaaaaattcctgctataactaagataatagaaatgatacatacaccaaaaccgataagtccggtaatgctaaacgaaaagccaaaaccaatcaaaccaatcagaagtaacactaagccagctaatttcatttgaaaactcctttcagaaatcttatctctattatataggaattatctgaaaaaaataagactttaaagataaaaaatttttaaagatgaaatgcattgatagagcatcagttcgcataagttggaaatagtcaagactgcaaaggaaaaaaattatctgttatagtaagaaagtgagagaagcaaggaggaaaacatatggattttaaagagtatcaaattttagcgaatagaactgctgcaacacacgaacaggcactaacaaattacggacttggtattactggagaggccggtgaagttgccgatttgattaagaaatatgcttttcatggacatgattcatataaggaaataaggacatctcatcacagaagagctagggggatgtacttttggtacgtatcacaaattgctaaatgggcagatata

SEQ ID NO: 3134 - DNA, 848 bp, Listeria monocytogenes 4b
  misc_feature (1)..(end): n can be any nucleotide: a,g,c or t/u
tagcaattattccagaagattttccggattcagcggtttggaagctgacattctggtcggttatgataataataggtttgggtggttatatcattgcgagaaaaaaagagaagaaaaccaaaagagtttgaatatgatcaggaagtaaaattgcgcagaagattaaaactggtgttagcacgtatgacaccagttcaagtaattatcgcgtattattttattgcggttacgatttctaccatcgtcttaagcttaccgttcactctacaaaaaggggtcaaggtgtcgtttattgatactctatttacagcagcgagttcggttagtgttaccgggcttgcaacagtagacgttagccagacttatagtactgctggaatttgggtcttaatggcgattttccaaattggtggacttggtgttatgatgattagtacgtttttctatttgattttaaaaagacggattggcttaaaacaacgtcaattaattatgacggatactaaccaatttacaatgagcgggatggtccggatgcttcgtgagattctagtgcttattttcggtattgagttaattggagccttgattttagggatttactttattccgctgtatccgaatttttgggacgcgatgttccaaggattatataattctgtttcactcgtgaccaatgcgggggttgatatcaccggtaaatcgctaatgccctttgccaatgattatttcgttcaatttatttcgattctgttgattattgcaggtgcgataggttttcctgtattgcttgaaacactttccagcacactgtcggccgctcaagcatgcaaacgagctcactatag

SEQ ID NO: 3135 - DNA, 1419 bp, Listeria monocytogenes 4b
  misc_feature (1)..(end): n can be any nucleotide: a,g,c or t/u
gggatatgatgaataaagaaacgggagtgagataacggggaggagaggaaaaaaaaagtaaagttcgtggatgcgtaagctataataaaaacaaataaacgatgtggaaatggcagggtcgggagtaatattagtaagtgtgaaaattatattgagggtactttatctttctgtataattagcgtttatatttgtgggaattattggatattgcgagttaaaggaaagatagtgggagtaagagggggagagaagaggaaatggattagaaagtagattagtttctttttttgcagtatagtgttttatttttttgcggtcgcctgtgttttgcgtgtggattgtggctgatcgaatagcgaagattaattctcagattcacaactgggattgattaataaaactatataatgtgttgttcattgtttcacttgatgtatccgggtatttggtagggatagagaggtcgggcaacaagccagtgagtaaagattatggagtgaaatacatgatggttttttataccatacgccatattccgtttttacacttcgggaagccgctctataatgcgatgggcgttaatttagatcccatgccatttgtggtggcaaggtattgacccagttggcgctatcaaaatcttagaaaaagctggatcgattcatcatttccatgctaaagatacgtatttagatcaagataatattaatatgtacggtttaacggatatgcaaccatatggcgacgttcaaacaagaagttggacattccgttcggttggttgtgggcacagtttgacagaatggtcggacattatgagcgcgcttagaacatatggttatgattatgtagtcagcatcgagcacgaagatccattaatgtcgattgatgaaggattcgaccgtgctgttacaaacttacaatcgattttaattaaagataaaccactggatatgtggtgggcttaacgataagaaagggtgtcttaggatgaaaaaatatcaattagtaattattggttacggcgggatgggaagctatcatgtaacgcttgcatcggctgcataaccaacaaagtaaaatccactgcgtacatctttgtatgttaaactgctttctgatgaattcgctgcattcgcaacagtaccagggataaaggcaaatccaatcattgatagaagtgcaactgctgtgattaacgcgattatttttttcatggatttaaaatcctccttatttacatctttaattagaaaatagggttaagttagccttaaccctatatttcaacttattctaattggcaattaaccaaagatacctttgattaagttgtttagtacttctgctacgtccggaaagcggattgcacctgaaaaattacctaacaattgcaagaaaaaatgcatttgtagt

SEQ ID NO: 3136 - DNA, 1122 bp, Listeria monocytogenes 4b
  misc_feature (1)..(end): n can be any nucleotide: a,g,c or t/u
aaaccaaaagaaaataaaatcgaaatcggtgaaaaaacaaaaccgcttctaagtattgtgtggattgtcggaggagtcattggcttatatgtggcacaaattatttgtagtgttattattacgatgatttcaggggagttaagtaattctgccaatacggagttacttgttgatttgactaaagctgcacctattttcttgatctttatttctattttgggaccgattttggaagaacttgtctttcgaaaagtgatttttggtgggctaagtaacgtgacgaatattcatgtggccgcagttattagttcgcttttctttggattacttcacggagatatttctttcttacttacttattttgtcatcggactaattctttgtttcctttatacgaaaacaaaacggattgttgtttcgatgggtgcccatattttaatgaatacgattgttttgcttttgagtcttggaattattgggggataatatgaaaaattcattaataaagcaaagttttttatattttgcacttggtcttgtatttgtatattttgttgttgttcgtgtggctgattatggttatgatgtgcttgcatgtatactaattatcatgacattaatggattttggtattggcatcggtctgattatcactggacttaaaagacgtaaaaaaaacctgtagaaagtaagtgttgcttaccttctacaggtttttttattctgttttcgctggataattttccaggaaatagattaacgtttgtaattccgttgtaagatcgatatggtgcacacgaacttgtttcggaacactgatacgagctggtgtaaagtttagaataccttttacatctgcttcaattaaacgatcaaccgttacttgcgcttcgtcagctggaactgtcagaataactacttccacaccgttttcacgaacaatttcttccatatcaatcaaatgatagattggaatatcttgttgaacactacctactttcgctggatccacatcaaatgcagcaacgattttgatattattatttttcatgaaattataatgtaataatgctgtacctaggttacctacaccgattagtgcaacatttgtctgtttgtcct

SEQ ID NO: 3137 - DNA, 1117 bp, Listeria monocytogenes 4b
  misc_feature (1)..(end): n can be any nucleotide: a,g,c or t/u
ctccttgcttgagcggccgacctgtgccggaaagtggaagcgctatcttaagtgccgaaacagcactcgaattattagaaactgacctccttgaaaaaacaaccatcatcgatgccccacttgttgaaggcgcatttactgccgctgttcaatctctcgttaatccatccaaagaagctatcctacaagaactcacaaacgtgcattaaaaacgtaataaaacgcaattttgtaactgggaactatgtaaattaatttttacatgacaatactattttcgaaaggagtttattatgaaattctttagaggaatgattggtttttgtatcgcaggtatgattgttatgagtgtttggactccacttgccgagaattatggtatttttggaggttatctggcagcttttattattattggtccaatgtggtttatgaatcactatgttggtttaatcgaaaatgatgaagacgcagcgtttgttgatatggctgtcggaattgggatttgcggaattatgcgtgatgtctttatgcaaggtggtggcgagttagtaagttcgcttccaacgattggtcttgttgcgattggagcagttctagctggaatcgtggccgcagcaattgaaaaagatatggcaaaaaaacaagaagcaaaacaagaaaaaacagaacctggcatgaatatgaaagaagaagagcgtttaaacgaaaatcaattagtctaaaaaggagtgtaaataatgagcattggtattgcattagcaacgattgcaggtggctttttattcccttttgctattcgaatgatgtggggaaaaatggttgatgaatggggcgctatcggaggttggatggcagcagcatttatcgttggtacagtttggacaattaatcatggtattccaaaatcaatgatttatcaatctggaacagtttgggtagatatggcggttgcagctggtattggtgtattcacagcttcccttttaacaggcggtaaattttctaaatcgatagtcaatttggcagcagctgtagttggtggcgtggttggcggatttttactatcactattcttataaaaatatgaaggaggaagaaaaatgagacgtttagt

SEQ ID NO: 3138 - DNA, 864 bp, Listeria monocytogenes 4b
  misc_feature (1)..(end): n can be any nucleotide: a,g,c or t/u
gcaagccaatacttttgagtgagctacctttatagaaaatatccccttctttttgcgtatcaagccctcctgcaagggataagaaagttgtttttcctgacccagaactgccgactactgtataaaaaacacccgcttcaaaatcataattgatgtcacttaaaatggattcttctttcgttttataccaataagaaatattttcaaacgttaatactttggtcatatcgtcacctactcctgtttagttagaattgtttttggattcatacgaagaacgagtgcagctggtaaaaggactgagataaaggcaattccgataccaattccgcccattttcagcatatcttctaatgttacttgaatgtctaattctttgatttgttcggtgttcttcgtcaagttgctcacgctctcaccgaatccacctggacctccttgtccaccacctggaccacggttttctgtcgaacttgttgtttcagtagtagatgaattttgttgcgccaataattgatttcccgctaattgtgctacatagtgactacttgcagcggctaggccaaaggaaactagagctacaattaaaatttccacaaagaattgcgcaatcaatttgccacgtttttcaccaattgccaaaagtacacccatttcatacttacggtcacgcacttgcatcatcacgagtaggcctaagattagtgctccggcaatactcacaatataaaccacatttttagagaaagatgctacgctattaatcgggccaatcatttgttgataaagcgtatcattggcatctaatttaaatgtatcccaatcaatgctatcaactttttttgcttctttttcaaaagcaga

SEQ ID NO: 3139 - DNA, 928 bp, Listeria monocytogenes 4b
  misc_feature (1)..(end): n can be any nucleotide: a,g,c or t/u
ccgcattatccgattcattttgatattctaaaatttctcggaaccatgttaatttattatcgaatgaagttttggaattaaccactttgccttctttataggcccagtgtgccgcaaccccgtattcagcgatttggtgcatttcgtgcgttctaatttgaacttcaagcggttctccttgaggccctataaccgtcgtgtgaatcgattgatacatattcgacttcggcatcgcaatataatctttaaagcgacctggcatcggtttccagcgcgtatgaataataccaagaacagcatagcaatccttgatactactaacgacaattcgaacagccaacaaatcataaatttcgttaaattgtttattttgttcgctcattttccggtaaatcgaataaatatgttttggtcttccagaaatatccgcttgaatattgagttcatctagattttcattcacaccgtcaatcacatcatgcaaataacgctctcttgcatcccgcttttgtttcattaagtggacgatgcgataatattgttgtggatttaaataacgcagcgctgtatcttccagctcccatttcactcgcgaaatacccaagcgatgtgcaagtggcgcaaaaatttctaatgtttcgttcgcaattctacgttgtttttccacgggcaaatgttttaatgtccgcatattatgcaaacggtccgccagtttgattaaaataacgcgaatatcctgcgccatcgcaatgaacattttccgatgattttcagcttgttgctttccagcgcactggcggncgctcgagccttgctgtggagggccccgtnnngccttttgggggggggggtggccatgggctggggcgngggggggcggngngggggcctggggaaaccctgggnnnncccgactaaataaaaaaaa

SEQ ID NO: 3140 - DNA, 828 bp, Listeria monocytogenes 4b
  misc_feature (1)..(end): n can be any nucleotide: a,g,c or t/u
taaaaactactgtgcactactctttatgaaaggcgcactactccgtgatccggaaaacattttagttcagcaaacagaaaatgtgcaagctgccagacaaatccgcttcacaaatttacaggaaattcttgatcaaaaagaatttctaaaggcgtatattcaaaatgcaattgaagtagaaaaagctgggttagaagtggaacttaaaccaagggaagaaacgcctattccagaagaattactcgctaaatttgaagaaatgcctgcgctacaaacagcttttgaagccttaactcctggtcgtcaaaaagcttacttgctctattttgcggctccaaagcaatcaaaaacgcgtgtttcgcgcattgaaaaatacgaagcaacgattttagatggattaggattaaacgattaatcgaaaaaaagcgcaccctgcgtgaaggttgcgcttttttatttattttacttcttcaaaatcatctaattgccaactgctatcaaaggctggttcggttggtccgtaaatacggaaatacgtgaaccaattggcatctggaacagtttgaatccatggaagcgactcatcttctggaggatttggcccaaagtaaagtgttgtattaccgtcagcatctacttcaaacgtatctttgatggagttaagcgcaggcataaattgctctgtgacaatttccgaacgagtatccatctcataaaccgttaccgaccagaaaatactcgttggcactggtgttggcacttttaatgtataacttttgcccccatccagataatttccttctttatctttcactccaagcatataaa

SEQ ID NO: 3141 - DNA, 777 bp, Listeria monocytogenes 4b; identical to SEQ ID NO: 1710
  misc_feature (1)..(end): n can be any nucleotide: a,g,c or t/u

SEQ ID NO: 3142 - DNA, 1680 bp, Listeria monocytogenes 4b
  misc_feature (1)..(end): n can be any nucleotide: a,g,c or t/u
cgacagtcccctggaaagattagcattaataatgacttttggagtggcgatgtggccttatctcacctataaaagcaagtgctgccacaaataatttcacggataaagtggaatatgttgatgcagacggagccgagattgctccttcagatacattaactgattatcattatgtatctacaccaaaagatatttctgtctataaattttgagaaatacctcataatgcgacaggcaatatcacagatactgggattatcgtgcgtgacatatatgataaaataatcgacgtaagctacgtagatgaaactggccaagacttattaccagtactagaaatcatcgatcgcgaagcagctattttagagacaatacctgactatacatttgtaagaaaagacattagcatacatggcttgcatatcatttttcgctataaaaagaatatttctaccattccagagttcgggaaaccgaatcaagtcactgtaaattatctggatgaaaacaatacttcaattgccccgtcattatatttgagcggacttttcaacgaagcatacaatgttccgatgaaaaaaattaaaggttatactttattaaaatacgattcggaaattcttggcgtttttaccgaatcaccacaaacaatcaacatcatttatcaaaaaaaagcgcctgagcaagcaccaagcatggaaccattacctgatacaactgttccagaaaacccgtcagtagaaaaagcaaaaataaagaaatcaaaaatagaaaccacagaaaagcgaactatatcaaaagcaaaaatcgaaccaaaagcattgaaattaaccaaagttgaacaaaaaaaacaagagacgaaagatcgcttgccaaaaacaggtgatagctcggtaaatttattaattacgtgcctcggaattattgccatatcgtgtggcgtttacttactcgtacaacaaagccagaagcgttgtcgtaaagaatagaaaataaaaacaagcaatccgaaaataggattgcttgtttttttacccttctcgtttaagcatctttgtattagctaaaaacagtgcagcgacgagtaaaagaatcgcgcctgaaagtattagcgtcgaagttgcgctagagtggtcgacaataataaatcgaataatcgctgtgataccaatataaatgaaatagcgcagcgggaaatgaaaatgagattcgaaatatttaacaatcagcgcaataaattcaaagtaaaggaaaaacgtcaaaatatcttgtgtcatataatagtaagaaacgtctgtatctaaaaagaaaatattattgaaaatcgtaaatgcctctctaattaaaaaagcaacaagggtaaaaccgaccataataagcgccagatttagggtgattcgtagcaggatgggaacaatagaagaaattttttctaatcgtttcatcagttgcctcctttccaaaaacgatatcgcttttttagttattttacactataatgggaaccatgactatttttaaggggnggattgttattctaaaacgcttttttagttattataagccgtatcgaacactttttatcattgactttggttgcgccgtcttagcagctattttggagctggcttttccagtcgcggttaaccacgtgattgatacattacttccaggaaaaga

SEQ ID NO: 3143 - DNA, 1481 bp, Listeria monocytogenes 4b
  misc_feature (1)..(end): n can be any nucleotide: a,g,c or t/u
acattcctgaaccattgtaagagagtagctccctttgaaccttttcaagtaccggtactggtaaaactgccggacctgccgaaaaattataaacacgttccactcaacatctctcctgtcttcaaatttccccaattacttacaaaaattttcaccaataatcgaatacttattggccagatatgagccttcctcgttacacttatgcttttcgaagttctgttgttaagaaataaaaaagccgaacctgtgatattctacacaatattcggatttttcagcgcttaaaagtaaacactgccttttgtacttttgtatattatagcagaaacagagctgtttttcagaaaatttatactaaatctacaaataaatgtgatgtttaaactttctgacattaaaaaagcacgagaaaccgctatttaaagcaattctcgcacttctactttttgaaaaacacttcacaaaagatgttagctatttttcacttttcgtcctaaagtaaaccaatacacagcaaaaaatacaacaagtgcaataattgctgtgcgatacataatagcataattgtagtaagtcgcaacaatactcaaaccaaaactaccaacagccattccaatgtccattcccgaaagaaaagtcccgttcgcggtacctttattgtgcggtgcagcccggtccacagccagtgcttgaagcgccggttgcgacatcccgtaacctaacccgaagaataacgatgcgataaacaagctgattgcaccagttgcaaaagaaagaattaatatcccaattatcatcgaaagcgctcctggaataataacaaaacggtgtcccttcgtatcataaagtcgcccagcaaacaaacggcttacaagaaccataatcgcttgcccgataaaatatatccacgttgtcgaaatccccagttctgttccatataccatcataaatgtctggatcccaccaagcggaatagccattaataaacacaagcccgccggaagcaaggccgttttctcaaacaatttcattttttgatgtacaatcttttctgattttggaattttcacctgtgtcatcaaaattaaaataaacaccatcaaaacaagcgaaaacgtcactaaaacatcgaaagaaaaataattcataattaaaatagcgataatcggcgcaagtgacattccaagtgcagtcgtaagcccataaaaaccaataccttctcccgttctgcttggtggcacgagtttagaaacgcctgtagcaatagaagttgttccgataccccagccagccccgtgaaaaagccgtaatataagtaaggccgccaccgccgttgaccaataaaagttcactgtagttaaaattaaaatcaaaaagcccacgataataagtactttcggtccgaatttgtcattccaactcccagcaatcgcccgcattaatagtgctacgatggagaatagccccaccgccaaact

SEQ ID NO: 3144 - DNA, 766 bp, Listeria monocytogenes 4b; identical to SEQ ID NO: 1472
  misc_feature (1)..(end): n can be any nucleotide: a,g,c or t/u

SEQ ID NO: 3145 - DNA, 938 bp, Listeria monocytogenes 4b
  misc_feature (1)..(end): n can be any nucleotide: a,g,c or t/u
taccttattatgatgtacattgatgagtggattacataaagaagcagcctggagaaacactaagcccagaagaaaaacgcttagctgatattgctaacagctacttagatcaatttttagctgcagacaaaatcgtcatggcgttcccactttggaacttcagtatcccagcccaatttttaacatacttattctatttaaatcaagctggcaaaacatttaaatacactgcaaacggccctgtaggtttagttgctgataaaaaaattgccctgcttaatgctcgcggtggcatttactctgacggaccaatgcaaagcttcgaaatgtccctgagctatgtaaaaaatgtgttagctcacttcggtatctctgagccagaaatggttatcgtagaaggtcataacgcaaaacctgatcaagcaaaagacattatctctgcaggagcaaaagaagcagtagaattagctaaaatcttttaataaaaaaaccgtgaaagcgaaaatcgctttcacggttttttttcgatttaatttaacaacacttttgatactattttgtttaacatattactaaaagaggaattgttttaagaatacatacgattataccgaacaaaagttattaaaggaggaaaaattcatgagaaaaatgggagtcaaaattggcttgtgcgtccttttaatgatgccatttactatatcattttccgcgaatgtctcagcggaagaagaaattagtgtaaaagccgctcaagatgttgtcaacattcctgacccagttttgaaaagttatttaaatggactcttaggacaatcaagcacaagtgatattactgaagctcagatggatactattacaaatgtcactattagtaacagtagtttaactgatttaacaggtcttgattatgcacataatttaacaattttacattt

SEQ ID NO: 3146 - DNA, 1123 bp, Listeria monocytogenes 4b
  misc_feature (1)..(end): n can be any nucleotide: a,g,c or t/u
agacgtggggggcaaaatttggtacttcaccactgtttcgaaaagaagacattaaaccctatacagaaatgatgttggaacatttcgagcaattcgaaccaatttatatcattagtggggacacggattttccaacggaaactgtaacagcttattatttggaagctttagaaaccgtttctaaaaaagcgccacacgcacttaaagttttgcatatttgcggtcgtttaaaagatattccggaaaatctgcaaacacatccagcacttgatttgtatttttatcaatctggacataattcggagcaccaatcaatggcgtatacgttggcagaacactttagtcagttagagccaatcaagccagttattaattcagaaccgtgttacgaattaatgggatatagtcgacaaaaatatggtcgttttagccgagaagatgtacgaaaagcagcttggcaaagtgtcttatctggtgctatagctggtatttcttatggggcacatggtatttggagttggcatgaagaaggaagtacatttggatcagctctaggcgaaggttttgtttctccatttaattggcgacaagcacttcattttgaaggagctacagattatgcatttctaaaatcctttattttggcaaatgacttaacaacactggcaccaataaatttagttttaaatcaaactccagaaattcgagcagcggagaccgaaaaagtagttatcatttatgtgccatcaaatgtcccgatttatttgaaagggcaatttgcttctttggatgactacgcgattgatttggagcaaggtaaaaaggtcagccttacaaaaatacttcatgaagaaaaaacagaaattcagatgactccttttttaaaagatagtttatatgtaattcacaaataaattccaatttctttctggaaaaaataattttgtttaccaataaaaactaaagcgaggccactatttcagcgtggcctcgcttttggcttttacagaagtttgttctaatgtttgcttaacaaatttaagttgtgcgacgagttataatactctttccgagcacacgttgcgcgctgctcaagcantgcgtgctaagttgcccatcaggc

SEQ ID NO: 3147 - DNA, 916 bp, Listeria monocytogenes 4b
  misc_feature (1)..(end): n can be any nucleotide: a,g,c or t/u
caacagagcatccttggtttaaaaaagcgcttgctggtgatccattctatcgtgatttctactatttccgcccagcaaaagccgatggttcccctccaacaaattgggtttccaaattcggtggtaatgcttgggaaaaattgcctgactcctctgagtactatttgcatttatacgatgttacgcaagctgatttagactgggccaatccgaatgtacgcgaggcactctttgatgtcgtgaatttttggattgataaaggcgtggaaggttttcgtttagatgtattaaatgtgattgccaaacctaagtttttagaagatgattttgaaggcgacggccgccgtttttatacagatggaccaggaatacatgcttacttaaaagaactacatgaacgaacttttggcgacaagccaattataacggttggagaaatgtcctctacagatattgacaactgcattcgttatagtaatccagacgaaaaagaattatcgatggtttttcatttccatcatttgaaggtagactatcctgatggagaaaaatggcgtttagcggatgtgaatttcgagaacttaaaatctattttccatacgtggcaagtcgcgatgtcagaagaaaatggatgggatgcgcttttctggaacaaccatgaccaacctcgagcacttggtcgctttgcttccgacaaaccggaacattattatcattcggcaaccctccttggcgcaacgattcactttatgcgcgggacaccgtttgtttatatgggggaagaaatcgggatgatgaatccaaaatttcctacgattgatgattatgtggatgtggaaacgctcaaccattttgatattttacaaaaaaacggacttagtgagcaagaagttatggcgattatcaaagagcgttc

SEQ ID NO: 3148 - DNA, 813 bp, Listeria monocytogenes 4b
  misc_feature (1)..(end): n can be any nucleotide: a,g,c or t/u
aagccctctacacgcatgctcgatgggcaacatgtgctggaaagattaggtggcatgaaccagaccctattgcagctgctaaatttcctggttcagcttctggttcaagatggactgctcaaattaagataggaagtaaacaagtaacaataaataaaggatggacaaaaaagcaaaactcaaatgaagtgcatattccaataaaaggaaggtaataatatgaaaaaaattatgaaaaaagatgattattctaaaatgccatgggtatcagcggaggatttatatcttttatttgaacaagcactcaaggactttaagcaaagcaaattaagtaaaaaagagttttttgatattcttgatgaattgactatgaggcaagtagatacctatgaaattttaaaagaacctttgagaggacagctcgacaatgagttatataatttatggaacacagaaaattatgatgatgtagatattattacatcattgttaattaatttaggcttgaaaaatacttataataaaatgaaaaaatctattgaggatacttcggaaatatcaccagaaatacttgaggaaatacaagatgcaattgaagaagtcggagataatatagatgatccatatcaagattatatgaagaaaatgtagaatgcgattacagtgggcaagaatggtttcattgttggtgctaatcctgtgtgcatcaattaaggagcgtgttgtgatgaaagaattgagactgtgtctagatatcaatgtcctgctgtttgggtctctaactatgcggggatctcaaagaaaatgaataac

SEQ ID NO: 3149 - DNA, 1030 bp, Listeria monocytogenes 4b
  misc_feature (1)..(end): n can be any nucleotide: a,g,c or t/u
aagctgacaactcctgaagatatgccgctcgctaaggcgattttaggggaacttggagggatagcaaatgattagaattggccaaggttatgatgtacataaacttgcttatgaccgagaactgattgttggcgggattaaaattccttatgagaaagggttactaggtcacagtgatgcggatgtacttcttcatgctattactgatgctatcataggcgcaattggcgctggtgatattggtcatttttttccggacacagatatggcttttaaagatgcggattcagctgagctacttgaggaaatttggcagaaggtagaggcggatggttttcgtcttggaaatctagatgctactattattgctgaaaagccaaaaatggcgccatatgtggagcaaatgaagcttcgaattgcggagttgctacatgcggattcagcccaagttaatgtaaaggcgactacgacagagaaattagggtttactggtcggaaagaaggcatcgcaagtctagccgttgtcttacttgaaaaataattgaaggagtgaataattgtgagtgaaacaaaacgagtacgtgtacgttatgcaccaagtccaactggatttttgcatattgggaatgcgcgtactgccctatttaactatttatttgcaagacataatgatggagattttatcattcgaattgaagacacggatgcgaaacgtaacatagctgacggtgaagaaagtcagatgacaaatttgaaatggctaggtatggactgggatgaaggtgtggatgttcctggaaaatacggaccttaccgtcaatcggaacgtcaatccatttatgaaccgttaattcaacaacttctggatgaaggtttggcttataaatgttattgtacggaagaagagctggatgctgaacgtgaaaaacaaaaagcaaacggtgaaatgcctcgttatagcgggaaatgtcgtcatttaacaaaagaacaacaagcggagaaagaagcgcaaggttttaaaccaagtatt

SEQ ID NO: 3150 - DNA, 1431 bp, Listeria monocytogenes 4b
  misc_feature (1)..(end): n can be any nucleotide: a,g,c or t/u
ttcctatgtcgagaaacactatcaagaaccggtcagcttacaagaagtagctgattacactggatttagcacgtactatttcacaaaatttttcaagcgaaatactggtatgacgtttgtgacttttttaaatgattaccgcctgaataaagcaaaatggatgttgtttatatgaagctttccctgttacagaagtggccgaactagcaggatttagtagtgtaaaaacctttcatcatgcctttaaacgagcaatgggtgtagcaccattaaaatacagaaagacaatatacgggaataattaagcaataaaataggaagatttacctctagtagttttgtatgatgtaactatcaaaactattggaggttttttattatgacattaaaagttggaattataggttgtggaggcattgcaaacgggaagcatatgccaagtttattaaaagctgagaaagcagaaatggttgctttttgcgatatcgttttagaaaaagcggaagccgcagcaaaagaatttggtagtgaaaatgcaagcgtatacacaagctatatagaattactccaagataaatccatcgatgtcatccatgtttgtacaccaaatatttctcatgcaggaatttctattgcggctatggaagctggaaagcatgttatgtgcgagaaaccaatggcaaaaacaaccgaagaagcgaaaagcatgattgaagctgctaatcgtacaggaaaaaaactaacaattggttaccaaaatagattccgcaaagactcggattacttgcaccaagtttgcgagaacggcgaactaggcgatatctattatgcaaaagcaaaagcgattcgtcgccgagctgtaccaacttggggtgtgtttttagatgaagaagcgcagggtggcggaccacttattgatattggaacacatgcgcttgatttaacgctttggatgatggacaattataaaccgaaatatgtagtaggaaacagttatcataaacttgccaaaaaagaaaatgcagcaaatgcatggggctcatgggatccaaataaatttactgtagaagattccgcgtttggttttatcacaatggaaaacggcgcgacgattgtcttagaagcaagttgggcgcttaacacactccatgtcggtgaagcatgaacgtctccttccggcacagatggtggcgcccatctggccgacgggtgtcgatttgtcggggatgcgcccacgcgcatgtgtgatcaggttatttgttgtcgacggcggcggcgtcgcttcgtctgatggatctggtcgtgcccttcctgtgcttgtctgttcatgtgtctgcctgccgtaccctgtggtgctctctgccctgccccctcttcccgtgctcccccctcttcgtggtcgcctgtgccgatccgcaaacaaaaagaaag

SEQ ID NO: 3151 - DNA, 1253 bp, Listeria monocytogenes 4b
  misc_feature (1)..(end): n can be any nucleotide: a,g,c or t/u
attgctttgtcagccaattccttatgcgaaaagaaaaacatttgcttatttgttcagtcggacatttattagaacaaatgaatatgccggtctttacattagacttaccgtaattgccgtgattttactcgtgtttgttcaaggtttttatttaaatatcatgggggcactactatttttgtatttaactggttttcaattcatcccgatgttaaaacattatgatgcacaaattatgctacgactttatccgattaatgatcgttatcgtcatcgcagttttattcactttcttcggattttgttactcgctcaagcactactctttagtgtgattggcattgcacaaaatgggaccatcagtgggatgatcattttaggaattaatttggcttttgtagttatctttacgttcctttatgcaccagtcagaatgaaaaaaatgtacgaataaaaaaagcgatttggatgagtggtccaaatcgctttttcctatttagcatcatgggaaaattctggataatgataaatatcttcatgtgagaatccagattgagtattattttttttcatgatattggtaatttctttggataaaggtgtttttttccagtcatgaaaaaatacttcagaatcccaaaaggaaataattaaaaatttattcatattcatcgcttttgtgagttttgtactttgcaagccaggcgtttcactaaaatgcagactcgctcgttgatacatttgcaagaaaatagggatttcttcatcgcggaggtggatatattcaaagacgactactccaaaaccttttaaggaaccactgctttgcaatactcgatactcagcgccttcttggaaaagtttttcaccagtcgactcttgatacaaaagtgattgggaaaagttttgtagaagtgtcacatttccgccagtataatttgccattaattgacgaagatagtgctccgttccagtcgtgataaatacttttttcataataagtccttctttcagttttattccattaagaaaaatgattacacctttattttccacgtttttcataattgaaacagctgataggcaatttgtttggttttatacaaattttctagtatccttttatctggagaagttatttattgttctgttgcctattgtgtgtaaatgaacaaagaagggaagcgactcaatgancaaaataacgaatgatttatttttaaaagcagcgcgaaaagaacaagttgaccgaa

SEQ ID NO: 3152 - DNA, 1549 bp, Listeria monocytogenes 4b
  misc_feature (1)..(end): n can be any nucleotide: a,g,c or t/u
cttttttttttggtcatttctctggaccgaggcgagcgacaaccacgtcgccgaccggcccaccctgcgcggcggacacaagggccagcaacgcaggggcgcgaacacggaacgacgcgcaacgacggacaaagagcagggggcggacgggaacggaacgacggccacagacgagaacaacgggcgggcgcgccccaccgcgccgagagccgaggggaggcgagcaccaccgagggccccgccgcacacccggcccgtgtcggaacgtctccaggaccccgacgggaggggggcgcctgcgcagccggaggacgtccgcccccccccacccccgccccacctagcagatgcggcaccacttcccccaacccacacctcgcgccagccatttctcggccctcataaatggtcgcaagtgcttcactataaatctccacagaaaatattttctgcatttcctttttgaatttcaccaaaggattcatataacaggtctactttatcagaaattgcgaggattttcccttccaagaaactgtctttaccttcttttagcaaatgacgataaattggttgatacgtttctgggatttctcgttcaataaaattttttgtcatgctttcttctacttctgaaagcatttcgcggagttctgtcgttgcatatttcacaggcgttttaatatccccgatgaaaagctctgaataatcgtggtttagcgctttttcgtatagtgcacgccaattcacttcattcccagcttcttcctctacagcaccgaaaaattgagcaatggatgtaactttatatgaatgttctgcaacagagtgctcttgatatttaaattttcctgggcaacgataaatgttttctaaatctgataaactttggaaatattgatgaattcccatattatccctccatccttcgttttattcttcacgtttttgttttttattggccggattagtgttttcgatttcacgcatcatcagcgccgcagcataaccaattaaagcaatcattgcggctgagtaagttctaaaattatcggtagcaaaaataaaaataattgctgaaaataaaagtgtggtcagtattccccagctaaacaactttgttccgcgcgccgttccgactttcatatgcgaataaataccaacataacaaacgaactgaatgataataaattgcacaacagataaaccaataactgctgtgagattactattccaaacaactgctaaaatcgcaataataatcatcacaataatccctataataacaatgaacttctgcattggtgataatttcttcaaaatacttcctccaagcttttatttgttacttactttaccataatctctgtttatttgggataaaaaacacccatcattcctaaaaggttttctgagcgttcttacttaatgatggtgcacgtggcgaattgcttgtgtgagtaattctaatacgtgatctttccagcacacagttgncnctcnncacgtgcagctgattaaactgncaattncgtncaaaaaggggcaa

SEQ ID NO: 3153 - DNA, 1410 bp, Listeria monocytogenes 4b
  misc_feature (1)..(end): n can be any nucleotide: a,g,c or t/u
gaggatacaaggagaacatcagaacgatggtagtggcccgattcccgctacaaggcaaggcgaaagcagtaccatgggtgcaccccagccctcaccctagccccacatttcatgggctccatcccgccaggcaaaaggcagagcacgccttccatcccgaataaccattctacaatcaggtaggcgcttaaaataaacccacccatggttttggattggtaaaataggctttgcatcatattgggtgtggcatggcgaagtagtatcgctctatcggttaagcctttcccgcgagccagttggatgtagtcagcttgccattcattttccataaggagcatcatcattttgtaaaagagcacggttggtatgatggataagcagacgattggtgctgcataaatttgctcgccgtttaagctgtaaaaattcaaggtgaacacgcctgtttgctgatatatgtagacgacggccatttgaataaggaaaataaaggaaaaatctggaaaagcttgaagtattgataagaatccgcttaagccttggcgcaaccattttggcccgcgaaatgttgcaatcactagtaaataagcaataatcgctgaaattagcaagctcgctacgataattttcatggagtagaaatatggtccggtaataaaatctgccaacgagacatgaaaaacttctgcgcttccttggtaactaatttcccatttggttgggtggaaaatcgctgtgaaaattgacttaagagcctcccagtacgtgcttgatgaccatgaagtcactttgctaaatatcgcgggaacacaactgattaaaataattcctaaaattcctaataaataatgtagaaaaattttgacaattcttttcatatgtatgttttctccctttttctagctttctcttatgtataaatctaggacacacctccaatgagatatgtccaagattctacttattttaagtctaaatgaccgatttcattgatttttttaagagaaaattcgccgttttggtattctacgatgctaatacttgtgttcaagattcttggcgcttctttgcggtgatcttcaaccgttccgccttgcagcaagtataataataacgtgagcgacatgccgtgagaaacgacgagaatgttgccgcttagattttctgcaatgattttttcgacgccttctaacagtcgttctgcaagttcataataagtctcgccgccgttcacttctgctttgtaggtttctgggctatggagaatttttgcgcgttcttcagggtgttgttcgtcaatttcagttactctaatgccttcccacgttccaaatcccatttcttttagttcttccagaggttgaatttcgatttcgcggtcgccaagaatgtaagccgcggtatctt

SEQ ID NO: 3154 - DNA, 1735 bp, Listeria monocytogenes 4b
  misc_feature (1)..(end): n can be any nucleotide: a,g,c or t/u
taggaagtcagatgccacgtcgcaaatagtaacgagcagagcaaggaagcttgccagaatttccagttccattttttccaagcggcatagagtaagctaatggatagtagttcttcgccaagaagcatgaacgggatacttgtgaaaacgtaagaccatgtaagtacactgttgataccattttcagtagtactgcccgcgaagtaagcccaagcaatgttgaaaatagagctgataataattaatgctggagcaccgatgaggatccatttgaaactaaaatgtttaaaccaatcgaggaattctgcttttagtatgataaaagcaattacccccatgcatagggcgttaaaaaaagcacctataaattctaacactccaatattggaaatgatgtgtggcaaaagaagaaaaagaacaccaataatgattgcgctggaaaataaccaatacccttgttttttaaagcttaaagtattttccattttatcctccttttagaccttttttcgatagatttcattagtccatgagttattatagctctttactttaaatcagtaaagttactaatttgtcactttaaaggaggagggagaattggctttcttctatagtatgttgaaagaatatgaaatagttagaaaatcttgttaccgttaacgagcgagaaaaggttgcaaacgctttaatggaaatgctaatttgaaatagaacgataggtgatataggaggagaaaaaatggaaaaagcagggatttatcatcaaccagcgagtagctatgcttatagttatgacgctaaaacactacatattcggattagaacgaaacgcttggatattagcgaggttactctaattgctgccgacccttacttatggaaagatggaaaatggcaaagtgaatcttatacaatgcgcaaaatcgcagaaacagaagagcacgattattggttttttgcaattacaccagaacatagacgtcttcaatatggctttttactaacagatacagaaggagaaacaacattttacggcggacgtggtttctttgagccaactgaggctaatttagctacgatggattattactttaaatttccatttatccatgcggtggatacttttgaggcgcctgaatgggttgggaatactatttggtaccagattttcccagaacgttttgcaaatgggaatccggctatttctccggaaaatgccttgccgtggggaagtaaagatccgaacacaacagactttttcggcggggatatagaaggaattatcgagcatttagattatttagcagagcttggtattaatggggtttatttgacacctgtgtttgaagcaccaaccaatcataaatacgatacggttgattataaaaaaattgatccacattttggagataaagaaacgtttagaaaattagttcaggaagcgcataaacgtgggattcgcattatgttagatgcggtgttcaatcacattggcgatacttcagcagagtggcaagatgttgtcttaaatgaagaaaaatctgcatatcgtnattggttccacatccatagtttccctnttcgtccccatncccatcccctattnnanaaannccnncnctttcttncnatctttcgggcgncnggtncnncttctcaggcntgaggaccagtaaactgtagtagnngtnccaaaaggncaagagtttncttcccttccttnnngcgcccc

SEQ ID NO: 3155 - DNA, 1249 bp, Listeria monocytogenes 4b
  misc_feature (1)..(end): n can be any nucleotide: a,g,c or t/u
acgattgctgcaatagaacgagaagtttatttgaatttaatggaccaaatgtgggttatgcatctggacgcaatggtacaattacgcgaaggtatccacttgcgagcatatggacaacaagatccattagttatgtaccaaaaagaaggggctcaattatttgagaaattccaagcagactatcatttctactttgctcacgccttacttgaacttgatccagacggcttaatccaaggctaaaatacaacttgcgtctgattttttccaaatttatgggtaatttaatgagaacgagggtattaatctatataatagtaccaaacgaaaataaatttagacaaaagagggtggtaaagtgaaggggtcattcacaaagtttaaacaattttttatagaaaacaaatttgtgttagggttactaatttttcttttagtagcacttgatatttatgtattaactaagattgcctttatttttgatccgttaatggtaattcttaaaaccgttgctgcaccaatcattttagctgggatatcttactatttatttaatcctatcattgattggttagagaaacataagtggaagcgaggttgggcgattgcattactatacttagtgattatcggtttactcattctactatttagttttgtcattccagctgtgaaagatcagattgttagcttgttcaaatcattcccggggtattgggaccaaatcacacataaatttgatgagtctatgcgttcgagcttatccgatcaaatgaaagatgaatcatacgcgaacatgatcgatgtcatgaatactctttctacataaggaacatgctgcattaatagttgctattttaagcgtcgtctgcttcgttttgtacggcctctcacgtttgccctattattgttacccccgcccttgttctatccttcttgttccatatcgctcctaatctctcttcttttctattttttttcttcttttttttgcctcttctctttcctctcttcttcctgttttccctatttctctttttccctccctcctttcctgcttcccccccctttatcctcttttttcttttttacccctttcctctccgttgtcttcctttctttttcattctttccctttttctctctcctcttccccttctttctttcccttttctcctttcgttccccccgacctaccgtccccccttatttccttcgcctcgtcctcccccgtcctctcttttttttt

SEQ ID NO: 3156 - DNA, 1572 bp, Listeria monocytogenes 4b
  misc_feature (1)..(end): n can be any nucleotide: a,g,c or t/u
atgattcgtattggtgaaaaaattcttcaacgagttggcgcgcgtaaaccaatgattttaggctctggtattacggctgttggtattgctttaatggcgctcacttttattccaggaaccctttatacggtgcttgtgtttatcggttttgctttattcgggattggacttggtatgtatgcaactccttccacagatacagctatctctaatgctccagaagataaagtcggagtagcatcaggtatttacaaaatggcaagttcgttaggtggctcattcggtgtggcaatttctgctacgatttatggtgtgattgcactttctggaaatattgatttagccgcaatggtggggcttttaactaacgtcggtttttgtgtcgtgtcacttatttccgttgctataacaacaccgtctgcgaaaaaagcgctcgaattaaaagccgcaaaagaataggaggttggatttatcatgcgtaccaagttaatgaatatgcttcaggaacgaaaagatgaaatcactcagattagacgtcatttgcacgaacatcctgaattatcgttccatgaagcagaaaccgcaaagttcatccaagatttttacaaaggaaaagacgtagaagtggcaaccgaagtgggaaatggtcatgcggttgttgtaacgattaaaggcgggaaaccggggaaaacgattgcgttacgtgccgattttgatgctcttcccattgaagaacaaacggaattaccatttaaatctaaaaaacctggcgtaatgcatgcatgtggtcatgacggacatactgcttatttactcgttttggcagattgtttaatccaactaaaagaaaacatccctggaacgataaaaattgttcatcaacatgccgaagaaacaccacccggcggagcgaaaagtgttgtcgaatctggtattttagatgatgtggatcaaatttttggtattcacgtatttccatttggtgaaagcggccaagtttattatcatagtggcttcgcgatggctggtcgcacatattttaaacttaaaattcaaggtgttggcgggcatggttcgtctccacatatggcgaatgatgcgattgtcgcgggtgcttattttgtgacggccattcaaacagtagtgagccgccgtttgaacccatttgatacgggcgttataacgattggttctttcgatggtaaaggcagttttaacgttattaaacatgcagtggacctataacgcgatgtgcgttatatgaatactgaaaactgcgataaaatggatgcagaaattcaccgtattgctactggtctggaagcgatgtttggcgtcaccgtggtacttcccttcccgaactactacccaccactcctcatctatctttccattacacctgtccgtctctctttcttccctttttcccgttctcttccctttttttcttttccccccctgttttcgcgcctttttcctcctccttcttcttccccctccccttcttcgcctctttttctttccccttcccccctcctattcgtgtttttctctcaaaaaaaaagaaaaaga

SEQ ID NO: 3157 - DNA, 974 bp, Listeria monocytogenes 4b
  misc_feature (1)..(end): n can be any nucleotide: a,g,c or t/u
taaccaattgtggcccagtcgctattcctcatgagaaaaacaacccataaatagccatattccggccacgtttacttggatcactcatcgccccaatccaagtctgcgaagaaaaatgtaacatatgatcccccacaccaataagcaaccttaatattatccaaaaatattatttaaaccagatttgaaaagccaaaatcgaaaccgcaacttttcctcccccaactaaaataatcggcttataaccatatttatgaagtggggcctcaataaatggagaaataagtaaaactcctaaatagattcccgtagcatgaaacccattaattcctgcacttatacctttctcttctaatattatcgcaataagaggtaataaaaccccctgtgacaatcctgaaatggcaacaaccatcgtcaaaatccaaaactttcctttagcccccattagatacctccaacaaaattttactaaataaaaaaacaatgtcacaaactgacattgtttttaggatgacccgtacgggattcgaacccgtgttaccgccgtgaaagggcggtgtcttaaccgcttgaccaacgggccatatctggcggagaaggagggatttgaaccctcgcgccgcgcgagcgacctacacccttagcaggggcgcctcttcagccacttgagtacttccccagatataaaaaacttattcttattgaaagaataactccacaggcactttccagcacactggcggacgctctagcatgcatcttcacggggcatccattctatctatagagcgtcctttaccaattaactagccagcggtttagatcgaaatgactcgcaaagccctccttgtgccctactaacggccttgcagcgcactcacacttttaaccctgggggaactgcgaataagccccaatccatccctctanncacgggggnccnnnctttatgaggacggacccacccttaa

SEQ ID NO: 3158 - DNA, 1489 bp, Listeria monocytogenes 4b
  misc_feature (1)..(end): n can be any nucleotide: a,g,c or t/u
caagcgtgcagcaatacttatttggttcgattgtaacaatcagtaaggcgcaagtgcagctgttggtaatnttaggagtagctatcgtagtattgttcttagtgtttaaaaggtttatgtttgtacttacttttagtgaagatgttgcagttgcagaaggagtccctgtgcgtttgatttcgcttttattcagtgtggttactgggattgcgattgctgttattatgccaatagccggagcgttactcgtttcagcacttattatattaccagctgcaatcggtatgcgaatttcaaaagggttcctgatgtgtgttattagtgcaattctgattggcttagtcggaatgttttccggccttgtgtcttcctaccaactaggaaccccacctggcgcaacaattaccttaatgtttatcattcttttcattatttcgaccgttgttttaaaaatggcacggaaatgatttttagaacgatgtttgaccattttgtatcattgcataaagctcttggtcatgaataatccaacttttttctttcttttcaatctgattggttgttttgagatgctgcaaatctttgtaaaaacagcttttcgaaagattactataagaaagtagatggcttgttttaattgcttgaggcagtattactgtgtcatcatcactcagaaccccgtgtaacaaagccatattcgaaaaggtcgttttaagtttttcagaagccggactacttgccattaagcttttaaagtaaatgtgagtagtctggtttttcattatgaaaaattggaatccgaaattttcgggaaacattgaaagaaaatactccatatctgctttcgaatacttatataatgaacatccagagagagtcttaaaattgaaatgattattacttcggtcgagtaatgtaaaatagttcaaaaatgttcctttaccttgaatagaatagattttgggattttggctaccatcatttaaaatcaaagcaatatatccatcaactacaagataaatatggttatctatatcgattttttctgttaataggctggcgttttttggtacatcaatttgttcaaaagctatttttccttcatgggataaacgaataaattcttgataattatataaattttttggcatgacgttttctccaatcttcttttgtaaacataattgtatcagaatgcaaaagaacagttatacgcagtctaatagtatttcacgtgtaaatgtttctaaaatgtgaaatatttaaatcattaaaagtctttttttagtgaaaagtgctgtatagtcgctcttgtgcgcgagtttagaatgtcttatcataaaagtccaaaattagtattttttattgaattgttacgaacgtaggttctgtgttataattcaactggattgtaaaggaggactattgatgaggagagtgcgtatttcagttatgcgtttantggagtttgtgctgagaagaagccgta

SEQ ID NO: 3159 - DNA, 961 bp, Listeria monocytogenes 4b
  misc_feature (1)..(end): n can be any nucleotide: a,g,c or t/u
ccttttgggccacctagcatgcatgcttgagcggccgccactgtgctggaaaggcaaacgtaggaaatattattggttgtcacaacttttatccaagaaaatacaccggtctttccagagaacatttcttacgtacgagtaaacaattcaaagacttaaacctacgtacagctgctttcgtttcttctaacagcggcgaatttggcccttggtttgttgtagacggcggacttccaacaatggaagaacatcgcggagtggacattactgtgcaagcaaaagacctttggaacactggcctgattgatgacgtcatcgttgggaacatgttcgcttcagaagacgaattacgcgctttaagcgaattaaaccgtaatgaattacaattagcagtagagtttttagacggtgcaacagacgtggaaaaagaaatcgttttaacacaaaaacatttcaatcgtggcgatgcttccgagtatgtgttacgttcaacaatgacgcgtgttaatttcaaacaattcgatttccctgcacatgatacaaataccatttcaaaaggcgatgtgactatcgataacgacggctacgaacgctacaaaggcgaaatgcaagtagcacttcaagaaatggaaaactccggcaacacaaatatcgttgctcgaattgttccagaagaacgttatctactagacaccattctaccgtggcaacattttagattggttgagaagaagaaataataatttttaaaagcagaaattttcttttatactagagaatttctgctttttttactatcttctttttgtaaacaatacctattccggcatctttaaaagcgtattttaaaactattttttgtaatattttaaaataaatagacgtataaagaaatatatattacacttaactaaatggaaaggttgttccatttacaaataaatgtgaataataatacata

SEQ ID NO: 3160 - DNA, 1056 bp, Listeria monocytogenes 4b; identical to SEQ ID NO: 1659
  misc_feature (1)..(end): n can be any nucleotide: a,g,c or t/u

SEQ ID NO: 3161 - DNA, 1520 bp, Listeria monocytogenes 4b
  misc_feature (1)..(end): n can be any nucleotide: a,g,c or t/u
agaaagaatcgcggaggatttgcgttaatgcccttcaagcccacgcatattatgaaggaaaatatccgcttatttccgctntaagtcgtccgttaattgcgaaaaaattagtagaagtagctcgtcaagaaggtgcctctgctatcgctcatggctgtactggtaaaggaaatgaccaagttcggtttgaagtagcgattcatgcacttgctcctgatttaaaagttgtttcccctgtccgtgattggaaatggtctagagaagaagaaatcaattacgccaaagaacataacatccctgttccaattgatttagataatcccttctcgattgaccaaaacctttggggtagaagtaacgaatgtggggtgcttgaaaacccatggacaacacctccagaagcagcttacgacttaacagtgagtttagaagacgcaccagatacaccagatattgttgaaattacgtttgatgccggtattccaatttctctaaacggagaaaatatgagcctagcaaatttgatccttactttaaatgaaattgctggaaaacatggtgtcggtagaatcgatcatatcgaaaatcgtttagttggcattaaatcacgtgaagtatatgaatgtccggccgcagtcactttgattactgcacataaagaattagaagatttaacttttgttcgtgaagtggcacatttcaaacctattatcgaacaaaaaatcagcgaaacaatttacaatggcctatggttctcacctttgacagaagcattagttgctttcttaaaatccacgcaaaaattcgtgaacggaacgattcgtgtaaaactgtttaaaggccatgccattgtggaaggaagaaaatcaccaaattcgctttatgatgaaaacctagcgacttacacgtcttccgatacatttgaccaagatgcagcagttggtttcatcaagctttggggattaccaacgaaagtaagcgcagaagttaattcaaaagtgacaataacaactgaggtgtaaaaaatggaaaaactatggggcggacgttttcaagggaaaagtgaagcatggattgacgattttggtgcttcgatttcttttgatcaaaaaatggcaaaagaagacttggcgggaagtttagcgcatgtcgctatgctcagcaaatgcggaattattcctgcttcagaagcagctgaaattacggccggattaaaaatcctccaagaaaaattagcgcttggtgagctcgaattcagcacagttaacgaagatattcatttaaatatcgaaaaactattgcacgaggaaatcggcccagtcgctggaaaacttcatacggcgcgcagtcggaatgatcaagttgcaacagacatgcatttgtatttaaaacaagccgtagcagaaattattcagtcattaaaacatttacgcgtggtgctagtccaaaaagcggaggcgaacgtcgaaacgattatgcctggctatacacacttgcaacacgcccaacccatctctttt

SEQ ID NO: 3162 - DNA, 1053 bp, Listeria monocytogenes 4b
  misc_feature (1)..(end): n can be any nucleotide: a,g,c or t/u
acggccgcccttgtgctggaaagggagaactttctctaagggagtgctaggcgtcaatcccctgttggtccataaatgctaaacgtttttctgtatcttgcatttccgctgctgaaggaagttccttttgcatatattgaaacatttccggactaacctgtccacttactaaatttccattgactttgttgatttcattcgtggggacttcggattcaaaatgttcttctattgttattattttcatgttcattcctccttaagtaaacaatacccctttttaagttgctaaaatagccacatttcgatacactaataacaattatgtatcataaaaaggagagttttatgaataactacgtaaaagtgcatcaaccgttgaatgttgatttacgtacacaaaaaacacaaaccaaactatatacggttttggagaggttttatgtggaaggtagaacatttgaatcaatatctataaaagatttatgcgaacaagcgcgagtatcacgagccactttttatcgtcatcatgaggagattattcaagtgattgaagtccagattttgcgaaccatgcagtacttctctttggaattcgaccaaattattttaacaaaagaaaatatccaacgcttaatcctccgaactattcaaaaaaatccgcttttatttcaagcgattttttggagccgggcagaaaatatttttgtcgatgtagtgtctggagaaatacttcgaattagtttgttaaaagaagtttccttttcagatagtcactttattcctaattattttgctaggatgattttaagtttagcgacagaaattcagcaatcgaataaagactatacgaatggtcaattagttgaattgatacaggaggcagctcgctttttacaaaaataaaaagagcctaagttcccttagactctctcatttaatcaatcattttacggaaattcaaccgtttatttaatagatacattagcggaatcccgacacccattacgatgaattcacttgcggctgttgatgcccaagtaattaggaacg

SEQ ID NO: 3163 - DNA, 1037 bp, Listeria monocytogenes 4b
  misc_feature (1)..(end): n can be any nucleotide: a,g,c or t/u
atttgttatttgagtaatgttatttttttcataaatcattgcaactaaaaatccagaaataactaaaatccctatcagtaagagaataatggtactccaaattttcccaacaatactattccaaatcttcatctattctcacctcggtcctcgcaaaaaaataacgaacaaagcacgtgcggcataacacttgccgattaaacgtctttgcccgttatcttagtctggtttattaatcttctggaacttcaaatttatatccaagaccccaaactgttacaatcattctagcagcgtcttctgatacatcatgcaatttttcgcgaagtcttttaacgtgtgtatcaattgttcgcaaatcgccaaagaattcataacgccatacttcttttaaaagagactcgcggtcgaatactttatccggagatctcgctaaataataaagcaagtcatattctttcggtgtcaaaccgatttcttttccgtcgacaataacacggtgagcttcgttatcaattttcaaatgtgggaaggtaataatgtctcccggtgttcctcctgctgattcttctgaggattgtttggcgcgacgaagaacagctttcacgcgaagcacaacttctcttgggctaaatggttttacgatgtaatcatctgcaccaacttcaaagccttgtactcggttagcttcctctccttttgcagtcaacatgacaacaggtgtggatttaaactctctcagttcacgacaaacttcgatgccatctttaccaggcatcattaaatcaagtaggattacttcataattattgttcagcgccatgcttaatgcttgatcaccatcactagcttcttcaatacgatagttttctctttcaagatacatcttaagaaggcgtcgtatccggtcctcatcatccacaacaagcactctaacttgttcactcataagtactcatcccctaactctcatttacataaaacgatcatttacattccatcagataaatggaatcttccgtacccacatacgaaaa

SEQ ID NO: 3164 - DNA, 1412 bp, Listeria monocytogenes 4b
  misc_feature (1)..(end): n can be any nucleotide: a,g,c or t/u
cgtgtattcttttacaacgttttgtaacgtaatcatctctatcaccttttctacattctgatatacaaaaaagcctttctgctgatgagcagaaaggcagcattttttcaaatggactaacttccttctcatctttcagaacaattagttgttctgcatgacttagcaccttaaacacataatgaattattgtttaggttgctgggtttcacagggcatttccctccaccactctggataagatttctacatattattaaatcacttcatttgtgactatagtgacgtttcttgttttttcatattaccttgtctagtagactttgtcaataactttctcacttatgttaatttatttgtaagttatttcactaataatactattatctgtctgttcattctgactagccatttgagaggctattttaatttgggccctattttgatatttgagttcgctattattaatttgaactatgtacataaataccgcaataaccgtaatacaagcaacaacaattaaaacaatatgttttttcattttcctctcctccgtgatttatattctacagaaagaacataaatcacgcggaaagaaacttttaagaattgttaaagattaaattagcggcaatttgacgataaaactggtttggcgttttttactttctgcagtaacaattccgccatgtttttcaacaatagatttagcaatcgcaaggcctaatccggttccagtcgtcgtccgatttttatctactttgtaaaagcgctcgaacaagtaaggtaaatcgacattaggaatttcttcaccataattcgttacgcgcacaacagccatattatcttctttcttagcactaacatcaatttgtttgttgccttctccgtatctaagggcattcgaaaataaattctcaaataagcgcatgatttggttgccatcaccgccaataattagtttgttagcatcaaaatgttcgacaatctgcatatttcgttctgcagctcgcccgtcgtactccgccactaattgccgtagcaactcaataatgtctaactcatctttctttaattggtaatccacgctatcgagccttgtataagaaaacaaatcatcaataagtttgtgcaaatgacgcgctttcccgtacacaagctcggtgtaataacgcagctcaatttcatcgcgataacggtcttcatgtatataacttaaatagcctaaaatggatgtaagtggtgttcgcaaatcatgcgaaacattcgtaatcaaatcatttctagcttgctgggcctgttcttcctgctgcattaattttttctgccgttcccgcatattttcgatgttacgttccagttcttgaatttccggcacaaaactttctgtgtcaactggcttcccgtcgtta

SEQ ID NO: 3165 - DNA, 1091 bp, Listeria monocytogenes 4b
  misc_feature (1)..(end): n can be any nucleotide: a,g,c or t/u
tatacatggaatcatcaagcagggtagttatttatttaacgcgacatggaaagacgattttaaacacacttgatcgggtacaaggctgggctgactcgccgttaaccgaagaaggagcacttgttgcgcatgatttaggtcgtggtttaaaagggactgattttgtagccgcttacgcatgtgaccgaggacgtgccatcgaaactgcacgaattgtcatgaaagaaagcgataaccatcatttaaaactagaaaaattagctgaaatgcgtgaatttggctttggcaaatttgaaggggaatataatcaagctgttttaaaaatggtagcaaaggcgcatggttttgaatctattgaaagctattatgataaaacttctgaaaataattccaatattgtcattgatacggtgcacaaaatggacgagactggaatgacggaaaactcggttatttttgaagaaagactaactgcgggactcgatactattcttgccgatgctaataagcgtggtggtggagatgtgttagtagtagcgcacggtatggttattcatcgcattattgaaatgattgatcctagtaaaaatttacgaattatcgaaaatgccagtgtgacaaaagttatttttgaagatggagcatattcgattgaagaacctggaaacatgttttatgtagaagctggaaaaaaggcgcaagggggagtttaagtggcaacaggaaaactgaatgtgtacttagttaggcatggcaaaacgatgttcaatacatctcgtcgtgtgcaaggctggtcagatacaccattaacaaatgaaggaatcgaagtggcagaatttttaggtcgtggccttcgtgaaactccctttgatgctatttatacgagtgatcgtggtcgaacaattgaaacggcaggcatcattttacgtgaaagcaagcagacgcatttggaaatcaatgaactacgtgatttccgtgagtttggttttggtaaatttgaggtgagttgaagatttatgttggaaaagtgtggagctcttggttcagcatgagagcttaaattgcatatgttaatattgacgtaaatgggc

SEQ ID NO: 3166 - DNA, 1077 bp, Listeria monocytogenes 4b
  misc_feature (1)..(end): n can be any nucleotide: a,g,c or t/u
agatacaattctcgtattgaataaaaagattggagtgattaattatgacagtatttagtgaaaagttagaaaagtatgcagaattgattgtaaaagttggggtaaatgtccaacctgaacagaaagtggtaattatggctccagttgacgcggctccacttgttcgccttatttccaaatatgcttttgaagttggtgcagaggatgtcattatggattggcgcgatgaagaattaggcgcattacgttacaaaaatgctccactacgcgtttttgaaagtgctccggttcaccgtgttgcagaaaaaacagaacttgccaaagaaggcgcttgttttatctccatcacttccgaagatccggatttactaaacggcgtggatagcaacaaaattgcgacattccagaaaacaatgggtggtgcaatgagcgagtttcgcgagttaatgcaagcaaatgttgtaagttggacagttgttgcagcagcttcacaagggtgggcagcaaaagtattcccagatttaactccagcagaacaaatggaaacactttgggaagctatttttgaaacaactcgtatcaatacagaaaacccggtagaaacttggaaaaatcacgatcaaacacttgctgcaaaagcagaaagtttaaatgaaaaacaatttacttctttacattatacggctcctggaacagaccttacaattggtcttccaaaaaaccatctttgggttggcgctggcagtaagaataaaaaaggacatgaatttatggccaatatgccaacagaagaagtattctgttgtgcggataaactaaaagtggaaggttatgtttctagtacgaaaccacttagttatgcaggaaatattatcgatgacttcaaaatcactttcgaaaaaggtcgtattgtaggtgtagaagcagcatccggcgaagaaattttgaaagatttaatcgcgactgatgaaggctcccactatttaggtgaagtggcgctagttccagacccttcccctatttcccaatccggcattttattctacaatacactatttgatgagaatgcttctaacc

SEQ ID NO: 3167 - DNA, 1604 bp, Listeria monocytogenes 4b
  misc_feature (1)..(end): n can be any nucleotide: a,g,c or t/u
acgatgattgggacgtatttatcacacccactttaaaagaagtcagagaaatatgtgaaacgggagtagaaattgttgcgatggatgcgacaacgagaaaaagaccacataacgaagacctcaaagacatactaaacgccattcgaaaagagtttccaaacacgcttttcatggcagacacaggtagtattgaagacgtttattacgctgattccctcggtttcgacttaattggcacgacactttacggctacaccgaagaaacagcgaataaaaatatcagcgacgacgatttctcccatttgaaagaagttttgaaaagcacgaagcgtccagtgattgcagaagggaaaatcgattcgcctagtaaagcacgacaagttcttacgttaggttgttatgccgttgttgttggcggcgcagtaactcggccacaggaaataaccacccgctttacaaatgaaattaaaaaaatctaagaagaaagaggtaagtgatatgacaaagcaaatcaaagttggcgtaattggcgttggacaaatggggcagtatcatgcagaaatttaccaaaagcttccgcaagtagagttagtagcaatttgtgagtacaacgatgaaagacgcgccgaaatggcagaaaaatttcagtgtaaagcatacaaagactaccacgaacttctagcaaatacggagattgaagctgtgagcattgttttacctgataatatgcaccgtgattgcgtggaagaagccgtaaaatacaaaaaacacattttactcgaaaaaccacttgcaaaagaactggaagacggcaaagcaatgtatgaactgaccaaagactacgacaaagtgtttacagttggctttttactcagatttgatcctcgttttaatatgattaaacagcgcctcgataacggcgaattgggtgatattattcatctttattgtcgtcgtaacagcccaattaccgggccaaagcgttacataggtgcttctgatttaagtatgcacgtaatgattcacgatattgattatattaactggtacatggatagcgagccagtcaaagttattgccaaaagtcgcagtgttttacttaaagaatacggcatgaatgatgtgatttatgccattgttacgtacgaaaatggcgcaattgcttgcctggaagcttgctgggtcttgccagaaaattcaccaaccatcattgacgacaaacttgaattagtcggaacaaaaggcgtagcatatgtagactcttgcgaccacggtgttcgttttgttagtgaaaaaggggtatcttatccggattcaagacactggtattacacaaatggcgaagtttccggcgatttagctgaggaagtaatggcatttattaataacgtggcgaataacacaaaatcaattattacaccaaaagaagcgtatgattccttacgagtagtagatgcgattgaacgttcgatttctgaggggaaagaagtatcactataaaatagcgccacacatatgattggagggggaaatatgtctattcgggtacatgtacaaaangttgggagtaagctaagtggtatggtcattccgaatttgggagc

SEQ ID NO: 3168 - DNA, 869 bp, Listeria monocytogenes 4b
  misc_feature (1)..(end): n can be any nucleotide: a,g,c or t/u
tccacttatgttaactctggaaatgcttcttggatgcgtgtttgcaagccaagattagaaacaaaaaggaaaattttgatgcacggtgtttaagccagtatattttgcacgtagcaaaaaactgctagcgtcttaaacctcggatacggaaggttccattgttttcgcaaccataattaacaagtgtgcttataaattttttaattaatttgaggggtgaatagtttgtcaggacattcaggacatgatgtaaaatatggacggcatcgtacgcgtagaagttttgcgcgaatcagtgaagtacttgaattaccaaacttaattgagattcaaacagcttcttaccaatggttcttagatgaagggctacgtgagatgttccgcgatatttcgccaattgaggattttgcgggtaatttatctttagaattcattgattacgatcttggagaaccgaaatactcggtagaagaatctaagaaccgtgatgcaaactatgcggctccactacgcgtgaagttgcgcctaatcaacaaagaaaccggcgaagtgaaagaccaagaagtatttatgggtgatttcccgctaatgactgaaatgggtacgttcattattaatggggcagaacgtgttatcgtttcccaattagttcgttctccaggtgtttacttcaatggaaaactagacaaaaatggtaaaaaaggctttggttctactgtcatccctaaccgtggggcttggcttgagtacgaaacagatgctaaagacgttgtacacgttcgtattgaccgtacacgtaaattaccagtaactgttttacttcgtgcactaggctttggttccgatcaagaaattattgatttaatcgg

SEQ ID NO: 3169 - DNA, 1018 bp, Listeria monocytogenes 4b
  misc_feature (1)..(end): n can be any nucleotide: a,g,c or t/u
tgtatatgcttcatcgacaattccacttagtacctcactcggtgctagctcattgttgttttcatccaagtgtttaacagtgatatttgctgttattgggttgttttgtaattgatacacataggtaaccgtttgaggattttcgttaaaaatcccgctagcgttaatagggctcttaattaaggtatagccatctattgttttagccactgttgtgtatgtttcaccaatttcaccagttaatacttccgtttcactaattttagctcctaattcgtcctggtagttcaccgtaacttcttttgctaaaattggatctgctttaatcgcgcgatacacataggtcactgtttgtgcattttcgctaaactttccttctgcattgctcggagtttcaattaattcgtatcctgtaaaagtcttcgctgttgtaacataattttcatcaacattacctgataatgtttcggttggtgctagttctattccatcttcatcggtatattgtaccgtgatgtctttagctggaacgggatttttcgaatagatatatgtcacagtctgttcttctaaactaaattctccttgtgcatttgttggaatttcagttagtgtataacctaaaatttctttttcacttgaactatattcttcaccgacatttccagttaatatgctattttctgcaagtttatttcctgatttgtcttcatatttcacagttatatttgcaccttgtacagcatcaatataaacagtcacttcttttggattagctttaattccatccatattctctacgtttaatattactgtgtattttcctactttcttgagattcaccattatttcaaaatcgcttttaatggataaatcatccgttgtttgcgcttgaatatcctttaaaaactctgcttctgttttttttgtcccttgcggataatgaatttcggaatctgcattaattactggtgtagttctttccagcacacnatgncggcccggctcgaggcaagca

SEQ ID NO: 3170 - DNA, 1682 bp, Listeria monocytogenes 4b; identical to SEQ ID NO: 1668
  misc_feature (1)..(end): n can be any nucleotide: a,g,c or t/u

SEQ ID NO: 3171 - DNA, 1190 bp, Listeria monocytogenes 4b
  misc_feature (1)..(end): n can be any nucleotide: a,g,c or t/u
aagatgagggggcgggggatggagaagggaggggggggggggggtatattaagaggtgcgtagaagtgggtaatatggtggggggggcgaaggtgtgctggaggtactgaagataggggtaaataggtgggggagtgcgcagggggggatcgaggatgtagagaatgggaggcagaggggagcgggcgggggagggaggaggggggtaagagattggtggggagggggtgggggaggtgaatcgggagatggcaaaagatggggtgaatgcggggtgtgggggaaaggtcgtgggggcgggggagaggaacttcgatcaagggcgggaagcggatgttcattgcgaggaaagctgcccgtagaataatccccgcggtggctgcatctctacctttcattcgacgagttagcccaataatgatcattagtggtgaaacagaaacggcagctccaaggttcaaaataacctgtatagctgattgtaatgactccattttttcacgctccctgttttatctggtttattttaaggcgttaagtaatttttctgtttcttcgtccatgcccatgcctgttaagaaggcaataccattcaatgttggaatatcgaattctttgttcgcttttgtaatagctacatatacatcacttgttttaatatgttgctctaaagacttaatatctactgcttctacagttgcacgaacccctttttcttttaaaattcgttctacttttgatgctactgtttggcttgttgctacacctgatccacatgctacgataacttttttcattgtaatcactctccaaattgtttttttaggaaatcacataaagtattgctatcatttattgtttttatttgttccacaaagtctgcttccataaatttctccatgatacttgaaagcagtggaacttgatcttggggatttttgattcctaacatgaaaattacttcgacatcaatccacttatctgtcgttcccatttgaataaaaggaatcggcgtagaaagtttatttacgagtacaaaaggacgttttacataaatcgtgtctgtatgaggaattgcaattttgatgccattcatctcgagaccagtaggaaaaacaacttctcggcttgttaccgcttctctaaaagtcggctctacatactgctctctctctaatatcttgctcgtg

SEQ ID NO: 3172 - DNA, 1206 bp, Listeria monocytogenes 4b
  misc_feature (1)..(end): n can be any nucleotide: a,g,c or t/u
ttttgtcacgcgctcaatttctgaaccatgtcgccgaacttcaggtggaagaagcggaatcttataatgctcggctaatgcttgtcttgattcatagtgagtgacgaacacttccatcttcttgctcgactccatactcacttattttttcattggattgtttagctaattggcgcattttgatgttgtgatctttagaacccgtaaaatgatgtagtgtcgttgcaaaagctttcttttctactaaacggaaatccacggaaatggtaatattatcttctaatactgctgatacttttgtttcaccagctccaataacgtccgtaattaatggaaatgccagtaatgctttttgaacttcttctggtttttccgtcgcaataacataatctaaatctttcaccgtttcccgcaatctgcgtagacttccagctttagcaaaagtttcgattggagcaatatccgcaagataagcttctactttttgaatgattggtaaaacatcatttagcggatatctatcagggcgctcacccatttcgcgcactgcttcggccattttttcagcagactttttaccaaaacctttcaatgcttcgatatggccattttctgcttcttggagtaatgtatctttatccaccacaccaagctcatgataaagacgcgataatttcttgcctcctagccctggcacatctaaaagtggaacgagaccagctggtacttcttttttaagcgcctcaagttctggacattctccgctatctaaataacgttggataatttcgcccgttgtttttccgatgccactaatcttcgtaaaatcatcaatttcagataaacttctactatctaattcaattgcttgtgcagctttgcggaaagcagatattttaaagctattttctccttttaattccatataagtggcaatttctccgagtaaacgaataatttcttttttattagtagcaatctttattcctccctgtaaaatcattaaaaaataccagagaaatcctatccaaaattggctaagagtatacatctggtatcgaatgtttcttttattttggcagaatgtctgtcatccagtcataaaattgttcggataaaattggcgtgttttcaagcatccactgggcaaccgttctttccagcgcactgtcggccgctcgagcagaagacaagttncccacagtt

SEQ ID NO: 3173 - DNA, 1284 bp, Listeria monocytogenes 4b
  misc_feature (1)..(end): n can be any nucleotide: a,g,c or t/u
tctatctaggccccttacgcatttttcatgacaattgattcaagcgtattcgcaacgctttgacaactatcagcaatgtcttctaatttttcataaacttctcttagacgaattagtttaattggatctttttcgttttggaaaagttggattagtgattcgcggtaaacatcatcacattgagattcgtaatctttaatttggatcgcaagtttacgaacgtcttttagttttttatcaaaaacaaggtcaactgctttttcaatttcaacagtgcttgcttgaatagcttggataaatttagtcatgtattcatcataatgagtgatttggcagatttctagtgagaaagctgtttcatcaagtgcatccattacgtcgtctaagcggttagtaagttctaacatgtcctcacgttcgattggtgtaatgaaagcgtcgtttaattccataatcattttgtgaaccatggagtctccagctgtttcatattctttgattttattcgagaaagtatgtaaatcctccaccgaattaatgttgtaagttgcaaagaaatttgcaccttcatgtaaatttactgcaatgtcatgcaacaacgaagcaaaacggtcttttttatttttaaaagccattttcttaattcccccgatcatttttggtcattaataatcagctcacttttactttgaaaagggagcttttttcttaacgataagttaacgaaaacaaataaaaaacttgatagatctttaccacaaattaatactaacataggatgggaataaataggaaacttttttttgacggctctgcaaataaacgttctgacagcgtttccaatggctgtttttaggtatttcattaaatgaataaaaaaagtagaatttttgtggctttttattaggagagtaaggcgcatttcggtatactggttttaaaatataaatttgcgaaaatagtgtataattcatttaagagaaaaagttcacaaaacagttttcgtgaggagggtttcgttctgacaaaaacattacaagacagaatgatactaccggggaatgagacaattgcttatattggacttggcgtctttgaagtgacataacaagaatttatgggtggtgctgtggaaaaggcaatcgaagcgggtttcgcgtcgcccatgcggggggcggggtaatgatgaacggatgggcggggcagccgatcgtggcggcgcggcccgcgcagcatgctgggtgggccgccgaaggcgcgtacggcacctggggtggcgggacg

SEQ ID NO: 3174 - DNA, 1179 bp, Listeria monocytogenes 4b
  misc_feature (1)..(end): n can be any nucleotide: a,g,c or t/u
gcgagaataccattgatgacaattggcaccgtccatggaacagcaaccccggttggagcaggaacaataccagctgccatgacgaaataattcaaagtagttacaatcaaaggcgcaataatccatggaattaaaatcgttgcatttaatacaatgtggcataccaaaaatttccggttcattaacgttaaaaattcctggcccaagtgctaatcgaccaatttctttactttgcttacttttcattaagaatgctagtgcaataacgactgctaaagtcattccagatccgcccataccaacagtaaagacttccataaatggtttcgtaataatatgcggcaatgggagtccagctttataggcatctaaattttcaagcattaacgtattccaaatcgggtccattaccgagttgacgatgatttgaccatgcagtccgaaaaaccataatacttggacaaaaaataaagcgattagtgttggaacaattcctgaaccaagccccactaaaggcttttgaataacagtataaacaacatcatgtaagtttgtatggaagaagaattgtaccataacattaattgctaaaaaaatacttaatgttaagatagcgggaataagtgctgcaaatgatttagcaacagcgggtggaactcctgcaggcattttgattgtccaatcccgttgaacaaaaaatcgatataattctgcagcaataaaaccagtaatcattccgataaacataccttttgccccaagtcgatctaacgaaagtgctccagtaataagctctccatcaggactattaaagaaaaatggcgttaaaatcaagaagctagcaagggcaactgcccctccataaattgcttcaactttataatatttagatagtgaatatccaattccaaaaacaacaaaaacagtcataatactcatagtggcgctttgggcattcccaagatacaactgtaaaactgccttcgtttcatcactccaaaacggtagattcattaaaaccaccgcaatcgaaccaaacattgttagcggaaatgccaacatgaaagcatctcttaaagtggttaagtacctattctctcctagttttgcagaaagaggcattaacttttcccctttccagcacagttcggccgctcagtcaggagcaagtgccacagt

SEQ ID NO: 3175 - DNA, 1039 bp, Listeria monocytogenes 4b
  misc_feature (1)..(end): n can be any nucleotide: a,g,c or t/u
tttttttttttcggagtgtcttcgcagggggggggggcccccaccagaaagggaaggagagagggggaggccgggggcagcgaggcagagagcgaagggggcgacgggaggggggaaggtggggagggggacgccgggcaccgaaagaccagagccagcttgttccgtgttctcgggttggccgtctttgcctgttgcaggattcccaatgcgcccaagaccgatacatagcgaacaggcggcgccaagcgcttgaactcgccaaacatttgccaaaaagggaattaagaataatgcgccaaaacggaggccaaaggcacccatcaatccgtagaataacgcttttttctgttgtttatctgggagatgtttgaccatcacagccataaccactgcattatctgctgctaaaatcccctcaagaccgattaggacaagtaacacccaaccgtactctaaaatcattgctgtatccactaattcttttcctcctttgttctattaaaatgtcaaagatctcctattttgaagaaacaaaaaagcgagacctgcccgtaaaggcaaaggtctcgctaacatttaaaattaaatgtgataaaaccgatgatatctctatcatgtaatgacgactttatcctgattaaaaagctaatcagcgctactcccctctgacatttgtcaaagaacgatatatgattacctagagaataataccataatatagaacttctcgtcaactaatttttctcacaaactttttaaacggctaagtctttcgtttttgcgctactagctattttgacattgtggcattgtgaataccgcccccccaatgatccattgtagaattcccccccctccccaacgcccacatctcacctctccgcccctcctcatggtcccctccactgcacaccggggacaccaaccatgccctgccccccccgccttcccctagtcctaattcttttcccccccccacccaacccgccgctcacccctccctcacccccccctgcccgccaatattttgcccccc

SEQ ID NO: 3176 - DNA, 855 bp, Listeria monocytogenes 4b
  misc_feature (1)..(end): n can be any nucleotide: a,g,c or t/u
tctttgtaatatatcatgatgcacacctgcttggttgaatttatgttgaatttaatgataacattgtgtttaaaaatgagcaagatgagtatagttttagaataaagtcagataaaattttagttgaataaatttctagtttaatttttgtgtattgtttagtcagtatactacaataaaaggggagaaagctaaaaaatgaatactttgtattatagggtgtctaaaaatacaaattttgaaacagcagcaagagagatttttgatttattaatagaaactcaacaacaatttgagaatcaaccgagatttttaaaggtagaaattgatggacatttaaatgagttaaatgagtttgataatgatatgcttaaacttcaacaagaatttggagaaatttttttactccaattctttaccacgattagtttcccattgcttacaaagaaaaatcctagaaagcttataaacgatataccgaatgacctaacaatttatgatttgaagtatggaaatccagcatataaacttcaaattgaaaactattataatactgaatttgttttagaaaaagatgtgtatgtattcttggaaaaagtttctaacctcctaaagaaatatggaaaaacagataactataaaatcaatattgagaatgaggagtatgataaacttggcttattgattcactggcaatcttatatgaaagaattgatagtagaactatttaattcttttgtaaacggtaatttaatttcgaatgctgcaatgactaggtcacttattgagggttatgtgtatttaagtattataaacaacgaacgaaatccattgttagttcaagattggtttcta

SEQ ID NO: 3177 - DNA, 1465 bp, Listeria monocytogenes 4b
  misc_feature (1)..(end): n can be any nucleotide: a,g,c or t/u
atactttcttcaattggtcctgttaattcaggatcatttaacactagaagatgcgcgtcaaaaatttgtgccttatcttcgcctaagtctttagcagctttctcacgaatcattgaaagttctgttctagaaacttctaacgcgctttcaaaacgctttacttcactctcaacatccgtaacttctgttttttcataggaaagatcaggttcaacgagcagataagctttcgcaatggcaatcccatcagatgctgcgatacctttcaactctttagccattattcagccaatccttctttcttaagaacttcagttagtccttcaattgcttctttttcatcgctaccttcagtgtagatagtaatgtcagcgcctttaccaataccaagagacataacgcccatgattgatttaaggtttacttttttgccagtgtattcaatttgaacgtcagagctgtatttacttgcagcctgcaccaatagagttgccgggcgtgcgtgaattcctgtttcatcgattactacaaaacttgcttgttccataatttacattctcctttgtaaagaaatttgttgtaaccttttaagccgaaaaaacttcagccaaaaagactatccctcaattaaaaagagtaccatgttttacctattgttacaactatttgattaaaaattttttagaatgtttttttgcagagcaccttatttcgctctttttaaatagaaaaaatagaacgtttttttaaatttatctctaaattgtttctgttttgaattaaatagcactttttaatggcttatagttgattttaataggtttttagtgcaaaatttaaggaaggttcaaaaatgcatacattctttttcagcaagatagacgcaacaccgaaaattgaaggagtgataacaatggcaaaagcacatgttggagacattattgaatttaaggatggccttacaggaatcgttgaaaaactcaatgagaattccgttatagtcgacttaacttatatggaaaattttaaagatttaggtattgaagaaaaaacagtggttaaccacaagaattaccaaattattcattctgtagaagaagatgatgaagttgaaaatgtagaagaaacagaagaataaaaaaacagaatagtttttaagcgcgcaaaaataaagcatttccgagtgataatgctctatatttttgcgttttttatatgtatataaacggggtaaaggagcgtttgaaattggaaagtaaaaagaaaattgccattataggagctggacctggtgggttggcggccggtatgctattaagtcaactaggttatcaagtaaacatctatgaaaaaaatgatcgaattggtggaagaacggcgttacacagaatgggtaaatactcatttgatgtcggaccttctgcactcaccatgacgcatgttntgacttctcttttatggatag

SEQ ID NO: 3178 - DNA, 814 bp, Listeria monocytogenes 4b
  misc_feature (1)..(end): n can be any nucleotide: a,g,c or t/u
gaaaaaaatagtccggtttgggttatgcgtatgaagaaaatcccttttttaagaggaattgttgcattaattgaatctagcgctatcggttccaaacacctcgcttttgcaacagaccgatatgacgaagatccaaataatccagtagaagaagaaaaaattgaaaagaaagaatcaaaagtcgcgatgtggcttggtgttgccgtcatcggtattttatctttcgtctttgcaaaatttgtcatgacgctcatccctgtatttttagcggaattattccgtcctatcgtaccaggtgatacggcgcaagtatttttagagagtcttttcaaattaattcttctattaacctatattttcgcggtttctcagacccctattattaaacgagtttttcaatatcacggttctgagcataaggtaataaattgttacgaagaaaaattacctttaacggttgaaaatgtacagaaacaatcgcgacttcattatcgttgtggtagtagttttattttatttacagttattgttggtatgtttatttatttgttagtaccaaccgatcctctttggcttcgtgtggtcgaccggattttacttattcctgttgtgcttggtgtagcttttgaagtacttcaattaactaataaatgccgtaatatcccagttcttaaatatttaggtgtcccgggtttatggctacaacttcttacaacaaaagaaccgtctgatgatcaagttgaggttgccattgcatcctttaatgagcttttacgagtagaaaaagaaggcgcaccagtaaatgtagcggaac

SEQ ID NO: 3179 - DNA, 874 bp, Listeria monocytogenes 4b
  misc_feature (1)..(end): n can be any nucleotide: a,g,c or t/u
agggataaattatcataatgcatgccttggatgtcttccatataaccaagtctttcgtaatactgatccgcagcgcaattcttttgctgcaaaatcccgtttcggtcaaaaatcaaaatggcatcatctagttgatcagtaattgaatccgttagtttactcatggcagacagcgtggtagaaacatctcgataagccgtttcttcattgtcaatttcaaaatgagctttaatttcggcgctaatatcattttctagaattagcacggcaataactcgctgtttattacgaatcggataaactttttggcgaattaatacgttttcttgtgtttttgcaagtagatcgttagagttcatacctgtttccaatgttctaagtacacctggctcattagaccttagggctgtttctccgactactttgtttttgtaaagtgatttggttgtttttggtggtgtatgatgaataacaagtgcttcactagttagcttattgtatacatcaataaatacatctacatcttgatacatggctgaaacacttaacgacttggctgtgtgaattaattcttcaatatcgtgctccgataaatctgtgtagcgtaagcacatttctcgaatcgttttagtcatcgctcatcacaatcgtttctgcgatttccatcatcggacagcgtttgtccatgctcaggttacgaatcatattgtaagcttcttcttctgtgatgttgttctcaatcataagcacaccttttgctttttcaatcacttttcgttcttctaattttttggtgagcttttctaattgctgctctaattttcttgtttctcgccctttggcaatactcatttcaacagttggaatcaaactt

SEQ ID NO: 3180 - DNA, 1934 bp, Listeria monocytogenes 4b
  misc_feature (1)..(end): n can be any nucleotide: a,g,c or t/u
tgggacacttgtaggagaaacgaaagaaattccagcatcagcgaagcaagcgattgctaaattgaaagaaaatggcgtttatgtggctattgcaactggtcgtggtccatttatgcttgatgaaatcagaaaagaattagatattaattcttatatttgctacaacggtcaatatgttatttttgaaggaaaagaaatatacgctaaaccattaccaacagaatctttagaacgattaatcacggttgcatcggagcatgagcatccaattgttttttcaggaaaagattccatgcgcgcgaatttaccggatcacgaccgggtgacaatcggaatggattctattaaaagagattatcctaaagtggatgctaattattataaaggtcgtgacatttatcagtgtttacttttctgtgatgagtcgtatgatgcttattaccgagaagaatttaagcagtatggtttcttgcgctggcatgatgtttccgtggatgtttgtccagctgacggttcgaaggcggaaggcattaaacaaatgatcaaaaaacttggcttctcgatggaagatacttacgcatttggcgatggtttgaacgatattgcaatgcttcaagctgttggaactggcgtggcaatgggcaacggccgtgatgaggtaaaagcggtcgctgactatgttacggatcatgtggatgaagatggggtttataaagctttagaacatttaaaattaatttaaaatatcaaaaaagcctgtgctcaaaaatagagcacaggcttttttggttattttttgaacggaacacagctagttctttcgattaagcttgtattcacttggatttgtctggtttcaaaattcgtatcagctttaatttgtttggacaaaagggcaagtgtttgttcagcaatatcacgttttttaacatgaacagtggttagttctggtgtaattactttactttcattaatattgtcaaaacctaatacggaaacttgttcagggactttgatagatagactttgtagcattttaatcatgctaatagccatgtaatcattttcgcaaaaaagagcagagggtaaatcttgcaattcagcaatggcttcttttaccgaaacttcctcttggatttgcattgctggtaaatgaaagacatgttgttcagggactgaaatatcggcttcttctaaacgagcaaaaaagccacttttccgctcatcaaaatttttaatgcgtggtacccccatcacataaccaatttttgtatgtgctagttgtaaaaagtagtcagctgctttatatccaccgagaaaattattaatagagacaaagttggctgagatatgtggatggtgtgtatctaagacaacgattttaggatattcctgttgtattcggttaatttcttcagcgtttaaattagtgccaagtaaaatcaggcctgctgttggttgctctttttctgcttcagcaagttcttctaatatggttgttgcatcgaaggtagagataaccaaatcatatgggtaactagcgatttcagcagataaatagctaagtagctcactgaaaaaaggtaagttctgatattgttcggtaatcaagttaggacttttgcatgcgataaaacgaatggttgatttctttttcatttttttattggtattacgtaacgggacgtaattattttcctcgacaatttgcagaatatgtaaacgggtttcttcacttacgccagctnttccattcagcgcaagggaaacggccgatttcgaaacgtttgctaatcgtgcaatatcttccagcttcattattcatttctccttgtttactaaatttatcttatttagtatatcatgtttagtaaatcaaaacaaaaatagcataccttcagtcttctaaacctctcgtttagttcttttatata

SEQ ID NO: 3181 - DNA, 1044 bp, Listeria monocytogenes 4b
  misc_feature (1)..(end): n can be any nucleotide: a,g,c or t/u
tcattattcttattttcggagagcatttcttcggtatttggggattaatcgttggtattccagttgtgatgttcttcttagatgtgctcggcgttacgaatcaagaagaaatcgaacagccaaaggacacaatcagtcatacgtaattcacacgggggttcttccagattttctggaaaatccctgtttttttgaagggggagaaaataatggaaaaacatctttttgtgatttcattagacgcacttggagcacttgatttaaaagatacgacagatttgcccgttttacgggaattaattaagacaggaactcacatccaagaagttgaaaccatttatccatcactgacatatccagcgcacacaagtattatcacggggcattatcccgcaactcatgggattattaataacacaaaagttcaacctgaaaaagattctcctgattggtattggtataaaaaagccattcaagtaccaacactttatgatttagccaaagagaaagggatgacgaccgctgcttttttatggccggttgcagcaaaaagtggaattgattataatattgctgaaatttttccaaatcgcttttggttaacgcaaatgatggtgtcattacatgctagctcaccattatttttaatagatatggaccgaaaatttggtcatctgcgaaagggaatcaaccaaccagacttagatatatttttgacagctagcgtagttgatacaattaaagcgaaaaggccaagattacttttaacacatttggttgatatggatagtatgcgacatgcgcacggagtagattcccctgaagcaaaagcggccttaaaacgacacgatgagcggttagctgcgattatccaagctacaaaagaagctggaatttatgaaaatactgtctttgcttttctaggtgatcattatcaaattaatgtaacacacgccatacgcctaaatgtcctttttgccgaacagggctggatgaccgtagtggacgataagattacggaatgggatgtctacgctaaaagta

SEQ ID NO: 3182 - DNA, 1826 bp, Listeria monocytogenes 4b
  misc_feature (1)..(end): n can be any nucleotide: a,g,c or t/u
gtgaacgccaccgtagccttgcattgcagctggaatatcggtacgttcttcgacaatcacttgcgccccattaccaccttcgccaacctcgtataaatgaagtccgtcttcttctgtcacttttctaaagccaaaaatcgtttgcaaaatcgcatccatatttttgagcgaaacaaccgttaaaaagactggtcctaagccataaattgcatatttttctgggactggtccgtttttccatggagttccagctgctaccccttcgttattttcatctgaaatcagttgtaattgttggtcgtcaaaatcttggaatgtcagatattttttgccaaatagagttttgatatcactatgaggaacttctaattgttcaaaacgatcaagccagtattcaagcgccgcatcactaggtactcggaaagctacgcgagaaatactgtctgtgccgtgacgtccttttggtaaatttggaaagtcaaaaaatgtcatatccgttcccgctgaacctttgtcatcggcgaaaaacaaatgatacgtatgaatatcgtcttggttgacggtttttttcactaaacgcattcctaaaacttctgtaaaaaacgcataatttttctccgcactacttgtcattgctgttacgtggtgaattccttttaaatctttaatcatgataaatctcctccaaaataagtttcaatttctgttcttttttcttctaaaaagcttggtaaggctaagttgtcgcccattgtttcaagcggttcgtcaattgtaaaaccggggccagcgcttgcaaattcaattcttaagccacctggttcgcgaatatatagacttttaaaatactcgcggtcaacaaattcttctattttcaaatcgtttcgaacagctatatggtgaagttcatcaacggcttctttggtttcaacggtataagcaatgtgatcgattgtcccgcgtcctgttcgcgattttttgtctgaacttgtggcatgaagtttcgcaaaactcgtcttgtctttatctactaataccccattctgactttctaagccaaataaatccgtgaaaaactggctggtcgcggccgaaaaggcacgtgatagtctgcgccgataatccgaacaatttgcttttcagccgggatatcagtatggatggttgggttagaaatggtttctggtatttccgttaggatgatacccattgtatcgggatcttgtaaggttaaagtctggccttctttttggaaagatatcgcaaaatcgcttattctttttttccagtaagagcttgtgccttttggtattccaagggtgatgcttcccgaaaatggcgcgttcgttgtagcttgagccgataccaggtacttncgcgaatggtaccctgccacccgctcttcctggacggcctgcgctcccacctggtgcctgcctcgtcgtctccccccacccccccgtcccctcgccgcccgcctcctctttcccctccccccgcctcccccgtccgctccgcttccttaccctctgccctctgtctctcgcgctctccccgctcctcgctgcgcttctcccttcccttctccgttttcccgtctgcccgctgtggctcgtttcttgcgtgttcgttgcgtcggtgtgtggtcctgttgtcgccgtcggtccccccctccccgccgtcccctcccttctcccctcatatccaccgcccccctcctcgctcgccgtcctccgcccgctcctcctcctccctccccccctccccctcgccctcccccccctcccccccctttcccgtctcctcttatatccctgcaataaaaa

SEQ ID NO: 3183 - DNA, 1044 bp, Listeria monocytogenes 4b
  misc_feature (1)..(end): n can be any nucleotide: a,g,c or t/u
aactatggggcacctacatcgcatgctcgagcgccgacgtgtgctggaaagtaagaacaccatgtttttttattcttttaaattgcgcaatttcataaggcatttccaacattgttaaaatatctttttgtttatctcaatataacatttaattaaaataaagcgatgtagtgctttcatgtcatttaatattcccaagtaaaattgaactaagtgacctataggagtcaaacttattttattgcctgttaacacttttatttctattaatccgtctgtattgagctttattttatttttagaacctagcagaaaaaccaaatattgaaattcatcaaaaaaactttttatgttttgtactgttttaatgtaatctatattgtttttcgtcgttgacaccccgttttactttaatactatcaaaacggattcattatttgttatgctaactgcgtaaaaaagcttcgaaattagtaataaaactaatttcgaagcttctctaatcaattcacttcaatgtgtacaaatttccgtggaacagcaattacttcttacaattctacgctattcattgcgtcttttggtgtaccaaagaaataagttaaaatgaatccacctaaatatgctgcaattaatccgatgacgtaagaaagccattcattattcgcgattagtgggataagtgcaactcctgatgggccgattgcaattgctccgacgttaccaaagtagccgattactgccccaccgataccgcctccgagacaagctgtaagaaaaggtttcccaagtggtattgttaccccataaattaatggttcaccgatacctaaaattccaaccggtagaccccctttaatcatatttacaagtggtttatttttacgacaacgaatccaaagcgcgattgctgcaccaacttgtccgccacctgccatagctagaataggaagtaagatagtataaccattttgagcaatcatttctacatggatgggtgttaaaacttgatgtaacccaaacataaccattggtaagaataac

SEQ ID NO: 3184 - DNA, 1167 bp, Listeria monocytogenes 4b
  misc_feature (1)..(end): n can be any nucleotide: a,g,c or t/u
ttcactgtaataacatcggcgagtgtggcactattagttacaataataggcgttgtaatatcatagccagcttttttaattgcatctaattcaaatcttcctaataaatcgcccttttttatttcttctgattcgctcacttcaatgtcaaaaaattgaccatttagattaactgtatcaagtccaacatgaattaacaactcgactccttgtttggaaatcaaccctatcgcatgcttggtttgaaaaacactaagtactgttccatcaaatggagcacgaatttcgccactcgctggaagaatcgctactcctgctcccattataccagcagagaaaacttcatctttcacatcatttaatgcaattatttccccttgaagtgggctataaatagtttcgtctaatgtagctttttctcctgtttgaatcacaacttcctcaactttatctttaaatccaaagaaataagttaaaatcaacgctacactgaatgccactactaaagaaattaagaatccccaaaaatcccatcctattccatctggattaatgaacatcggaataccgaaaatcccaccagacgcgaagcctgcaaacattttcgcagcactcatccctgcaattgccccaccaaatgctgatcctacgcaagccataataaatggtttggtatatggcaaggggactgcataaatcgctggttgcgcgatgcctaaaaatcctgaaataggcgctgccatataaagggaacgctatcctatggggtgcggccccaagggttactgtccgaaccccccgccctgcgctctaatgccgcgcgtcccagtctccactagttatgaacgctgccctgtgtgaccagcccggtgcgtcgacctctcgcatggctgcccccacgctgtgcccgctaccgcttgcttcccccccccccctccctttccatctctattctccccccttctccgccccgtcgtgcccgttctttcgctctcgttccggtcttctgcagcttcccccccccccgaccccgcctgttctgggctgcagttctgagtaatgagtggcgcgctaggccgcccgccggaggtgaattctgtgcacgcggctcttagattatggcgccccggccgtgggtccgtggttttctccggccgttttttctct

SEQ ID NO: 3185 - DNA, 661 bp, Listeria monocytogenes 4b
  misc_feature (1)..(end): n can be any nucleotide: a,g,c or t/u
ggcacaacagaatggcgcggaaaagcggacggaacttattcggttcggaaaatagaaacggaaactcgcgaaccaggtacacaagtgtatttgcgcttacgagctgatttagacgagcaccctgaatgcgaggacgtagaagaattaatcaatacactcaaaaaatatggttcctctttggaaagtaatataatagtagaaattaatggtttagaagaagaaattaatagttggaccaaacagttttccaataaagaaaccttgtctaaactatcaaaagatcaaattattcagtacggcgaatatatccttggaacgcgtttccaagattatttcttaattgaaaatgagtcaggaagaacgtttgggattgcttatatgattcctcatgctgttcaaatgaatgctatccggaagaacacggtatttttaaataatatgtatgtcacaagtgaagcaaataatattttgcctgattggtcgttttttgctaaatgcgtgatttggacggatgagcttcaacctgttgcttctcgtgaggcgttttataaaaatgagcgattaactagtggtggccgacgagcttggcgttgctttgaaaaaaggaattgaaactcttccagaagaagccttggtgaaatttattagctacacattatct

SEQ ID NO: 3186 - DNA, 1285 bp, Listeria monocytogenes 4b
  misc_feature (1)..(end): n can be any nucleotide: a,g,c or t/u
gtgctggaaaggtgcgtgactctgaaggacgttaaatgtctaagtcgcttggtaatggtgtggacccaattgaagttattgacaaatatggagcagattctcttcgttatacacttgcaacaggttcatcaccaggtcaagatttgaaattcagctatgaaaaagtagagtctacttggaatttcattaataagatttggaatgcatcccgttttgtgttaatgaatttagatgggatgaaatataatgaaattgatttgtctaatgttactgaagttagtgataaatggatattgactagacttaatgaaacaattcaagcggttacctccttaggtgaaaaatatgaatttggtgaagtgggacgaacgttatataactttatctgggatgatttctgtgattggtatatagagattgcgaaaatacctctttacggagaagatgaagtagcaaaacaaacaactagatctgtacttgcgtatactttgaatgcgactatgcgattacttcatccatttatgccttttgtaacagaagaaatttggcaaaatttacctcacgaaggggaatctattacaattgctgaatggccaaaagtgaatgaacaacagattgatactaaatcttctacggccatggctactttagttgaagtgattcgtgctgtccggaatattcgatctgaagtgaatacgcctcttagtaagccaattgttcttgaaattaaaccgaaagatactacgtataaagaaattctagaacaaaatatttcttatattgaacgtttttgtaaccctgaacaagtgacaatttccttcgatgttgaagcatctaaaacggcgatgactgctgtagtatctggagcagagattttcattcctttagaggcgttaattgatttaaatgtagagattgctcgacttgaaaaagaactagaaaaatggaataaagaagtggcaagagttcaagggaaactaaacaatgagcgattcattagcaaagctcctgagagtgtagttgcagaagagcgtctaaaagaaaaagattatctagataaaaaagcctctgttcttgaaagaattgaaacgttaaaagaagtataaaaaacgaactgaccttatcatgaaatcaactggtagggtcagttttaaggtggtttaaataatgacattaaattcgtatgaagaagcattagattggattcacggaactttccagcacactgtcggcgctcagcagctccaggaccataggccnnnnaaagaaaagcccnngcaacctc

SEQ ID NO: 3187 - DNA, 699 bp, Listeria monocytogenes 4b
  misc_feature (1)..(end): n can be any nucleotide: a,g,c or t/u
ttttttttttatttgtaggtagggagaagggcagggagggaaacgggggaaacagaaggcggaggcggggagaggagggggagggaaggggaaggagaggggagcgagggggagggaaccgagggagacagggggaggcgacagagcgcggggagagggaaacgcagagggtattcccagtcccgccgttgcacgagcgcgaccgagtaaaatgtaacccgactcaccataggcgagagnnnnnnnnnnnnnnnnnnnnnnnnnnnnnnnnnnnnnnnnnnnnnnnaattcatataaatgtcacaactaatcaataatgagtctaattctagtgattaaacgaaatttgattaagttataatgaaataattcagctatgaatacatacacagtcctaagaaatagaataatattataaaggagataagttaatgaaaagaaaaaaaacagcattacgtatcttggtaactctggctgtagtaatggcaattagcttttgggtagggactagctcaaaagaggaagtacaggcggcagtaattgatcaaccgacgccaattaatgaaatttttacagatgagaatttagcaaacgcaataaaagcaactttaaataaacctagtactacatctgacgtttcacaagcagagctagattctataagtgaagccacggcagaaagtagcaatatagcttctt

SEQ ID NO: 3188 - DNA, 706 bp, Listeria monocytogenes 4b
  misc_feature (1)..(end): n can be any nucleotide: a,g,c or t/u
gtacagcctatgagaatatccgcaaaacgatttactttttactaagtacaaacttttctcaaattttcattatgttaattgcgattattcttggctggggcgcgccggttgtagctgttcagttgctattaatcaacgttgtgtctgatgggattccaggcttcttcttaagtcgtgaaaaggcagatgactcgattatggagcgtaagccaattccaaaaaatgcagggatctttgcgaatggacttggcaagaaaatggcgacacaagcggttgtctttacgattgtgacacttgcaggattttatatcgggcagtttgtaacgattaataattcgattggtgcaagctatgaagttggaatgacaatggcattcgttattctagcatggtcatctgtcgcgcatattttcaatgtaagaagtgataaatcgattttcactatcggatttttatctaaccgtggtttgttctttagcgcgatttgttcgatgttgattattttaggacttgcgattattccaccacttgcgaacatgttcttcttagtagaaatgagcttaacgcactggattctcgcattcatcctctcgatgttcccactcctattcgtagaaattcaaaagcttattcagcgactttccagcacagtgtcggcgctcaggcagctctatggngctgatgtgcnnnnnnaaaaggtgagctc

SEQ ID NO: 3189 - DNA, 1077 bp, Listeria monocytogenes 4b
  misc_feature (1)..(end): n can be any nucleotide: a,g,c or t/u
gtgctggaaagatgatttttgtttttggtcgtgattaactgtgaccgatgccaaaataggaatagcggatatgcctaaaatgggcgattattacataacaacattggttgaaaatggcacaatgccaactacaattccactcgctggtttcgatgaatggattatcggctaccgagatcgctccgtcgttttaccggaaatatggcacgatgaaattatgacgaaaaatgggattttcagaccggcgattatcacggagggcaaagtagtcgggaaatgggaaaaaccaaagaaacgtgctgaattagacggagatttctgggaccgttacatccagtttcgaaatatgctatagtcaagtagatggataaattttaatttgaggtgataaagctatgaatgcttttgataaattttacaaaaaaacagtagaagaacgacgcgcaattttggcggaatatgccgacttaaatgaagaagagcaggcatttttagcttctacaggggcgctttcttttgataaagcgaatcatatgattgaaaacacgattggcatttactcgctgccgctcggattaggaatgaacatgcttttaaatgataaacattatgtggtaccgatggcgatggaagagccttctgttgtggcggcccaaagcgctggggcgaaacttattggacaaaatggcgggataactggaagtgcaacaaaacgaaaaatgattggtcagattgagttgatttctgtttctgatatccaagcagcaaaagaaaacatcattgcgaacgaagaacaactaattgctatcgctaaccaagctcatccatcgttacaaaagcgtggcggtggtgcggttgaaattcaagtcagaacagcacaaacagcgaatgacgaaacgttacttatcgttcatttactcgtagacacccaagaagcaatgggcgcgaatatggtcaatacgatggtcgaaaccttagcgccagaattagaaatgttgacgaacggaacagccaatatgcgcattttatctaatttagtagatgaagcgaccgcaacggctgtttgccggattaatc

SEQ ID NO: 3190 - DNA, 1315 bp, Listeria monocytogenes 4b
  misc_feature (1)..(end): n can be any nucleotide: a,g,c or t/u
cctcaagttccttcaattgtttagaaagcgttggctgagaaagatgaagcacttccgccgcttgactaatcgttttttcacgtgcaacagttaaaaaataattcaacacacgaagctccattaaaatcaccctttcctataactaaaatgaatagttggatatgctttataagtattattcaattataacttctcccgctataattaaatagtaaaaggttttcgagggggaaagcgcatgatagaacaagatttacagaaaagactagtcgaccaagaaattctccaagggtcggatttgttagatgaaattcacgaagtaaaacaaaacaatgaacaacttatcatcgaactaaacaccaagtaccactcaaaaaaagaagtgaccaaatacctcagtgacatcactggaaaaccagtcgatccatcagtcgatgtctcacttcctttttatagcgacttcgggaaacatattacttttgggaaaaatatctttatcaatttaaatgtaactttcgtggatttgggtgggattacaattgaagataatgttttaattggcccaggagcaagacttgtgaccgtcaaccatttagttagcccgaaaaaaagacgtggcttaagagtagccccaatttgtgtgaagaaaaacgcctggattggcgcaaacgcaacgatattatcaggcgtaacaatcggcgaaaatgctatcgttgctgcggatgctaccgtcacaagagatgtcccagcaaacgttatcgtcgccggaagcccagccaaacaaattcgtaaaattatcgaggaataaggagagatagcaaatgacaatcaaaaataaagtaattattataaccggagcatcatccggaattggtgaagcaacagccttacttttagctgaaaaaggggcgaaagtggttcttgctgctcgtcgcgtagaaaagctggaaaaaattgttcaaacgattaaagcgagttcaggcgaagcaatttttgccaaaacggatgtgacaaaacgcgaagacaataagaaattagtagaattagcgattgaaacatacggaaaagtagatgcaatctttttaaatgcgggaatcatgccgaattcgccattatctgctttaaaagaagacgaatgggagcaaatggttgatatcaatattaaaggcgtactgaatggaattgccgcagttttgccttctttcatcgctcaaaaatcaggacatatcatcgccacttcttctgtagcaggattaaaagcatatcccggcggcgcagtatatggcgcgactaaatgggcagtccgtgacttaat

SEQ ID NO: 3191 - DNA, 1026 bp, Listeria monocytogenes 4b
  misc_feature (1)..(end): n can be any nucleotide: a,g,c or t/u
ccttagatgcatgcctcgagcgccgccactgtgctggaaagcataacggtttttgtaagcattcgcccagctccagcaatccatgaatgtccaaagatgataaccatgacagttagaaccttcttcaatggctttatgcagccatttcaagtgactcttaatgaaatcgattcggtacgtatcttcaatcattccgtctgcattacggtagcgactttcgccttctacacccataccattttcagaaatgaagaatggaatattatcgtagttatcacgcagattaatcgcaatatcataaattgctctttcgaaaatttcccaaccacgatatggattcattttgcggtaaggcatttcatagttatcaaaaagatgttctggcataaatggtgcatccggatgagctgcgtattctttcgctttcacacgacgcggttggtagtagtttacaccaagaatatcaataatgttgtttttaattatcgccaaatcttcttcagtatattctggaagcgcgtcatgttcgcgaataatttcaacaaggtcagctgggaattccccttttgtaaccggatcaaggaaactacggttgaaaattagatctgcaatatgagccgcttttaaatctgccggattttggcttcttggatacgacggtgttaagtttaaaatgattccaatttggccttctggaatttcaagtgcgtggaattctttaacagcaagcgcatgtgccaaagtagtatggtaagcaacctgagtcgcacgtttaaaatcaacgacattcggatagtgcatatcgtataagtaacctgcttcaacaggaacaattggttcattaaaagtaaaccaatgtttcacacgatctccgaataattcaaaacatgttttcgcaaaagttgcatacgcgtcaactacttcacggctttcaaaaccgcctttttcttgcatcgacattggcatatcaaaatgatataaattcataaatggttccacgtcatttgcaagcatttcatcaataac

SEQ ID NO: 3192 - DNA, 913 bp, Listeria monocytogenes 4b
  misc_feature (1)..(end): n can be any nucleotide: a,g,c or t/u
agttactcaagaagtcgatacgcaatatgatgtagttgtgacgaagcttaaattgctcgtatggctgacggaaacaacgactggtgatattgatgaagtgaacctatctagcggcggggagttattctggaatcggatgaagcacacaggctggtttttatctgaaaaacatgatccttggctcgcacacgatttctataaattcaacatcaaacaagccaaaaatgcagatttagtcattgttaatcacgcactacttttaaatgaccatttttcgggaagagaaacattgcctaagtatgcttttgcagtaattgatgaagcccatcattttgcggatagtgctcgtatgcaaggaagttttgttctgtcttaccgaaaaataaaatattttttgaatcagctaggctctttagaaaaatattcccttctcacaaggcttgcaatggctttcccagaagcagacagtttatatgatttagatattgcggcaatgaagttaagtgatgcggtggaagagtttttcggtcttctgaaaatgcagttaaacttcgcgcgtaaaaatttacaagaagttgtcttagtagaaaacagcgaaaaagatgcttggaatgacaaggtttattacgctgctgaaaaagtattacatttgctaaaagagtccgaaaaaaatatggaaacattgttagaacaggggaaacaagaagaaaatgaactaggtgaggcagagagcgcctttttggaagaaatgtatgcttttttacttgattggaagaatatggtaaaacaactggagcaaatgttgcataagaagtcgcctattttgaccatttatttacaagctgacaaaaatcattctatttctagcattcgtctaaaagctgtcttgatggaagtggagccgacacttgga

SEQ ID NO: 3193 - DNA, 1254 bp, Listeria monocytogenes 4b
  misc_feature (1)..(end): n can be any nucleotide: a,g,c or t/u
ctgtggcacttagcagcatgctgagcgccgacgtgtgctggaaagagggtttgacggtaaagatattgttttcgcgtattccgtccagaacatattcatgatgagccaatcgttattgaagctaatcctgactatacgttcaaagcaactactattgttgacgagcttactggtggtgaatttatgctttatagccgggttggtacacatgaattacaagcactttttgatgctcgctcggaacaccaacgagacgaagtacttactttagcattcaaaatgtctaaatctcacttcttcgacccagaaacagacgataacttaactgattaatattcgtagaaaaacccgccaagctcggcgggttttcttatttttcaaaaggaaatttaattccccactgcgttctaacatcgctcataatcgtgataacatcatttgttaactgataagtcgtgttttctcctgtcgcgatgctctcttccatagctataatttcatattctaaagctttacttgtttcaccaacctcaatttcttccacttttccagttgccgtgtgtgtaacagttgctcggctggcacgcgggtattcatctacagtgataaatccttcttcacaagcaatgacacctcgttttggcattttagcacggaaagatagcgatacaaccgctagttcctcttctttatttttcagtaaaattccggactgttcgtccacacctgtttcgaatttcttcatcgtcgttaatacttcatctggcgtttcacttaaaaaataccgagcaaaactaagggcatacgtaccaatatcaagtaatgctccacccgccaaatccatattataaaaacggtttttcggatctttttctttggcacttccaaaagcaacttgaataattttcaatttaccaattgctccagattccacaatttctcgtaactttttataaagcggcatatggaatatggtcattgcttctttaacgattaagcctttctctttggctagcacattgatttcattaagttcttcgctacttacagttatcgctttttcagctaaaacccccctgccattatgtaaacttttcatgataaattcatagtggttggagtgtggtgtagcgatataaactacatctatcgccggatcagcaagcattttgtcaaagtcatcgtataccttttctattccgtattgacttgcgaatgcttgcccgttctatatactcagtgcacctaccgcat

SEQ ID NO: 3194 - DNA, 1091 bp, Listeria monocytogenes 4b
  misc_feature (1)..(end): n can be any nucleotide: a,g,c or t/u
gacatttcatcggcatctccgtcggcggaaggaataagggcagcatcttcagatttgtctttgatttccaagtcctgcttaatcattggtgtatattctgtcattatctcatcatcccttacttctttttcatcctctcattatagcataaagtttcatttccctgcgaccgcaaaaggaaaaaactgccgatgttttggcagttttaagtggttaattttctttttcaagctctgtagttacttttgttgtgatttctgttgtaattgattgtaaaagatcattggcgtcttcttgggcacgtctaaattctgttacaatcggaagtgaatcaatatctgcgcgaacgttatcaatttggttttcggtttgtttcatcgcttcaagtttttgataatgctctaaatttactgcttctttttgaagtaattttattttagaaaccttcgctgctactttggagttcgcattgattctttcctcggcaagacggtaaaacgatacttcttccgtttgttgaagcgcatcacgaagttcggtagcttttttcatgatttcgtcttttgaaactgtcacaatttcatctccattcttaatcaaaggaaaatgggtggtcttcattgatgagaattcggtcaattttttgtgcttttccagtattttcgtcaagtgtgattaaacagcccgacaagactgctcgaccagttttaggaacttcgaacctagttggtaaagctgttttaaatcgacggataacagcttccttttccataccaaggatagcatcgtatggaccagtcataccagtatccgtcagataggctgttccttctggaagaatgcggttatccgaagtttgcacatgagtatgcgtgccaacaacagccgtaacacgaccgtctaaataccaacccattgcttctttttcactagtagtttctgcatgaaaatccacaaaaataatgttagtccgtttttttgcttcttctatcaaagtgtccattttgcggaatggatcgtctaaatctgctagaaaagtccgactttccagcacacgtcggccgtcaagcatgcagtagtgtgccaaaagt

SEQ ID NO: 3195 - DNA, 1151 bp, Listeria monocytogenes 4b
  misc_feature (1)..(end): n can be any nucleotide: a,g,c or t/u
tgcttactgacttttttaacctcttcaaaattcggctctagggcatataaatctgctttacttttaattggaattaatatatcttttaaaccagttgacacaattttaatagggtagttagtatttagtaaatttaagttaaaacaacctgttaatttattggggggaattgtatcataaaaagttggttgattttgttccatgaagatagtgccatcttttatcgtaatcgtcagtacaccgctatttgtttcaattgtatactggctcttatgaattttatttaaatgcatcaaaatcgcaaaagtgccgattgtcgcatgaccacataaatcgacttcttctttcggagtaaaatattctaatttataatcagcacagttagattcagttaggaaagcagtttccgcatagcctaattgttttgcaatggccattttttgagcagtggcgagtgttggttcgttcaatacgacacccgccttatttccacctttattattcttactaaatgcacttgcaacatagacagataaattcataaaaataaaactcccttgtaaaaactttattcttccgtaatcatcgcaaactccgcacgtactacttttttcaaatcagtaggggctagttcgatttgtaatcctctttttccagccgaaatcagtatagtatccagcgattcagcgctgttatcaataaacgttggacataatttattcattccaatcggcgaacatccaccgtgaatatagccagtaagcatctagaatgtatcacgcgcaatcaactcacatttttcatttccgataatctttgccaaatgttttaaatgcaaagtctaaagtgcaggaatgcacgaggcaatatttcatgtttcgtcaccagtcagcagtaaggttttaggaatctgtgcgggattattccctgtttctggcgcaacatgaagcgcatcgagggaatcctcgatccatgcacaatcaagtaattcatagtttacagtctgcttattgaaaatccgacacgcatttgtcttttgattcaagtctttcgcctcaatcaattcagaaatatgtataatgtatgacacattatgcgaaatagttggcatttcccttttcattctgcacaatgaagtggaaatcgaataa

SEQ ID NO: 3196 - DNA, 1036 bp, Listeria monocytogenes 4b
  misc_feature (1)..(end): n can be any nucleotide: a,g,c or t/u
tacagcatgcttgagcggccgcacagtgtgctggaaagttaccaccatagaaaatacatttcagcaaacattaccaacgatgcctactattattcaaattttagggaatgttttattgttatgtccactgtctttcttcatgctttactttaaaataacaagcactggcgggaaaaacattattagtcatattcttaacatcttgcggcatcgaactacttcaatttgcgcaaacaacgatgattacaggatttgaaagtatatcgctaccaccaaaacgttctacagatatagatgatatcattttaaatacgttaagtggattaataggcattctactagcttatgctgtaccatctgttagaaaacgaatcaataaaagaagatgaatggaaatcgttaaggagactctgttatgaaagaaaaattaatgcaagcctatgcctggtttcaaaaaaatagtaccgtcgtaaaaatcgtttttattacttttgtgatggcttttgttatttttgaaattattaatattgcgacgggaattgactatccatcgctaaaagaaaatttaacttctcaaagtccagaacaaatatttattatgtttattgttggcttaattgctgtcactccaatgctattgtatgattatgtcatcgttaagttgttgcctggaaagttttccccaagtcatgtgattgcctctggttggattacgaatacatttactaatattggtggttttggtggcgtattaggtgccagtttaagagcaagtttttacggaaaaaatgcatctcataaagaaatattactcgctatttctaagattgctttatttttagtatctggtttatcgatttactgtttagtatcattagccactttactcattccaggatttgcaaatcattttgttaattactggccatggcttcttgcgggtggtctttacttcccaatcttatttacaataacgaaatggaaaagtaagtcactttttgttgatttacctatcaaaagagaattaacgttaatt

SEQ ID NO: 3197 - DNA, 1301 bp, Listeria monocytogenes 4b
  misc_feature (1)..(end): n can be any nucleotide: a,g,c or t/u
tgtcggccgacagtgtgctggaaagtattttcaggagaagtgattgaggttggtagtgaggttacagatattgagattggtgatagggctgccggatgcccagcactctattgcggagagtgtgaatactgtaaaaaaggcgaattcgcccgctgtcggaagctaacagtaatcggagcaagacatcccggagcctatgctgagtatatcaaacttccagcagaaaatgtagtaaaaataccagacgaattagattatgaagctgctgcacttgtcgagccttccgcagtggtcgttcatgggttttatcatacgaaattacaagcaggcgatgatgtcgtcgttgtcggaagcggcaatataggtttgctagcaattcaatgggcaaaagtttttggcgcaaaaagagttattgcaattgatgtagacgataaaaagttagctcttgcaaaagaagtaggagcagacgtcgttattaattctttaaaagaagatccattagaagtagtcgcagcacatacagatggtctaaacgctgatttagttgtagaagctgcgggatcacctattacatctgcccaagtttttgcctatgcgaaaaaaggtggaggcgtcgttttcctagggattccatacgccgatgtaacaatcgaacgtttctattttgaaaaaattgttcggagtgagcttactgtttggggctcatggaatgcaatttctgcaccatttccaggaaaagaatggcaaacaaccattcatttcctagccaataaacaaatcaaaattgaaccaatgattacacatcgtctttcacttgctgaaggaccagaagtttttgagcgaatctatgaaagaaatgaatttttcgggaaagtattatttttcccagaataatagggggattttaggatgaaaaagaagaaaatttatgtttgttgtgggactggaattgcaacttccactgttatttccaaaaaagtgcgtgcggtactagacgaaaagcgcattccatatgaaattagtcaatgtacggttcaagaagtagcgtcaaaagtaagcacatctaagccagacattattgttagttcaacaacagttacaggtgatgttggtgatgtaccagttgtcattggaagatcatttttaacaggcctaaaaaaacaagatacaatcgatgaaatactcgcgatacttcaagattaaagggagggcacanaatggatattattctagatttctttaaatatattatcgggcttgggtgtacagttatgatgccgattatcattaccattctaggg

SEQ ID NO: 3198 - DNA, 1166 bp, Listeria monocytogenes 4b
  misc_feature (1)..(end): n can be any nucleotide: a,g,c or t/u
ttattacacaataattaaatgccgatagaatatgagttgttaatagcaaaacaaaaaaccttggaatcccaaggttttttgatgttactttattttatgtggtactaaattacttgctaaaattgcattccagaattcttcaaattcaggaatatccatttgttgtgcagaatccgataatgcaactgcaggatctggatgaacttcagccatcacgccatctgcctcgatagctagagcagcttttgcgcatggaagtaataaatcttttcgaccagtagaatgcgtcacatcaaccataactggtaaatgagtttcttttttcaaaattggaacggcagaaatatcaagtgtatttcttgtcgctttttcatatgtgcggatacctcgttcgcataagatgattttgccatttccttgtgacatgatatattcagcagcaccaatgaattcttcgattgtagcagataaaccacgttttagtaaaatgggtttgtccacacggccagccgcttttagtaattcgaagttttgcatgtttcttgcaccaatttgaataacatctacataatcaagtgcaacttcaatatcagccggcggtaacgatttcactaataacacctaaaccgtattcatcagatacacgttttaaaattttcagtccttctaaacctaatccttggaagtcatatgggctagtacgaggtttaaatgcgccgccacgaataagttttaagcctttcgctttaatggattcagcgaccgcagcaacctgttcataagattccactgaacatggaccgaaaacaaatactggttcgccattcccgattggcaatccttttactgtaactatcgtatcttcttttttgttttttctagaaacgagtaatgctttagagtgatcttcttcttgaagctctaatcccgctttaaaaatttctttaaataatttttgaaccgtactatcttcaaaaggtccttcatttgctgcaagaatcgtgttaagcatttctctttcacgtaatggatcaaaacgaagagaaccttgagttcctttaattttgccaatttcttgtaccaaattagcgcgtttgctaattaattctagcaaatcaatatttaattgatccacctgtgttctaagttcctctaaatttgtatta

SEQ ID NO: 3199 - DNA, 1382 bp, Listeria monocytogenes 4b
  misc_feature (1)..(end): n can be any nucleotide: a,g,c or t/u
gttattgttagaaaaaatcattactttgattccttcttctttcaatatagtaaaccagttgataacttcatccgttgcgtctagttgatcccatgcaagcagcgtattatcaagatcagtcaaaatagtagtctttcccattttgcgaagttgtgctgctgtaattccaaatggagtattcaacattttatctggtgagaattgctttaacacgtattggcacctcattcttttatttagtacagtctattctataatacattcaattagactaataatctataaattttaccatctttctgcttattttacaaaaaaaccttagaaaaatgctataatatgaaaggaaacgttatttttaaggaggtaaacaaatgtcaaaagattatgcattaacatgggatttagaaaatatatatgctggcggcagcggctctgaagaattacaacaaacgcttcaagaggtaaaagctgatttagacagctttgttgtaaatgtttcggagtgggatgttcctgaaaatgtggaagcctctgctgaatttttacttctcgttaatcaaaatgcagatatatctaaaattttactcacagctggatcatttttagaatgtcttgcttccgctgatatcaatgactcgcgtgcaaatgagctttcggcgttaatttatcaatacgttgcaactctagctacggccgaagatgaatggcatgacaaatttgcacaagtttctgaccgtgtttgggacgaattaatggaacaaaatggtttatcgcaaattagctttattttaagtgaagcgcgtacgaaccgccgtaaaaaagggagtaaagaacaagaagcagctattaattctttagctgtcgatggttatcgcggctggtctgatcattatgataccattgtcggtaaactccgcatgcatgttaccattaacggagaagaaaaagatgtttctgctggccaagcgctaaacttattaaatcaccctgatcgcgcggttcgccaagcagtttttaaagaatatacacgtgtatggcaaagtgaagctcgtttatttagcgatacgttaaatcatttatcaggattccgtttagctacatatgaaattcgtaaatgggataatattctagatgaacctcttgcaattaatcgtttagatgagcaaacgttaaaatctatgtggaatgtcatccaaacgaacaagcctacttttgttcgattcttagatagaaaagcgaaattacttggccttgaaaaattaagtttttatgatgtagaagctcctcttgtcttttcaagcgaacctaagaaatattcgtatcaagaaggcgctgaatttattattgagcaatttaacaaattcagcccgaaaatggca

SEQ ID NO: 3200 - DNA, 1671 bp, Listeria monocytogenes 4b
  misc_feature (1)..(end): n can be any nucleotide: a,g,c or t/u
ccaaaaagctgccgcatatacaatcaacattaattttttagaaatgtctcaagtaatgcaacattgttactgtctttcttctgaaaaatttactattacagaatcattaattgccggaaaagaagaaacaacgattattttttgcaaatacagacgttcagaagaggcattgcagcaagcatttccaaatgtaaaaattactacttttgccaaatcttcttacggactcaatttgcaattttataatcaaattatttattttgataaaacgtttgattattctcagcgtgatcaatcagaaaggcggatttacagaactgggcaaacacaagactgctactatcatgatttaagcggtaatgtcggtctggattctcttattgatacaaatatttctaagaaaacaagcttattgcaagaatttaaaaaagaactctcacaaaaaaattcttttgaggtgataatggatgctttctagaacagtctttgatgcttcccaagaaagaatggaagcgattttttctgaattcgataatattattgtgtcgttttcgggtggtaaagatagcgcagtaatgctccatctcatgattgactacatgcggaaaaataatattcgcaagaaaatatatgtatatcatttagattatgaaggtcaatacagcgctacaactgattttgttactgaaatgcttacaactaatttagatatcatcgaaccactttggtgttgtcttcccatcgcggcacaatcagctgtttcgatgttcaccgaccactggaaaccgtgggaaaagaccaagcaaaacatctgggttagagatatgcccacctttccacacgtgattaatgaagacaatgccccgtttgactttgattttgaaaacctttgggattatgaatttaataaaaaaataattaactggttacatactaaaaataacgcccaaaaaaccattgctttgattggtataagacaacaagaatctcttaatcgctataacgcaattcataaaaaagaacgaatgtataaaacatacaattggacgaccgaaatttccaaaaacatttacaacgcctatccaattcacgattggcaagtagaagatatatgggtcgcaaatgcaaagttcaattggtcttataataaaatttatgatttattttatcatgctggcctaactgtgcacgagatgcgtgtcgccagtccttttaacgatgctgctacagaaagtcttaaactgtacagggtcatcgaacctgcgctttggtccaaattagtcggccgggtgaatggcgccaatttcactgccatatacggtggcacttccgcaatggcttggaaagaaattaaactacctaaaaatcatacttggaaatcatatttggaatttttactcacaactttaccaagttacactagagaacgctatttaaaaaaattcaaaacaagtattacctattggaccgaaaaaggtggtgctttaaaagtagaaactgtagaagaattaaaaaatttagatatacaagcagacttcctaggtaaaccacaaaataaccgagtatatactaatccaatggaaatcgttcgttttaaggagtatccagacgatttgaaaatcaaagaattcgcaagcgttcctacctacaaacgcatgtgcatagcaatat

SEQ ID NO: 3201 - DNA, 1528 bp, Listeria monocytogenes 4b
  misc_feature (1)..(end): n can be any nucleotide: a,g,c or t/u
atgtattctttgaatttgggggctaatcataacctcagtgatttaagtccgttaagcaatatgacaggtttgaattatttgacagtcacggagtctaaagtaaaagatgtgacaccaatagccaatttaaccgacttatatagtttaagtttgaattataatcaaattgaagatataagtccgctagctagtttgacaagtttacattattttacagcatatgtgaatcaaattactgatattactcctgtagctaatatgacaaggctaaattctttaaagataggaaataataaaattactgatttaagcccattagctaatctatcacaattaacttggctagaaatcggtaccaatcaaattagcgatattaatgcggttaaagatttaactaaattaaaaatgttgaatgttggtagtaaccaaattagtgatatatctgttctaaataatctttcccaattgaattctttattcttgaataataatcaacttgggaatgaagatatggaagtgattggtggattaactaatttaactactttatttttatcgcaaaatcatattacagacataagaccattagcaagtttaagtaaaatggattccgctgactttgcaaatcaggtgataaaaaaaccagcacgtaatttttcgaagacactatctgttccgaataatataactagcatagatggaacactagttactcctaagacaattagcaataatggaacctacgacgcgccaaacgtgaattggtcttcgccgagctatcttccagaagtaagatatacattcaagcaagatgtggtggtgggatcaaccacaagtagttatactggtatcataattcaaccgctaaatgagccagtagactacaatgtcacatttaatatagacggcaatacaagcgaagtaaaaactgtaacagaagaagatctaattccagaacctgcgaacccgaccaaacaaggttatacatttgatggttggtacgacgccgaaacaggtggaacaaaatgggactttacaactgggcaaatgcctgcaaatgatctcatgctatatgcccatttttccgtaaatagttatcaagtgaattttgatatagatggcgcagtaatgaatgaagcggtagtatacgatactttgctcaatgaaccgaccgctccaaccaaacaaggttatacattcgatggttggtatgacgcagaaacaggcggtaataagtgggatttcaaaacgatgaaaatgcccgcaaatgatgttactttatatgcacattttactgtcagcagttaccaagtgaattttgatatagatggtgcggtaacgaatgaagcaatagtatacgataccttactcaatgaaccggcgactccaactaaacaaggttatacatttgatggctggtatgacgcagaaacaggcgggtataagtgggatttcaaaacgatgaaaatgccccgcaatgatgtcactttatatgcgcattttaccatcaacaactatcaagctaatt

SEQ ID NO: 3202 - DNA, 1166 bp, Listeria monocytogenes 4b
  misc_feature (1)..(end): n can be any nucleotide: a,g,c or t/u
cgccactgtgctggaaaacaacggcttacaataaatcgctaggtggggcacttatgcatccttctattgaagcaatgcagttaacagagatggcatcgattaataatcgagtgtaccggacaatcggtagcccactagtttttccgaaacatcatgttgttagtttacaaccggttaatgacaaggactttcaaatttctgtagatcatttgagcattttgcaccgggatgtacaagaaattcggtatgaagtatctgcaaaaaaaattcactttgccagatttaaatcatttccattttggcgtcgtgtacacgattcgtttattgaagattaagctagcaggaggaagcatgtgtttttagaatggaaagtcgaaacggaagaagatggactcttacttcgcacgtttttgaagagtaaacatatttcgaaacaattattaactgccgtgaaatttggggcagaggggaaaattgaagtaaataacaaagaacaaaatgttttgtatcacgtaaaagtaggcgataaagtgaggcttacttttccaacagagcaacaaaatgaacgattgcttgcggaatataccaatttagatattatttttgaagatgattttttattaattatcaataaaccagctggtatggcttctattccatcacaatatcatccaaatggatccgttgcaaattttgtcaaagggcattatgaaacgcaaggactgacgaatgctattcatattgtaacaagactcgatcgtgagacgtctgggttaatgttaatcgccaaaaatagatttgctcatgctagattaagtacgtttttgcaaaaaggattactaaaacggcgctatcaagcatttacatcaggagttttagtagaacaaaagggttcgattgaagcgccaataggacgcaaagaagtgagtataatggaacgttttgttactcctgaaggtaaatatgccaaaacaaattatgaggttctcgcgcgctatagagcatttgaccatgtggctattcaacttgagacaggaagaacacaccagattcgtgtgcatttctcttatattggacatccgcttattggcgatgatatgtacggaggagatacgaatttgttgaaaagacaagcgctgcactcatgtcatctgcatttagtccac

SEQ ID NO: 3203 - DNA, 685 bp, Listeria monocytogenes 4b
  misc_feature (1)..(end): n can be any nucleotide: a,g,c or t/u
aaatggtaggtcaccgtcgtaacctattaacttacctacgtaaaaaagatgttcaacgttacctgcgaacttatcaaacgtttaggtttacgtcgataaaaaccagacgaaagcgggataccaaaagttcccgcttttttttgagtattaactatactaaattttggaaaacacgccgaagaaatgaaactttatcgcatgaatccaaaaacgtgcttcaaaaatcgctatttttagcaggtttttggattcatgtgtgctttagaaaatctaaagtgtgcgtgaacattcttatgcatggtaaagtttctggttcgtgtttttcctaatcaaaggagattaaaatatgtctgaaaaacaagtattttcaacagaatgggcaggtaagacattatctgtcgaagtaggtcaattagcaaaacaagcaagtggagcagccttaattcgttacggcgatacggtcgttttaacagcggcagtaggttctaaaaaaccacgtccaggcgactttttcccactaacagttaactatgaagaaaaaatgtactccgttggtaaagttcccggtggatttttaaaacgtgaaggacgtcctagtgaccgtgcgacattaacagcgcgtctaattgaccgtccaattcgtccattatttgcagaaggtttccgtaatgaagttcaaattaca

SEQ ID NO: 3204 - DNA, 971 bp, Listeria monocytogenes 4b
  misc_feature (1)..(end): n can be any nucleotide: a,g,c or t/u
taggtggaaaaacttcggatggtaagtcagtgggatggccaccttgaaagtcaattaatgcatagcgcacagttggtgtatctgtccaattattttccttgccaagtaaataataatcaaaaaagcgtcgcaattcttctacgttattttcgtcatagtaatatggccattcttggcgatcatgaatacgaagccatttttctttagaaccaagtgaacgccaagaacgaaatgtacccattgtgtgaagcgtattagaataacttgcaataacaaaagctggtattgtaattttacttggatctgcaactttgtctttccaaatagcactatcagctaaaggatatgcttccatttcctttgttaaatcttctctttgcgaatttttagcactgacatggttgatttgcaaacgctcaataaaattaggatctggaatgcctccaataaaagctaagtcacgataaccatctgctaatccttcagtaggattgatacatgttaggtgagggggctgctcagctgcaatataccactgggaaaaggctaaataagatgttcctgttagagctgtttttccattactccaagattgcttagctaaccattcaattaaatcatagccatcttcagcttcttgagagccaatcattgtagtattaccctcactatgagcaatgccacgcatgtcaggattacagacagcgtatccatgtgcgcaccagtatgctggatcaggtgcttcaaatttagtaaggccagaattccaggcattccccattcctagcatattaaatagatttttgtatcgaggagctgttccagcactttttccataagggctccaggcgataagagtaggaactttttcttctgttattggtaaataaatatcggtataaatggttataccgtcacgcatcttaactggtacatcttttaacattntaatggaaacatccagtggtttg

SEQ ID NO: 3205 - DNA, 1053 bp, Listeria monocytogenes 4b
  misc_feature (1)..(end): n can be any nucleotide: a,g,c or t/u
aatgttaagccagtgcccagccttgtcgtataatcgacaatcgtatttttcacttgactgcttaaacgttgcgctggatatacggcaatcgagtcacctgaatgaactcccgcacgttcgatatgttccatgataccagggattaagacgttttcaccgtcactgattgcatctacttctacttcttggccgcttacgtaacggtctactaaaactgggtgttttggatttacttttaccgcattcgtcatataatgttttaatgcttcttctgattctacgatttccatcgctcgaccaccaagtacataagatgggcgtacaaggaccggatagccgatgtctgtcgctacgttgattgcttcttctaccgatgtggccgttttcccagctggttgtggaatttgtagaattcctaatgctttttcaaaggcatcacggttttctgcgcggtccgtatcttctaaacttgtacctaaaatttttacgccgcgttttgctaaaccgtctgctaaattaatcgctgtttgtccaccgaattgcacgacaacccctagtggctgttcgatctcaataacgtgcataacatcctctagcgtcaaaggctcaaagtaaagtttgtccgagatactaaagtcggtcgaaacggtttctgggttattattaatgataattgcttcatagcccgcttgttgaatggcccacacggaatgcaccgttgcatagtcgaattctaccccttgcccaatccgaatcggaccagaaccaaggacaatcacgctttctttcgctgatcgtgttgactcattttcctcttcatatgtgctgtaaaaataaggggttgtcgattcaaattccgctgcacacgtatcaaccatcttgtatactgggaaaagattttgtgcttttcttaagtcataaatcgcttgttcatcgacattccaacaagtggcaaggaaagcgtcagaaaaaccggcccgtttcgcttctgccaaaatttcttggttttgcggattttctttgatcgattctattttatataaatttgccttt

SEQ ID NO: 3206 - DNA, 1323 bp, Listeria monocytogenes 4b
  misc_feature (1)..(end): n can be any nucleotide: a,g,c or t/u
acggccgcactgtgctggaaagagggtgtagaggtggaagtaattgcctcatcggaagaccgcaatttcagctatattcctgagattcctacagtttctagtgacgcggcttacttacatgtaactacaaataatacaatcgaaggaacagcaatgtttgatgtgccagactcagctgtcccggtcgttgcggatatgtcctccaatattttatcgagcgtttatgatgtgaaaaaatttggcttaatttatgcaggagcgcaaaagaacattgggcctgctggattaacgcttgtcatcgtgcgcgaagacttgatagggcaagtagagggacttccttctatgttagattttaaagtacaagccgagaatgattccatgtataacacaccaccgacatttgccatttatgtagcaaaattagtatttgaatggattaaggagcaaggtggcgttgctggaattgaagcgttgaatcgcaaaaaagcggccttattatataattatattgatcaatcggatttcttttcttcaccggtcgaaccttctgctagatcgctcacgaatgttccttttgtgacgaattcagcggagtttgataaagcttttgttcaagaagctgaagcaaatggttttaaaaacttgaaaggacatcgctcagtgggcggtatgcgagcaagtctttataatgcatttccaattgaaggggtggaagctctaatcgcctttatggaaaaatttgcaaatgcaagaaaagggggagaagtacgtgtttaatatccaaacgtttaatgctatcgcaaaagaaggcttaaagacatttgatctcgaaaaatatgtgattgatgcaaatcagccagcagacgggattttactacggagttacaacttacacgattttgactttccggagacagtgaaggcagttgcccgagctggtgcaggagttaataatatcccagtagaaaattgttctgaaaaaggtattgttgtattcaatacacctggcgcgaatgccaatgctgtgaaagaactagttcttgcgagtttattcgtttcggcgcgcccaattttggaaggaacggaatgggtcaaagaattaccggcggaagatgatgtggaacagaaagttgaagctgggaagaaagcctttgcgggaacagaacttgctggcaaaaaacttgggattatcggtctaggcgcaattggtgcattggtagccaatgacgctttatcgcttgggatggatgtggttggatacgatccattcgtttcagtagacacggcttggagaatttctaaagaagtggaacgtgcgatgac

SEQ ID NO: 3207 - DNA, 1487 bp, Listeria monocytogenes 4b
  misc_feature (1)..(end): n can be any nucleotide: a,g,c or t/u
aaatgagtaaaaatgatacatcatgacagctgaagacatgatggttgaaatgaaggaaatagcaagtgacttagtaaatgcgttctgctgtctggttagtatttgtcttgacgataaaataattccaaacgatactgcataagatagttgaaaacctacttctctaatgatatacggttgctagaggaaaaacagaataaaggacaaacaaatggcagaaaacgaactccatttagtagtatatttttctgacaataaaagtaatgctgtcattgtagcagctcgtatgactggcggatttgctcctgtaaggataacgtaaaatggtaagaaaacaagtagacaagtgatggctctatcccttgtaataccgaattttagtaggagaaaatatattgcccctattaataaattcacgtgaagtccagagatagctagcaaatggacaacacccatttgttgataaacttcatacatttcgggggaaaagccgtttttctctccactaattaatgcgagacaataaggagaaatggttggagatattttttcggttaaatgggtaattattttcaaacgtatattttgaagtttcattaggaaagatggtgagaattgactggaaatagcaagattacttgctcgaagtatatagtgtacattttggttctttaaataagtttggtaattgaattgattttgattgcggttgacggaaggtgtttctatatttgcagaaacagaaataaactgtccgtaatggagcttttttagtttttgttgttcctcttccgttgtaattttataactcaattgaaatttttctttttcgcagcgtacaaaagtttgaaaactatctccatcgatttttaaattatctataatttgacagttcccattatattcagttgctgtaaaagaggaagtattgaatttttctattacaaacaaaaaactataggttagaaaataaatgaggacaaaaagaagaataattttggattttttaataaaagcaattaaacctagcaaacaaatacatatgggaacgatagagcttgtaaaattcgcacaaacaatagctaaaacaataatagctaaatatcgctcgataacgtcccctccctatttagttcaatttctctgagatgttttgataaagttgctctgctttttctggttcgatatttacttccactgcagcttcttttactaaagtatgcattttttctccattccaattgtttacttgaagaacagattcatcaaattctactttttgtaattcgacgccagcaatgttaaataattctaaagcgtacggatggtttttgtagtctttagcgaaatacactttctttatacctgcttgaataatagatttcgtacaagcaagacaagggaaatgcgttacatataattcagctttatctgtcgttgcaccaaatttagcacattgtaaaatcgcgttcatctctgcatgtatt

SEQ ID NO: 3208 - DNA, 1564 bp, Listeria monocytogenes 4b
  misc_feature (1)..(end): n can be any nucleotide: a,g,c or t/u
gttatcatgtgcaaatctagaagacatcacgccaccaagcgagtgtccaccaatgacaaatttttcatacggagcctcatcaataatatcagcggctcgattcttaccaaatacagctgaattaaggggcattttaacgatgtacgttttgtaaccgctcgaagctagtttgcttgcaagaggtgcataacttatcgcgatgaacatacgcacctggatataaaataacactcatatcggcatccaattgacgccgagtaaaaacaaggatgtccttatcttcaagcacatacactgctctagttgaatctgcagccttttctgcagccgttcacggttctgaggggaaataaaaatatccccaaataagaagacaaaataaaacaatcgcactcccaaaaatcgctatctttttcataaaggacctcttttccctgtttcgtataatattttaccataaaatctgtttaaaaaaacgcatttaaacaagaaaaaaaccggagtctcgtagaaaacaagattctccggttccagttttagcctacataatctaacttcgcgccgtttttccaaaccgtatcgattgttccaccgccaaggcaaatgtccccgtcgtaaaatacaaccgcttgacctggtgtgattgctcgaactggatcagcgaaaactacttctgctgtcccatcttcgcgcaagtgcacggttactttcgtatcagtttgacgatagcggaatttggcagtacattcgattgttttcggtttttctgcattcgttgtgaaagaaatatctgtcgcaattaacgaatctgaatatagtgtttcatgatggaaaccttgttccacaaacaatacattttcttttaagtctttaccaacaacaaaccaaggttcaccgtctccaccaatacctaaaccatggcgttgaccgatcgtgtaatacatcaagccgtcatgtttccctaacacttcaccgttcagtgttctcatttcaccaggttgcgccggaagatattcacttaaaaattgcttaaagtttctttcgccaatgaaacaaatcccagtgctatcttttttgtttgcagtagcaagtccggcttttttcgcaatttcgcgcacttctgttttttccatgccaccaaggggaaacatcacttttttcagttgatcttgtgaaagttggtttaaaaagtacgtttgatctttattattatcgacacctcgaagtaattcaatttcatcgccgacttttttcacttgtgcgtagtgaccagttgccacatagtccgcaccaagactttccgcatgttctaaaaatgccttaaatttaatttctttattacacataacgtctgggtttggcgtgcgaccgagcttgtattcatctaaaaaatacgtaaacactttatcccaatactctttttcaaaattgaccgcataataaggaataccgatttgattggctacgcgaatcacatcatcataatcctccgttgctgtacaaacgccaaattcgtccgtatcatcccaatttttcataaagatgccaataacatcataacctt

SEQ ID NO: 3209 - DNA, 1573 bp, Listeria monocytogenes 4b
  misc_feature (1)..(end): n can be any nucleotide: a,g,c or t/u
tggaaaagcagagaatattgcgggaaccattgaaactttacttatttttgtagcggggatttggatcattgtggaatcagttaataaacttgtaaatcctcacgaaattcgttttccagcgcttggtattatggtaatgctttttggcgctatcgtgaatattatcgtgtctcgtatcatcaaaaaagcggctgatgaagctaattcagtagcgatgaaatccaatgcattacatttatatacagacgtgttcacatcgcttgggattgcgcttagtttgttccttgtatacataaccggctggctttggttagatcctgtcatcgcgattttaacggcgttttatatcatgtatgaggcttataaattgttaaaagagtctttccctccattaatggacaaacgcttgtctgcggatgaagaagaggctatcaagcaaattattttggctcataaagcaagatttattgaatttcatgattttcgctcgagacgggcaggagcagaagagtatattgattttcatttagttgtatcttcatcgatgacgattgaaagtgctcattcgctatgtgacgaaattgaggcagagattatgaatttttatgctaaagcggaagtccttatccacttagagccggaagaagaacgggttcttaccagaatttaatccgagctctttctattcgatttgttgctaaagtgttacaataggtagaaataagactggaaaggacaatgagtatgacaacttctattttaattgctgatgatgacaaagaaattgttgatttagtaaaattatatttacaaaatgaaggatatacgatttatcaagcttatgatggtgctgaagtatggcgtttagttcaagaaaaacagccaactttagtgatactagatattatgatgcctgaaatgaacggcttagaagtatgccgattaatgagagataatgggattttgactcccatcctaatgcttagtgccaaggctgaagacaacgacaaaatcatgggtcttttaacaggtgcggacgattatatggtcaagccattcaatccattagagctttctgtacgcgtgaaagctattctaagaagaatgcagcaaatgagccaggcagagcctgttagtcaagataaagtcatcattgggccgatagtagttgaccgtggccttcacgttgtaactgttagtggcaaagaacttcatttaacgacttctgagtttgatattctatttttactagcgagtgagccagggcgcgtttttagttcagaatatatttttgagaagatttggcaagaaaaggcccttggagcgagtaagacagtaatggtccatattagtaatttgcgtgataagttacgcgaggctatgggtggagaaaatgtgattaagactatttggggagtagggtacaaaattgaaatctaaactggaactgttgtttacgaaaattagccatgtgatgaatgtttggcaggcgactttttttgcagctgtttcttggattttggcgttgattagcatccaaactatttatttatggagcatttccattcgggat

SEQ ID NO: 3210 - DNA, 1577 bp, Listeria monocytogenes 4b; identical to SEQ ID NO: 1840
  misc_feature (1)..(end): n can be any nucleotide: a,g,c or t/u

SEQ ID NO: 3211 - DNA, 1239 bp, Listeria monocytogenes 4b
  misc_feature (1)..(end): n can be any nucleotide: a,g,c or t/u
tttcgattgtttcacgaggaagttttcctggtttacgaacaggcgcaaaaccaattcctaacgcataagcaactgggcagccgataataaagccacgtgcttctggtccaacaataatatcaatttttaattcttttgcgtattccacaattttatctgtagcaaaacgatatgcttctccgtcattcataaggggtgtgatgtctttaaatacaatcccttttttgggccaatcgttcacaatcgctacataatcttgtaaatctttaatttccattttctagttcctccgcattcgggtaaattgatgtttccatcattgattccatccaactatgaagttccgtatagttagagtacaacagtttttttcttgtagttatttcttctaccttttgttgataaacaagtgattcgtccagattacgtttttcaacaacttcattaataataatctgaccactttccattttagcaaattctaaatcaaaaaacacctttgacatgaaatctatttgctctttattccagccaaacttttgcattagccgtggtgtgtacttttcaattggaaatggttggaattttttgatgagactatatagctcagcaaaggctaaccggtctggaattgctggaatttgattcccctctgctgcatcaaaatggacaaaaatacgctctggtttcgtttcacgaacaatcgtttccactaattcagtcttcgttggcatatccgcaaaaacaagttcttctgtctggaaatccgccgtaaaatcagctttttcatccactaaaatatagtttttttctccaagcgtgccaatcgttctttcttcaaaacaaacaaaaactcttgattctgtttgttcttggagaatcctagcccactcagatttattacgtacatcgaaaagttgccaatgcgagatgtgaatgtccatcatgcgtagttgtggttttttcacattattccattcattgatggataattccccaaccacgtccacggctgcatttggagaaattttttctaccaaatcgcctacaccaaatccgatagaatctaaagtggcatcattttcctctgtagcagcattgttttaaatgggtttatctgcccaatctggtcgtcctctaacgccatatctactgaactgtacgttcataaaagctatatattgctaacagggaaaatgggtttttagggttattcctttccaaaacttagcctatttt

SEQ ID NO: 3212 - DNA, 529 bp, Listeria monocytogenes 4b
  misc_feature (1)..(end): n can be any nucleotide: a,g,c or t/u
atggttcaatcgagtatattggtgaagcttatacaaattacaaagtagaagtcatttcgaatttgaagaatgaactaacgctgaataaggaaattgcacttgaaaaacagggtggtattcgtgaagatggttctgcttatgatgtttttgaagatgaccagttaccagaagaaggcgaaatctatattttcactgcttatacgcaagacgatggatcactccttgtagcaggtgggaattctaccatttctttcgatgaaaaaacgaaaaacattgatacagaaaaagaagtgagcaaaacggaagagtttgaattatatgaagaggccgttgaaaatcaagttacttccaacgaaaattaaataagccattataaagcatagcgattctggcatgaatcgttatgcttttttatatagtcgaaggatttcgagaaaaagcctaataaaaataatttttaaacaatttgcaattatttgttgcgctttcaaaaaaaatcggttaaactaataacgttgcataataaaac

SEQ ID NO: 3213 - DNA, 1215 bp, Listeria monocytogenes 4b
  misc_feature (1)..(end): n can be any nucleotide: a,g,c or t/u
agatgcttgcaatttgaaaaaaaaagctagtaaattaaaaaagctgaatcccgataataaaacggattttcagctaattagtcgtattgtatccaaaagagcatcactttctaacatattagatgtcaaagaaagtgaagatttactgatgttttatgtattaattgcgttaaaaaacgagctttattatttggaagaattagatgtaattgttctgatggaacaggaaggtactgatctatatgtactggatattcttagtacaaaaaaactagatgtggtggaagttctaagttatctttctaccaaaaaaatcgaaacaatccatcttctttttacgccagaaaaaagcaaatacattgatgcggcttatatcattgaaacggaagatatgttgtttgtgcgtccaaatgtgcttacaagtgaaaattacttcttatttccagcgacctctcacgcttgattttcaagtttagtaagtcgttcttcgatacgttgttgatgtttgtattgtttaatgattcttttggcaagttgcaattccgcttgtgccgtcattaagtgatcctgcccatgaataagtaaaaaggaaggatgagctaccgtttctgagtcgcgaatggatactaattttgtttgccaaatatgaccttcttggaattgatcctgtgcgatttgcagatgtttatcggcttcatcaaattgatacttttccgcaaaatcaattgctttgtatgcttcttttcgtgtgtttccgccatgcaaaatgagttttacaacagcttcttctacttgaatttccatttttccaccccaacagttgatagttttctttcattgtagcaaatgcctgaacggtatgacaataaattagcaataaatcagcctatggaacgatgtgtttcatggagcttagcgtataataggcaatagaaaaggtgtggagggattcaaatggaagaacgtttatacgaacttgaagataaagtacaagaccttgagcttgaagtgcatgatttgcgtgatagaattcaactgctcgaagaaaaaccagctgctcgctctagcttacttggtcataatgtatgggtcttaattccattagtcgctattatttcttggatggttgtagaaatttttagttgaaggggacctttaatggtttcctttttatttgtaatattgttattttctgtataaaaattactatattac

SEQ ID NO: 3214 - DNA, 875 bp, Listeria monocytogenes 4b
  misc_feature (1)..(end): n can be any nucleotide: a,g,c or t/u
aaggtgtgataggtaagaatgcagcatactgactaattgtgggcaacttttctaaaagtgccttcagatttgtaactttttccgtatcattctttaattgattagtattatattgcaattctggttttccatactttgaataataaataacattatcatccaaattatctataacacgtgtttcctgtgtgactgaaagaaatttctctttatctgtccaagtgacattcatattatattctagtacagttagacattccataaatgcacgatatattgatttatctagtgaatatccgccttgaacgccaacagtatatttaggaaaggcatcacttgaattttttgcctctatttcgcatagcacaatataaattgatttatcaaaacttacatctgaaaaatgtacattaaactttgataaaaattttttcacagctacttgattgtcgaaccagcttgatatatttcgagtgatatctatttctatatctctcgcacgaaaccctccataccaccataaattaaaggaatcaatttgaagatattcaattagggcattttctatacttttttctacagtttcatgacaagcagtgcctgttgatacagcgctagttacatatcttttttcattagaaaacatttcttctgtatacatagtaacaaattgcaaaggcatccatacttttttatcagaatgaacaagagaattcattgctatccattgaatagtatcatttggagtaacataattttcgcatacttcagaagagtaatacgaatttatgtatttaagtcacatatagcagtttaatcttgcatctcttgacaatatctgctataagagagagattgttcgctccaactccacg

SEQ ID NO: 3215 - DNA, 1283 bp, Listeria monocytogenes 4b
  misc_feature (1)..(end): n can be any nucleotide: a,g,c or t/u
cacagtgtgctgaaagttataatgaataatgttacatcgtgagtaatgttacttgccggatgggtgaagcatatccgagactgacgcggccagttacaaaagggcttccgagtttggcttgaaaaaaaggaggacatcatcttgaaaaaatggttattagtagttttaactttagcactaggattgtcgctttcggcttgttccggttctaacagttctgacaaaaaagaagacacaaaaaaagaaacaacaagtgataaagacaaagtactaaattattacatggacttagtagacgttgttaatgaaaacaatggcgattacaacgcttatgtaggagcagttggcgcagatcctaaaccatctgaagcagaccttgcagctcttgcgaaaccagctagtgaatcagcacttaaagtatctgaagcacttgctagtgaaaaaacaccagaccttggtaaatccacagatgatttcaaagcagctgtgaaacaattaagtgatgcttacaaattagaagcagacgcacttaaagctagtggtcgtgatacaacaaaagcagacgaagcgatggcaaaagcggacgaagcaattgctggcgtattaaaagatgctggacttaatccttcaagcattacaactgatacagcttcctgataataaaaaagacagtttcctaatggaagctgtcttttttattatttattttttgtttgattaatttcattttgaagttgttcaaaagtcgccattaattcttgagatttaacttctagtagctctttttggtcaagttcggtatcattgaataataccggatcgccaaaacgaataatgatttttttgcgttttaaaatttctccaaatgtttttggcccatcataaacggcaggtagcattggaacttttgctttatgagcgatagttactgcaccgcgttttaaatgaaggttggtcgtttttctagttccactcgggaaaatcccaactactttaccggattttaacatccggattggggctttaatggcgcttggtccggngttatcgcgattgactggaaaggcgttaaggtgcgtcatgagccagttaaggaatttacctttgaaaagctcttgtttcgccatataatgtaccggtgttggcgatagggcgaaaccaaggtataagatttcaatccatgacgtatgcgtggacacaacaacgtatggtgcttcaatgattttgtctttgttttgtacttgaaatcgtccacccatatattaanataatgacgaggtttt

SEQ ID NO: 3216 - DNA, 933 bp, Listeria monocytogenes 4b
  misc_feature (1)..(end): n can be any nucleotide: a,g,c or t/u
gcgctggaaagacggttattttaattacggttattatcgttataatgggcttagcatttgattttataaatggatttcatgatattgcaaatgctgtggccacaagtatttcaactagagctttaaaaccgcgagtggcaattggaattgcggcagtcatgaattttctgggagccatttcgtttaccggagtagctgaatcgctcaccaaaagtattgtagatccattttcgcttaataatggagagtttgtcgttttatgcggcttaattgcggcagtgatttggaatttgatgacttggcttgttggcatgcctagtagttcctcacatgcgcttatcggtgcgatagctggggcctccatcgcatcagccagtagttttagcgtgcttaattggtcaggatttacaactattattattgcactcattatctcgccgattatcggttttacagtaggttatttgatttattcactctttaagcatctttttcacgacaaaaagcttgggaagatgaatcgacgctttcgttttatccaaattggaacagctgccgcccaagcatattcacacggcacaaatgatgcccaaaaaacgatgggaattatcacgcttgctttagttgcgagtgggcttttgaaagagtcagctggtattcctttttgggtgcaagtaagttgtgcggcatcgatggcgattggatcgtctgttggtggttatcgaatcatcaaaacagtaggaactaaaatcatgaaaatcaccccagttacaggtgttgcgtccgatttaagctcactttctgtaatcatgacagctactttgattcatttgccagtcagcactacgcaagttattgacagctcgattatgggtgtcggaacagctaaccataaaaaagaagtcaattggcgtacgggaaaaaatatggttt

SEQ ID NO: 3217 - DNA, 1076 bp, Listeria monocytogenes 4b
  misc_feature (1)..(end): n can be any nucleotide: a,g,c or t/u
gctaggaaagtcattgctaatttcgccatttgtctacattcttggtctgttaaactgccccaatccagattatttctttttaattctgctgaaatccattccattgctccatggaaaatttcacccatatctacagcttgtagctgaaaatgacctcgttcttctaattttaaaccatattgagcaaaatgttgaaattcgcaactgaaaaatttctccattctcgagacactcgcatggattgtttctccaaataagtttttggcagttttttcttgtagtggttttgttttattttcgtaatacaaactagataacacttgtttagccattctagattcttttccattttcaaaataactattataggcatcccaccatacactagatagtggataacctcgtttgtacatttgtaattgactcgtcaacaaacctaatgttgcttgcttagaacgaatataactactttgttccgcatcacttaataaacctgggtctgttaaataaaccgattcgcttaattttttaaattggccttttattttccttaaataattggattcacttagcactttaccttcttcatccgcagcagggtaactaagaaatagtttatcactaggcaaacttattattttatacgccaataaatcttcttctccaatattatttttagcagatggcttcaaattactaacctcagcacgcaaggcatccctatcttgatccgaaagaatcccgttatccttttggcgaagcggcataacaccatcgttcattccaattgcaaaaatcactttcatatctagtaatttcgcattctccatatcagataaaactacttgatctaaggaaggtggcaaaagtgaaaattcaagggcatctagcccagtggcaataatttctacaaaactatttaagtctaaagtttcttcacctaaaacttctacaaattcatccaaaagcgccgaaatagcgctccatgcttgctcgtgctcacgtgcaagttctagataaccctgctcctctgctctttgcctccatgattccaatcgttctacagcatttacttg

SEQ ID NO: 3218 - DNA, 1338 bp, Listeria monocytogenes 4b
  misc_feature (1)..(end): n can be any nucleotide: a,g,c or t/u
caaccgaaatgagcccagaagctaatcagcataatgggcacgctgcgcttgtcaaagcgattgaaaaacgaaataaagaacaagcagctcatgaagtaacagagtatattactcttttcaaacgaattgatgctaagaatggagaaaagaaatgaattcagatttaaccaataaaaaaatccttacacgctcgagtaaggtaatgcttgttttaggaattattttaattgcggcaaacttacggacaccaattacctctgtaggtccgttacttggaatgattcaatcagatttacatttaaccaatacgatggctggattacttacaacaattccgctacttgcatttgcaggactatccccgttcgtttctaagctaagtcgagcacttggtatagaggtattaatttttgtagcactattgacacttgtacttggtagcttacttcgaccttttggtggcgaactcaatttatttgctggaacgtttatgattggtcttgctattgctgtcggaaatgttattttgccaagtttgataaaaaaagaatttccatttaaattgggtctaatgactggagtttattccatttcgatgaatttgtgtgcagcgattgcagctggcttaacggttccaattgctatgaacaatcgctttagctggcatggaagtatggttttctgggcaattcttggaatcgttgctttagtcatttggcttccacagttaaaatataatcaacgctcgacggaaaaaattgcaactcacttggttacaacttcggtttggaagtctccgcttgcgtggaaaatttctttatttatgggttcgcagtcagcaattttttatatttcgattgcctggttaccaaatattttggcggaccaaggattatctagtacttctagtggcttaatgctctccttaatgcagtttgcggttatgccgattacgtttattattcctattgttgccggacgaatgaaaaatcagcaattactagttggaatttctattttattctttttaattgggatttttggcattatgtttgcttctggtagcgtgcttattttatcgattgctatcattgtatacggaattggttcggggatgtcatttagtttgtcgatgatgttctttaatttgcgaacaacaagcgctaccgaatcagcggatctctctggaatggcgcaatctatcggttacttgtttgccgcttcaggtccgatattatttggtaccctgcatgatgcgcttggtagctggcaaccaaccttatatgttttagtcggtattaccatgcttatgttatactgcggcctagatgctggaca

SEQ ID NO: 3219 - DNA, 1074 bp, Listeria monocytogenes 4b
  misc_feature (1)..(end): n can be any nucleotide: a,g,c or t/u
agggacttgtgccactagtctatgcctgagcgccgaactgtgctggaaagattgttttttctactgaattttagtagtaacttgatgcgtatttggtgtcacaatgactggtttatttactacagggtcaactggatcaaccggatttactgggtcaaccgggtcaactggattgaccggatcaactataggtgttggggtaacggtatcttttttataaatataatcaacggtttgcggggtatcagtgaaagtaccagttgcattttttggtgtggtttctagagtgtacccgctaatttttttacttgtagattggtaattactatcgatagttcccgtcaatgtgtctgattctgcgagtttatttccatcgctatcaagatagttgaccgttatgttcgctccggctacaggtgccggagttgctacatgaacggtgacatttacagtatttgagacgttgccagctttatcggttgcttgaacattgaccgagtaatcaccactcactgctagattaactatggaagtaaaattgcttgtaagactaatagtggagtcataattatcagtaacgctagcattaatgtctgttaaaaattgctcttcggtaacgttgcttccaagattatacgtaacctctgttttatctgctttgacaactggtgcgctaatatcttttggttttaaagagccagtagaggtagatttgttaccagctttgtcttcgcttgtagctgttgcggtcgcaactaaagaatcgatttttgcttccccgccttcacctgaataagaagttttccagtcgaactttacttttgctttggataaactatcccaacttgttactttgtcgaatttaaaagtaacagtgttagtggaattgtcaaagctagttgtcccaacttggtttgtaatgtcttccccaccaacagaaacctgcaagcccgtatagttcatgccagttggtagggctaattttatttccagtttatagtcttcctgggtttgattcgttaaagttggaaatgtaagagtggatgtgtatttatatgggacattctcattggt

SEQ ID NO: 3220 - DNA, 1465 bp, Listeria monocytogenes 4b
  misc_feature (1)..(end): n can be any nucleotide: a,g,c or t/u
aagtcatgttcgtcaatcgttggacttaaacgaacttctttcatcacgatgactttttggttcttacgggcttctttatctttcttctgttgttcaaaacggaatttaccgtagtccatgatacgagctactggcggtttcgctgttggagcaacaagcactagatcaagattagccttttcagcaatttgaagcgcatcgattttactcttcacgcctaattgttcaccgtcttggtcgatcaatcttacttcacgtgcacgaatcccatcgtttaccaacatgtctttgctaatggtgagccacctccacttaattttgttacaacaagatagaaaatagctgttcaaatctgcggcctgctaactcattcgttcggaggccataaaaaaacgggctgcttttcagcaatcccgcacattcaaaatcgcgtaagttacgcgacgaaagtttgaattttttgcctgaaaacgttcgtgttaacgaggcgagaagcgggttgcttcttctttcttgtttaataaccttacttactatatcatatgggatttttggtgtcaaggtgaattgtaaataaaatagtttctttacctctgggcaatcttatacgaataaacgttctttctgtcaaaaggcagttaaaactttcatattgaaaaagctctcgtgactatacgagagctaaaagtatacagtgtgcatatccattcaaaacatcaaacatgtatgcataagtcctaattctgaataggttgtataactgttccatcaaatatagcctcagtctccccaacgtttatatattcactaaacttatagcttacttcatttgtataaacaggcaattcccacaggacacaaccatctacataattccctccattactgatgtaatatggagatatccatcttccatctgggtctttgacagtatttgttatatacaattctggttggtatcttactggttcattcacacatttctgaccagttaaatctatccagttaactttcttcaatctagttagtccacctgtatttgttatttcattaccatgcaaatctaatacctctagtttagataaaaagccaagcatcacaatactttttagcttattattacgaatagataagatttctagatttttcaaatgaataagcgagtcagtatctcggagttcgttgttatctacaaacaaacgagataaacaagcacttggaattccgtttaaatttttcagtctatttctattcatagatagctcttctaatttagttagatcatttaaaggactaaggtcacttatttgattgtgggatagatgaagttcttttaaattagtgaaaaattgcattccggcaagagatttaatgttgctattatctccattgaaattttgtaccccagatagttccttttgtgatacaaggtctgtaacactttgctttcctaaattttgtttca

SEQ ID NO: 3221 - DNA, 1603 bp, Listeria monocytogenes 4b
  misc_feature (1)..(end): n can be any nucleotide: a,g,c or t/u
gagtttgttgcaatgatggaacaatacaatttaaaatctaacagcatcacaatacctgaacataccattctaaatgatctagttactgaaaatcgggattgtgtgtatttacttaaatctggtatattggccggatatattgatttcgacaatgataaaatttattctattttctctatctaattttttcatgggatattatacgattttcgataatgcatcccttgttttaacgtatcaaacactaactgagtgcgaattgattatctacaagaagaaagatatcgaatactcgctctctctcttccctgaaaactttagcttccaatacacaattatgagaactatcgccaaacatggttactacaaatcacttttacaatatcgcgataaaaaagatcaattggcttttgtatttgaaatgcttgtcaaaatcctcgatatcccagtggaagacggcgtcgcagtactaccaaaatctattagtgcgacagtcattaaaaactactgtaccctgtcgaaagccttcttctattctcaacttaaagaattaaaagaagccgggattatttcaaaagtaaaactgcaatggcgtattaacatggaagctctttcagaaaaaaacaatagcataaactaagaaaaaggatgcagttttatgagctgcatcctttttttatttaatcgctaaagtgaaaatactaacttcttgttcttttccgccataattagcttgtttggtttcttctttcgtgtagccaaggtattcaaagaatccacgccctttttcattctcagctaaaactcctaaggctaatgaatctgccccgccgtcattcgcccactctttgatcgtttgatgaagtacttttccaaggccgttatgacgagcatctggcgttaaaagaagtaatccgataaaccagcgcccttttcgcggatagtcagaaacaatatctactaagccgattggtttttcattttcatccaatacagctagtacaaacttatcgaatcttgttttcccgtttggaatttctgtgataatttttaatgcatcacttttcgatgcaggcttatcttgttccattaaataataatcttcggatgccgcgcaaacagcttctgcaagttctacatctttttcatttaaaaatttcacatgataattacgtttcattatttcactcttttctttatcaagtttccaagtcaatcatgccataaattccctgttgtttcaatagatagccagaaatccatctgaatttatgctatactagaatgagtttatgatggaaaaggagctagtatattgtataaattaatcgcgattgatattgatggaacactactgacagatgatcataaggttacggacgaagtaaaagaagccattcgccaagcaaaactaaaaggcgtaaaagtggttctttgtactggacgtccgcttgttggtgtagaaaattatctaactgaccttgaattacgtgaggaaggcgattacgttattagttttaacggcgcattcgttcaagatacgtttacaaaagaagttatttctcacttaacgcttggcattgacgatttaaaagaaatttat

SEQ ID NO: 3222 - DNA, 1959 bp, Listeria monocytogenes 4b
  misc_feature (1)..(end): n can be any nucleotide: a,g,c or t/u
gtagcaaaaagtgctcgagctggagacgaaatggcgacggaacttatgggtaaaatgggtgaatatttaggatacgggattcgaaatattattaataccttcaatccggaaaaagttatcattgtcggtgaaggcttgcaccatagagacttattcttaactaaaattgatgaaattgcttcacaaaactttttttcaggggctggctttgaaacggaaattactacaacttctttagaggatcctgcatggttacaaggtgcggctttactagtcattcaccaattattccaagtgccaatctatgaagaagaacaaacgttactacgttaaaaagaacataaactatttcaggaggttatttttacatggttggtatgactagaaagaaaacactcttttggctatgcatattcttgctacccaatttactaggttttctcatttttattgcaatcccaatccttggctcgcttggtattagttttaccgattgggacttagtgagtactattcactttactggatttgaaaattacaaaaggctatttaatgacccagagttttggaaatcgtttagaaatacaatcacgttcatcatcggttatttgcctagtgtaatgattcttggcctagcgtgtgccttgatgttgaaccaaaaaatcaaactaagaccatttttccgagcagtgtacttcttacccgtaatcacttcatgggtagctgtttcactcgtttggaaatggctgttcaatccttcatacggtttgatcaattacttcttatctttaattggtattgcagggcccaactggttaacagatccacaaacggcgatgattgcagttattattactagtgcgtggaaagatattggtttcgttatggtactattccttggtggattgcaaaatatttcaccatcgtattacgaagctgccaatatggacggagcatcaaaacttcgccaattattctctattactatcccgcttcttactcctactacattctttgtgacgataatttcgcttatcaactcattccaggtgtttgaccaagtgatgattatgacagaaggtggtccaagtggagcgacaatgaccctagtccaaaatatttacaaccatgcatttagatacttcgaaatgggctatgcttccgcgatgagttggatattgtttattgttattttcatcattacaattattcaaaataaacttcaaaaaaggtggtccaattactaatgaaaacagaaaaaagtggttcaccaaaatggcaactatttaaaaatattcttacctatacaatcatctgtcttggtggaattatcatgcttatgccgtttgtttggatggtatcaactgcattcaaaacaggcgcagcgaacatggtattaccgccgcaatttattcctaaagaaccgacaactgcgaacttcactcaagtatttgaaatgttcccaatgttgcgatttttagttaactccgtggtcgttgcagttgtaacgacacttggtcaaatgctgttttgttcaatggcagcgtatgcttttgccagaattcctttctggggtcgcgataaattatttttactttacttagcaacaatgatggtgccagctcaagttacaatgattccgcagtttatcttgatgaaacaatttggctggttggattcgtatgctggtttgattgtacccgcactattcagcgtttttgggacattcttattacgtcaagcattcatgggaattccgaaagagctagaagaagctgcattcatggacggtgccaatcattttactattttccgaaaagttatcttaccacttgcaaaacctacttttgcgacactcggaattntaacttttatgcaatcttggaacagttatttatggccattaatcgtgacaagttcacaagaaatggcaactttacctttaggattatctctttt

SEQ ID NO: 3223 - DNA, 1810 bp, Listeria monocytogenes 4b
  misc_feature (1)..(end): n can be any nucleotide: a,g,c or t/u
tcgtccagcagtgtgctggaaagtattaattaaaccaaccattaacccagacaacataatagccgaacgtctactataatcgcgtaacacaacaacactcgtcgcgccactcaataaaataaaaatagttatgccgcttgtagcatcattttgaaatgttaacaaactagttacagcaataaaaatgacgcttaaaaaggcatatttctcattgagtaaaattttgagtatcatcggggcaaaggcggctgggaataagaaagcaatattcgcgatattttgcgtttctaaaaataaaataattaataacataaacaaagaaacaagataaaccgaagaaaaaataagcatcgtctgcatttttttcgctttaggttgtgtttgttttttcgtgtaaaggaatagaattgctgctaaagcaataatgaaaatcgcaaatccagcgtattgttttacaggcattttttgatcaagtaaatgtagcatttttagctgacgatatgtttctctatctacaatttggccttcttgaacaataacttgcccttgtaagattttcacaggaacaacggattgcgcagcttctttacgtcgtgcatcggtctgctcttcatcgtaaacttcattcggtacgatagcataggaaactaaggcttttgagacatttttgtagtaagcgggtatcgctgaaagttcaatatcatcacgagctctaatttttacagaattcaagttttcatctcggattttattttccatggatttttcaacttctgttgtaaccacgtcttccatgacattaaaatctttacttttcgcttcgattaaagtagtgaaaacttcgtcagatatgttagaagttattttttcagatacgttactagataatttgtcttttaagttttttaatttatcttcagttgatgttggcgcaggagcaggcttattctctttttttgctttctctttattcttggtatctttttcttgcgcttctgcgtttacttcatttacataggcaaataaactttggataagtgctactcggttttgaccagtttcgcgattgtagacatacacatcttctacagcatcgcttgctttggttctttcttcttttgttttttctgtatcttccaccgtttgaggtgaacgaattgttttttcagccacctggaatagtttaacattgtaagattccggtttcgtcatttggcaaacgagaaaataagctacaactgcaaagcaaacaaggagcagcggaaaaaggtatttctttccactttcgatgtaccaatctctccatttcttggctagtttcacatctttgtctcctctctaattttgtttcccttcataagctttaataatttcagcaacgagtgggtgtctgactacatcatgatgttcaaagtaaacaaaaccgatatcttttacatcttttaaaacttgttctgcattgacaagaccgctagttgcaccttttggtaagtcaatttgtgtcatatctccattgacaatcattttggagtcataaccaagtcgtgttaaaaacattttcatttgggcaatggtcgtattctgcgcctcgtctaaaataacaaaggcatgatcaagtgtacgtccacgcatataagccagaggagctatttcaatgacgcctcggtccattaaccttgttgtatgctctgtaccaaaaatgtcatataancgcgtcgtacacagggcgtagataaggatctactttttcttttagatctccaggcanaaaacctaaactttcgccagcttcacggcaggtcttgttaaa

SEQ ID NO: 3224 - DNA, 1495 bp, Listeria monocytogenes 4b
  misc_feature (1)..(end): n can be any nucleotide: a,g,c or t/u
atccactactaataacaattctgaatacacagttgttgcaggagatacacttggacatatcgctgttgataaaggtgtaacagttaatcaacttaaatcgtggaataatctttcttcagatttaatattagtaggtcaaaaattatctattggtaataaagcttcagcaagtgaaagtaatgcttcagaaaacaattcaacagcaaataattcagccaataataaagtaacagaacaaccgaaagaagaaaaggcggctccaacaactcaaaaatcaacttcttctaatgaagcatcttcaaacagttcttcagcacaaggtaatgtttcaaaagagttaacggtaactgcgacagcatatagtaaagctgaacctggcatgggccacatgacagcgacagggattgatttaaatgataattcaagagtaattgcagttgatccatctgttattcctttaggttcaaaagtttatgttgaaggatacggacaagcaattgcagctgatactggcggtgcaattaaaggtaataaaattgatgtacatttaaactcagtacaagaagctaacaactggggcgtaaaacaagttaaagtacaaattttagattaattcattccatatagaaagactgtgaatggcgtaatgctatttgcagtcttttttatagattaaaaataggaagcatccttgttttatgataaacttatacataataaagttttttaggagatacatatgaaaaagaaggaaatttcaattttaaatatacctttctataatacgacgcaagcaggatttgtggaggagctatacatggccgcgaagaacggggagcgtcggtttgttgtaacggctaatccagaaattgttatgcatgctcgtactgataaggagttcgaagcaatattagggcaagctgattatattgtacccgatggtattgggattataatggcttcagaaaaacttggagagcctttaaaggaacgggttactggttatgacacgatggttggtctattaaataagccactaagttgttattttttaggagcaaaaccggaaattagtgaggttgtagaggccaaagtgcgggaaaaatttccacaggcagttgtttgtggtgttcatcatggttactttgatgtattagaaagtgaagcaattgctaaggaaatactcgtagcacaaccagatgtgatttttgtcgctctaggttcacctgctcaagaaaaatggattttgtctcagattgctaattttactaaaggcatttttattggtgtaggtggaagttttgatgtcttaacagatagtgtaaagcgcgcgccaaaaatatggataaaattaaggttagaatgggtatacaggctcctttctaatccttcaagatggagacgtttttttgcaatacctgaatttatgcttgttattagaaaagagcgcaagcgtgtgaaaaagggtgagtaaatgtattttcaagaagcgaga

SEQ ID NO: 3225 - DNA, 1008 bp, Listeria monocytogenes 4b
  misc_feature (1)..(end): n can be any nucleotide: a,g,c or t/u
ggtttctgtgtacgcggtgtactggaaactcacgtcgatatggcaacgaatggtcatattcctatcggcttgattagcggtgaggtagtagcccgcagaaatatcaaagctggcacatttattactgacgaagacgtttcattagatgaatccactactgtttggaaacttagaaaactgcaagatgaaacatttaataaataatttcaacttggtgggaagtgatttgtcttcccaccctctaaggaggaaaagtaaatgaatattgtccttattgcttccctcattttcatcgctcagacaggtcttgcttttttccaagtgaggtattatcagcatcatatgaacaaagttgcggataaatatgctgggaaaactggttattatctttattccgaaatggaacgactcaaatttcgcacaagtgctgtagccattctggtagtgaatgaaaaccgagttgtacatgaatgccaaattttaaccggaaagactgtttttgcaaagttcaagactttcaccaactatcatcataaagatttatccgaaatattgacggatcttagtagtaaaaataagaatacaatccaagaaaaagcaattattaaaacagtcaacagttgcatgaaagcgctttaaataactaaaaaggagtgtttcctagtgaattatattgaatggtttggaacaaactttatcggcctatttgaggctggcggcaaacagtttgtgagttttatgacaggaattgtccctcttttaattgtccttttaacctttacttactcgattatcgcctttatcggggaggagcgagtcaaccgagcaatccaattttcagccaagaacatgattttgcgctataccttaatgcccgttttatccgtactgatgctaacaaatccaatggcttatacatttggtcgttttgttaaagagcatcagaaaccagctttttatgactccgtttgtatcgtttttgcacccagttacaggattatttccata

SEQ ID NO: 3226 - DNA, 1375 bp, Listeria monocytogenes 4b
  misc_feature (1)..(end): n can be any nucleotide: a,g,c or t/u
ttccgtttgagtttagtggaaatggttacgtgaagagccaaagtgtatctgcgggtagcgtaattaatagtgaaacgaaaatgaaaataactctcgccccaccagaagaaataagtgcatttaatcaaaatcacgatcaagatacagcagaaaaaaataaaaaagcaactgacatccaagagaatgccggtatcggtgatttgctcaattaataataggaagatagaagtatgtcagctttacaaagtggcatacttctaactttaaatgcaatctgtgtcttttgtcgtggtagatatagtttgttgtttttgctaagatagaaaaggattctttttggttttagcaaaaataacagaaagaataagtttgaggagatggcaagaatgaagttaaatgaactaatgcaagctatcccggtttttactggcgaggcaagtgaaacaattgaaattagccatatcgcccaagatagtagaaaagtaaaaccagggacgttgtttatttgtatagatggagaattggtggatggacatcaatttgcatcacgtgcagtagaactaggagcggtagcaattatcgcggaaaaacaattagatgtatcgattcctgtcatttatgtaagagattcaaaacgtgctatggcgatgttagccgattacttttatggatctccaacccaagcattaaagctcgttgggattactgggacaaatgggaagacgaccgtgagccacttagtggaacaaattgtgcgcgaaaatggcgagcaaacaggtttgattggcacgatgtatcgcaaaattggcgaccaaattttagaaacaaaaaatacaacgccagatagcctcactttacaagaaacattccgggacatgttacttagtggagtgagcacagctgtgatggaagtatcctcgcatgcactcgttcaaggtcgcgtatatggttcagattacgatgttgctgtatttatgaatttgtctcaagatcatttggattatcatcatacaatggaagaatacgccaatgcaaaaagcttattgtttgcgcaactaggcaacagctaccatacaagtaacccaaaaattgctgtgttaaacgcggatgacgaggaaagcgtgcgtatgcaaaaagcaacagctgctcatgtaatcacttttgggataaaacaacaagctgacttcaaagcaagtaatatcagaattactagccatggttctacatttgatttacggacaccaattggtaattttacattgaaaataaaaatgattggaaactttagtgtttataacgtattggctgcgattgcaactagctttgcgctacatatccctatggaaaaagcaattaaaacagtggaaagcatacc

SEQ ID NO: 3227 - DNA, 1575 bp, Listeria monocytogenes 4b
  misc_feature (1)..(end): n can be any nucleotide: a,g,c or t/u
ttggcatgctgtaacgttccacacgtgctggtagatcttgaattttaccgtcatctaactctttataatgggttccttcaattcctttatcaactaaattacgtaaatattcatccgtgttaagtaaatcaaggaatttcactgcttcttccgggtgttggctcgtaacagaaacagcttgaatcgcaccagttacagagttatttttgatgataggagtttcagcaattggctgtgtgactactttatatttgccgcctgtatttttatcccaaatattttctgcatatggttggtatttttcgattcgcacaaaccagttttctttatcgtatgaccacggatctgtggaggttgcgatatcttttgtgacatatcctttttggtagaagctatgaagcgattttaggatatctaatgtttcgggttgctcatagaagttgacgattttgccagtgtcttcatattgatttactgcaaaaggaagaggtactgcattatcaatcaaatagtcatatgggaaagctggcttaaagtctttgttcccgccgattggtgtgatacttggttcgttttctttaattgtttttaacattggttctaaatcgctaaagttttttactttcgttacgtccattttatatttatcgacaagatttttgttaaaaacgtatacttgttgctcgccgacttctttgttcgaaggaacaccgtaaatgtttccgtcaatggttgcaccttcccaaagtacatcatttaactcggctttcatattcttgccttctttatctagatatttatttaatggcaagaatgcgcctttttgtgagtaagaaacgaattctcccgctgcagagtaagcaatatcaaagttttctccggagttaataacggtttgcatccgtttaccgtagtcgccccagtcaatttgtgtcatttctactttgacgccaattttttcttctgtatatttatttacttctttcattacttcttccgtgtctttttgtggcgttccaatcatgtaccatttcagtgtcggaacttcatttgcgtctgccttctcatcgcttccgcacgcgcttaaacctagtagcaagcagagtgatgcgatgattactccccatttcttcttcattaaattccctccatcttttttattcttttacgccgccaattgtgagtccactaataaagtatttttggaaaaacggataggtgattgcgattggtaatgtcgaaataacaaccatcgccatttttgcaccgtcttgtggtatggacttaaacgcgccggcagtataagcaatttcagagttttgtcgcatgaattctaagttgttttcaattttcataagtagcgattgcagcggcactaaatccggattatcaatataaagtgacgcttggaaccagccattccacgctcctaccgcccacaaaagcccgattgccgccagcccctgcccaacaaagtggcacacccatctgctaaagatccgcgacctcccaccccccccaatcccaggcctcccagcctcggcctcgccatacacaccctccacacccccccca

SEQ ID NO: 3228 - DNA, 996 bp, Listeria monocytogenes 4b; identical to SEQ ID NO: 1849
  misc_feature (1)..(end): n can be any nucleotide: a,g,c or t/u

SEQ ID NO: 3229 - DNA, 1287 bp, Listeria monocytogenes 4b
  misc_feature (1)..(end): n can be any nucleotide: a,g,c or t/u
ttggcaattactgttgttaacgcagataattctttataatcagaagtttttacatctaccaattggggttggtcttgaacatttatcaattttatagccaaattttgttgtatatttagtgtcatcaaattgggtagattttctacatccgttttgtctaatacaacttcttctagttggttttttgacagatctaacgtttttaaattaggcagattttggatgttatcgaatacagtatctgttaattcattttctcctaatggcagatcttcaatggccaaatcagtaacttttagctcattaatactgttcctctcaaggtttacttttcttaccttagggagattgactaattcaactttcgttaaacttgccacctggctaaagtaaacattttgcataatgggataacctaaattaactaattctggattatttttggcaattactgttgttaacgcagataattctttataatcagaagtttttacatctaccaattggggttggtcttgaacatttatcaattttatagccaaattttgttgtatatttagtgtcatcaaattgggtagattttctacatccgttttgtctaatacaacttcttctagttggttttttgacagatctaacgtttttaaattaggcagattttggatgttatcgaatacagtatctgttaattcattttctcctaatggcagatcttcaatggccaaatcagtaacttttagctcattaatactgttcctctcaaggtttacttttcttaccttagggagattgactaattcaactttcgttaaacttgctacttggctaaagtagacatttcggatagtgtattggcctaaattgactaattctggattgtttttggcaattaccgttgttaacttgcgtaatcctgtataaccggatgtctttacatctaccaattggggttgatcttggatatcgatagtattaagatcaggattattttcaatatcaatggttgttagtttcgggagttgattttgcgcatttaagataagactgctaatttgattgttttttaccgataggcttactaaattaggtaattgatctattggagaaatgtctgttacttgattattattcaagcttatacttgtcacattgactagcaaatcgattcctgttaatacgctgattcctttattataaccattgagagatttgattttattcaggtctgcttgtgttactagctgagttgtattctctgaccccgttgcttctttagcaactacttta

SEQ ID NO: 3230 - DNA, 2008 bp, Listeria monocytogenes 4b; identical to SEQ ID NO: 1858
  misc_feature (1)..(end): n can be any nucleotide: a,g,c or t/u

SEQ ID NO: 3231 - DNA, 1216 bp, Listeria monocytogenes 4b
  misc_feature (1)..(end): n can be any nucleotide: a,g,c or t/u
taaatctggccccgatgtagtccaaatgggaactacttggatgcctgaatttgtcgaagctggcgcactacttgatattacaaaagatgtcgaaaaaagtaaaaatatgaattctgatctatttttcccaggttcagtaaaaactactcaatttgacgggaaaacttacggtgttccgtggtatgcagaaactcgcgtattattctaccgtaccgatttactgaaaaaagttggttataatgaagctccaaaaacatgggatgaactatccgacgctgcacttaaactttctaaacgtggcaaagatatgtacggctttgccattgatccaaacgaacaaacgactggtttcattttcggacgtcaaaacggctcccctcttttcgataaagatggtcaaccagtattcaataaaaaacctttcgtacacactgttagttatttagatagtttcattaaaaatggttccgctccagatactgatcttggtttagatgcttctcaaagcttcggcggcgacggtattgtgccaatgttcatgagtggtccttggatggttaatacactgaaagacactgcccctgacattgacggaaaatgggctactgcagtattacctaaaaaagaaaataacgaatcaagccttggtggcgctaacctttccattttcaaatatagtgataagaaagatgatgctctaaaattcatggactacatgagtcaacctgatgtgcaattatcttggttaaaagatacaaactccatgccagctcgtatggatgcttgggaagatgatatgctgaaaaatgacccttactacaaagtattcggcgaacaaatgaaaacagctgaaccaatgccacttatcccacaatttgaggaaatcgctcaattatatggaaaatcttgggaacaaatttatcgtggtggtgcagatgtacaaacacaaatggatactttcaacgatcaagtagaagcacttcttaaaaaataacgaataaaaagggcaaatgatttattctgccatttgcccttttagaatggactggatgttatgaaacaatttttaaataaaaatacaccctatttgtttatatcgccagcactgtttttacttcttctgttttccctacttccgattttgcttgcttttgtcattagttttacggacattgatttagtcgggcttgccgattactctaaaattaactttgta

SEQ ID NO: 3232 - DNA, 1271 bp, Listeria monocytogenes 4b
  misc_feature (1)..(end): n can be any nucleotide: a,g,c or t/u
aaatttcaccattagcgaagaaaaacaaagaagatgaccgttttactgaccgttttgaattatttatcgttggtcgtgaacatgcaaatgcattctcggaattaaacgatccaattgatcaaagagagcgttttgaagcgcaaatgaaagaacgtgagcaaggtaatgatgaagcgcacggaatggatgcagatttccttgaagctttagaatacgggctaccgccaactggtggacttggaataggtatcgatcgtctagtaatgctattaacagatgccccgtctattcgtgatatcctattattcccaactatgaaacaccgcgactaattaaaaatccagagctgattatatcggttctggattttgtttttttctcagaaaaaaacaaatttgccaaagagaaactttttctcaaaatatgcttgcaatccctataaaaacatgatatatttataaacgttccagttaaacaaacgcaaaatgctcatcaagaaattaaatttttttgaaaaaacatcttgactttgttgactagatagagtaagatataagagttgctgctaaaggcaacgaagaagaaaaagtgacctttgaaaactgaacaaagaagaagacgaaaagcaatgagacgtaaagtctcactggtaatcgcagggcagaaaacagaaagctgttttcaacaaaacaaactagtaatttaattgctagcgaagtcaatttgacgcaaggaatcttattcacggtgttgaataagtattcaaattcaatttatattttaaagagagtttgatcctggctcaggacgaacgctggcggcgtgcctaatacatgcaagtcgaacgaacggaggaagagcttgctcttccaaagttagtggcggacgggtgagtaacacgtgggcaacctgcctgtaagttggggataactccgggaaaccggggctaataccgaatgataaagtgtggcgcatgccacgcttttgaaagatggtttcggctatcgcttacagatgggcccgcggtgcattagctagttggtagggtaatggcctaccaaggcaacgatgcatagccgacctgagagggtgatcggccacactgggactgagacacggcccagactcctacgggaggcagcagtagggaatcttccgcaatggacgaaagtctgacggagcaacgccgcgtgtatgaagaaggttttcggatcgtaaagtactgttgttagagaagacaaggataagagtaactgcttgtcccttgacgg

SEQ ID NO: 3233 - DNA, 752 bp, Listeria monocytogenes 4b; identical to SEQ ID NO: 1862
  misc_feature (1)..(end): n can be any nucleotide: a,g,c or t/u

SEQ ID NO: 3234 - DNA, 711 bp, Listeria monocytogenes 4b
  misc_feature (1)..(end): n can be any nucleotide: a,g,c or t/u
atgttgcgaaaaagtcgatggttgctcatattattactattgatagtattagtggcattttcagcatgcgtggacagcgggaatggagatgtttccggtgtgccggctaaaagggaaaaacagcattttcctccaaatgatacgaaaaaaggatggatagaacttcttgccacggatggaatttcaagtcaaggtgatctgccttgtgtttatgaagaggcggaatctgtagaaaaattggaagttcatatgaaagaattaagtacggtgagtttgacctatatttatattgatggctacatcgtccaaatggaacaaggtggcggcgaactttcctttcaaattcaattaagtaaagcagaattaaaaagaggaattcacgaattaacggccgtgcaatatcaagaaaataatcctgatacaaacaaagtggagcttttaaaacgtgctaattatgaagtgaaataaaaaagactaataaacaattcataaccatatttttaaagagaatgtgaaaaatgacattctttttttgtgctattaatacttacaaaagaaagatgacgatattgtaagtagcttttcgcttttaaaagaattaaaatactagtgtttagggtatatattttaagaacaatgattcctaaattgtttggagtctttccagcacagtggcggccgctcaggcatggggctaggtggccatcaggc

SEQ ID NO: 3235 - DNA, 2062 bp, Listeria monocytogenes 4b
  misc_feature (1)..(end): n can be any nucleotide: a,g,c or t/u
ggttggtatactccgccgctaaatgagactctgcaagcgccattccagccgccataccaatccttgtcccaagcgggccactcgttgcatcgactccagcagtccatccaaattcagggtgtcctggtgtcaaactatctaattgacggaactgttttaagtcttccatttttacatcataaccaaataaatgaagcatgctataaagtagcgcagacccgtgtcctgctgataaaacaaagcgatcgcggttaaaccattctgggttggctgggttgaatactaaatgtttcgcaaatagcatatacgccattggagctgctcccatcggcattcctgggtgtcctgatcaccaaaaacatatatggtctatgaaatgaacattaacccatctggagtagaagacacactaaattcttcgttcacagatacacttccaaaaggattgaaaatgcttgaatatgatattgctggtttaaattctagcaataaacacatttatggttttacaacgaacaaatttgaaggtacaccgaaattcacaaatgcagacggacaagatgttattgtttatcaaaaaggcttatattccgagaaacaagtttgtattgccaaccctactttaaatgacgttggagtaaggtatttcggaaataacgcggataaaatgggtgtaactggttccgtaacaaaagatgcacgtacactaacccttaattttggacaaccggcagctgacccgatgtatagtgaaacaaaagcagcttataaagtgtatatgattgtggtaattgatccagacgaaattgactacagcagtatcatgcaaaataaagcaacatacacttacaacgataaagttattacttcttatgaaaatagcgaaatgtactgggatgctggtggcggtacggcctatgcgaaaaaatatgttttagataataaaacaaatgcatatttaagtggaagccaatataatgtagctactcctgatgcagacggtaatttgtcagttggctataaaattcgagtaagaagtgcctatgaatttgataaatcatctataaacattggagatattattgctgcagataattttaaatctatctctaatgtagaagtaaatggttatgaggcaagtccaaacacgggcttccaaattgacggggaacttgaaaatcctgtaccacttgctgcggataagtatgcggtagaagcaaaagcaactgcaaacacattagatatcacaaacccagttgacattccacaaatgcaactatataacgttcttttcaaagtgaattatcaaaaagtgaaatatggcgcgaaactagttaaccaagcagcagggtcagaagttgcaactgttgttccattaaacttaaatcttctaaaacaagatgatataagcaaaacagcattgacaggctatgaattcaaagcttattatgcagatgaaaatggaaaagcagatttaacgaaaccggtcaaagatacaaatagtaatgaaattgttatgacagactcatccggcgcagcaaatttcatcccgacaggttataaaacatcttctaaaaatcaagaatggaaagtagttcttgttgaaacaaagacaccaactggttatgaatcaaatgaaaataaagagtatccagttacagtgaaaagcgatgcgaatggcaacttatccattccagccactacagaaacaagccttgaaatcaccaataatgatcacggagcaacaacagcgactattgacaaccatgcggatgtgaaaatgattgatgtgaatggcgcgaaaacttggactggtgacacagaagcagatcgcccagattccatcgaagtacaacttttgcaagacggtgtggcttacggtggttcaattgctgtgacaaaagcggacgactggaaatgcgaattcgaaaatgttcgcgaaacaaatgcacatggtaataaatccacttgtggcggcggggaaaatccagggtctcactatacaagcgctgacacaggcgttgctttctaccaccacttaataaaacatcgtgcatcggtg

SEQ ID NO: 3236 - DNA, 1638 bp, Listeria monocytogenes 4b
  misc_feature (1)..(end): n can be any nucleotide: a,g,c or t/u
gcatgaatcattttctcatccctttcattacgcactacttaatatgtatgtaacttcacatattatctgtcatttgtacgttgcttcacataaatagttatttctaaaaatgagtgagtactcactcgatatgcgaaaatacgacaaaatgctctaaacacctctcattctacacgatttttttcatttgtaaagaatttcgcggagcattttcatgccgaaaaaaagcaagcattccctaaaatagctccatttagcgaatgcttgctcagttattaattatggcgaatttttgtctttcggttggaagcttttaaaacttgataagcgatacctaaaatcaagaaccatactggtgtgacgaaaagtgcgattcttgtatctgctgcaaaaccgaggataactagtaatcctccgaagaaaattaagctaacccagttcattaaaggagataatggcattttgaatttacttttttctgcgatttctggatgtttatgacgaaaacgtaaatgcgccactaaaataacgccccaaacccagataaagcaaatcgtcgcgatacttgttactaaaataaatacttgttctggtaagaaataatttaaaaacacaccaataagtaaacatgctgtagatgtgattaacgctgttgctggaacaccattagagctcaaatgatgcatttttttcggtgcttttccttctgcagaaagagtataaagcatccggcttgtactgaaaatcccactattacaagaagacatagcagccgttaacaccacaaagttaataataccggcagctgcaggaatcccaatcatcgtaaagacgcttacgaatgggcttgtgtttggatcaatattgctccacggataaatcgacattaatacgagtagcgcaccaatataaaagattaaaatccgaatcggaatattattaatggcttttggaagtgtgcgctctggatcatccgcttctcctgcagtaaccccaacaagctcaattccaacaaaagaaaatgtcgccatttggaatgctagcaagaacccggcaattccattcgggaaaaagccaccataatctactaaattagaaaatgaagctgtacttgtgccatgtttgtaaccaataaatacgagtacaaatccaataacaattaaggcaataataacaaccactttaataatcgcaaaccaaaattcgatttcaccaaaagctttaacagttgctaagttaaacaatagaagtatcaaaacacatgcaagtgctggaatccattgcggtaagtctggcacccaaaattttacgtacatgccaactgctgtaatttctgcaatacctgtcacaatccagcagaaccaatatgtccaaccagtaataaagccagcccatggtccaataaattgctctgcgaattctgtaaaagatcctgttgttggattatgtattaataattcacccaaagctctcataacaaagaataaaatagccccaataattaagtaaactaacatgatagaaggtccggctaaatgaattgacttccctgctcctagaaaaagccctgtaccaattgctccgccaatcgcgattaactgaatgtgtctatttttcagccctctttgcaattcttct

SEQ ID NO: 3237 - DNA, 1223 bp, Listeria monocytogenes 4b
  misc_feature (1)..(end): n can be any nucleotide: a,g,c or t/u
actgagcgagagatttgtacactttattatcatctaacatttgaaaaaggaaatcgttttttcgcaagtgaaatgaaattttctatgaaggcaccttttagtgaatggaagaagaagttagctagaattattacacgccatgcctatgtaaaacgagatagagaactcgaaagacaaaaaatttgtttttattatgctaaatttaaaaaacatggacaatttatgcaaaaattatttaatgccggttattatttgcattatttaccgaaagagataggtgtggatttagaagaacaatttttagttatcacacctgctgttgaatggcaatttgatttgtgggaaaagttttttaaaggtctggagaaaggagatacttttagcgaatgctgcttttttgagagttttcaatcagttgtaacccaaattttaactatctggctttctccaaatgaaagtttgaagttaggaaaatcatatctttcttatttgattggtgaaggggtgttatctaccataccagataatcgatatcgtgtgaaacggaaaatggtttttactaatactcgagcagcacatatataatcatctgttttgcttttttagttattttggctcataataaaaacaaaatgactatggttgggggttttaatattgagtaaaacaaatgcattacctttaagagaagaagtaccagaaaatctaacttgggatttaactacgatttatccaaacgatgaagcttgggaacaagcatttacagatttgcaaaaaatcacagaagaaagcgagcaatttaaagggcgtttatcggaaagcagccagacactatatgaagcacttcaatttcgagataatgcatatgatttaattagtaacttatatgtatatgcgcatttgaaaatggaccaagatacggctaatgcgaaatatcaaggtttacatagtcgcgcaggaagcctagttacaaagctaatgtctgcactgtcttattatgatcctgaaattttagctatggacgaaagcgttttaaaacaatttttaaatgagaacaaagatttacaattatatgcgcatttactagaagagttaaatttaagccgaccgtatattttaagtgagaaagaggaggctttactagctaacgcaggtgaagtgcttggcagttcgtctaatacttttaataccttgaataatgcagatatgaagtttccaaccat

SEQ ID NO: 3238 - DNA, 1158 bp, Listeria monocytogenes 4b
  misc_feature (1)..(end): n can be any nucleotide: a,g,c or t/u
gaagaaaaagaagtggagttagcagaagctgctttactcggcgcacatgaaatcatcgcggaacaaatcagtgatgagcctagtttccgtgagtggattcgtaactttacgcgcaaatttgggatgattgaatccagagcgaaaaacgccgaagcagacgaaaaaggcgtttacgaaatgtattatgaatttaacgaaatgattggcaaagtagcaagtcaccgcatccttgcatttaaccgcggagagaaagaagacattttacgtgtacaagtccaagtagatacgacaaaaattttccaatatttatttgaaaaagttatccaaaaccgtaattctgcaacacgaccatacgtagaagaagctataatggatgcttataaacgctttatcggaccggcaattgaacgtgaaattcgcggtgaactaacagaaaaaggcgaagaacaagccatccatattttctccgagaacttgcgcaaactacttttacaaccacctttaaaaggaaaaatcattcttggggtcgatccggcttttagaacaggttgtaaattctctgtattagatcaaacggggaaagtactagaaattggcgttgtttatccacatacagcaaaagcacgccgtccggaagccaaacaaaaaattgcggagattttatccacatacaaagtggaagttatcgcaattggtaacggaacagcctcacgtgaaacagagcaatttattgtggaagtgattcgtgaatcgaaatcgaacgcttattattgtatcgtcaatgaagctggtgcgagtgtttattcagcgagtgaaactgcccgcgaagaattcccagactatcaagtagaagagcgtagcgctgtttcgattggtcgtcgtttgcaagatccgctagctgaacttgtgaaaatcgatccaaaatctgtaggcgtagggcaatatcaacatgacgtagcgcaaaaacgtttaaatgaaacactaactttcgtcgttgaaacggccgttaaccaagtgggcgtaaacgttaatacggcctcggcttctctgttacaatatgttgctggcttaaacaagacagtcgcaaataatatccgtaaatatcgcgaagaaaacggctcgttcgcttctcgcaaagagttgaaaaaagtacctcgt

SEQ ID NO: 3239 - DNA, 1289 bp, Listeria monocytogenes 4b
  misc_feature (1)..(end): n can be any nucleotide: a,g,c or t/u
actttaatcttgctcaaaataaaatcccctttctttttttagattgaattatttattaggcaaaaattcggcccatatcacttttaaaaaaagcaataacatttatcattgtacacaagttttggctcagtttcacatcatacagtttggtttgcgctattttgcacattttagaaagcgcctccatcttacaacaacagcggctgacagttttttaattttttttgtaaaaaaggaggatttttcacgaaaaaagcgcattttttggggataatttattttaaaaacagcatttttataaaatatttgttagaatagaaaaggacatttcatttaggaagggggagatgaaatggatggagaactttcaaaggatgtggaccagaagatgaatttactcaaaaagtggttcagttctattgactgggaccaattttggaatcatattatttcagtaggaataaaaatcgccattttaattgctctttattttattttccgcgtggttgggaataaaattatccgtagtttcttccgcaaatatcggcaacaacaagcagtttctgttgggcgcgcggacacgttagaaagcttgatttctaatttttacggctatgttttattcttcacttttgcgattttattattacagaactttatggatgttacagcgattattgcaagtgctggggtggcgagtttggctattgcctttggtgcgcaaggacttgttagtgacgttgtgactggattttttattttacttgaacgtcaacttgatgttggtgatacgattaccattggactagttaatggaacagtagaagcacttggacttagaacaacacaggtacgtgattttgatggcacgcttcatttcattcctaacaggcaaattatggtcgttagtaatcattcgcgcggtaatatgcgtgtgatggtggacattcaaattagtccacatgaagatccggaaaaagcaattaaaattattggtgaggtttgtgacgtagctgcaaaagaaaataaaaatatcgttgagccccctgttgtattaggtgtgcaaaacattgacgcaacaaacatgattatccgcgtagtcggtaaagcagtgaacggcgagcagtattctgttcaacgtgacttactcaaagatattcgcgaagcactcgcagaaaacgaaatcgagttaccacttaattttgtcagcaccttcggaccaaataataattaaaaagacgccaattcgctccttttgagaacgaattgacgtctttttatttactttc

SEQ ID NO: 3240 - DNA, 1730 bp, Listeria monocytogenes 4b
  misc_feature (1)..(end): n can be any nucleotide: a,g,c or t/u
gttgttgttgcgggattactgcacgatgccgttgaggatacggaaatgaccgatgccgatattcgcgcggcttttggcgctgaagtagccgatttagtagcgtctcatacagaaaataaaaccttatcttgggaagagcgaaaagcacacacaatcgaacaagtgcgcaccggaaatttagaagaaaaagcgttaatcgtggcggataagctagacaatttaacatccgtcaaatatgccttaagctcagaaggaaagtctgtctggagctattttaaacgcggctatgatctgcaaaaatggtacaaccaagggattaaaaataatatggaatacggattaaatccatctgaaatccctccattttttggtgaatatgcgcgacttgtgaagtggatttttaagaagtaaattttgtatttaaatatctgttaaattaggtatttagaattaaaattataagtttttagaaaataagtttctttttccagaaatctattgtaaaatgaaagcgttataaaacttacgagaagggaagttttttgaatggtttatggagcaattgaagcaggcggaactaagtttgttgtagcaatcggagaaaagtcagggaaaattattaagcgcgagagctacccgacaacggagccagcagaaacaatgaaagcagtcattcaattttttaaacagtatgaggatgaattaaaagcaattgggattggctcatttggaccgattgatattcggaaatcaagtgctacatacggttatatcacgcaaacaccaaaacttgcatggcgcaattatgatatcgttggtgcaatgaaaaaagaatttaatgtacctattggttttacgacggatgttaatgcagccgctttaggagaggtaagtttaggcgcggcagcaggtttggatagttgtatttatttaacgatcggaacaggaatcggtggtggagcagttgtttcaggcaaaattcttgaaggcttctcccacccagaaatgggacatattatggtgcgccgacataagcgcgatcgttttacaggcagctgcccgagtcatagcgactgtttagaggggcttgcagcaggtggagcaattgaaaaacgttggggtcaaaaagcagcagaacttgcggataatgaagaagtgtggaatttagaagcgcattatatcgctcaagctttaatgaattatacacttatcttatccccagaaagaatcgtgttaggtggaggcgtcatgaaacaacgccaacttttcccacttgttcgtcaaaaattgaaggcactcgtgaataattacgtgcaattgccggatttagatgaatatatcgttcctccaaagttagaagatgacgctggaattacaggctgtgtcttgctcgctgtggatgctgaagagtccaattaatggcgaaaaacagctctagtttatagggctgtttttcgatatactaaattgtgataaaacaaacaagaacgcaggaggaaaaagatgtccattacgaacttatttaatattaaatatccaattatccaaggtgcgatggctcaaactgccaaagctccactatgcggccgatgtatctaatgcaggcggtttatgaattatcgcttctggcggaatgactgccgacatgctacgcgaagaaatcaaaaacacaaaagttctgacagatcaaccatcggggttcnacgttatggtatgatgaccaatttgcc

SEQ ID NO: 3241 - DNA, 1036 bp, Listeria monocytogenes 4b
  misc_feature (1)..(end): n can be any nucleotide: a,g,c or t/u
catcgtccatcagtgttctggaaattgtagtggaaacccaagttgaaaaagccaattacgctggagtatcctgcttttagttgctgcaattcctagttttatcggctttatcgtaactttttacttttaaactaaaaagaagcattcccaaaatatggaaatgcttctttttttaatcttctaaagcggaaataaatgctggtaaatattctggaaggtctggtgggcgacgactcgaaataatatggccgtctgttacaacaggctcgttatgccaaatagctcccgcattcgtcatatcatctttaattcccggtgtacttgttacattcacgccttctaaaataccagccgaaacaagtacccatccagcatggcaaatttgtccaattggttttttcgccttatcaaacgcacgaaccaaatttagtacgctatcaaaacggcgtaatttgtctggggaccagccacctggaactaaaatcccatcataatcttctgcgcgaacagaatcaaaatcatagtcagaagtaacaggaactccgtacttaccgtgataaactttctttgcttcctcagccactagatgcaccgaagctcctgcctcgcgcaatctaagcactggataccaaagctctaaatcctcaaagtcttcactgacaagtgcaataacttttttaccttttaaagtcatataaatctcctcctatcctcttctacagtataacaataactagattgttattaaattattccgcctataaaagaagacaaaaaaagacgctcgaaataaacatttccagcgttgccatcatgttcgggcgtctatgcataacgggatgaggcatagacatgaactacacggccaatgagatgaatgaaaacaaataatgattttggtgtctaaacagatgtctgactagttgccattctattggaagatggatacaccanaagtcattataaccatgatagggtcttatccncatganaatcacattaataaaaatgaaactttcatcgaggtaaaactctt

SEQ ID NO: 3242 - DNA, 1437 bp, Listeria monocytogenes 4b
  misc_feature (1)..(end): n can be any nucleotide: a,g,c or t/u
aataatgcactaactaaatttaataaaatgtccaagttaagttacttaaatttagacagtaatccttctattactaacatcatgccactaaaatccattccaaatttagctactttatttgtccagttttgtggaattaatgatttccgtggaattgatacttttcctaaattagtgagtttatcggcttacggacaaaacgtaggtagaaccgttttaatcaacagctctatcaaaagctctgcattgaattttgatgaagcaaaccaaactatctttgtgccgattactttaatgactgaacgaggagtaaactttgatggctatttgttcccttttacaactaatacaagcaagttctgctagcatgtatttcactttagatgagaccaaaattgacggtagccgtttaaccattgacgataaaggaattacggtaagtggaattaccaaaagttattttgatacgattactaaaatggaatacaatgcattatacaataaccccgccggatcgtatcaaactccgccaaatttcaataattattccgtatcagggggaagctacgaccactattttgacatcgatcattcactaaccattacaaatgattcagcaataagttatggggaacaaaccactgttacagaagaacaatttttaaaagatgttcatgctgagacagatgatggaacgcctgttactagtgattttaatacggttgtagactttagtaaacccggtgtctacacggtgacattaaatgccgaaaatgctgctggtttaaaagcaacgccaacacaagtaacggtgaccatacttgcaaaaccagtcataacagcagataagagcatttcttacacgaaagattcaaccaagacagaccagcaatttttacaagatatttcagcaaaaacaagtgatggtagtaaggtaacgagtgattttgatagcgttgttgatttagccaaagtcggaacgtataaagtgactttaaatgcggtaagtgcagatggactaaatgctgacccagttattgttttagtaaatgtggtagagggaaatgaacctccgacaccacctgctcccggccctgatcccacaccagatcctacgccaaatcctaataatccaaatatcaatcccaacccagataatggacaatctgcgaactctgaaaacgcatcaaatccgtctaactcagaagtaaatgccgctttaccaaacactggcgacgcgagtcaagcaactactgtgttaattgggattatcattgccggagtagctatcctcttcttccgtcaaagaaaacatagctaaataaaaaagtcgtgactagaattttagtcgcgacttcttttttatttagttactataccgtgaaaggctcccatacctgccattacattcgttacgtcaaagccttctgcagctaa

SEQ ID NO: 3243 - DNA, 854 bp, Listeria monocytogenes 4b; identical to SEQ ID NO: 1822
  misc_feature (1)..(end): n can be any nucleotide: a,g,c or t/u

SEQ ID NO: 3244 - DNA, 1939 bp, Listeria monocytogenes 4b
  misc_feature (1)..(end): n can be any nucleotide: a,g,c or t/u
attcagaacgaagattatccagcaggcgctcgataacttagtcaaagatattacaccagcgaaatagcgaaagtaggttacgtttatgatggttcagaagaattatatgaatattattcagaatggctctgctcctacaagattatccttatgtaacttatgggggctggtaatttggcccacttactatattgcgaagggacttctatttctttttactgaacttgctttcgttagtttttcctctgtgttttatggcatcaccttaattcaaggtatggcgacattagggacagttaaccaatcgtggaattttgataagagtttaggtattatggttcgaacaccgggcgataattccatgctgatgctaatatatgggattatgacagttgttatttgtgtactatttctcttcttgtaccttgctaatattagaagcgcttgccaggtggagggcttccagcgggaaaataaaaaaatcccaacatttaaggaagacttaaagagtttgctagacaataaatttcatgtaactttactgacgatcccgatgattggggttgtggtgtttacgataatgccacttgtttatatgatttctttggcttttaccaattatgatcatgaacatttaccgccaaggaatttatttggatgggtaggatttgttaactttaaaaatgtgctaaatggtgatatttccagtacgttctttccggtgcttggatggacacttatttgggcgcttttagctactgctacttgtttcttttttggcgtattgcttgcacttcttattaatcataagggtgttaaattcaaaaagttttggcgcactatctttgttataactatggcggtacctccgtttgtgtcacttctcgtaatgcagaacttgttgcatgcagcaggaccgcttaatacgatgttacttaattggggaattatagctgagccgataccatttttgacagatgctttgctagcaaaggtatccgtcatatttgtcaatatgtggattgggattccggtaactatgttaatcgccacggggattttaatgaatctaccgaaagatcaattggaagcggcgcgaatggatggaggtaacagttttcatttatttagatacataactttccctcaaatcttaacggtgatgttgccaagtctgattcaacaatttattggaaatataaataactttaatgtgatctatctcttgactggtggaggaccttcgaatagtaacttctatggtgctggggatacggatttgctcgtgacatggctttataaattaacagtagaagctgcggattataatttagcttcggttattgggattgtaacattcattcttagcgcggcattctcgttatttgcctacacacgtacaaattcttataaagaagggagcaactgaaatgaaaagagctacagtatggcctaatctattgttgatagtgctcgggtgtatctggatattcccgattatctggattgttttgacagcttttagagcggaaagtggacaatttgtttcgtatatctttccgaaagaatatacgctagatcattttgcgtacctatttgaaaatcatgaaaattttccttttatgttatgggttaaaaatacaatgattgttgcggtgtgttcctgtttattgagcacttttataaccgtttcgatggcttatgtgttatctagacttcgctttagatttaaaaagacgatgttaaaaacagcgctagttttaaatatgtttcctgcttttatgagcatgatagcagtttactatattttgaaagcatttggattaacgcaatctctaacggcgcttgtgttaatttattcatctacagctgcattaactttttatattgcaaaaggattttttgatacaataccaaaatctttggacgaatcggcaat

SEQ ID NO: 3245 - DNA, 1400 bp, Listeria monocytogenes 4b
  misc_feature (1)..(end): n can be any nucleotide: a,g,c or t/u
atcctcaagtgtacgagcacatggaagtgtccactcgcctttcatagtcaggttagcggtaacttcttctgggtgtacaattagttccccagttacttgtacggggcttgcatcacgaacgtctatattgttctcttgaaagaacttttttaggtcagctttttcattaatcgtgaagttgctgtcacgatatttttttaattgactgatagaccatttcatcctacatcactccaagcgcaacacaaaatattatagcttttttaaaggcttttgtcaatgctttttcggggagtaaaaccgctgccttcattttatgctaaaatagattatctaaaggagggaaccgaaatgaaagcaactggaattgtggtggaatataacccttttcataatgggcataaactacatttaaataaagcgcgcgagttaactcaagcagatgtggtgattgcggtaatgagtggctcgtttgtacaacgaggcgaaccagcgattttgccaaaatgggaacgtactaggatggctctcgctgctggcgttgacatggtggttgaactccctgtctcattcgcgacacaacatgcgacgattttcgcagaagaagcagttcgtattttagatgccattcatgtggatacgctgttttttggcagtgaacatggagttgcggaagattttacattagctgcgaaaaaagtagtcgaaaacgaagcccgttttgatgaagcgattcagctggcgttagttgataagaaaacttcttatgctagagcttatacagaagcttttaaaaagttgttcggccagaacttgctggatatcacgaaacctaataacattctcggtttccactacgcccttgctgcccagaaacaaaacccgtccatttctcttcactccattcctcgtgaacatgcaggataccatgacgaggaagcaaaccatgaccaaatcgcaagcgcgaccgcgattcgaaaattaatacttgctgggaagttagaagaagctagccactatctccctgcttcttctatagctattttacgcaattatgaggggccatttttatcgtggacagattattggtcattcctgcaatatcggttaattcaagcaggctcagaagaactggaaggaattcgcggtgttagtgaaggaattcaaaaccggatgcagcaagcagcgactaaagcgcaaaacttctctgattttatagaattaaccaaaacaaagcgatacagtaatgcgcgattacaacgaacggctttacaaattttattaaatgcgaggagtcaaactagctccccttacatccgaatactcggcatgaataaaacggggcaacaatatctatcgcttcataagaaaaatatttctctccctattatcacgacggt

SEQ ID NO: 3246 - DNA, 1235 bp, Listeria monocytogenes 4b
  misc_feature (1)..(end): n can be any nucleotide: a,g,c or t/u
gcatatttacgaagaaaagataaaaatattacataagaaaaagcgccatgaatattttcttaggcgctttttctctgtttatttagttaatcgagctataacttgttgcacaagctgcgtttcttccgcagttatcactttttccgttaagttattactataaatttgggcttcatacattttcgttagtcgcgaaaattctgtcgttgttaattcagcatccactctggtgctaaaatgacgtaacgtttcactcgattcgcggacataaccataagaagcaagtaatttcataagtctatgataggttttgccaaattctggactatttctcagagaacgaagcaataaatatctacgaattctacgtctgaatataatagctagtgcgagcagtgtcacaactagtccagcaggaatccaccaaacccaagacggaatttcgaaattagaggccgctgtttctgttttaggttcttcttttttcggtgtttcacctgtggagctgctaccgttatcttgttctggtgttttatcggctgtatttggtgtttctggcgtactcgtactatcattaggtgtttcaggtttatttgctgtttcagttgtgggttcttggaagttttcgggattggagaatgttgctgttggctcaaatggaacccatccagttcctgggaaaaacacttccggccaagaatgtgcattgttatttgtgattgtataagtcgttttagcatcattttcttttttctcaccctcaccaggtgtgtagcccttggcccatcttgctggaatcccaagcgatcgaagcatgactaccatggaagtagaaaaattgtcacaatacccaatttgcgtttcaaataaaaattgatcgacataatcggctcccctaggcgtttctttcgcatcctctgtactataagtaaaggtgccagaagcgcttaaatagcgttcgattgctttcgttttgtcataaattgaatcagcgtcttttgttactttattggcaagttttgtcacccggtctggtaagtcttttggtgtttgggtatattgggaaacaaaagcgttagacagtgtgcctaagtcggcattctgcattttgtccatattccacaccgctgtttcttatcggacccggtactctttcattgttccactcgtccactctttccatcggtgactttgttcttcctgatctgctgcgcccttgaccctataccacacaa

SEQ ID NO: 3247 - DNA, 1717 bp, Listeria monocytogenes 4b
  misc_feature (1)..(end): n can be any nucleotide: a,g,c or t/u
aaaaaagtagaatgcgggggtgcagggtaaaagaaaagaaggggggtgcataaatggtgaggaaacatgataagaagggatcggacgataggaatagggagaagaaaatgggatagcagctggtatacagagtagaaactggaggagaaaggggggagaaaagaaaaaagagaaatatgggcggggaaaagatagaggggaaagcccccctgaaaatagaaatagacatttataggagcagtaagatccctataaaaattatcaggtagataggtctccagtgtcagtgcatccatacatggaagaaacgcatcctaatcgatccaggcgttactccaccaatccccgacagttacatatatcaaccctttcttctgtagttttcagagagccatctttcctccactttatattgtatggtagttatggcgagtaaggtcacacccgttcccatcccgaactcggtagttaagcttctatgcgccaatggtagttgggggcttccccctgcgagagtaggtcgctgccgggcaatttattattccacagtagctcagttggtagagcaatcggctgttaaccgatcggtcgcaggttcgagtcctgcctgtggagccatttttttatttgaaaggctttgctgccgctttagctcagttggtagagcacttccatggtaaggaaggggtcgtcggttcaaatccgacaagtggcttaaataatatatggataatttgtatgtttcgctagtatgcgaggctttttttattgtttaaaagaataatgatatttattatggatatcttgaataggtagtataaatcgattatactatgggtataataacagaacgggtggggtgtttttttgaaggagaagaagcagcggattattaagtcggctaaagaggtgtttcaaaaacaagggtatttgaagacgtctgtacaagatatggttgatgcagctgggatttctaaagggactttttataattattttacttcgaaagaggaactggcaattgtgatttttaagcaggagtattctgtattgcatcagcgtttggagtatacgatggggctagatgggacgaagaaggataattttacggagtgcttgaaaattattattcatttttatacggaaaatggggagatcttgaatattacgttttctcagacgatgattgatgatgattttaatgcgttcttgcagaatgtacgacttaagaatatggaatgggttaaaaatcagttgttagaggtttatgggaaggaaacggagccttatataaatgatattacgatgttgcttagcgggatggcggcgatgtatgtctttgctagtggtagcaagaatgttgattcaggattgattgagcgggctattccttatgtggtgagaaggcttgatgcacttgtgaaggatattttggagagcggagagattgtgtttacggaagcggacacagaaaatctggtgccggatcaaactatgattagaaagaaaagactagctaaactgcggggcgcgctggaggagttaaatgtcgggattgaaaatgcggatattgatgactcggataaatggcagtataaggaatccatgaacgcgcttgttggggagattaacaataatgaggcgcctagagatttcatggttcaaggaacattgttgtatcttaaacggacatgtaccagcaagttaaaccaaagag

SEQ ID NO: 3248 - DNA, 738 bp, Listeria monocytogenes 4b
  misc_feature (1)..(end): n can be any nucleotide: a,g,c or t/u
ttggtaataatgttctttgacttgaaaagggttattaccagtacttctctccccagtttctttagccaattcatctagtttttggtaatctaaagtttctggaagttcttttaggcctttgtttacgcgatcttgtttggaaccaatgatgtattttgattctaaatcatctttacgttccaaaatcttcagttcgatattaccagtaatgtttagaagttttggatcatgaggttttttaggcccttttgcgacaatgttttcgagtaatttttttaatgtagagtcactttgaactacttgaaaagataataaacgtttagctgcatagcgacgttcaggcgtatttttcgtatcttctaatgcgaatttatatgcatgaagaggggaaaaattggcaccaaatgatgggtcagaaacgcctttaggttggaaccattgtggagataaaactaccgctactttttttccttttaaatcatcaccaagtgcatttacgtctaagaaatgacttaatgattgtgtacctgggcgaccaagtaaaaatggtgtatagccctgattgtatttttttgagactacgctaggatgaaatgggtcgacgcgggaaagctctgaagaaccataaattggtaaatagtttccttcttgtaaagcttttttctggatgtctaagccttggatgacggattcgttcattgatgtagcgcttttctctacggtttcagaagaaacttt

SEQ ID NO: 3249 - DNA, 1107 bp, Listeria monocytogenes 4b
  misc_feature (1)..(end): n can be any nucleotide: a,g,c or t/u
actcaatgtttcaatttctaagtatgtttccattttcgctacctccagtttttcaaaaaagtcgtacgtttacttcaccaaggcttttgctttttgtaggtgtggatctgtttcttttagatgtttttgtgttaattcgactaatttatcggttgctacacctgtcataattcctgtcacatctaatttatttgctgcttggaatctttgaacagcatattctgtgtctgtatcgtataagccatctactttcccaacattgtaatctagtgcttttagcaatgtttcaatggttttaacatcatcaccgaaatcgccatttttgtagactttggtggaagacgggatagtcatagttgcataatctggcatgttcacaactacatctggcgtaatacctttttcatgaatccattcgctattaggtgttaaccattttgcgacagttaatttaagcgtggagtcatcagataaagttgttgccgtttggaccgtacctttaccaaatgatttcgtgccgacaagtttaatgccaccagattcttttgctgcagcagcaaggatttctgaagcacttgcactaccaccatctattaacatagttgttggtacttttactttataatctccatgtgagctactatccgctttaatggctgatttatcaccgtctttgtcctgctcttgtacaacaattttgccatcgggaacaaagaggctagaaatcgaaactgcttgatcaagtaacccaccaggatttcctcgcaggtcaagaacaaggcccttcatgccatctttttcaagggatttcaatgccttttcaagctcatcataggttgtttctgaaaatgtactaatggtgacgtgcgcaattttgtcactgcccatttctttgtacaccgtttcgattggaatttcatcacgagtaatcgtgacatcaaatggtttatcttcgttggaacgttgaatggtcagggttactttggtgcctttttcaccacggattttttgtgttgcttctgttgctgtatcgcctttaacagacttcccatctacttgtgtaataatatcttgtggccgtaaaccagctttttcggctgtagagtt

SEQ ID NO: 3250 - DNA, 1531 bp, Listeria monocytogenes 4b
  misc_feature (1)..(end): n can be any nucleotide: a,g,c or t/u
tttcaccaaaacaatttccagaactagctgattataatgggaaaacactgattacaacagatggaacaacgctactcggtgcagacgataaagcgggcattaccgaaattatggtggcaatgaaccatttaattaaccatcccgaaatcaaacacggtaaaattcgtgttgctttcacaccagatgaagaaattggccgaggaccagaacgttttgatgtagaagcatttggcgcaaaatatgcttatacaatggacgggggcccacttggagaactagaatatgaaagttttaacgctgcaggtgccaaaatcacttttaatggtaatagtgttcaccctggtacagcaaaaaacaaaatggttaatgctgtcaaaatggcaatggaattcaatgcacacattccaaaagacgaagcgcctgagtacacagaaggttacgaagggttttatcatttaatttccttaaacggtgatgtagagcaagccaaagcctactatattatccgcgatttcgatcatttgaaatttgtggaaagaaaaacacatattgctagtatcgccaaagagttagaagaaaaatacggcgaaggatcggtagaattaaaactgaacgatcaatattacaatatgcgcgaaaaaatcgaaccagtaaaagaaattgtggatatcgtcagcgcggcgatgagaaatctagacattgaaccgaaaatcagcccaattcgtggcgtatcagacggcgcttaactttcctacaaaggactaccaacacctaatatttttggtggaggagagaacttccacggtaaatttgaatatgttgcattagaaagtatggttaaagcaacagaagtaatcattgaagtggctcgtttatttgaagaaaaagaataataaaaaagtgagtctagttcatcctagactcactttttctatgcgctcatttactctagcagtaaagacctttgcttcgccgtttgcaacaagtaacgtatagctttctttattattaagatgtaaaatcaattttttcgtcatggaaaggatacttactttttgttctactttttctattctttcataatcgaatttcttcagtaagtagacatcttcattttctaaataaaaaatcaacgcatctgcatttgaaatccaaagtcccgttaaatccatccattcgccttccattttataagcaaatgaaccataaatcagactagtatccatcccgagaagctcacgtacacctgcttttgcaatcatcgtttcatacaaaacatttcgcccctctacatacgcatttttcgtattctaactataccatttacttcggatagactgcaatggagccgtcttttatccgaattaattctactggcttttgataaaaatcttgaagaacttcctctgtcaaaagattttctgtttttccgtgatgagttatttccccgtcacgcagtaaaatgatattatcgaagcagggaagaatttcttccgtatggtgagtaacaaaaagcatcgttggggattct

SEQ ID NO: 3251 - DNA, 1400 bp, Listeria monocytogenes 4b
  misc_feature (1)..(end): n can be any nucleotide: a,g,c or t/u
ttgttcagcctcttttcaggtcttgttttcgtctataaagattatagctgttttatggttcacaagcaatgctatttcgtaaatatcagccgtttgtcctgtctcgcacaaaaaaagtagctattctgtcacaaatagctactttttcactttatctaaacatggtttgggttgctttcgctagcacttttggatcacgattatgtggtgttactgggcagatttttttgtcaatatcaagcaatgtgtacacggcgattctagcagcgcgaacggaatattcttcagtgaaaaccatatcttttggaatttctacaaattggctaatcatcgcaaagtttgtactaccttctggaacaacggccggacgatcactcattgcccgtggttcaaattgcgcatcaatatatggcatatagcacggaattacattgataatatccgctttaatttcttcaaaatcgtcttgccagttcaaatgacacattaattcatataaaatttcttccccggtacattctttcatcggttttttcacgaaatcacccacgcggtctggatataatccgtaaccccagaaaatcgtagtgtttgcatcttgcgctttaaaatgaggttgtgcggcaacaacggtactcattaaccaattagaatctttgaaagtcatgagcgcaccacttcctggaatgttccctgtgaagcgttcaatgcgttttaataatttatcgccatgacaagtgacggtaaaactttgccagtttgtttcttcttcatgaccaaaaaatggctctggattgcctaaatttggtttcttttgagcgactttgtaccaaagctcaccagaaattggtttttcttcaggttttggtgccggtgtattcatatcaccaagagtcgcgctatctgtcatacaagcattcgtcataatcacatcatcatctgggccaagtttgatagtggatccatccgataaatgaagtgctgtcgctgtaattccaggcgcatctttgaaatcaatatcttccaccgtttgattaattgtaaaatcaacatggtgtttatctaaaaatgtttttaaaggtaaaatcaagctttcgtattggtttagaggggttcttgttacaccttccagcgtatcaatccgactaaattctaacatcatccgattcatataacgtctaaattcaaacaagctgctccatttttggaaagcaaaagtggtttgccacataaaccaaaaattcgtttcaaaaaagtgttcgtcaaaccaatcacgtatcgttaaattatccagtttttcttccggagtagcgagcagtttcgtcatcaacatccggtcattattattaaatcccatcgaatgcgcatcgaggatattgcgatctttatcaactaatctc

SEQ ID NO: 3252 - DNA, 2549 bp, Listeria monocytogenes 4b
  misc_feature (1)..(end): n can be any nucleotide: a,g,c or t/u
agaattcgctgaagctgcaccgatcaaacgtcatttccctgaagaaccaaaaacagttgcagtgaaagagcgtaaaattcatttccctgttcaaattgctaagaaccttgtagggattaaagaagatattggctctttagaaggccaagctgctttaaaacaagaaattattggagatgtagccttggaaatgctcttntggcacaacctctgacacttacttgaagttatacaacgaaggaatcattgacgacacatttggctatgattacaccttacaagatagcttctcgttcgtattagttggtggagatgccaaagatccagataaacaaaccgaaaaaatcaaagaagcaatgaaagaagctgccaaaaacggcttaaatgaatctgatttagcattactaaaacgcaaacgaattggtcaatttttgcgttcgctgaattctccggagtttattgcgaaccaatttagccaatacgttatgaaatcagcttctttattcgatattttacctttaatggaggaagttaccctagaagaagtaaatgcatttgttaaaaatttggatcaagaagagcgaacaacaagtttccaattacttccagagcaataaacaaattatgtctttttttagtagaaaaaatagcatgaattgctgagtcatgctatcataaaagaaataggctggaaagggttgcctttttttggataaagagataaaatatgcttttgtaacaggggctagcggggaaataggtcaagcaatttgtttgtcacttgcgaaagccggttggaacttgtatcttcactattatcaaaataaacaagcagtgtgaaaaattactgccacaattactagcagaagatgtagatgttatactgattcaagctgattttgatgatttaacaagtttaacattagatggagaagcaagtttttcagttagatgcctttattcatgcagcagggcacgcccattatggtttattccaggatactacagatataaatattactgaattatggaatgtgcatatgtatatgccaatgcgattaattcgcacttttatgcccaaattaatgaaaagtagccaaggaagaattattttcattagttctatatggggagaagttggtgcatcaatggaagtagcgtattcaactgtaaaaggtgcgcaaatagccttttgccgtgcgctaagtcaagaggtgggactttctggaataacagttaatgcagttacaccaggggttgtagaaacaaaaatgatggatcagttttcggacgaggagaaagaaattcttcgtcaagaaatccctttaaatcgttttgcccaaccagaagaaattgcagaaattgtagcatttttgacaagtaaaaaagcaagctatatcactggagaagttttgcgcttaaatggcggttggcttatgtaattttagtaaaaaaatggaaatttgaaattagtaatggtaggtgtttaattttgacagaactcggtgataaactgaaacaagctagacgtgaaaaaggactcagtttagacgacttgcaacaagtaacgaaaattcaaaaacgttatttggtagcgattgaagaaggaaattatgctgtaatgcctggcaaattttatgcaagggcatttattaaacaatacgcagaagcagttgggctagatagcgcaacacttttcgacgagtttgaaagcgaagttccggaaacaccgcaacaagaagtagtaaataatgagccaacacgggtacaaagtaaaagaaatccgatgcctgcacaatctgtaggtaatcaagcgaatactcgtaatcgtttttttgatatcttaccaaaaatccttattgctttatttattggtgttaatcttttcattgcttgggttttcttgcttaataaacagacaattccacggagaaagtgaaaacagatacaaataatcctacagtaaaagtagaagattcgacaaaaagcaaggatacaagtacagacactgagagaaaagatacgacatcaaacaaagataaatctacagaaacaaaggataaaaaagaagatacaaccaaagaagttgaagtgactaaaggagagacgtctggtaatgccactacgtacacagtgaaaaatacggacaaaatgactctgtcacttagcgccactggtgattcttggataggcgtttccgatgcgaatggtagtacaatccaaaacgaaacactatcaacccaaaatccttctgcagaaattgatttaggtgataacaagacggtttctatcgttatcggaaattctcctgttacaactgtaaaaatcaatggtaaacagctagaacttgcacctgatcttgttaaacaagtattaacaattaatttagaagcaagtgatactagctcagatgctgaataatttgttttatatggcgaaatctactcattagatttcgccaacattttttataattacatacttttcaaatgtaaaaaaggagagaaaaagatgaatttacctaataaattgacggttatccgaatttt

SEQ ID NO: 3253 - DNA, 1930 bp, Listeria monocytogenes 4b
  misc_feature (1)..(end): n can be any nucleotide: a,g,c or t/u
gctacaaaacaacgaacaatgaagctaactataatgatcaatatatagatgtgatcatttaaaataagccaatttactccgtattcaactagctaaagacaataactctgtaaataaaaattctaggattattttcatgaatcttcccaccttgcgttaaatatacaaatagatacaggtaagaggggtgatttgttgcattttccaaaaatttttttaataatcaccaatccgtatatgtaaatggaataaacttacctgcactcctataccagtgaaaaaacgtttttgtcccacttttcaggaaatttaatatacaaatctgtgaaaaagttctaattggctaaaaaaataaccatgaatcttactcaatggcattgagtcaaattcatagaaatagcgtgaaacattggcgttctaagagagaagacaaatttttgtcttctcttttttcttgttttactttgaatcttacttacttcatcaatgggagcgtttatgtaagattcgaaaaatgtaaaagataagatatacctgataaaatatttttttcaaatctaatactaaactattagtaaacgtattcgatataagaaccgtggaaaatccatttcacctcatttgacattgttaaatatttagtttaaggtgtttttgtagaactggaaattaataaatagttccattaaaagcgatatgcaagaaatttttcaaggaggagcaaaatgccaaaactcgttacgggatatgagcgtcaacaaactataaacctaattatcgaacatacaagccatttaatttatataaaaaaaggaattcaaggttttactgtggaggatattactcgagcagctaggattggaaagagaaaattctatacgtgttttccctccaaagaagcatgcctatttgaggttgtggaatattcctatcaagcacaattagaggcatttaaaaaaattatggaggagaaaggttcgttaaaaagcaagatgactcgttttttgaaagaagtctatctttcggaaaagagtataaacaactacttttcaccggaagatttccacgcaatactccaaaaactccctccaacatatacggaaagagaagaaagaatgacaagtgaagtcctggaaactgccatgacgtatatcgatcaaacgagagctcaatgggaggctttagtgatgttactagattgtttaacttacactgcgacaaggagttatgtagaaactgccaaaaaagcgaaagaagagactttggatatattaatacattctatagctgattatgtagaaaaacagacccagtgctaacgaaaaatattttaggagggtaaataaatgaataaagaaaccgaacgaaagcttgctgcgtcactcacttctcaatcaatagaaatattaccgtttattccgtattttttacaagatttttttgaattgggtagtagtccgaaagatattacttatttaattaagcaacatatgccgttatcagctgaaagtaattttttggatttagcttgcggaaaaggcgctgtttccattggtatcgctaaggaactaggaaatcctgtcaaaggaatagatttaattccggcatttatagaagaagcaaaatgcaaagcgaaagaagcgcaagtagagtcactgtgccaatttgaagtaggagatgtaaataaatcggttcaaaacgaaaaaaattatgatgccgttatatttggtgcagcagcggatatacttggaaatccagcagaaacgttggaaaaattgcagggaactgttaaagaaggcggttatattattatagatgaagcatatgtgcctgaattagcgcacaataaccaggtgaagtatcaaaattatgaatatctcactcgaaaggaatggctgaatttatttgaacagaatcaattacaattggt

SEQ ID NO: 3254 - DNA, 1623 bp, Listeria monocytogenes 4b
  misc_feature (1)..(end): n can be any nucleotide: a,g,c or t/u
tgcttcgccagtggaagtttccatctctaaatgggacacagaggcaatacttggaagtgcctcaccgcggaatcctagtgtatgcacacggaataaatctgcttcgtttttgattttgcttgtggcgtgacgtaaaaaagctgttgcgacatcttcttcttcaatgccactaccgttatcaataatggtaattttatttaatcccgcttcttccactaaaatatctatgacggtgctccctgcatcaattgcattttctactaattctttaacgactgaagcagggcgttctactacttctccggcagcaattttattggatagagcatcggttaattcgacaatatgtttagccatttaaaacccgcctttctttttaatggattttactttgaagttcgtataatttattcatcgcgtccattggtgtcatctgcataatgttcatggaggcaatttcttttagtagttttgtttctttagaagatgctttcttttctggctccactgggaacatcgacagttgcacttcttcgtgaacttcttctggctgcttcacgctagcgataatgattttcttatcgtcattttccagttgttctaaaatacggctcgctcgttcaataagtgattttggtaattctgctagctcagcgacatgaataccataacttttgtctgctgggccttctttaattttatgaaggaaaactactttgccattttcttctacagcactaacgtgaatattttgtaacccactcagttctttctccaaatcagttaattcatgataatgggtggagaaaagtgttttagcatggacattttcatggatatattcaatgattgcttgagcaagcgccattccgtcgtaagtagctgttccacgaccaatttcatcaaataaaattaaactatctttcgtcgcgtgaacaatggcatttctagcttctaacatttctaccataaatgtactttgaccggcaattagatcatctgctgcgccaattctcgtgaaaatttggtcaaaaattggtaatatcgcttcttctgcaggaacaaaacaaccaacttgcgcgcagattgctgttaaggctacttggcgcatataagtgcttttacctgacatattaggaccagttataagtaaaatttcccgattttcatctaaaacacagtcatttgctacatagctctgggcacccattactttttctacaacgggatgacgaccttgttttacgtgcagggaaccgtcttcgcttaatgtcggacgaatgaaatggtttttctcgctaatatccgcaaaactttgcaggcaatcgatttcactaacagatttcgctaatttttgcagacgttctatgtagtcttttaccatttctcgtacttcagaaaataattggtactctaattccatgcttttttcttctgcatctaaaatgagtttttctttttcttttagttcaggcgtgatataacgttcggcatttgttagtgtctgtttgcgctcatagcggccttctgggagcagatgcgtgtttgcacgtgtaacttcaatataatagccgaatactcgattaactcctaccttcatcgttttaatacccgttagttcac

SEQ ID NO: 3255 - DNA, 853 bp, Listeria monocytogenes 4b
  misc_feature (1)..(end): n can be any nucleotide: a,g,c or t/u
ggactacagtgacctcctcgctgtgcgagcggccgacagtgtgctggaaagtaaagctccatcaatttggatagaggttactgctgcacctggaagagaagataatagaatacgacgtaaggagttacccaaagttgtaccatatccacgctcaagtggctctacaacaaactttccatacttggcatcatcgctgatctcaatcgtctcgatttttggcttttcaatttcgatcattcaaatttaccctccttcaaaacgtctagaatatcagtctttatgtcaaactctctgccttgatagttaagacagtaaaaatctactattggcaaaagaaaacgaccacttatacgcgacgacgttttggaggacgacatccgttatgtggaactggagttacatctttaatagctgttacttcaagaccagctgcttgtagtgcacggatagccgcttcacgacctgaaccaggacctttaacagttacttctaatgtttttaaaccatgttcttgtgctgattttgctgcactttcagctgccatttgcgctgcgaaaggagtagatttacgagaacctttaaatcctagggaacctgcacttgaccaagctaaagcattaccatgtgtgtcagtaatcattacgatcgtattattaaatgtagaacggatgtgtgcaataccagattcgatattctttttcacacggcgtttacgagtatttgttttacgagccattcactaactacctcctttactattatttctttttgcctgctactgttttggacgggcctttacgagtacgggcattattttttgtattttgtccgcgaactggaagtccacgacggt

SEQ ID NO: 3256 - DNA, 652 bp, Listeria monocytogenes 4b
  misc_feature (1)..(end): n can be any nucleotide: a,g,c or t/u
aaggttttgagtattaaattgattaggaccagattttgtaattgaataatctggtttggagcttgcagcatctttcaaatcatatttagttctcatcacagaagtttttgcaactgcattaggttctggggcgatagtcattgatttgcctgaagcatccatggcaattttagctccaacttgtggtgcagtagtatttaatgctgccaactgtttcgtcataaaaatatctgaaatagctgaacttccgctggtaataatgtaatcacctgttgttttaattgttgtagttccctcgcttgaaagtgataaggttacattatttttcccactttgaagttgctcattaccgcctgtcgtactagtaatttcaagcgttcccggtacgatagattcttcctcatcttctacatatacatttaatttaatttcgctcgctgtgcggcttaaaatttcgtattcaacggttggtttttcttttttgatttggattgtatcggaattaatttcaatatgatgatcttcataattatcattccaaacaacatccgcttttatgacataagaataacctcgtcctaagagcttattagttaaatcaaagtacacgtgcttctcaaagtctgccgctgttgaaacttcttgctccaca

SEQ ID NO: 3257 - DNA, 1495 bp, Listeria monocytogenes 4b
  misc_feature (1)..(end): n can be any nucleotide: a,g,c or t/u
acagagacaactgctgctgctgactacggtagttgaccaatgacatataagtcaagaacaacaagcttatagtcagccttaactattggtaggggtagcgggacggcaacaataggttcacttgaaattaccaaagaggataaaaaggataatacagaaaaaactagcaggagctaaagtccaactttatacgcttgaaggtgataaagcgggacaagaggctaccactgatacagatggtaaaatcgtgatggatggccttcaatctgggaaatataaactagttgagacagaagcgccaacaggttacacaattagtgatgaatataaagacggtaaagaaatcacggttaccgccgatgcagttacaaacgttacaattgaaaacacagagcaaactggtagcgcggttcttttaaaagaagatagtgtaacgaaagacgctatcgcaggagcagaattcgaattacaaaatgcagacggtacaaaagtcgctgaaaacttagtatctaatgcagatggtaaaatcgaagtaactgacttagcgccaggcgattaccaatttgtagaaacaaaagcgccaactggctatgtattagatgcaacgccaagcgaattcacgattgaatttaaccaagaagccgctgtaattgttacaaaagaaaacacagcgaaaactggtagtgtggttctaacgaaagaagatagtgtaacgaaagctacgatagccggagcggaattcgatttacaaaaagcagacggaacaaaagtatccgaaaacttagtaacagacgcagacggtaaaatcgaagcaaacgatttagcaccaggagactaccaatttgtagaaacgaaagctgcggctggctatgtattagatgcaacgccaagcgaattcacgattgaatttaaccaagacaaagcagctgtcgtaacaaaagaaaacacagcaaaatctggcagcgtagttctaacaaaacaagatagtgcaacaaaagctgcgttatctgatgcggaatttgaactacaaactgccactggaactaaagtaaaagataatttaacaacgaatgcaagtggtgagatagaagtagctgatttagcaccaggcgattacaagttcattgaaaccaaagcaccaacaggctacgaattagatgccacaccggttacttttaccatcgaatttaaccaatcgactgcagtcaaagtaacaaaagaaaatgttgcgaaaactggtagtgtggtcttaactaagctagatagtaaatcaagaagtaatttagctggtgcagagttcgaattacaaacaaaacttggtgtcagtttgaaagataaagtagtgacagaagcaaacggtcaactgcaaattgataacttagcaccaggcgactaccaattagtagaaacgaaagctccaacaggttatgagcttgatgcaacaccagttgaattcaccattgaatttaaccaaaaagatgcagttcaagtgact

SEQ ID NO: 3258 - DNA, 1271 bp, Listeria monocytogenes 4b
  misc_feature (1)..(end): n can be any nucleotide: a,g,c or t/u
tcgcaaaccaagtaatgaataaagccctatttctcgttttcgccttttaagaaaaaaaccatgtggaataaaatataaaaaagataataaacaatattaacataagactagctgacgaaaacatggccggtccgaataattcccaacgtttaaacactgtgtcaatcagcgggttatatgataacgaaacaaacgtaaaaaaaactaatacacaaacaattaacgaaacaaaataaacaatatattgattaaagttctttcgcatattggtcagcgcgactttaaataacatcgttttcgccacctccaagaagcgccaaaacatctaataccttctggaagaattgttttctagaacttgtccctcggtagatttcagtgaaaatttcgccatctttaataaacataattctttcgcagtaactggctgcaaaagcatcgtgcgtcaccatcataatagtggaatcacgcacatcttttgcttgagaaagtccttctaataaattggtcgctgctttggaatcaagcgcaccagtgggttcatccgcaaaaatcagcgttggttctgtaatcattgctcgacaaaccgctgttcgctgcttttgtccaccagatatttcggttgggtacttgttccttaactcaaaaatcccaaattgacgagcaataatttcaaaccgctgatcaatttccgcttgtttaatacgagcaagagccagcggtagaacaatattatccttcacagtcatcgtatctaataaattatagtcttgaaatataaaaccaagctgatctcttctaaaaacagctaattcttttccgttcatagtagaaatttgctttccaccaatctcaatttctccagaggttggtttatctatagaagacaatacatttaataaagtagatttaccagcaccagagggacccataatgcctacaaaggaacctttttgtatctctaaactaatacttccaagcgcagaaaacaaatttccttttgaaccgtatacttttctaactttatgcgcctttagcactgtttccattgtattcctcccgttacgttctttatttggttattttaccttaattttaaacaagatactatgggctatagttgtatttattaaaaaatcatttattcgtcaaaaaaacagataaatgattttccttattatttcttttccacaaagatttccataccaatagtttcatcatttgtataagtggaacgcatcgactgaatgagtttttctagttcctccaaa

SEQ ID NO: 3259 - DNA, 849 bp, Listeria monocytogenes 4b
  misc_feature (1)..(end): n can be any nucleotide: a,g,c or t/u
cttcacttcatttcattataataaaaaaactgtaggcaaagtatttttatacttcgcctacaatctcagccgaaaagaaaggtgtcttttcggtttttatttatgatttttccaaagaaacatcgctgaagataatagtagaattcctgccaaaaagtcattgtatggattggaatcgccagtttttggtaagacagacgtttcttcttttattacgttggtactagaatctattttaataatcgggtttttgattggtggatttactattactactggtttatttttacggtagatataatcgattgattgtgcttccgccgaaaacacaccattagaatttgtaggagtttttatcaacgtgtagccatctatttctttagctagtgtattataagcctctcccacacgaccatttagaactacagagtcagcaatttctttaccattttcatctaaatagttcactgtcactggtaaggcggaaatagcaatcggcgtatacatataagttactgtttgcgcatttgttgtaaaggttccttttgcatttggaggtattgttgtgagtgtgtaaccagcaattgttttcggttgagttgagtaagattctccgatattaccagttaaaacctcacttttcgcgattttttgacctgtagagtttctataattaacggtaataggttgggctgtctcagcgtttttcgcatagatataattaattatttgaggttctgtcgaaaaagtccccttggcattggcaggtgtagttgttaaagaatagccgtcaattgttttagctgttgtcgtatagttttcactaatatttccggttaaggtttcaga

SEQ ID NO: 3260 - DNA, 2148 bp, Listeria monocytogenes 4b
  misc_feature (1)..(end): n can be any nucleotide: a,g,c or t/u
tgcactttgagttgctagaatattcgttgcttttgaatcgttatagaatttacgaccttgccattctacaacaaattgtgtccggtgctctacacctttaaacgtttctaatacgtgcatgatttcttcatttgtaacacctaacgtttttgctactgctacggaagcaagcacattttctaaattatgctctcctggaagtaaaatattgtcacgtgcgccaatcacttcatcgttgaacataatattgccattttgcacgtagcttccttgaccaaggcgttgtgtggttgaaaacggaataacttgtgcttttgtttgttttgttaggtttttaagctcttcttgatcccaattaattactaggaaatcatctgctgtttgatttttttggatatgccattttgcttgaacgtattcactacggtctgtatggtaatctaaatgcgcttcataaatattcgtgatgacggaaatatgcggtttaaatgtttctacgcccattaattggaacgaagatagctccatcgaaatgtattgatcactggtcgcattttctgcaactgcggatgccggaaaaccgatgtttcctgcgagtaaagaactatnttctttgtgcgcatttaacatatggtggatgattgtggttgttgtcgttttaccatttgttcctgtaataccaacaattggtgcttcagatatttggtaagatcattaaacttccgtaatgactggaattttgagttttaacgctttttcaatcattgggttgttgtacggaattccaggattttttatgacaagttcaaatccttcatctaaaagttcaattgggtgcgaaccgcaaataactttaataccttgctcaagtaaaccttgtgcttctggattctcgctaaaaggtttttgatcattaacagttacaaatgctcccagtttgtgcataattgttgccgcgctaacaccacttcttgcaagacccaagacaagtacttttttgtgatggtacatttcaatttttttcatttcctttggttcccccatttatatcaaaattggcggtcgaatttatgattttcacaaaaacgacggaaagcgccaaccagattctgtaaaaaaacagctaactagagacgcttttgccgtaaaaagattacggcgcattatttaaaaaatgactacacagacagaaataattgctccgattaacccgattccccagaacgttaaaacaacacgccattcggaccagccaccaagttcaaagtgatgatgaattggtgtcatacggaagattcgttttcctccagttgccttaaaataaaatacttgcaatataacagatgctgtttcaataacgaaaataattccgattaagagtaacagccattcttgatgtactaaaatagaaattgcggcgatacttccaccgagtgcaagcgaaccagtatctcccatgaagattttcgctggatttttattaaatagtagaaatccaagcataccgcccacaatcgcaaaacagaaaatcgcgacatccatttgttcttggtaaaatgcaatgacaccaaaagcagaaaaagcaatgacagaaaggccagagacaagaccatctaaaccatctgttaaattaactgcattagagaaaccaactaaccagaacaaaataaagataacaaagaaccaaccaagatccacttctatatttgtaaacggaatattaagcgtctcagcaaaaccatttaaatgatataccagatagaataaaatcgaaattgccacttgacctaaaaacttctgctttgaagtaaggcctagattacgtttttgaactactttgatatagtcatctaggaaacctaatgcgccaaatagtgccagcgcgatgaatagcagccacgtagctgcactaacttcaccactgatgaacgaaaagatcaagaaactaataagcattgcagtaatgaaaacaactgcccccattgtcggtgtccctgatttcttttcatgcattttcggaccttcatctctaatactttggccgaattttaatttcaccaagaatggtataaatagtggtacacctatcaccgctttccagcacacgttcggcccatcaaagcatgcatgtagagtgcccaaaaaggt

SEQ ID NO: 3261 - DNA, 1613 bp, Listeria monocytogenes 4b
  misc_feature (1)..(end): n can be any nucleotide: a,g,c or t/u
acctttgggcaacctagcatgcatgcttgagcggccgccacgtgtgctggaaagaatgaatggatgatacctttaccggatcatactaatgctactaaaaaaatatgttttttgccttgattaaagtaatttaacagggacgaaaaggagctaagaaaatgaaaagaccagtagatttttttgctatgaaggaaaacggagagaaaataacgatgataaccgcgtatgactatccttctgctaagaatgtagaacaagcagaagctgatatgattttagtcggcgattcacttggaatggtagtattaggctacgattcaactgtaccagttacgatggatgatatgattcatcatacaaaagccgtgaagcgcggggcaccagatacatttgttgttacagacatgccgtttatgacgtatcatggttcagtggatgaaactatccaaaatgcacggaagattatccaagaaagtggcgctcatgctgtaaaattagaaggagcaggagaagtcgttaacaaaattgctcgcctaacagaagcaggtgctccagttgtcgcgcatcttggcttaaccccgcaaagtgttggcttaactggaagctataaagtacgtgctaaatctgcccaagaagcacaagagctaatggataatgcgttagctgtagaagctgctggagcgattgcactcgtacttgaagcaattccacgtcaactcgctgaaaaagtaagtaaagcactttctatccctacaattggtattggagcaggcgtagaaacagatggacaagtactcgtttatcacgatattatcggttatggaatcagtcgtcgcgccaaatttgtaaaagcgtatgcggacattgatgaaagaatcgaaccagcactagcaagctacgtaaaagaagtaaaagcagcgacgtttccagaagtgaaacatagctttaccatggctgaagaagacttaaaaggcctttatggaagggaatagcaaatgttaattattcgaaataaacaagaccttaaagaagctattttagagcaaaaaaaagcgaataaaacaattggttacgttccgacgatgggctttttacatgaaggacatatgacacttgtcagccatgcgagaaaagaaacagattttgtcgttatgagtgtttttgttaatccaacccagttcggtccgaacgaagactttgatgcttatcctcgagatgaagcgcacgatgcaaagctcgcagaagaaggcggcgtggatattttatttgtacctacagtcgaagaaatctatccaaccgaactagcaaccaaactacatgtcatcaaacgagcttctgtacttgatggtgctgatcgtgaaggtcattttgacggagtagtaacggttttaacgaagctatttcatttagtgaacccagataacgcctatttcggtcaaaaagatgctcaacaagtggccgttgtttcaggtctagtagaagactactttttccctataaatttacgaatcattgcgactgttagagaagcagatggacttgccaaaagttcacgaaatgtctatttaacagaaaaagaacgaaaagaagcaccggtgattcatgaagcttta

SEQ ID NO: 3262 - DNA, 2231 bp, Listeria monocytogenes 4b
  misc_feature (1)..(end): n can be any nucleotide: a,g,c or t/u
tcaagaaggtaaaggactattcaaaatagaacaagccgccgaaaaattaatggctgaaaaattcgaccgtttaagaagtaaaggtatgaagccaagagcaattcgtgcgatgattttaggtattccgaatgttggtaaatcaacattaatcaatcgactagcgaaaaaaaatattgcacggacaggtaataaacctggtgtaactaaagcacagcaatggattaaagtgggaaaaacattagaacttctggatacaccagggattctttggcctaaatttgaagatcaagaaattggctacaaattagctcttactggtgcaattaaagatgatttactacaaatggaagagatcgctggttacggtttgcgctttttagaaaaacattatcccgacagacttcaaaactggctgaaagtagagacagtctctgaagatcctatcgaaacacttgcttttattgctgaaaaaagagggcttctagatcgatacaatgatccagattattctcgcgcagccgaaacggtagttcgagaaattcgtcagcaaaagttagggagaatgtcgcttgatttgccaaattgggaagatgaagtccaatgaccgattgcatatccgttatccgagaaaaactaaaccaagtcacatcataacatgatcccttttttcggaaatgcatgcaagatgagcgtaaaggtgtagaaaaacttctggaaactacaaggagaaaatgggaaaaatttcgcaattacggaacaagcttgaagaaatgaaacaatatgaaacagatttattccaacaaggatacaagtatatcgctggagtggatgaagtgggacgtgggcctctcgcaggaccagttgtagcagcagccgtcattttaccagctgatttttctgttgtcgggataaatgattctaaacaattgagtgaagcaaaacgtgatgctttgtttgaaacgataaaaaaagaagcaattgctatcggagtagggattatagaacatgatgtaattgatcaagtaaatatttatgaggcaacgaaacttgctatgcgtgaagcgttagatcaattaacaccagaacctgattttgttctaatagatgcaatgccactaagatataccgaggcagaactatctcttatcaaaggggatacaaaaagcatttcgattgctgcagcgtctatcatcgcaaaggtaacaagagatagattaatgcagatgtacgatgaaaagtatcccgggtatgattttgcaaacaatatgggctacggcacaaaaaaacatttacttggtttagatacaattggtatatgtcctatccatcgtataagttttgcgcctgtaaaagaagcaaagttgcattttgatagtttaaaataactaaatcatatagagaaaaacgtattttcaacatggaaaatacgtttttttatgccgttttataggttttggtcattttacaaaaaagcccaatgtttgtacactgggagtaactattacggaggtgcaacagatggattttaaacaacgacatacatggctcaaaattgcttcttgtaagtctatttctgctaaaaaaagagccagcatttggcaaaaattaacagaattcgaccagtatgaaatgacaacacaaacatttgcagaatctttctttcctgtggataaactcgcacagattctaatggagctagagacagctgaagcgtgcttttttgatgatgttaccttaatatggattttagatgatgcctatccagcgcttttaagagaaatttatgaagcgccgccaattttattttgtaaaggaaatattgatttattacaacaacaagcaattgccatcgttggtacaaggcagatgagtgaatatggtaggaaagcttgtatgaaaattgctagtgaacttgctgagaataagctgactatagttagcgggatggctatcggaatcgactctacagcccatagagccactttaaataaacaaggtgcaacgattgcagtactaggttcaggtgtcaacaaaatttatccaaagaaaaatgaacttctagcgaaagaaattgtcaaagaaggtttgttattaagtgagtatttacccgatgaagaagcgaaaagatggcattttccagaaagaaatcgaattattagcggcttggctataggaacagtaataatagaagctgccgaaagaagcggttcgttgattactgctgatatagc

SEQ ID NO: 3263 - DNA, 1517 bp, Listeria monocytogenes 4b
  misc_feature (1)..(end): n can be any nucleotide: a,g,c or t/u
gattgatattatcaataatgaagaagaaactatctcaatcggtattacgcaatcttctttgcctatggaatttaacacaatcattaaagagttctatcaacagtttccaaataaaaaattatctatcgttagcggaagtacaagtgaattaataccaaaaatagctaacagagaactaaccatcgcatatgtcgctgaactcgaaaaagaaaatttatttcaagatagccaaatcatctcacaaacgctctcatgggataaactagttttcgcaggcaacacagctggaaaatcagtccaaaaaatattagcggaagaacgattatacgtcttcagcaaacaatgttattcataccgcgccctggctgctctcattaacgatattaatatcccaaatgtttccatatcagagatcaatattcccgaaacacttgttgaaatctgcaataatgaacttggtattggaattatccccgaaagcatcgcactaaactatcattttctaaactatgaaacattacccacagaatacgcatcacttcgaaaaacattaatttatcatgcagatcatacaatttcaaatggggaaaaatggcttatcgaaaaaagtaaaccagcattcaaaagttaagttgttgattacaaccctttcaaccagctagctatttatgataaggctccccccgaacaattcgaaacgcccggtaaacctgctccaccagcaccaatctcatcaactggtgtggcagcgttaacctcccaaacgaaatccgctcattactccgcttcaacaccgcctcactaagccccagcgatccaccaatcacaaacgtcaccttactcttaccataagtcgccagcttatccaaatccgccgcaaattcttcactcgacttcattttcccatcaatcgccagcgcaatcacatgggcatcgtccggaatctttgctaaaatccgcgcaccctctttatcttttacttgcttcatttcggcatcactcagcacttccggagctttctcatccggaacttcaacgatcgtcactttcgcataggcgctaagtcgttttaaatattcggcgattccttgcactaaatatttttcttttaatttcccgaccgttacaatttgaatattcatttatgccacccttatcttttttaatacttttatcatacatcaaaaatccctcattgcactagtcaaaataaaataagagcagctttccataaaaagttattccacaggttatcccgcccttatacacaagttatccccaaaaattatccacatatccacaagccccttctctattttgtgtccgaacatatattctccacaatatatatgatagccgaatttcactatccacagcttatccacaggtgaaattgtcgcctaactattcaaaactcaaactccaccaaacagtggaaccccttctcctctttccagcacacgtcggccgctcaagcatcaggcaagttacccnctagttnnntncnaaaaggaaaa

SEQ ID NO: 3264 - DNA, 1109 bp, Listeria monocytogenes 4b
  misc_feature (1)..(end): n can be any nucleotide: a,g,c or t/u
taacaagcgcacgagtatgtcctacaagatccaacgaaaaaaatgagtaaatctgatgccaatttgaaaaatgctatctttttacttgacccaccagctaccattagaaaaaaaatcaaaagcgctgtaaccgattctagtggtattattgaatataataaagaagaaaaaccaggtgtgtctaacttacagactatctattctgttatcactggcgaaacaatttctactatagaagaaaaatatgttggaaaaggttatggcgattttaaaacagatttagctgaattagttgttgctgaacttgagccaattcaagaaaggtactatgcttatctaaaatctgaggagctggacactatattagacgcaggagcagaaaaagctgctcgcgtggctaataaaacattgaagaaaatggaaaatggcgttgggcttggccgcaaacgcagaagataatataaaaaagccaatgactagttgatctaagtcattggttttttttatttaaacattaacctactttaatttccacatcgatgttaccacgagttgctttagaatatggacaaacttcatgtgcttttttaagtagtgcttctgttttttctttatcttgtccttcgatagttccttctaatacgacaccaattttaaaaccgttgtcttctggatcactatataagctgacagttgctgttactgtgctctttgcttcaatcccagcttttcctagaactaattctaacgcgctattgaaacaagctccgtatccagccgcaaatagttgttctgggtttgttccaccaccgccgtctccaccaagttctgttggcgcagaaatatcaaagtaaaatacgttgtctggcgaatgaacttcaccacttcttccacctgtattaatgactgttgtttcatataattttttcattttctattcctcctaattgtttcgttaacgattgtattttggtaagtaattgtgtgtagtctaattctttgaaatcaagtaattgaaggcagttgtccacgctttttaatacgtcaggttgtatttttactttccgaggacatgtcggcgctcgagcatacagctaagttccttacgt

SEQ ID NO: 3265 - DNA, 1102 bp, Listeria monocytogenes 4b; identical to SEQ ID NO: 1582
  misc_feature (1)..(end): n can be any nucleotide: a,g,c or t/u

SEQ ID NO: 3266 - DNA, 1613 bp, Listeria monocytogenes 4b
  misc_feature (1)..(end): n can be any nucleotide: a,g,c or t/u
agacagctgtgctttcgattgcggcgattggtatttacgcgatgattaaattacgactgacgaaacgaggtgagaatgatgaaaacgaatgatgttctactgagaaatgtaacgaaagtagttgctttcattattttcttattctcactccatttattctttgcaggacattataatcctggtggcgggtttgtggccgggcttacaacggctggtgctattacattaacactacttgcttatgatacaaaaacagtggctagtatgcttaatatcaatacgattatgcttactggggttggacttgtatttgcccttggtactggaatgattgggatttttacaggagatcctttcttaacgcataaatttggtcatgttgatttgcccattttaggagatactgcgttacacacggcgactttgtttgaccttggggtttacttagttgttgtcggtgtaacacttacgataattcaaacgattggggagagtgactgatggaactattaatgtctatattaatcggcttgatttttgcagctgctgtctacttaattctctctaaaagtttgctacggattattattggaacggctgtcctaagccacggtgtcaatttgcttgtacttacgatgggtggactgaaaaaaggtcgcgtgccaattcttggtacaccgggagcaggaacgtataatgatccccttccacaagcacttattttgactgcgattgttataagctttggtgtaactgcctttttccttgttcttgcttatagagcgtatcaggagcttgatagcgagagtgtatccaagacgagaggacatgaagccgatgatgaataatataattttaatgccgattttgatacctttccttggagcaattacgttaatgttgcttccgaaaaaagtaatcattcaacgggtattcgcccttatttttagtggtattttggttgtagcgacacttggacttgtattttatattcgagaaaacgggattacaactgtgaatattggtaactgggcggctccttttgggattacgatggttggcgatatgcttgctgtcttgcttactgcaacgacgagtattgttttattctgcgtgattctttattctttttatacgattgggaaaccacgagagaaatttctttattatccagcgattctctttatgattgttggggttaatggttcgtttttaactggcgatatttttaatatgttcgtattctttgaagttatgttgatggcgtcttatgtactacttgtcattggtgggactcaagttcagctcaaagcgacgattaaatacttgttgattaatgtggttggttccggatttttcgttgtagcaattgcgctactttattcgatgattggaacgctcaacatggcagatatttcgcaaaaaattacggacttaaatggtgcaaatacaggaatgattagcgttgtcgcggttctgttcttgtttgtattcggactaaaagcaggactattcccgctttacttctggctaccaggatcttactttgctccaccaattccggtgcttgctttgttcggtggacttctgacaaaagttggggtttatgcaat

SEQ ID NO: 3267 - DNA, 1397 bp, Listeria monocytogenes 4b
  misc_feature (1)..(end): n can be any nucleotide: a,g,c or t/u
gattttcgttttttagtttgcaaaagaaagcatttacatatataataaacatgtgtttgaaaataaaacaaaagtttggaatggaggtgcattatatcgtggagaataataaagcgaaaatgaacgaaaaggaagagataattttcaattccatccgtaaaaatccttacatttctcaacaagaacttgctgacatacttgatttatcaagaccgacagtcgcaaaccttatttccggccttattaagaaaggtcgcattttaggaaaagcttatattttaaatgaagccaaacaaatcgtttgtataggtggagctaacgtcgatcggaagttttatattaaagacaaggcccaactagccacatcaaacccagtgcgctcaacacaaagtgctggcggggttgctagaaacgtaggcgaaaaccttggacgccttggaaaagaagttatattactcactgcttgtggaacagactctgactgggaagctgtcaaaaatgctagtaatacatatatgaacttagattacgtcacagcattcccaagcatcgcaactggttcttatacagcagtgctcgaaaacaatggagatttactcgttgcactagcggacatggatgcatatgatcacttaactccagatgtactcgcaaaaaatgaaggcttgctgagtcaggcgagcgcaatcattgcagatttaaactgtccgaaagaaacactagaatatcttggcagctttgctgaaattaattcaattccattagtactcgttcctgtgtcttcacccaaaatgtctcatttaccagaaagacttgatcatgtaacttggctaatttgcaaccgagacgaatcagaaacgcacctaggaatgactatcaaaaatgacgaagactggcgcttagctgcacaaaaatggttagatctaggcgtaaaaaatgtcatcgttacaaatggcagtaaaggcgcagttgcagcaaacaaaggtgaaggtactatttttgaaccagcaattgtaattgaaaatattgtagacgtgacaggagcgggagatgcattttgctccgcggttatctacgcatggttagaaggaaaagcattgaaagaaattttaagagcagggagcgtaaatgccgcgcgaacactcgaatctgagtataccgttcgccaaaatttatcgacatcccaactacaaaaagacatggaggaattcaaatgaaaaattatttatcattatccgaagaagtaaaacaagcaaaagcagaaggaaaagcaatcgttgcgctagaatctacaattatctctcacggcatgccttatccgcaaaatgttgaaatggcacgtgacgtagaacaaattattcgcgataacggtgccgtaccagcgacaatcgctttaa

SEQ ID NO: 3268 - DNA, 1514 bp, Listeria monocytogenes 4b
  misc_feature (1)..(end): n can be any nucleotide: a,g,c or t/u
actgttggcaacctagcatgcatgcttcgagcgccgccagtgtgctggaaagtttcatggatattagccaaattaaagcagaagtagtaacaccagaaacagggatacacgtaggagatcaaactgcgccagtaaaggtaatgtcattcgttaacttacgttgcccattttgtagagaatggaatgaaaaatccaaagacgttctaacggaatatattcaagcagggaaaattgaattaatcattaaaccatttgataaagaaaaagaatcgttacaacgaggaaatgtaacgcatcgctacttagattattccaaaccggaagaaacccgtgaaacaatcaataaaatttatagtaagcaagatgaatggggtagcctaacgcttcctgaagtagctacttatatggaatccgagttaggcttaacagagcaagacaataaagctgcatcagaaaaaattgttgctgaggcaaacgcggcaaatgttgtttttgtaccgactgttattgtgggtgaacatatttttgatgagcacattagtcctgaagaattacgttcgttactagacggcgaattagctaaataaaaaaagcgaatgtattggcctaaaattttaggtaatacattcgctttttgtttatttttaaaagaatttcctccgccagaatacaatcgcaagcgctccggcaatcccgaatgcaaaaccgagcgtcagcatccaagccattggtgtattcataaacggtaatttcacgttcattccgtaaaaactaaacaccatcgttggaatcgtcaagatgatggtaaaagaagtaaggaatttcatcacgatattcatattgttcgagataattgaagcataggcatccatcatcccgctcaaaatattcgagtggacttccgccatttcaataccttggcgattttcaataataacatcttctaataagtcttgatcttcttcgtacattttaacaatattttgacgcatcattttatcaagtacgactttattcgatttaagggcggttacaaagtaaactaaacttttttcaatccccattaaatcataaagttgtttatttttcatagattcatgtagttctttttcgatttcgtctgtttgacggttcaagcgttttaagtgacgcaagaaagtagtggaaatcatgtataagatttgcaatgcaaaccgtgttttcatatgtgtataaaagcccttaatacggtttctaataaatgactgtacaatagaagaatcaatcgtacaaattgtaataaaataatcctttgtaataattatccccattggaatggtttcgaatgaagcgtaatgaatatcatcttcatcaactaccggaaagtcacagacgattaaaacggatccgagtcgtatcggtcatcggccttattttatgctaactggatgttgattattatgcatcagtcatnnnnnnnnnnnnnnnnnnnnnnnnnnnnnnnnnnnnnnnnnnnnnncnnnnnnnnnnnaaaa

SEQ ID NO: 3269 - DNA, 977 bp, Listeria monocytogenes 4b
  misc_feature (1)..(end): n can be any nucleotide: a,g,c or t/u
aagtccaacatagatgaaaacaccatccactggcataatagattcggaaccatccactgtggaaacaagttttgctccagttacttttttgccatcgccaacaatttcttctactgtactattccaaatgaaatcaactttttcatctttgaaagcacgatcttgtaaaatttgttgtgcgcgcaatttatcacgacggtgtactatcgttactttatctgcataacgagtcaaataagttccttcttccactgcagagtctccgccgccaaccacgattaattcgcgatttttgaagaacgctccatcacaaacagcacaataagaaacgccgcgtccactaagctcttcttcgccagctgcaccaagtttccggtgttcagcaccagtcgcaataataatcgcccgagctttataggttttcgatccagccgttacagttttaaattctttgccatcaacgacttctttaatgtccccataagcatactcagcgccaaattgtttcgcaccgctaagcatcttatcggataaatcgggtcctaaaatactatcaaatccagggtaattttcaacctcagctgtgttaaccatttgtccaccaggtacaccgcgttcaatcattaacgtatctaaatctgcacgggaagtatataaagcagctgtcattccagctggtcccgctccaataataatcacatcataaattttttcttcactagccattctttttgccctcctcgtttatgtgtatacaatagttagcctaaattaatcctaatacggaatagcaaaaaggtctatttatctgctcagaactcgctcaatatctcgcgcacatttactacattcaaattcttctactaattcaagcttcaaatgaggtaaaaacagcttagcaatcgcactagccacagtttctatcgtataacgaccaagtattaaatctttcccagcatctattaaaactaacgaaa

SEQ ID NO: 3270 - DNA, 1139 bp, Listeria monocytogenes 4b
  misc_feature (1)..(end): n can be any nucleotide: a,g,c or t/u
cctatcgtccaccagtgtgctggaaagcaaactaactttcttaccttatatggtgaaagctcttgttgcaacgcttcgtgacttcccagtgcttaacacaactttagatgatgcgacagaagaacttgtttacaaacattacttcaacgttggtatcgcagcagatacagaccacggtttatatgtaccagtaattaaaaatgctgataaaaaatccgtattccaaatttctgatgaaatcaacgaactagctggaaaagcacgtgatggtaaattaactgctgacgaaatgcgccacggttccgcaactatttctaatatcggttctgccggtggacaatggttcactccagtaattaattacccagaagttgctatcctaggtgttggtcgtattgctcaaaaacctatcgtaaaagatggcgaaattgtagcagcaccagtacttgctctttccttgagctttgaccaccgtgtaattgacggcgcaactgctcaaaaagcaatgaacaatattaaacgtttattaaacgatccagaattattactaatggaggtgtaacaaaatggtagtaggcgattttccagaagaaagagacaccatagtcatcggtgcaggcccaggtgggtatgtagccgcaatccgagctgcacaactcggacaaaaagttaccattattgaaaaagaatattacggcggtgtgtgcttaaacgtgggatgtattccttccaaagcacttatcacaatcggtcaccgttttaaagaagctggacactctgataacatgggtattacagcagacaacgtgaacttagatttcacaaaagcacaagaatggaaaggcggcgtagttaacaagcttacatcaggtgttaaaggccttcttaagaaaaataaagttgaaatgttagaaggagaagcgttcttcgtggatgatcattccttacgtgtgatccaccctgactccgctcaaacttatacattcaacaacgtaatcattgcaacaggatctcgtccaatcgaaatcccaggtttcaaatatggtaaacgtgtattaagctcaactggtgcacttgcactaacagaagttccgaaaaaactagtcgtaattggtggcggatatatcggaacagaacta

SEQ ID NO: 3271 - DNA, 1130 bp, Listeria monocytogenes 4b
  misc_feature (1)..(end): n can be any nucleotide: a,g,c or t/u
gaaaaaaatggtgcactacatgtgaccaatccaagcgatattcaaaaactagaaaaagtagctgtcacagataaaggcgtaacaaacaaaaaactagtcggaaaaagtgcttcagaaattttaaaagaagcggggattgtttgtgatttttcaccacgtttaattattgtggaaacagaaaaaacacatccgtttgcaactgtagaattattgatgccgattgttcctgttgtaagagttcctaattttgatgaagcgcttgatgtcgctattgagttagagcaaggcttgcatcacacagctacgatgcattcacaaaatatttctagattaaacaaagctgcacgagatatgcaaacatccatctttgtcaaaaatggtccttcatttgcgggattaggctttagaggagaaggtagcactactttcactattgcaacgcctaccggagaaggaaccactacagcgcgccattttgctagacgtcgccgttgtgttttaacagatggtttttcgattcgttaagaggaggcaaactgaatgaacagctttcaaattaaaacaaaagtagcttttggtacgaatagtttacaagttttaaaagaaattaaaaataaaaatgtctggattatctgtgaccgttttttggctgatggggaagggcttcaaggtttaattggacaattagatacatccaataatgtgcatatttttaccgatgtcgtacctgatccacctatttccaaagtagctggaggggttagtgaggcaggcaaaatccaaccgcaagtcatgattgcttttggtggtggttcagcgattgatacggctaaaggaatctactatttcgccaaacgtttggaaaaaatcaatatcagtacttttattgcaattccaaccaccagcggtacgggttcagaagttacagccgcaaccgttatcactgatccaacaacgaaaattaaatatccgcttttcttagatgaactaattccggatatggctattttggatgcgcaactggttgttacggtacctccagctattacagcgaacacagggatggacgtcttaacacacgcaattgaagcttatgtctctaaagatgcaagcgattataccgatgctct

SEQ ID NO: 3272 - DNA, 1989 bp, Listeria monocytogenes 4b
  misc_feature (1)..(end): n can be any nucleotide: a,g,c or t/u
agttagaaacgaaagatagtaagattttgcttaaaaagaataaaacggttgttgctgcagcagttcaagaagcaccaattgctatcacacaagcaccagctcaggctgcaccagtagcacaagctcaaacatctgctcctcaagcggaagcaagtacagtggaagatgctagtttagaagtcattacatctccaatggttgggactttttatgcatctgcttcaccagaagatgctaattttgttagcgttggatctaaagtatctgcgcaatctgttgtatgtattgtagaagcaatgaaattattcaatgaaattactgctgatatcgacggagaaatcgcagaaattcttgtttcaagtggcgaattagtcgaatttggacaaccactattcaaagttagaaaaaaataaggggtcgaaaaacatgattaaaaaagtactggtagcgaaccgtggagaaatcgctgtccgtatcattcgcgctgcaaaagaacttggagtggagacagtggcgatttattcggaagcagataaagaagcgctacatattcagctggcggatgaagcttattgtgtaggtcccgcagcaacaaaagatagttatttaaatatgtccaacattattagtcttgcagttttaacgaactgtgatgctattcatcctggctatggtttcttagccgaaaatgcagatttcgcggagttatgcgaagactgtaatattacttttatcggaccaagtgcttccgctatttcgcaaatgggaacaaaagatgtagcccgcgaaacgatgcgtaaagcaggtgttccaattgttcctggttcacaaggaatcgttaaggatgtagaagatggcaaaaaaatcgctaagaaaatcggttatccggttatcattaaagcaacagctggcggtggcggtaaaggtatccgtgtagcagaaaatgaagaaaaattaatttctggcattcaaactacccaacaagaagccgaagccgcatttggtgatcctggcgtttacttagaaaagtatattcaagatttccgccatgtagaaattcaagtgcttgctgataaccatggtaacgttattcatttaggagaacgtgattgtagtattcaacgtcgcttacaaaagctaattgaagaatcaccatcacctgccattgatgaaaaaactcgccaaaaaatggggaaagctgctgttaaagctgccaaagccgtgaattattctggcgcaggaacgattgaattcattttcgatcaccatgaaaataatttttactttatggaaatgaatacgcgtatccaagtagaacacccggtaaccgagcttgttactggtgttgatttagtgaaacaacaatttctagttgcttctggggaagaactacaaattaaacaagcagatgtgaaattaacaggttgggcgatggaatgtcgaattaacgctgaaaatccagagaaaaactttatgccagctccaggtgaaattaaattttatcttcctccaggtggcttaggtgttcgaattgactcagcagcatatccaaactacaaaatcccaccatactatgattcgatgattgccaaagtaatctgttatgcggaaacacgggaagaagtgattcaaaaaatgaaacgtgcgttgtccgaatttgccattgatggcattccttcaacgattccgttccatttacgtgtattagataatgatgtgtttttatcaggcgacttcaataccaaattcttggagcaaaacgatgtaatgaatctttctaaggagggctaaataatggcttatacaaaagatttgcgtaaacaaaatgatgcaccgcttggcaaaattgagattgcacctgaagtaatcggcgtaattgctggacttgccgcaagtgaaattgaaaatgttgcttatatgcaaggtggctntgcaacagaaatgcgtgagaaattcagtggtgctgtaaactaccgtaagggcggtaaa

SEQ ID NO: 3273 - DNA, 1424 bp, Listeria monocytogenes 4b
  misc_feature (1)..(end): n can be any nucleotide: a,g,c or t/u
tagtctatgtcggcgtctgtgtgcccgctggcaccccgtcacccatgccacgctcccagtggggcacattccatcactcccgccacatgttccatcatcccgccacccatttcaagtgtggccaacattgctaacatcattcaatcccctattgcttcgccggaacgtgtatttgaaatgatggatgaagaagaagaaaaagtcgaaattccagctaacgttaatcaagttgctggcgaagaacacagcattgtattcgaccacgtgaaattcggttacactccggataaacctctaatgactgacttaaatattcatgtggaagaaggccagatggtagcaattgttggtccgactggtgctggtaaaacaaccattatcaacttgctgatgcgtttctatgacgtagatggtgggcagatccggatgaaaggtattgatacacgcgatatgaccaaagatgctgtccgcgaaaaattcggaatggtactgcaagatacttggttatttaacggaaccattgccgacaatatcgcatacggtcgtgaaggcgcaacgaaagaggaagttatcggagcagcaaaagcagcttatgcagatgatttcattcgcagacttccaaatggttatgataccgtcttgaatgaagaaggttctaacatttcgcaaggtcaaaaacaattactaacgattgcccgtgcgattttatctgatccatctatcttgattttagatgaagcgacttctagcgtagatactcgtacagaattaaacattcaacttgcgatgggtaatttgatggaagggcgcacaagctttgtgattgcgcatagactttcaactattcgtgatgcagacttaattctcgtgatgaatcacggtagtgtaatcgaacaaggtacgcaccaagaactactggacgcaaaaggcttctacgctgacctttacaacagtcagttcacaggagctcaagccgtttaaatgtaagaagacaatgtggctcacccgccgcattgtctttttttgagcaaaaaatttgtttgatggtggattaggcgttatggttaataaagaagaaattgaagaggtgaaaatagatgtatcaatccattactgcaaatgatttagaacaagacttaaaaaaagcgtcacataatatcttagatgtcagagatgcagatgcttttgttgaaggacacattccggacgcaataaatattccaattaatgaactaccagaaaaattagcttctcttgataaagagaaaccttatacaattatctgttatgctggaggtcgttctgagcgcgcgagtcaatttttagctgcagaaggctttaacgtaacgaatgtctttccagcacatggcggccgtactcgtggtacgagctgctaagaactggagtacttncaaaaggtagac

SEQ ID NO: 3274 - DNA, 2111 bp, Listeria monocytogenes 4b
  misc_feature (1)..(end): n can be any nucleotide: a,g,c or t/u
gaacaactgactttgcgcgagcttaaataaactaacagctgagcaaaaggaatccctgcactccgtaaatctttggtcgctaaatgagccgccaagtcttttctcgtaacggcttgttctgaaacaatttccgaaacgacttctgtagccttatgaagaacctcatctgttaagcctaatttcgctcggcatggcttacatattttatctatggaaggcgcaattaaatccatcatccagtgataatctttggctgaaaacaagtgaattgttccgcgcaaaagccatgtccggataatttcaccattattaatcgcttgctctacagccttttcacttggcgtcgtcattctactcccaacagcccagagcgactgaccatagttttgcgattgcattgctccaaaatgaaaaacaattctttccggagagtcactccacgcagtttgtattaatttctgactttgaaagcggttttctattattgtgtttgcgtccatctgttaacctctttttttagtttattgtagcataaaaatcccctccagttcgataagctggaagggattttttcactattagaaattaaagttgtctggatctgggccagttctttcgtctttatttaaaccgctgatttttgctacttcttcttcgcttaattcgaagtcgaaaatatcagcattttggataatacgttcttggtgaacggattttggaatagtcacgacaccgatttgtaaatcccaacgtaagataacttgtgcaactgatttaccatgtgcatcggcaatcgctttgatttctgggttagaaagtaatttcccattacctagtggagaccaagcttctactacaatgttgttttcagcacagaatttacgtaatggttcttgtgttagttgtgggtgtaattcaatttggtttaccattggcgcaatttccgcgtcttccattaattcttttaggtgatgttcgtggaagttacatacgccgattgcgcgaacgcgtttatctttatataatttttcaaaagcgcgccaagtgtctttgaatttacctttgactggccagtgaattaaatataagtctacataatcaagttctaatttacgtaagctttcatcaaatgcagccaaagtggattcataaccttgctccgcattccaaagtttcgttgttacgaataagtcttctctcttaacgccagactctttaatcgcttgaccaacgccttcttcatttttgtaagcagcagctgtatcaatactaatgtaaccagcttcaatcgcccatttaacagaatttactgcttcatcgccgtcctgcactttccatacgccaaatcctaaacggggcatttctacaccatttgcaagttttactgtatcttttaagttcaatttatccgcctcctaaaagtaataacacgtttactatacaccttagagtatactcaaaggcaaacatttggcttttcgattttcaaggtgctattattaagaaaaaagaggtggttttagtgcaacaaacaatcaaagaagcgtccgaacacacgggtttaagcgcccatacgattcgctattatgaacgagaaggattaatcccttttctagcacgcgataaaaataataaccggatttttgataatgatgcccttcactggcttgaattactcacctgtttacgcgtcaccggaatgccccttgcgaaacaaaaagaaattgttgaactaactaaaggcggtgacggtactgtctccgaacgcatcgctgtactgaaagaacatcaacaagatatgtaccgccggcaagcagagctagaccgagcatttaaaaaaatcgagaaaaaattagcttgttacgaagagttagaacaagcagtaaataaaagtgtggaccagtttagctaactgatccacacttttttatagttgttttttctttttccgatgtcttttaataagataaataagtagaccaatgattgcgacaagtagaatcccaccaacaatcgcaatgttttttacgtttggtacagtgacttcaaaatacatttcggattttttgtcgagcggcacatcccaagtgagcttcccgccatccacactt

SEQ ID NO: 3275 - DNA, 1888 bp, Listeria monocytogenes 4b
  misc_feature (1)..(end): n can be any nucleotide: a,g,c or t/u
acaaatcgaagcaaccgatgaagaaatcaaagcgatgacaagttcaagcaaagcactagaaagcaaacgtgcagcagatttagaaagtctgtcatccttaaaagcgcaaatcgccgctaaacgagagcaacttcaatctgctacagaagccgtcgagcgagtaacgacaacgctacatgaaaattacgaacaaaaagaagcggctgaacaaaaactagcttccttaaaaaccaacttaactagcgttcatacaagcgaagaatcagctagaaaatccattgaagaactgcgcaaagataaggctgaaacaagcgaaaaacttgcgcaaacaagacaaactcgtgctgaactacaagaaaaattagaactattagaagccgaattaacacaaaaaaataatcaaatcagtttttacgtggagcaaaaaaataatgcagaaataagcatcggtcgtttagaagtagatattaataaccgaattgatcgtttgcaagaagcttacttactaacaccagagcaagccgaagaaaaaatcttgacagaagtaaataccgaacaagctcgttcgaaagttcgcttattaaaacgttctatcgatgaattaggtatcgtcaatattggtgccatcgaagaatttgagcgtatccaagaacgttttgacttcctaaacaggcaacaagcggacttacttgccgcaaaagaaaccctttttaaagtcatggacgaaatggacgaagaaatgaaaattcgttttagtgaaagttttgaagcaattaaaaccgaatttgcgattgttttccctgagctatttggtggaggtagcgcggaactggtgctccttgatccagaaaatctcctaacaaccgggattgatatcgtcgttcaaccacctgggaaaaaattacaaaacctatcgcttcgttctggcggagaacgtgcgctaacggcgattgcattattatttgctatcattcgcgttcgcccagtaccattctgtattttggatgaagtagaggcggctttagatgaagccaatgttacacgattcagccgttacttaaagcaattcgagtccggcacgcagttcatcgttatcacacatcgtaaaggaacaatggaagaagccgacgtattatacggcgtcaccatgcaagagtccggcgtctccaaactagtatcagttcgtttagaagaaacagctgaactcattaaataaaaggagtaaacaaaatgaccttttttaaaaaattaaaagataaaataactcagcaaactgattctgtttctggaaaatttaaagatggcttatccaaaacacgcggcaacttttccggaaaaattaacgaaatggttgctcgctatcgtaaagtcgacgaagatttctttgaagaactagaagaaatccttatcggagcagacgttggttttgaaactgtcatggaactagtcgatacgctacgccgtgaagttcaacttagaaacatcagtgatccaaaagacgtacaagaagtgatagtcgaaaaattagtcgagatttaccaaggagacgaaaaagaagacgaagcacttcatatcgaagaagacgggctaaccgttatcttgtttgttggtgtgaatggggttggtaaaacaacctccatcggaaaaatggctcatcgctttaaacaagaaggtaaaaaagtgatgttagctgctggcgatacattccgtgctggtgccattgatcaattagaagtctggggcgagcgtaccggcgtcgatgttattaaacaagccgagggaagcgaccctgcagcggtgatgtttgatgccgttcaagcagcaaaagcacgcaaagcggacgttttactttgcgatacagctggccgtttacaaaacaaagtcaatc

SEQ ID NO: 3276 - DNA, 2218 bp, Listeria monocytogenes 4b
  misc_feature (1)..(end): n can be any nucleotide: a,g,c or t/u
taaacttgttcacgcactaaaagatatttatggaaggagtgaaaactagtggcactagaagataaagatttacgctcaatccaagaagttcgtaacctcattgaatcagctaacaaagcacaaaaagaacttgctgcaatgagccaacaacaaattgatacaattgtaaaagcaatagctgatgccggttatggtgctcgcgaaaaacttgcgaaaatggcccatgaagaaactggtttcggaatttggcaagacaaagtaatcaaaaacgtctttgcgtcgaaacatgtttacaattacatcaaagatatgaaaaccattggtatgttaaaagaagataacgaagagaaagtaatggaggttgcagttccacttggcgtagtagcaggattaattccttctacaaaccctacatccactgttatttacaaaacacttatttcgattaaagccggaaatagtatcgtattttctccacatccaaacgcattaaaagcaattcttgaaacagtaagaatcattagtgaagcagcagaaaaagctggttgtccaaaaggcgctatcagctgtatgactgttccaaccatccaaggaacagatcaactgatgaaacacaaagatacagcagttatccttgcaacaggtggatctgcaatggtaaaagcggcttattcatctggtactccagcaattggagttggtccaggtaatggcccagcatttatcgaacgcagtgctaacattcctcgcgcagtgaaacatattcttgattccaaaacattcgataacggaacaatttgcgcatctgagcaatctgtcgttgtggaacgtgtgaataaagaagctgtcattgctgaatttagaaaacaaggagcacacttcttatccgatgcagaagctgttcaacttggtaaattcatcttacgtccaaatggttcgatgaatccagcaatcgtaggtaaaagcgtgcaacatatcgctaaccttgctggtctaactgttccagctgacgcaagagtacttatcgctgaagaaacaaaagttggcgctaaaatcccttattcaagagaaaaattagctccaatcttggcgttctatacagccgaaacttggcaagaagcttgtgaacttagcatggatattctttatcatgaaggagctggacatactttaatcatccactctgaagataaagaaatcattcgcgaattcgcactgaaaaaaccagtttcccgtctcttagttaatacaccaggagcacttggtggaattggcgcaacaacaaatcttgtacctgctttaacacttggttgtggggcagttggaggaagttcatcatctgataatatcggacctgaaaatcttttcaacattcgtcgcatcgctactggcgttttagagttagaagatattcgtaaagaagaaaaccaagcaacatctgaacttccggttgatgcagacgcactcatccaaagtttagtcgaaaaagttttagcagaattaaaataaaaaataaaacactaattggaggaattttaaaatggcaaacgcaaacgcattaggtatgatcgaaactaaaggtttagtaggagcagtagaggcagcagacgcaatggtgaaagcagctaacgtaacacttatgggtaaagaacaagttggtggcggtctagtaacagttatggttcgcggcgatgttggcgcagttaaagcagcaacagatgcaggcgcagcagcagcagaacgcgttggtgaattactatctgtacacgtaatcccacgtccacacagcgaagtagacgcaattctaccaaaaagcgctgaataagactaacttttaacataaatcaggaaaaagcgtgagcgtaaggcaaaagggttccatcagactcggaaattgcccgaaactttcgctttttaccagatttaagcaatacaaagcttcccaacattactaacaccaattgtaaatgggacaaaaggatgtggttctttggctattttgacagaagatgagttacgaaaagcctatttacacaccgatttaaaaacaaccaaaaaacttgatataaaaaaaggcacaattatcacaccttcagctaagagtttcttgtctgaaaagaaaattgaccttcattatattgatgaaattgcagaaacaaaagtagtagtggagccagtgaaaaaagaaactactagagcaaaattccaaacgatttat

SEQ ID NO: 3277 - DNA, 1767 bp, Listeria monocytogenes 4b
  misc_feature (1)..(end): n can be any nucleotide: a,g,c or t/u
ttattcaggcgtagaaacatcaggccacaatcgctctattaatcgaaaaaaatacgacttggcggaaattacagcagagttggaacaaagaggctccttacgaaaagcaacttatgatgcgttaacgaaattaattagcacacgaaaagcggaatcacttttccatccagaaataccgatggaagttttagaatctacggcggaattgtttgttgttaaacgttcatccgacgtggaatcgattatattgattcataatttatcagaaaaagaagtgagttattcactagacagcggtgtttatacaaatctttatacgggctccacagtaactgggagcgattccataaagcttagtggctatgaattctgctggctaaaaaccaaaaattacagggaggaacaaaaatgaagaaaaagagtcttgtattacttgttgttgtgttggttctaagtgcggttctagctgcatgtggagggaaagagtctagtagtaaggaagtaacgattgaatttatgcattcatccgttgaaaaagagcgtttagatgttattaataaattaattgctgattttgaaaaagaaaatccaacaatcaaaatcaaacaaattccagttgaagaagatgcgtttaatacaaaagttgtcacacttgctcgctctggtaaacttccagcagttatggaagtaagccaagattttgccaaagtaatggataaagatgagttgattgaccaagatgcagtgaaagaagttatcgactcggttggagaagacaaatactacgaaggtgcaacaaacttagtacgttctgaagatggtaaaagctatatcgcagcaccattaagcggttgggttcaaggtatttggtacaacaaaaaagctttagccgatgctggttttgaagaacctaaaaactgggcggatattgaaaaagtagcgaanaaattcacaaataaagcagataaaaaatacggtattgcaattccaacagcagaaagcacgatgagtgagcaagctttctcccaatttgcactttctaataaagccaatgttttagatgcaaaatgtaatgtaacgattgatacaccagaaatgaaagaagcacttcaatattataaagatttgtcagcatacacgatgcctggttcaaatgatgtaactgaaattaaagatgcatttatgaatggaacagttccgatggcaatgtactctacgtatatcctttatctgtttatgaagaaggcgatccaaaaaatatcggtttcgcaattccagaagaaaaagaaaaagcagtttatggtacagtttctggtttaactatttcagcaggacttgatgatgagcaaaagaaagcaacgaagaaatttgttgaatacttgtctcaaccagaaaatatggcaacttgggtattaatgtctccaggtggagcgccccctccgcctccacaacgtcccgaacgctccgcctccgcgcaccgtgaaccgctctcctccccctggtgaactgtcgcgtgacctctgcgccgtcgctctctgccctcccccttcatcacttactctcccccccctccttcctccttnggccccgtcgcctcctgccgccccccctccgcgcgccgctctcttccccccctcctcctctcctccctcctctctcttctctcctcccctccgcccccccctcctcccccccccgccgccccccccctccccgtcctctcctcccctccccccccttcgccctcgcccaaaaaaccaaacaaaa

SEQ ID NO: 3278 - DNA, 2096 bp, Listeria monocytogenes 4b
  misc_feature (1)..(end): n can be any nucleotide: a,g,c or t/u
agctgtgcgagggccacagtgtgctggaaagaattaactttaaaaggagcttaaacggatgattagagcgatttctgtagatatggacgggacttttttagatggaaatggtgaatatgatcgtgctagatttgagaagatttatgttgaattaatgaagcgtgggattaaatttattgttgcgagtgggaatcaatattatcagcttaaatctttttttccagggaaggatgaggagcttttttatgttgctgaaaatggggcggttatttttcatcaaggggaacttcggagtgtgaatcgttttgaggaaagattagttcaaaagattttgcggacgttgattcaagaatatcaagatttgcaagtgattctttgtggggtgaagagtgcgtatttattaaaagccgccgatcccgattttaaagcatttgcgaaaaagtattattttgagttgcaagagttggattcgttcgatgtatttccggatgatacgtttattaagttcgcgcttgatgtggaagtggctaagacagggcaaattgtggaagatttgaatcaaacgtttgccggtgaaattcgcgctgtgtcgagcgggcatggaagtattgatattataattccgggtgtgacgaaagggagcgcgattcagcaactattgaatgaatggcaagtggcgccagatgatttactcgcttttggtgatgcgaataatgatatcgaaatgttgcaattaacgtcgcatagttacgcaatgcaagaaagcagtccggaagttcttgctgctgcgaaacatgtggctccttctaataaagaagcgggcgtgttacaagttatagaagagtatatgaaaaaaagccaaagaccttgaggtggtctttggctttttttatttcaataaactaaggaacacgacgcccaccattattaacagtatgccagaaaggataaaagtccattccagcgggctttttttctgtttgaaaatgaggataccgccgattgttgcgacgataacgcaagcttgtgaaatcgagaagctcgttgcgacaccaagtacagcagtcgctaagaacatgcctaaattggcgatggaccacgataatccggtcattaagttgaatgtaacattttttcgggaaatagcagtctttttcgctaagttaataccaatggcgcatgtcagcataccgattgcttgtggtaaaatgatagaaaagccagtgacatcaaaaagctggtttgtcactacgtaaagcgttaaaaagaacgaagatagaataacgataccgtagacatgaaatgaaaccgactccgtgatatgattcccgcgtttttgaaacccggtcattaccaccccaatcaagattaaaattactgcaacaactccgataataacagccgtaaccgtttgccattcccggaaaacaagaacggcaaaaagcgttgcgccaacgagttgtgtaccgtttgaaatcggcattgccttcgcgacactagaagccgcaatccctttaaactgtagtaattgcccaaaactccaaaagatacccgaaacaaaactcactataaaagaaagaaccgttatttctggtgataaaatccagaacaaaatgaaagcaaataatagcgcgctaatcgaagtccccagtagttgttcctcgggggtgctttttcgtaagttcgcaattattggcataaatccccacccaagaacagggagtaacgcaataagataaatagacataaaataagcttcctttctaggttagtggtgctatttaaatctaccattctccaaaatgaacagcaatatcccaaaattacggtattcaatgcggtaattttcgtagttttctggggatgagtctttgtaatagaataagcgtagggaaaggaaaattaaaaatgaaagcggtaacgaaaatgattgcaaatcgcgaaaaaaatatcattcagtttctaatgaagacaggtcaaacacgtgttggaactatcgcgaatcatctcggactttcagaanaaacagtatcaaactcactgaaggaaatcgatgtttttctaaaggattttgatatgacagtggtcccgtaacc

SEQ ID NO: 3279 - DNA, 1673 bp, Listeria monocytogenes 4b
  misc_feature (1)..(end): n can be any nucleotide: a,g,c or t/u
aatgatgcgagaagttttatccatcacatatgcatgggtttttgatcactaatagtgcatggtataataaagctaaaaggtgttggaggttttggggtgaaactagaacggattttagcaatactagtcatgattttggagcgaaaagtgctggcaagtgagctggctgaaaaatttgaagtaagcacaaggacgatttatcgcgatctggatacgctactttatgcgggatttccagttgttgctttgccgggaaaaaacggcgggttcacaatgctcgatacatataagctggcgacatttactttttcggaggcggaaaaacagattttgctggaggcattagaggcgcgttcggagtttatgctgaatgatagccacgagattttgcgagaaaaaatcacgctattacagactgaaaaaccaactagtaagcatattttctttgattcagcgacacaacatcgccagcaaattgaagcagaagtgaaacgaaaagtcgcctatatccagaaagcttttacgacaaataaacaacttaaaattacgtatatcgctatgagtggcgcggaaacaacgcgggagatttcgccgcaaaaattaaacttgatggatggaagttggtatttagaagcctattgccacaaaagagcagcgattcgtcattttaaattaacgcgaataacttctttgaaagaaataggtaaatcgattatgtacgttgaagaaacggagcaccagcctgcagaaatgaagaaaattgtgttggaatttccgaaaaatcagctcgggaaattgttggattattttttgcaagaagaaatggagactggagacgattatgtccgtgtaagctttttctatgatttggagcgcaatataataccgtttttattgatgtttggaagtgccgtgaaaattttagaacctgcatcgcttcaaaaagactacaaatccgaagtggaaaaactttattttaatttgaattgttgacagatagttgtcaggttttgttcgctataatggttttaaaaggaggcggcaaataatgattttacaagaaaatatagagatttttgggaaaaagatacgtgtaaacaatgataattttagtccgattgcagagctttggggtgatgtaatggtagataagcctgcaggagatatttttgcggtatatagtaattatgcaagtgattacaaaggtgactatgatttgttggtaggaacaaaagactgggatgaagagaagagtgtcttaattaaagctggagattatttagttttttctgtagataatgcgagtcataaaggcgtggaagaaacttggcagaagatttgggcgcgagatagtgaattaaaacgagcgtacaaaacagattttgaatggtatcatacgagtggcgagatagatatatatatttcaatatgaaaaatcccctcgcaaggaggagattgggtgattatttaagtttttctgctgctttagagggaacttctttttctgggacttcttcataggaagttacgcctttgtcttctttaatatacaattttaaataagcacctttgcgtaaatttttgtctgcagaaaaagtaacttctgtttctttcccggcttcatcatatgctggcattgtataggaatagttgaagcttacgtttttgccttt

SEQ ID NO: 3280 - DNA, 2950 bp, Listeria monocytogenes 4b
  misc_feature (1)..(end): n can be any nucleotide: a,g,c or t/u
gcagaagggaaaaagattttttatcataaagcattaacggaaaaagaagaagcagcctatgtagttatgaaaattcaagaagaagtaaataactcgaatcgaccactttctgactttgcgattctttatagaactaacgcccagtcccgtgtcatggaagaatatttcatgaagtcgaatatggcgtacacgatggtcggcggcacgaagttctatgacagaaaagaaattaaagacattttggcgtatttacgtcttattagtaataatgaagatgatattagtttgacacgtatcgttaacgttccaaaacgcggcgttggaccaggtactttagataaactaaataatgtggcgaccacgtatgatttgagcttgtttgaagtccttaaccgcatcgaactagcgggaatttcgcctaaaataagcaaagacttagttgcgtttcatgatttgattcgcggcttcacgcaaatgcaagatttcttatccgtaaccgaactcgtagaagaaatccttgaaaaaacaggctaccgcgcaatgctaaaaaatgaacgaaccattgaagcgcaaacacgtttagaaaatatcgacgagtttttatctgtaacacaaaactttgaaaaggaaaatgacgataaaacgttaattgcctttttaactgatttagcactcgttgctgacgtcgataagttagaagaagacaatgaagaacaaaacggggctgtcacactgatgacacttcactctgccaaagggctagaattcccagttgtttttttggttgggatggaagaagggattttcccacattctagagccatttatgaggaagatgaaatggaagaagagcgtcgacttgcttacgttggtattactcgagcggaagaagaacttttcctaacgagcgcttactcacggatgctttatggtcgtccgtcctctaatcaggaatctcgttttattggagaaatacctcgagacttacttgagttaggtaatgaaaacaaattaaaagcagacaaaccatatgccaaaccgcgtatgccacaaaaaacaactactgcgtataaatcctctggagcagaaacgcttggttggacagtcggcgataaagccagtcataaaaaatggggcgtaggaacagtcgtcagtgtcaaaggggaaggtagcggaatggaactagatattgcattcccaagcccaactggcgtcaaacgattgctcgcagaatttgcgccaattgaaaaagtataaatttggaaaaagcaggtgaagaatgatggctgataaaaaaaggtatgaggaactaatcaacatacttgatcagtacagctatgattattatgtaattgataatccaacagtagaagatgccgaatacgatcagaagatgcaagaattacttaaaatagaagaagcgcatcccgagtgggttacacctgagtctccgtcaaaacgagttggcggggaagttttagaaggttttaaaaaagtagcacatgacacgccgatgttaagtcttgccaacgcttttaaccaagaagacttggcagactttgaccgccgaattcgcgacaaagtgggcgatgatattgcttatatgtgcgaacttaaaattgacggactagcagtatcccttcaatacgaaaatggtaaatacaaacaaggtgctactcgtggtgatggaaccattggggaagacattactgctaacttgcgtacgattcgctccatcccaatgaaacttcaaaaggactattccattgaagttcgcggtgaagctttcatgccaaaacgctccttccaaaaactaaatgaaattcgcgaagaagaaggccagatgttatttgccaatccacgaaatgctgcggctggctcgcttcgacaattggacacaaaaatcgcagcgtcgagaaatctcgatatcttcctttatgcagtagcagattttggtgaaatgggcgttgaaactcatagcgcaggcttagatatgcttgaaacacttggtcttaaagtcaataaagaacgccgactttgcaacagtttagaagaagtttatgcgtacattgaagaatggacagaaaaacgcgccggattagcatacgatattgacggcattgttttaaaattaaacaacttagagcaacaacgccaaatgggaaacaccgttaaatcgcctcgttggtcgattgcttataaattcccagccgaagaagtaccaactaagttactcgatatcgaattaaatgttggtagaactggtgtgataactcccaccgccgtgttagaaccagtgcgagtggcagggacaaccgttagccgcgcttcgcttcataatgaagacctaattacagagaaagatatccgcattggcgacaccgttttaatcaaaaaagctgtcgatatgattccagaagtcattaaaagcatcaccgaaaaacgtagcggaagtgaagaacctttccatatgccaaaaaattgtccagcgtgcgaaagggaattggctcggctagaagaagacagtgcgctgagatgtattaatcctaaatgggcagctcaaataaaagaagggcttatccgctttgtctccagaaatgcgatgaacatttatggcctcggcgaaaaagtaattatccagctattttcacagcatttaattaaagatgtagcagatttgtttttcctttcgaaggagaagctgttagaattagaaagaatgggtgagaaatcagtaactaatttactggcatccatcgaagcaagtaaacaaaactcgcttgaaaaattacttttcggcttaggcattcgccatgttggtgcaaaagccgccaaatcacttgccattcatttcgatacaatggataatttgaaagtagcagacaaagaaacactgacaagtattaacgacattggtgaaaaaatggcagacagtattgtcacttatttc

SEQ ID NO: 3281 - DNA, 1554 bp, Listeria monocytogenes 4b
  misc_feature (1)..(end): n can be any nucleotide: a,g,c or t/u
taagtggttcacgtgcaaaaccctgtgattgttgaaaaataagaagtgaatgaacaagccgtttcgaggtagatggcttgtttttttgcgcgctcgaattttcagataattattgaatttttatatcttatgcggtatattaagaataaaaaagcagggatggatttaagtggattcaaacaacgagaaattgaaacaacaactacaaactctccaaaaacaacaaaaagatgcggaattatccttatatatgctcaaacatgaacaaaatgagcgaatttggctagaagaagattttgagcggatttgttacgaagaacgcgagtctttggagttgatgagagaagtctggcaaggcgatcaagctcgcaatttcggctactatttagaagacctccaagcagacgagaaaaataaatggtgccaaacctttcaagctgaggaagaaaaacgccaagaaaaaataaatacataccaaaaaaacatctaccaattggaaagtaaacaacaagatatacaaaaggagttgttccagtgagccgaatcgacatcggagaaatacaagattttgcattccaactacgcgcagccaaccaaacaggaagaaaaatcatccaaggcgtcaaaaccaccgtgacaaactacgtagaagatggtagtttaaaagggaaggccgtggaagcgtccaaaaattactttcaaatgacatacattccactctgcgacacgataatcgaggcaatgaatgagagtgaggaaaggttgaagcggtatatccaagactttcacgaccaagtagacctttctcctaatgctaaaattgatgcagatggtttatatgaactcggccaaatgattgaccgcattgaaagcaaaaaagaagcactgtaccaacgaatgaacagcagtacagaaggccaaatgcaaacctatcgttcccagttagcaaccgcatataagcaagaaaatattttagagaaatatctggcttttgaacaaagtcatggggcttttttcgaccatttgacggatttagtgcaaggtatccagcaaactgttcgagagttacaatcaaatatccagtttgatagtcaaacgggcagctatgatttaagtaaattaaattttgccactgtgaaccgaatgcgaaaaacgctaggaaaagcgagtgccactgatacgacagtctataattttgcgagttatagcaaagtaaaacaaggcgttatgtggattctttcaaaagatgggaaagtggatattaaagcaacggaggcttataatacagtcagttttaacggcgagctgccaaaagaaagttaccaagccacggaagaaggcgagtggttaaaagccatactggaattactgaagccgaatagggatgtcgctatctggcgcataaataatcccaggtgaaacctgccggcatctttaccctccctctgtcgccgctcccgatcacttccaccgccactgcttgcggcggtctctccccctgcccgtccgacagcgcctcaggtcgcgcgcatccggctgcatccgccacgcagc

SEQ ID NO: 3282 - DNA, 1072 bp, Listeria monocytogenes 4b
  misc_feature (1)..(end): n can be any nucleotide: a,g,c or t/u
aaaagataattagtagcatccccaaacccatttttaagcttatcacttcaccattcagatcactccaatatagcattgagatagtttagtaatattgtaacataattatgcggggaagagggggaactgggtttgaggataatcatttagagaggctctttcggcacgataagacacaaaaaagaaccggaattttaatcccggttcttttcgaattattataaccacccattacccaagtggtgaataaccagctggtggaagtcctaagataccagaccagtaacctagaataccaacaacgaatagtcctaaaatcaaccataaagcattgactttcttcttgagtatccacatacaagcgaatgtgagtagaagggcaagaagacctggcattaattggtccaagatactttgaacagtagttggaacgtctttaccagttttagagtcttctgttgtataagctactagtggaacatagattgtggtccatttattaacaagggcacccatgacgaatagtccaagaatggaagctccttctgttagtttttgaagcaaaccgccagacatatcagatacaacatctgtaccttttgtatatccgtagaacacgccccaataacggaaacctaaacgaattgcattaaatagtacgaagaataaaattggtccgatgatactaccgtcagttgcaaaacctgcacctaaagcggcaagtactggacgaactgttccccagaaaattggatccccaacgccggcaagtggtcccattagacctactttaataccattgattgcaccgtcgtcgatatcagcaccattggctttttgttcttccatcgcggttgttacacctaagataggagcggccatatatggatgcgtattaaagaactcaaggtgacgtttgatagcttgttctctttcaggtcctttttcaggataaagacgtttaattactggaattactgagaaacagaatcctagagattgcatacgttcaaagttccacgacccttggaagaggttggaacgtatgaacacgcccattaagtcacttttc

SEQ ID NO: 3283 - DNA, 1796 bp, Listeria monocytogenes 4b
  misc_feature (1)..(end): n can be any nucleotide: a,g,c or t/u
ttctaaattgtgataaaatagtttcgaacgcgtctaataatgcgatttttgcgcgcctaaaatttgataaaagtgggggaataaaaatgtctaaattaactaaaattcaagaaacgctgggcaaggaaaagatagaagccgttcttgtcacaagtgagtttaatagaaggtatgtatcaggtttcactggaacaagtggtgtggcgctaattttacctgaaaaagcttattttgtaactgatttcagatatacggaacaagcagcaaaacaagcagaaggatacgaaattgtacaacatactggtccgatttttgatacagtagaagatttattaattaaaaatgatacaaaaacactacattttgaagcggattatgtgaccgtatctgaatttaaacaaatggagcgcgtatttaatcgtcaattaatcccacttactggcttctttgaagaaatgcgtaaagtgaaaacagcaagtgaactaaaagcaatccgcacagcttgtgatattgctgatgcagcttttgcacatatcattcaatttatcaaaccaggcatggctgaaatcgaagtatctaatgaactagaattctttatgagacgtgcgggagctacttcctcgtcgtttgatacaattgtcgcatctggtgttcgttctgcgttaccgcatggtgttgcttcggataaaaaaatcgaagttggcgatttcgttacaatggattacggctgttactatgacggttattgttcagatatgacaagaactatcgcggtcggtgaacctgctgaaaaattaaaagaaatttaccaaattacgttagatgcgcaattaaaagtaatcgatagcttaaaaccaggtatgactggaattgaagcagatgctattgcacgtgattatattgcttcttttggctatggcgatgcatttggacattctttaggacatggtattggactagaaattcacgaaggacctaatttatcctttaagagccctcaaaaactagaagtcggacatgttgtgacggatgaaccaggaatttatttaccaggaatcggtggcgttagaattgaagatgatctcttaattacagaaacaggtaatgagattttaattcattcaccaaaagaattaattattttataaaattcctttgtaactttgtgtgttttatggttaaataaggaagaatgagcagttttaatatgctccaaataaagatactttgcaaattacaggaggaaaaacatgatttcagtaaatgactttaaaacagggttaacaatagaagtagataatggtatttggcgtgtgctagattttcaacatgtaaaacccggaaaaggagcagcattcgttcgttccaaattacgtaaccttcgtacaggtgcaatccaagaaaaaacattccgtggtggcgaaaaagtagcaaaagcgcaaatcgacaaccgtaaaatggcctacttgtatgctgacggcacaaatcacgtattcatggataatgagtcttatgaacaaattgagcttccagaagaccaaattgctcatgaacttaaattcctaaaagaaaatatggaaattaatattatcatgtatcaaggcgaaacaatcggtattgatttacctaacacagtagaattagttgttactgcaactgatcctggaattaaaggtgatacttcttcaggcggttctaaaccagccactcttgaaactggtcttgttgtccaagtgccatttttcgttaatgaaggagacaaactagtaattaatacaaccgaagcagcgtatgtt

SEQ ID NO: 3284 - DNA, 1260 bp, Listeria monocytogenes 4b
  misc_feature (1)..(end): n can be any nucleotide: a,g,c or t/u
accgaaatatctctcattttttaaaagggttagtaaaaatgcaaaataatcatatccaagaaggatacaaccaagcaaaaaaagccattcaaattatgaatgacctccgttttgaagagattgcttatttatatgaaattttgttggatcagtttatcaggataaaaggtatagatattgttaagagctagctttctagcagccaagattcattcatacttttgtctttcccaaaatgttttccgtgcacatcaatgactgagtgccattctttacatagtttatgtggaatattctctattattggcataaattcatcgcgcatttgtgcataagttgtatattcaccaaaacccaacctagtaaatagtcgtctggcatataagtcagcaataaacacattccgctcaaaaatatacagcaacattgcatccgccgtttcttccccgacaccctttatgcctaccaactcttttcgtaaagcttccgttgaatacgtctgaaacttatctaaactagctccgtgaccatagaaccactcagcaagtgctttaatatagatacttttttgtttataaaaacccgctggatagattaattcttccaatttcgctttatccatttcaattaagctatctaaatctaaatatggtgcaaggttcgctaatgcttgtttggcatttttctctgtcgtacgctggattaatatcatcgaaagccaatcagccagacgattatcggcttcccaccaatcttgataaccataatgctccactaaattatttaaaactaacactttttgttcgtttacattcaccttgcatcacctcgttccaatctgttattcttttgtgtcacttcagcgtaaattcttttgagacttattcttagtaaatattaaaagagaaagtaacatgtactctctcttattcttgatttgttatatctatgctatttttagcaataacttttacatagttgctaacagaaaccagagtctttattaatgactaattcaagcccttaaacatcgtaatctaattaataaaaagcacaaaaatacttcacgacttaattttctcccacaaatcatcaaataacttaccatattctctaacttcaactctgacttgaacccaaacctctgtaggactcaacccctttcatgtttttggatacctccccttggcctttcctgaatgttcacccaacctcttagaaaccggtttttttgagaacccgtattaaatatttattatc

SEQ ID NO: 3285 - DNA, 1680 bp, Listeria monocytogenes 4b
  misc_feature (1)..(end): n can be any nucleotide: a,g,c or t/u
agcctattccatcgaacatacttatatgccacttgcgattattccgggtctagaaccacgtcatttagaggactcgatttataattatattcgggatgatttgaaacttaagatgcagagtgcgcatgtttgggtacgcggggataaatcaaatcaagaggatagcaagctcctcgatttagaagaacctacttttatgatggaaattgaaaaattagcgcatttggaagatggtcgtgtgttcgaatattcgataacgcgccatacgtatgaatcgtttgtgtttgaaacggtttttgtgcagaattaaaaaaaacagcgactctctactaagagaatcgctgttttttatatcttcttaacaaattctgattttaatttcattgggccgaagccgtcaattttgcaatcaatgtcgtggtcgccgtctactaggcggatattttttacttttgttcccattttgattgggtttgatgcgccttttactttaagatctttgatgactgtgacagaatccccatctgttagtacgttgccgtttgcatctttgaacactttttcttcggtagcttcttctgctacagcgctccactcatggccgcattccgggcagattaataagccgcgatcttcgtaggcatactctgagttacattctgggcaatttggtaattttggcattttatcaattcctccgattgttgtaatagttggctgttaatcttctaattcgacgttatgatatactttttgcacgtcttctaggtcttctaaagcatcaattagtttctcgaatttttctaagtcctcacctgataattgaatatcattttgaggaatcatttcgatttccgctactgtaaattcttcaattccagccgctttcaaaccttcttgtactttgtggaaatcttctggttctgcataaataatcgcttggccatcttcgtctaaaatatcacgaacatcaatatccgcttccattaaaagttctaataactcatccgcgtcttttccttcaacaccaaaaatggctgtattatcaaacatataagctactgaaccacttacgcccatgttgccgccgtttttgctataagctgcgcgaacatcggatgccgtacgattcacattatttgtcagtgcgtctacgataatcatcgaaccatttggaccaaagccttcatagcgcagttctgaatatgtttcatcgccagtgcctttcgctttttcgattgcacggtcaataatatgtttcggcacattgtatgtttttgcacgttcaataacaaaacgtaatttttggttggaatgtggatctgggtcgcccgatttagccgctacatatatttcaattccaaattttgcatagatacgactatttgttttatcttttgacgcttttttctctttaatatttgcccatttacggcccatattaccactcgctttctaattggagttttctcgtgtctctgtactattataagtgtaggaaacgaatttgttaagtggaaatttagctatattcgttaaaaatggatagatgtggcgtttttcaggtcaaaaagctgatttaaaaagaagtatggaatgaattcgcccgaacttcttaatgcttctaactcttctttagtgacaaaacgggcatctgctacttcttctttctgtaagcta

SEQ ID NO: 3286 - DNA, 1144 bp, Listeria monocytogenes 4b
  misc_feature (1)..(end): n can be any nucleotide: a,g,c or t/u
tctgcgagcatatctactatcttttgatcggagagtggttttaatttatcttctgctgctacaaattcttgtactagctttttgatagttgtacttgaaatatcacctgtgttttcgttctcggaagatttcttttgtaaaccggatgcaaagaagcgttttaattcgtacacaccattcgttgtttccatgtattttccattcaccgcacggctcacggttgattcatgtacaccaagctcttccgctacttcttttaaggttaatggttgtaaatgcgcggaattatctaggaaataagctttctgatgattgacaatcgcctctccaactctttgcaaggtgttttcgcgttgttcgatgcctttttttatccaatcaaattcgccggctttttcgcgtagaaattgggcgacgtctttttcttcggttgctcgcatcgtttcgtagtatgcttcttggaaacgcacttgtggcagaaattgttttgctagtgaaacagcaaattcatcttcgtgttggagtaaaattaaatccgggacaacatattgaacgcgttcagactcaaattcagaacccggctttggatttaaggtttgaatgtagtcggaaacttcttgaatgtcttgcaagctaacatccatttctgcagcgattttcttccattttttctctgcaaattccgtgaagaatttttggataacgtcataggcaatataaggagcatccggcgagcgttcgatctgtagtaaaatgcattcacgcgcatctcttgccccaacgccggctggctccatgctttgcaagatttctaggccttctaacacactagaatcatccattaaaagcgccgcactgacatctttcaaatctatttgtaaataaccattgtcatttaagctttctattaaatataagacgataattttttgtgtttgcgttacatccattaaatgtagctgttcttttagcgcatcggctaacgtcagcttattgtcagctatttgttctagccaatctgtatcatcagaacttccagcgctttttcgactactgtaagaaaagtctgttgcaaaatccgagcctggaatcacttcaattaatgggttctcgagtgctttatcttctaaaaatgccactagat

SEQ ID NO: 3287 - DNA, 1468 bp, Listeria monocytogenes 4b
  misc_feature (1)..(end): n can be any nucleotide: a,g,c or t/u
ttgaaacaagtctgccagaatggttagcaaaaaggtggacagatcaatatggtatcgaaaaactgcgtgaaatcggtttagcattccttgtcgcgccacaccaaagtatccgcgtcaaccaaacagaaattcctactgaacaattaatcaaagaactaaatgaccaaggaatcaccgtgacacgtaatgaatttatcgaggaagcgttacttgttgaaaaaggatctgtagcagaaacaaaagcatacaaagacggtaaatgtagcattcaagacgaaagctcaatgctcgcagcctatgcgcttcaactagaagacaatttgacggtattagatgcttgtgcggcaccaggcgggaaaacaacccatatcgcggaaaaaatgcacggcacgggaatggttcatgcactcgatatccacgaaaagaaaaccaagctaattgatcaagccgccaaacgattgcaactacttaatattcgtacggcgcatttagacgcaagaaccgcaagtaccatgtttgaaccagaaacatttgaccgtattttagtggatgctccgtgctccggctttggcgttcttcgcagaaaaccagacatcaaatatgcgaaaacagaaaaagatatccacaaattagcagaaattcaattagcgattttagatgatgttagccaattagtaaaagaaaatggtatattagtttatagtacttgtaccattgacaaggaagaaaatgaaacggttcttcgcgctttcttagaaaaacatccagaattcacactagaacctgtagtactccctgaaaaattggcgcaaatcaagaaggacgattttattcaacttttaccaacagatattggaagcgatggtttcttcgtttctagccttagaaaagtaaagtcctgaaaaatagtgaggtgcttttaaaatgcatgcagaatttagaacagatagaggcagaataagacatcataatgaagacaacggcggggtttttgaaaataaagataaccagccgattgtcattgttgcagacggcatgggtggtcaccgggcaggagacgtggcaagcgaaatggctgtgcgtctactaagcgatgcatggaaagaaacgaccgcacttttgaccgcagaagaaattgaaacttggctacaaaaaacaattcaagaagtcaataaagaaattgttctttattcggaaagtgaaatggatttaaatggtatgggaacaacacttgttgcagcaattatggcgcagtcacaagtcgttattgccaacgtaggagatagcagaggttatttacttcaaaatcatgtcttacgtcaactaaccgaagatcattcactagtacatgaactccttcgaacaggcgaaatcagcaaagaagatgccatgaatcatccgcggaaaaatattcttttacgcgcacttggtgtagaaggaaaagtagaagtggacacatttgttgtcc

SEQ ID NO: 3288 - DNA, 1314 bp, Listeria monocytogenes 4b
  misc_feature (1)..(end): n can be any nucleotide: a,g,c or t/u
tggcgcggtaaacttggtagtgaaatgggaatggaccgtgcagcggccgaccaaatgggtatgcttgcgactatcatgaattccttgtctttacaagattcccttgaaaacattggagtagcaacgcgtgtgcaaacttccattgatatgcgccaaattgctgagccgtacattcgtcgaaaagcgattcgccaccttgaaaaaggtcgcgtcgttatttttgcaggtggaacaggtaacccatacttctccacagatacagcggcagcacttagagcggctgaaatcgaagcagatgttatcttaatggcgaaaaataatgtagatggtgtctacaatgctgatccaaaactagatgaaaatgcgaaaaaatacgaagagttatcttaccttgatgtgattaaagaaggattggaagttatggatacaactgcgtcctctctaagtatggacaacgatattccattaatcgtcttctcgtttacagaacaaggcaataatattaaacgtgttattttaggtgaaaaaatcgggactactgttagggggaaaaaataatgagtaaagaagtattatcgaaatccaaagaaaaaatggaaaaagcagaacaagcattaacaagacaattaggtacaatccgcgctggtcgtgcgaatgcatcattacttgaccgtttatctgtagattattacggagcagctactccagtgaaccaaatggcttctatcagcgttcctgaagctagaatgttactaattacaccttacgataaaactattttaggtgaaattgaaaaagcaattttgaaatcagatttaggtttgactccaaataatgatggttctgtgctacgtttatctattccacaattaacggaagaacgtcgtaaagagttggttaaagaagtgaaaaaagaagctgaagaagcgaaagttgctgtccgtaacattcgtcgtgaagctaatgaagaattgaaaaaactagaaaaaaatggcgacatcacagaagatgatttgcgttcttatggtgaagacgttcaaaaattaacagatgaaagcatcaagaacatcgatagcatcacgaaagacaaagaagcggaaatcttagaagtttaattgatacttttacaaatagtaacaaatagggttaaacaccttttaagttgaagcgacattcctaattctttccatatgtgttgggttaggaatgttttttaatgggcaattccatcgctctcatgaaactctcatctgttcacatggaatttttagtacattaattgattcttttttgttattataggtatagacatgc

SEQ ID NO: 3289 - DNA, 1178 bp, Listeria monocytogenes 4b
  misc_feature (1)..(end): n can be any nucleotide: a,g,c or t/u
aactaaagtcaatctacagcatgctcgaggcgccgacagtgtgctggaaagtaatttttctagttgttttcggacattttctccaaacatttatcgcggattatgcgggtgttcgtgtgctttatatttatatctacacgtttcacatgcctgctttcgtgctaatatccggatttttcgctaaaagttttggtaagcccggttatttaaaaaagacgatgaaaaagctcattttaccttatgtgttttttcagctaatatatagtattttttattattttcttttaagtaaagacaatctttctatccaattccttgatcctgaatggtcactttggtttttactaagtttgtttttctggaatataatgttatttatttttgcaaaaataaagccttggaagtcgatttgcattgctctcttcgttggattggttgctggctattttgatattattggggggtatttgagtttatctcggacacttgtttttttcccgtttttcttagttggctattttttaaagaaagaacatttttattaccttaaaacgcattttgtcatgattctcgggggcattttcattgttttacttctatcatttattacatttcaccctaacttaaatgataaatggtttttaggttctaagccttatgcaaactttgtggaagtaaagtcgttaggtctattcattcgcgcacttgtctacttgattagttttggttcgattgcggcttttttcagttttattcctagaaagaggttatttttcactaaatggggtaaaaatacgttatatgtttatttgttgcatggcttctttattaagttttttcgtgaaggtagtcaaactgactttcaatatagcccatcaacatttttacttctattcgtcgttacttttgttttaacggtattattatcaagtcgattggtaaaaatattcgttcaaccggtaatcgaacttagggtatctatgctgcgagatgtgtttagccgcttaacaaaacgggaaagttattaaacgtatagatagaaaaaggaggttgtattatgggttcaagaaaaccagaaattattatcggattaattggctctatcattgggattctagttggcttttggattattaattatggagattcagtcacagattatatacaaacatttactt

SEQ ID NO: 3290 - DNA, 1325 bp, Listeria monocytogenes 4b
  misc_feature (1)..(end): n can be any nucleotide: a,g,c or t/u
atgtggtgcgacaaacaatctctaaatgggagcaaggattgtcagttcctgattctgatatgttaatctccatatcggaagtgcttgaaacaccagtaagcactttgcttggagaaactgttatggtttcaaaggttgatgacgtaaaagcgatctccgaaaaactggagattataaacttacagcttgcacaaagaaagaccgccagacaaaaaatgctttattggctatttatctcgatgtgtaccgttatagcaataatttcagcggtctttataatactaaatagtccttacttaggttgggattatagtgaccctgaaactagcgttatcggagtagcttttcatacatttgaatggttgtttgtcagattagcaccgattatccttataggaggagtcgttggaatttttttaacgcggaagaacgtatgaaatcgtactatttttgatgcttttggggatgagtcaggcttcaaaattactgtttgtaaaaaggaacggaatcaaagcaccaaacccatattgtcaaacaaccgaacggggctagacaattgattctacgtaccgaattgattatttggcctcacatattgcgcgtatgcaagaagccattgaagaaggttgtgacataaacgtttatctaatttagtgaataatagctctttattcaacacgtgaaggtttcgagaaaagatatggctttgttgatgttgataaagataatagctataaacgtttgaagaagaaaagtttctattggtataaaaaagtaattgaaactaatggaaatgatttaagttattaaattaatatcaatctcatatatccaaagagtccttatcaatccggtaagggctttttttgttgaccaaaaattcttcttctacaagttcggttagtaaattggatatgtttggctgcgttgtgcggcaatatcttgcaagaactgactgattgataaagtttggtaatacaatttcatttctttcttcatcttcagtgcccatctctaccgcaagattttctaaagccatgtaaatccgctctttcggcgcttctgacccatcccaccaagcgcatagcgacgagcccacaccgccaccgtacttgtcaacacaaaattatctacctcacgtccaccccatcataccctcacgcccccgcccccctccctctcatcccacttcccctgttcccccctgaccgcgcttctcccctcctctctccccccccaccccttcccctcccctccgtgcgttcccctccgttcccttccctcgctccccccctcttgctatcaccccatacacactaaccccg

SEQ ID NO: 3291 - DNA, 731 bp, Listeria monocytogenes 4b; identical to SEQ ID NO: 1166
  misc_feature (1)..(end): n can be any nucleotide: a,g,c or t/u

SEQ ID NO: 3292 - DNA, 1799 bp, Listeria monocytogenes 4b
  misc_feature (1)..(end): n can be any nucleotide: a,g,c or t/u
aattacttactgagaatacagattatgaattgatttatgcaccttcaggattaacaattaaattaaaagaaggtctaaaagcaaaagggtatcaagttacctatgagcgttccattgataagacaaattcgtctttgagtactatcgggacttcagcaacaacagttggaagttctggcatgttatcaaatggaagtatgaccatttcagtaacaataaaagcatatgatcatttaattaaaaaagcagtttataaccctgtaactcaatgtattgattggacaattaatgttaattatgatttagcaaacttgactcctggtacggttttaacagatgtattaacagacgataatgttagttatgttgcagattctttgaagattaagcgagtcacttttaatgaagaatcaggagaagcagtaataggcgatgatgcgtctaatgattggactgtttcgactatatcagacaacggtagttttaatatgaactacaagaaaactgatgaaaaagcatatcaagtaacgtattctacaaaactaaccgattttagtccacgaaaaattaaaaatgaagtaacggatgaaaaaggtgttaaagcaacagaaaactttgatttcaagccagacttactaaataaagaagctggagagattgattattataataatacaatggattggactattacagttaattcggaaggtattaatatgcaaaacattaatatcgttgacgagttttctacaggtgtaaaaagtttagtcagctacaatgtgtacgcttatccttctgattcaggctacaaattattaacagaaggtagagactttaccatccaaaaagacgtctcgccagctgggtttaaaattaaacttatcggtaactatgcgacaacagataataaaattgttgtgaaaatgaaaacaaaaattgatttaactgatggagcaaaaacgctagataataaagcctcgttttcatattttgacggtagtttaacccagtattcagaaacagtaaaggcagaagcaacaccggaaactagtattttagctaacggtgggaaggtcggtaaatggaatccggcaactggtgaaataaattggattgtatctgtcaatgcaatggggaaaaaatatgataaattggttttagatgatgaatttttagatggtacaacctttgttgaaggatctttacagtatcgtaatgtagttaattcatccgagctgaccgacttgagtattcctctagagataaaagggactttagcacaagttggggatgctaattatccaaccaaaatagacacatcagccaataaaatacatttggaatttggtaatttagatactaatcgtgtatttgttaaatataaaacaaaaccaaaagataattggttcttctcacagtgggtaaacaataaagctatcgtctcagataatggagcagatgaacaaatatacgagacgaaagagtttgcttttttgcaaaatgaagttattaaggtagctggaaacatagataatgtctatggaaataaagtgaactgaaatatggaactcttgaatatttctccagaaagaacactgtctaatccggttattaccaatcgattggaacaaggaaatacgggcgctcagtttattaaaaatagttttcaggtaattaatacaaaaacgaacgaaccgataaacgaagaaaattataatattacttttgaaggaactttccagcacactggtggccgctcgccactgctgtagagtgaccatcagggtnnnaaaggttaa

SEQ ID NO: 3293 - DNA, 2500 bp, Listeria monocytogenes 4b
  misc_feature (1)..(end): n can be any nucleotide: a,g,c or t/u
gatttagatggacttgacgggcttgttttacctggtggtgaaagtacaacgatgcgcaagattatgaagcgttatgatttaatggaacctatccgcgcatttgcaagtgaagggaaagctatttttggaacttgtgctgggcttgtccttttgtcaaaagaaattgaaggtggcgaagagagcctaggattgattgaagctaccgcgatccgtaatggttttggtaggcagaaagagagttttgaagccgaattaaacatcgaagcatttggtgaacctgcgtttgaagctatatttatccgcgcaccatacttaattgaaccgagtaatgaggtagctgtgttagcaacagttgaaaatcgaatcgtagcagctaaacaagctaatattttagttaccgcattccatcctgaacttactaacgacaatcgctggatgaattacttcctcgaaaaaatggtataaaaaaagcagtagacaatttagtctactgcttttgcatattatttattcactgcttgcgctgctgtaattaacgttaagttataaacgtcatctgtattacaaccacgagataaatcattaactggtgcatttaagccttgtaaaattgggccaactgcttcaaagttacctaaacgttgcgcaattttgtaaccaatgtttcctgcttctaggcttgggaagataaatacatttgcgtcccctttaataacggatcctggcgcttttttctcagcaaccgttggaacaaatgctgcgtcaaattggaattcaccatcaagcgttaattcaggtgctttttcttttgcaagagcagttgcttctacgactttttccgtttcatcggattttgcagaaccttttgtagagaaacttaacattgcaacacgcgggtcaatgccgaagatttctgctgtttccgcacttacaatcgcattttccgctaagtctgctgcaactggtgcaatgttgatagctacatcactgaataaatagcgttcttcaccgcgaaccataatcattgcgccggcaactttacttacgcctggttttgttttaataatttgtagtgctgggcgaacagtgtcaccagtagagtgagccgcgccacttacaagaccttctgcttttccagtgtatacaagcattgttccaaaatagtttggatcaacgagcattttacgtgcagcttcttctgttgctttccctttacgacgttctacaaatgcagccactaattcatcaaaaagtggatcggtcgcaggttcgtgaatagcgattccttcaacagaaacgccaatttcttttgcttttgcttcaatttcagctttgttaccaagcaaaattggttttacgatattttctttttgcagacgtgcagctgctccaacaatacgttcatctgttccttcaggtagtacgatgcgcacgtttttcccagtaacttgtcctttgattgtagtaaataaatcactcatgtgttaattgcctccattaatatacatattatagttaccattttactataaaaaagaacaacttgacagaaaaaaagtgattaaaaacagctccagcacttatttccgtgtatcaatacagaggtaaaaaggcatgcttcttagttaaaagacggctatgctcttaagaaatttttttgctgttataccctactattttgctattctagcagcaatttcaaaaaaacacttcatattaaggtctgttcgtgataaaatgaacatagttgataatgattatcatgttcattaaataacataaaaggaggcctgctagcttatgcaattaaatgaaactgctgtcggtgaaaaagttcgcatctcagaattaaaaattgagaacgccatgcttaaacgtcgcttacttgcacttggttgcgatgaaggttgtgatatttgtatcaaacaaaaaggactatttggtggtccctgtacttttgaaacaaaagggcaatatatcagcattagacaatgtgatgcttgcgccattatggtggaacgcagatgagtcaaaatacatattgcttactcggaaacccaaataccgggaaaacttccttatttaatgcattaacaggctcttatgaatatgtaggaaactggagcggagtcaccgtcgaaaagaaagtcggtacgttgcgctcaaaaactggaaaattaattgatttacccggtatttatgacttaaatccgatttctcgtgatgaaacagttgtcactagatttttactggaagagaaattcgattgtatgttaaatattgttgattcctcgcaaattgagcgaaatctaaatttaaccattcagctacttgagtttggtgcacctgttgtgatgggactgaatatgattgatgtgcctgccgggcgcggggttcatgtgaacatgcagaagctgggcaaccatggcgcgttggcatgggcgcgntgtgtgtggcggtcgggtaaggtgcggcgatgtggggtggcgaaaaaagaaaa

SEQ ID NO: 3294 - DNA, 2061 bp, Listeria monocytogenes 4b
  misc_feature (1)..(end): n can be any nucleotide: a,g,c or t/u
aaaatgtacttctcttattgcctcccaaatgaatatggagattctgggactatcagctttgttggtggcgaaatagcaattaatttaattcctgattattaaagaagaaccagaggagtccgtactgcgtaataagacagaaattcattgttgggtacttgatcctgattttgtggaacgtgttttggatgaatcgggtcaaaaagcgaaatatctatcatctaacttactttatacaagaaaagtttattttaaagctagtaagcgtaattttatgaagaaagaacttcgtattagagcatgcttaaaagagcttggtctgtacatgggcagagtaacaaaggataaggaattcattttgcctgatgaaatcaataattctattttagcccaatatgcgaatactactcgagaatatacgaatattattgtactaaaactacgaaaagaaggaattctcgatgatagtcacaaaccgtgggtcataaaaaaaatagacatactttaaagaacaaaacttaatatatattgatttttacgttaaaaaaggtggaaaagttaaaatattacctaaaaaaagcatagaaaaaatgtcacaaaaagtacttatttagacatattatgcccaaaaaaagttgattttaatgaacaaatagtgaaaaagttctttttttatgatagtaacgttattttatttagcttattccttctctagggtgttttcattgtgtgatattatactttagaggaggaatttgcaatgaacacattagaaaaacgacaacatgaaattttgaccaatccacttcatttttgtaagaagtctggagattttgctaagcatagtatgagtattaaactttctaaaaatgaactgtttgatgttgattttgttacaggtatctactttgttgaaaagggtattgttatgaaaggaacacaaatagatgactatattgggtacgatcaattgctaaaacctggagatgtctgtaatttttcatcttttatgtcttctgatttaaaacgcaatattggtgctcaattactctcgccaagttctagcgtcatcacggcagtagatagagattttttcatttttatggtagaaaagcatgttagtgtagaagaatttatgctttatcaagcgaaaaaagaaattatgatactgcaacgtcgctgtttgcttaatacgcttaaagtgaaagatcgcgtaaaacacttgattgctgcaattggttatgaatatggtatttccaatggagataacattcaaatcccgcaagaattatctactacatttttatctaaattcatgggtattacaagagagtatcttagcttaactcttagtgaactaaaaaaagaagattacctattaaatactaaaatacctgttgttataaatgtagaaaaactttttaatgaaattccctatgaatcattaattttataaacttaagaagatagtttaacggctgtcttcttttttatgctaaaatgaaagaaaaaaaggagtttcactatgagcgaatacttggaaattccagaattaaataaagcttttccttttcgttcgtttattaatgaaggggaagttcttgtttatccacactggcacaaagagattgaaattatttatgcgctaaaaggtagccttaatcttggcgttaatgatatgccaattcaattaaaagaaggagaaattcaagtaataaatggcggagatgtgcattattttttagcttcgccgagtagtgagcgcatcgttatccaatttgatttaagtttatttcaagaagaaatgcaaatggatggccaaatgcaaacgttgcgcgaaatgcttacagaaatggcacatttgagcagggaatggccagaagagacggttgctaaaatgcaatctttaattatgaatatccattctgagtcaagcggggaaaagcctgggaagcattatattctaaaagcagacctactagcgattatcggcttgatataccgggaaattcctcaaatcaaaactcaacccgatagtgtgatttcagaagatgcagtctt

SEQ ID NO: 3295 - DNA, 1107 bp, Listeria monocytogenes 4b
  misc_feature (1)..(end): n can be any nucleotide: a,g,c or t/u
acgccaccgtcgaaattcttctaatctctgtttttgcaggggtagtaggcttctttgctcgggcttggtggcggaattatcgcgacacctgccttgactcttattttgcgggattgatattcaggatgcgattggggccgagtattatttccgtcatcgcaacatgtatgggctctgccatcgcttatatcaaagacggcatcaccaatcttcgagtcgggatgttctcgaaattgccacaacaattggtgcaatcactggggctttcgtcagcggactgctctcggccacggcactctacatcatcttcggacttttacttctttattctgctttcaacatgattaaaaaggtcggtacagaatttcctaccaatgtgaaaccagacccactcgcaaccaaactaaacttacatgattcttattacgataaatctttacggcaaacagttgactatcaagtggcaaatgttcctgctggttttggtgtgatgtacggcgcaggtattgctagtggcttacttggaatcggtagtggcgcatttaaagtcatggcacttgatgtctttatgaaaatgccactaaaagtaagtagcgcaacgagtaatttaatgatgggcgtaaccgcggctgccagtgcaaccgtgtaccttttccaaggcgacatccagcccgctattgcagctccagttgcgattggcgtacttgtcggtgcaacacttggaacacgcattatgcaacgtttaaaaagcaaagttattcggattatttttattcccgtcattttatatgttgccttccaaatgattttagaaggattggggtggatttaaatggcagagaaaaaagaagaaatgtaccgcgtggagctaattgttagcgcactgctacgaatcggtgttgtcctcagtgcgattattattgttttcggtcttgttatgctatttatcaccggcgaaagtggctatcctggggaaacttatccaacctcgcttacggcgattttcagcgggctagggacgcttaaaccatacgcgattatgatgtttggcctcttttgcttaattttaacgcccgtccttcgtgtcgttgtatcgttatttacttt

SEQ ID NO: 3296 - DNA, 1451 bp, Listeria monocytogenes 4b
  misc_feature (1)..(end): n can be any nucleotide: a,g,c or t/u
atcatagtctgttgcctgagcggcgcgaacctgtgctcggaaaagaacgattttagatgcaagcgtagcagaaaaatgactggggaaaaggggacatagctcttcttaccaagtggtgcaagtaagccagtgcgtttacaaggaaccttcgttagtgatgaagagattgatgcagttgttgctcatgttcggagtcaaggcgaggccgattatatctttgaagaacaagaattacttgtaaaagaaacggcaaaagaaaataccgatgaattatttgaagaagcgtgtgactttgttttaagccaaaatgctgcctcaacatccttgttgcaaagacattttagaattggttataaccgagcggcgagattaatggaatcccttgaaaatcatcaaattgtttctgggataaatggttccaaaccgcgagatgttattattacaaaggaccaattagctaagttgcgaaacaaagaatcttaattttgtagtactaaactaacatattacttaattagttttacaaataatggctattttcatgagtaatttcgcttatattcgctgaaagatttttctatttacatggaaagtgatataataagctggtgaattattgactcaactagaattcaaacataaaacacaattagaacgtaagatgatgtctagaaaacggagactttatactgttttcaaagttaagacttggtgcttaacagttaacatgttttttttaggcaccctcttcaagataaattaatgggggttcaaataatgactatctatcattttgttggaataaaagggtcagggatgagtgcacttgctcaaatcctgcatgataaaggtttccaagtgcaaggcagcgatgtggataaatatttctttacacaaaaagcattagaagaaaagcaaattccgattatgactttttcggctgataatattcaagaaggcctaacaattattgctgggaatgcattcccagatacacatgaagaaattgagcgtgcactggagcttgggcttccggtgattcgatatcataaatttttaggtcaattaattgatggctatacaagtattgcgataactggttctcatggtaaaacgtcgacaactggtttactttcgcatgttgttggtgcgattcgtccaacttcttatttaatcggtgatggtactggaagcgggacaaaaggagcggaatattttgcacttgaagcgtgtgaatatcaacgtcatttccttgcttataaacctacgtatgcaattatgacgaatattgattgggatcatccagactatttcaagagcgtggatgatgtatttaacgcattcgaaacactgggtaaacaagtgaaaaaagctgtatttgccttaggggacgatgctgaattacgtaagcttactttagatataccgattatttactttggttttggcga

SEQ ID NO: 3297 - DNA, 1442 bp, Listeria monocytogenes 4b
  misc_feature (1)..(end): n can be any nucleotide: a,g,c or t/u
gtagccatcttttggcgctttaaacaattgttcagcattgatcaatctactgtctggcaaattgtttaattgatggcttttctcagaagtctcagaatcaaaaagtaaccaaggttggtcaaggcgattaacaaaaatatcaatagtagacgctggaagatgcggggaaaccatgattggcacggcaccaatataagaaatcgcaactgctaaaatataagaatcgaatttggcagatttatatacgattactttttcttctttgcgtacaccgaatttatgtagatgagctgctttttggataatagcctcttcgcattttttgtaagtagtgtgaaggcctaattcaggaaaagtaacaagctcttcatcaaaatggatgggcatttctggatagcgttcagcagattttttgaaattggtatagaggttaagtggttcgtacttttttatcgtcatatggcgatgctcctttaatatttgatgttgctattatatcactttgtggaaataatgaggagtagtaatagaaaacatttacatcattgtaaaaaaatctgtaaattgctttttttcttattttggaaaattcgcctgatgacctgtaaagatatctcaattagtgatataatatgttaatataatcacaaactattggtctaggggaaaattttcaaaaaagtggaggtacgaaaatgaaaaaaaggttagctacaactttcatcatgctactatcgcttgcattaattatcgcaggttgtggcagcaataacacaagcaaaagtgacacggagaaaacaaaagaaaaagaaaaaacagaagttacatcgggagcgtcaaaaactagctacacagatccatccgaattaaaagataaatatgatatcgttattgttggtgcaggtggtgcaggaatgtccgcagcactagaagcaaaagcgaaaggcatgaacccagtaatccttgaaaaaatgccactagcaggcggaaacacaatgaaagcctcttctggtatgaacgcctctgaaactaaattccaaaaagaagaaggaattaatgatagcaacgacaaattttacgaagaaacattaaaaggtggtcacggaacaaacgataaagcaatgcttcgttttttcgtagacaattccgccagcgccattgactggttggattccatggacattaaattaaacaacttaactatcacaggcggaatgagcgaaaaacgtacgcaccgtcctgaagatggctcggctgttggtaaatacttagtagacggtttactaaaaaatgttcaagaacaaaaaatcccagttttcgttaacgcagacgtaaaagaaatcacgcaaacagacggaaaagaaactggcgtgagagtaaaatctttccgagcgcnncgttcgnncctatcgcatcatnctgctcgaagtactttcaagctg

SEQ ID NO: 3298 - DNA, 1608 bp, Listeria monocytogenes 4b
  misc_feature (1)..(end): n can be any nucleotide: a,g,c or t/u
atcgtccatcagtgtgctggaaagatctatctttaaccgctcgtttgaaaaaacgaaagcagttatggaagaaaatgcggacaaaaaattagtaccaacttatagtttagaggaatttgtcgaatctcttgaagtgcctcgccgtatccttattatggtaaaagctggcgatgctacagatatgatgattgaagcagttaaacctttcttaaacgaaggcgatattttaattgatggcggtaatgctttcttcaaagatacgattcgtcgtaataaagaactaagtgaagaaggatttaacttcatcggaactggtgtatcaggcggagaagaaggtgcactaaaaggtccttctatcatgccaggtggtcaacgcaaggcatatgaccttgtagcacctattttacgtgaaattgctgcagtagcagacggagaaccttgtgtgacttatattggtccagacggtgccggacattacgttaaaatggtgcataatggtatcgaatacggcgatatgcaattaatcgcagaagcttacactattttgaaagaaatcggtggattaagccatgatgaacttgctgacgtatttgaagaatggaacaacggggaacttgatagctatttaatcgagatcactaaaaacatcctaaaagtaaaagacgaagaaactggcaaacctattgtcgatgttatccttgataaagcaggtcaaaaaggaactggtaaatggactagccaaagcgcactcgacttaggtgttccactttccttaattacagaatctgtatttgctcgttacatctctgcacttaaagatgaacgcgtttatgcaagtactgttttatctggcccatctaattatcgttttgaaggcgacaaaaaagcatttgttgaatctgttcgtcgtgcgctttatttcagcaaaatcgcatcttatgcacaaggttttgcacaaatgagagcagctagtgaagaaaacgattgggacttacaatacggcgaaattgcgaaaattttccgcgctggttgtattatccgtgctcgtttcttacaaaaaattactgatgcttataataaagataaaaatcttaaaaacttattattagatccatatttcaaagatattgcacataactaccaaggcgaccttcgtacagttgttgcagaagcagtaaaagctggaattccagttccaacattcactgcagcaattagctactacgatagctatcgttcagaagtattatctgcaaatctaatccaagcacaacgcgactactttggcgctcatacgtatgaaagagtcgacaaacctggcgtattccatacagaatggccacaagtagaagattgatggaagataaggcatccactttaacgagtgggtgccttttttatgagatttgaattagtaaatcatggtaaagtgctaaaaaatagtgaaaatatctatttatgcgctgttattagttgtttttgagctaaagttcgttacaatagtaataggaatatagtgtaatgaccgaaagagagggttaggccanatgaatagaatattaatcgtagaagatgaaaaaaacttagcacgctttatcgaactcgaat

SEQ ID NO: 3299 - DNA, 1300 bp, Listeria monocytogenes 4b
  misc_feature (1)..(end): n can be any nucleotide: a,g,c or t/u
gcttacggcacttcgtttttctaagataaaagagatcatctggcattggcgttccaaatggtttgacaattttatttgaaacgagtattttctcagcggtaaccattttaatgggagcctttgggacggagacaattgcggcacatcaatccgcaaatagtgtctgcacactgctctatgctttcccgcttagtgttgcttcaacgttgaccattcttggcgggtaccagacaggggcaaaacgcttaaaagatgccaaacagtatcgtcatattggtatggctgctgcgattttcattggttgtgtaaatggtgcaatcctatttttcttccgcgatattattgctggtttttatacgaacgatcccgctttgagcaatttaatcatgcatttcttagtttacgcgatattgtttcaatttgcggatgctgtcctgtcgccagttctcggggcacttagaggatataaagatgttacggtcacctcgattgttgcctttatttcttattggttgattgggcttccagtaggctacggtttatcgtttacgaatcttggcccattcggttactggatagggttaagtactggcctgtttgtcgccgcatttattttatccattcgggttcgtaaaacggagcaaaaactttctttcaacacaaaagacgcagagatttcgagttaatctctgcgtctttttttatttggctaaaccatcatgaattttatctaaattgtattgcatcatttctaaatacgtgtcgcccacttcaccttttttagcagtggagtctgtgaagatttttgcgaaaattggtacgcctgtttctttagatacactttccatactacgtggatctacgcttgtttcaacaaataaattaggcactttttccttttccacgataccgacaatttgtttcatttggtctggagtaccttgactttctgtatttatctcccaaatatatgctgcttttaatccgtagcgagctgcaaaatatttaaaggcaccttcgctagttactaatgttttttgattttctggcaaatctgcaaatttttgttttgcttctttatccagagtagctaatttgttgatatattttttcgcattctctttataaaaatccgcattgtctggatccgcttttacaagtgcatcacgaacattttcagtatagataattccgttatgaagatcaagccatgcatgtggatctgtttcagacgtcttgcctttttccgttaagtatttgggttttacacctttacttaactccaccacttgctccttgt

SEQ ID NO: 3300 - DNA, 1223 bp, Listeria monocytogenes 4b
  misc_feature (1)..(end): n can be any nucleotide: a,g,c or t/u
tatgtcagagcaacttcttcatattattcagactaaaaatccaatcttataattctgacatatttgttatattattttccttctttgtaacttgaaacgagggcttcataatcctagtcttgctataataaagacatcttagaaaggtgtgttgattatgaatgatcatcgtattttaaatgctttaagttattttagtatcctatttgcacctgttattgtgccagtattgatttggatttttgctaaatcagaggatgttactcatcatgctaaagttgcattactaactcacattattccgactatcgctggtgttctatgtttctccagtgttttcgttacagctttgacaaatggcggcttactcgcaaatgtatcatttttcgttaccggtagcttatttatatttacactaatagctattgttggactgtttatctttaatattgttcgaggtattcaaatgcttttaacgaaaaatgaagaagatgcttggatttaaatgaaaaagctatcctaaatttcttaggatagctttttttttattttatttgtttaggtttttttaagaagaatactccagcaacactaacaaacaatccaatgaatagcattgtataagggaactcatctcctgtagaaggaagttttctcttattatttgttgatttgtttgttgttttaaagttttgttttataggttttggctctgctactgtagctgattctgttagctgttctgttggttttgatggttcagtaggttccacaataatcggcattgcctttttctcataaacaaaggttatttcttgtgaagtttctttatacataccttttttgttagcggaatctttaactaatgtgtagccaacgatttctttagctttcacattgtattcttcatcaacatttccagtatgcatttcctcatcatttaattgattgccctctacatctataaatttaactataattgtaccaatttttttcttgttggttttggttacattagccgcttctgtttggttaaaatcaatcgtgaaatgaactggtgccgcgtctaattggtaaccagttggggctttggtttcaattaatttatagtcgcctggtgccaaatcagctacgctaatttctccattatcatctgttacgagattctcgcggactaatgctccgtcctcgtttcgcaactcaaatgtggcgtcagctagctc

SEQ ID NO: 3301 - DNA, 2098 bp, Listeria monocytogenes 4b
  misc_feature (1)..(end): n can be any nucleotide: a,g,c or t/u
agtcagtacaatcaactaattacgcgccgcattcgtgaattcggtgtgtatagtgaattacatccgcatactattacagttgaagaaatgaaagcactaaatccaacggggattattttttcaggaggacctaacagtgtgtatgacgaagatgccttccgcgctgacgaaagaatctttgacatgggaattccgattttgggaatttgttacggcatgcaattaatgacaacgcacttcggtggcaaagtagaacgtgcgaaagaccgcgaatacgggaaagcggacattcacgttgagaagccaaaccgtttatttgctggactaccaaccgatcaagttgtttggatgagtcacggcgatttagtcgttgaggagcctgctggttttgaagtaacaattactagtaaatcttgcccaattgcaggtattgcggacgaagaacgttcactatacggcgtgcaattccacccagaagtacgtcactcagtttacggcaacgaattactgaagaattttgcattaaatgtttgtggctgtaaaggcgactggacaatggagaactttagtgaagtagaaattgctaaaatccaagaaatcgtaggcgacaaaaaagtcttgcttgccctttctggcggtgtagattcctctgttgttggtgtgttaattcataaagcaatcggcgaccaactaacttgtattttcgtagaccatggccttcttcgcaaaggggaagctgaccaagtaatggcaacattacaaggcgaattcaacatgaacatcatcaaagtagatgcgaaaaaacgcttcatggacaaacttgctggcgtttctgacccagagcaaaaacgtaaaatcatcggtaacgaattcatttacgtattcgacgatgaagctaacaaactagacggcgtagaattcctagctcaaggaacactttacacagacatcatcgaaagtggtacagcaactgcccaaacaatcaagtctcaccacaatgtaggcggcttaccagaagatatgcaatttaaactaatcgaaccattaaatacacttttcaaagatgaagttcgcgcactaggaacagaacttggcatgcctgacgcaatcgtttggcgccaaccattcccaggcccaggcttaggaatccgcgttcttggcgaaattacggaagagaaattagagattgtccgcgattctgattacatcttgcgtgaagaaatcaaaaacgcaggtctagaacgcgaaatctggcaatactttactgctcttccaaatatccgtagcgttggtgttatgggtgatggcagaacgtatgaccatactgtggttgttcgtgcagtgacgagtattgatggtatgacagcggattgggcacgtattccgtgggatgtactggagaaaatttcggtacggattgtgaatgaagtggatcacgtgaatcgtgttgtttatgatattacgagtaaaccaccagctacggttgagtgggagtaaaaagctaacataataagaataggaatatcaataaatcaacgtttttcaacttatgaaatgcttgattttcattaaaaatgatatggtttcctgccacaaatccctgtcaagatgatgcttgacggggatttatttttttgagctaaattatttaataatccataaatcctgccaatattagctatttgggaaaactttaacctcctgtttaaagaacacaatctagaacaatattgtttaaatatgaaatgctaaaataattgtaggctaatgaaaaggaggaaaaagttatgactttaaatgcaaagagtatcactatagggctgccagtaagtgatttggagaaatctgcaagctggtatgaaaaactgcttatgagtgatgaaaaactagtaccggttgaaggggttattgaatatcaaattggttcggtttggattcaactttttgaagaaaaaatcaatgcttctaagaacgttttgtgcttagaggcagaaaatatagaagtagaatttgaacgtttctttccagcacaggtcggccgctcaggcagctgtagatgactgcagtccntnncaaaagaaaagtcatatctcccttc

SEQ ID NO: 3302 - DNA, 2129 bp, Listeria monocytogenes 4b
  misc_feature (1)..(end): n can be any nucleotide: a,g,c or t/u
attggatttaataaaataaaacaaattcctaaaattacaattaatgacatgtctactctaaacatactcaaatcgcctgatagtccactcataaagtcgccttgaatccaggaaaaaaacaaaagagccacgagtaataattttatattatgcctgatttgcattggtctgtatcttaatcccattgtgaattgtaaagtatatatttgttctaagtctattttcactataagtctccttttttgtcaattgatgccatgtaaatccttaacttttcaaaacgataataagaaattacttttctactttatattgaatattactaatatgaatctttacatttttagtgtcaattttcttatcttcaccctcacctgtcgcgttcttttctggaaacgctataactattggcactcccgtattgggttcaaaatctcctatctgagttttggtaagtggtagtgcttcactatttagaaatgtctttccagatattgcattatcctctacactaacttcaaagctaaggtctttaatgcttgagtttgttccatttttaataactgcagaacaatctaatgatccccacaccgaatcatagtaaccataatctcctaccagtactgtgattgaatcattagtaattagttgatttgtctggtcatatttctttttagcttgattgtatacttctaacgtttcatcatttaaataatctgctttaggaggcaattctattttaataagctgttcatgctgtggcttcccttcattactctcaatttcaactttttccccttcatcttcaacgtttttagtctgttcctctgtatctgttttttcggtatccccattttcacatcccgataaaaataaagtgatggcaatcattgttattctaatccttttaaccaatttctacttttcatattgtaacctcttatcttttgtgtcttattcagttgatttttatactgttaattcgtgtttcccttcattacttaagaaaatctactactatacttgttcacatttgaacttataattatatatgtataattntttagttttctttgttttcaaccaaaaaaacattcttttcanacctcaaaattcttatgtacattaagcagtctaagataaatttttcatcttagactacccaatttactttatatctctacacagtcagagtttaaaatctggtgaagcgattttattccgtttcgattaattttttggattaaactccatctctttttctatatttttatgaaaagccgtatatctccaatcgtcaaccgagtttttatctttatactcattctttttaccagtcccatatttctataataatttgtgttgctacaaaaccatggacgctcgcttgccgttcatatcgttcatggttctagcatatcatttaccactgtttcttaaaccttgcaattaatcattcatatttgttttttaaataacctatttgtttgattaattctgtggcagaacgttctatttcttttgtatttatattatatttgtgaattccgccattcttccgtacatatacagtcagatatacggcgccccagtctctacgcaaggctactttttcaatttcattccacttaaagcgtttactccatccctcaataccatcttgatccactttaagcagtggtttacccgaaaaaaaatgcttagctacggtaaaataagttggtgccacgataactaaaaggattattccacaagcacctagtaataacgattcttttactttaaataaaataaaaattccaaataataatataggcaaggtataaagcaatttaataattgttttccctttattctgctgaattataatctctgaaatttcatttgaattcattttattgagtccctttcgaattggatttatatactatacctctgttaaaatgacgcctttttctaacaatatttctcgatctttctctgtttctggttcccacccgttattcatcttcccgcggataaaccatgtattataattggattcaaagagtagagttaccatctttccagcgcnctgtcgcccatcacgacagctgtagattactaagagacncncnnaacatggttta

SEQ ID NO: 3303 - DNA, 1987 bp, Listeria monocytogenes 4b
  misc_feature (1)..(end): n can be any nucleotide: a,g,c or t/u
aggtaactgccgcaccatgactcgatgggccgacagtgtgctggaaagtccaatcaattggcgcatttcttagcgtattcaaatctaaaaaagtatctaaaacatcttctgtcgttataatttggatattgcttggctcattttgcataatccctgaaagctctcgttctaattcgaaagcaagcgtctctttggaagccacatggcccgtcgcataacaaactggacaaggcatcgttgtcgtttctaaaaaggattgctgttttttgcgtctcgtcagttgtaatagccctgactgcgataaagcagcaacttgtgttgtaatatattcttcgcgagttttgatctctaacgcttcataaagcgctgtgtagcccaattctgacattcctccaataaaatccactaatatcatcccactcatattacgtaacctaatttgtcgaaggatttcaggaactgctttgagatttactgattctactgttttttcttttgctgtggtacctttaaatttacctgagtttacatcaacaacccacatcgcttctgttttttcaataaataaagaagaaccattacttaaatgaaccactggtcgtgcgagcctatctatttgagctttgatacctaggtccgcaataaatcagcgcttttctttatgatgatttgcttatccggccatagcatttctagcattttagcaaactcaaaatcatgccgtattacttctgatggtgcgtatcgttgaatgaactgtttcgtactatttaaaattcccgaagccactgataatagtaagccaggttttttccgcttgctagcttcttttaataatgtttgatgtttatctctcgcttgaaccaaggcttgttgcaattgctctttcgtcgcaaattctgcattagatcgaataattaccgcttcattttcttccaccatggtttccgttattttctttaatctgattttgtctcctattcttttagaaatagaaatatattcttttccatacaaataaataagcaagtcaccagaaaattccagtataccagttaataacggaagtttcgtcgcgctgccttcccgcacaatttgaactggaattttagcaccttgcgttttatcatagctttgcggaatatcttttaaatggatgaaacctttgttattattacctaaatcaacaaaagctgcttgcacttttcgatcgattttttgaataaatgcatgataaatatgaccaacttgaactttttcagaaggtcggcccgatttcaatatctattaccaaatcatcttccattgctgctattcgtttttctataggagccgcacttactactagctttttcatacaatcaccttttataaagacccttcatcttaaagataaagggtctaattttttatttcccgctaaaaagttgctttaagcgagcgaaaaatcccgctttttttgtctcaatcgacattaaagggatagattctccaagaatacgtcgagcaatattacgataaccttgtgaagcacggttatttggtaacatagcaacaggatccccactgttcgaagagcgaataacttcatcatcatcaatgataataccaagtaattcaattgataaatgtgtggtaatttcatcaatatccattacatcaccattcatcatcatttgtgtacgaatacggttaataattaattttggtggctcaatatcttctttttccagtaaaccgataattctatctgcatcacgaactgctgatatttctggcgttgtaactacaattgctttgtctgcaccagcaacggcatttttatagccagtttcaattcctgcaggacaatcaattaaaataaaatcatagtctgggcggagttgattaattaaatccaccatttgttcacccgaaacagcatttttatcagtagtttgcgccgctggaagcaagaaaagtaaatcatgaaaacgtttatctttaa

SEQ ID NO: 3304 - DNA, 1601 bp, Listeria monocytogenes 4b
  misc_feature (1)..(end): n can be any nucleotide: a,g,c or t/u
ttacatgtgcgcgtttgcctaagtattcaaaatagaaattatacttttgaatgcgattaactactgcttctgcttctttcactgtggctggttcttcttgtgaatttaatactgtcacaccagctactttacttaatttagtataaataataattgtgaaaacttctccgctcaaattgattgtgtacggtagtttatgttgctgttctaaaagccttttatgttgttttaatagtttatccgtcatcgttaatcaacacctttactacgccattagtattatataattcaattatatagtataaagatgaaaatttcgagggaaagaaatgagaaaattatttttaattgtttacataatataattattgtcttcttcccttatttataatgacgtcaaagtataaaataacaagtagatgtttaagactgcaataaaaatggcgacagcccaagaaatgatttttaaccatgttggattgacgaattcgcccatcttttgtttatcacttgtgaacataactaatgggataactgcgaacgataattgcattgatagaataacttggctaaaaatgagtagttcattgataccatttgccccgtaaagtgctgtgataataacagctggaacgattgcaagtacacgtgttaacaaacgacgcactactggttttaaacggatattaaggaaaccttccatgacgatttgaccagctaatgttcctgttaaagtagaattttgccctgatgcgagtaatgctactgcaaaaacagtgctggcgatactgcttccaagtgttggattgagtaatttgtaagcatcctcaataccagcgacattatgctgaccggtcgtataaaaagcggcagccgctaaaattaaaatcgatgcattgattaataatgcaatcgttaaagaaaaagtggaatcgataaaggaaaaacgaatcgcttctttcttcccttcttttgttcgagcgtattgtctggtttgaacaatagatgaatgcaaatataaattatgtggcatcactgttgccccaagaataccaagtgcaatataaagcatagctggattagtaacaatttctgattgtggaataaaaccttttgctattgcttgcatatcaggatgagacatcaccatttccgcaccaaaacatacaagaatcgtaaccattaaagtaataacaataacttctatgtagcggaaacctttatgttgtaaaaataatacgagaaaaatatctaatgcagtaatacaaactccccaaattaatggaatcccaaatagtaaattaagcgcaatcgcactaccgatgacttctgcgatatctgttgctataatcgctaattcagctaaaatccaaagaacgaatccaaatggtttagaaaagtgatcacttgaagcttgggctaaatcgcgaccggtgacaatgcctaattttgatgcaagtgattgtaataaaacggctagaatattagaaattaaaataacggataacaatgtgtaaccaaattctgacccgccggcaatagaagttgcccagttccctggatcgacatagccgaccgcaataagtgcacctggccccata

SEQ ID NO: 3305 - DNA, 1841 bp, Listeria monocytogenes 4b
  misc_feature (1)..(end): n can be any nucleotide: a,g,c or t/u
ttttttttttttaatatcaagacggaggagaccacgcgcccaccgacccccaggaccccgccaccccacggacagcacccccaggcgaagccccattgcaaagcaaagccacccaaggcacgcccccgttagttacccacaaccacccatttcggaagccctgaatcagcagttagacccctttttccaaagtttcgctagcacatgcaatgctcaggcgcgcaaaaccttaaccggaatgtccaaatccagaacccatttgaacaccaacaccagcttcgattaaatcagcgtaaatcgttttttcgtcttatggaagagcgcgacaatcaagccacatcaagtaggttgcttctaagtcggtcacaccaacttcgggtacttctttttcgagagctgctttgacatattcatagttgctataaatatattctttcaactcttttagccaaggcacgccgtggcgatacgctgcttctgtaccaacaatcccaaagacattgagcccattagttgtggcggtacttttgctccgcagcgaatttggcctgataatctttattcgtaataatatagtaggaagctttaatcgccgccaagttaaatgttttcgtagccgccattaaagtaataatttgatcttgataaaacggtgctgcgaccatcattggcacatgtttatgatttttcatcactaagtcagcatgaatttcatccgaaacaatcggaatttggtatttttcacatagtttcgctaattccaccagttcttccttggtgaaacaacgaccaccaggattttgcggattacatagaaggaataattttaccttttcttctttcatccgtttttccaaatcgttaaaatccattcgatattgacggttctcatatataagtggcgacataaccacttttctctcagtggctttcgttacattgaaaaatggtgggtaaatcggcgaaaccattagaactgcatcgccttcatttgtgagagagcgaatcgctaacgaaattgtcggaacaaccgctccattaaaaaataacgtgctcggatcgatttcaaactgatgctgctctttgttccaatcgataatagcttcgacaagtgccgctgacttggtcgaataaccaaaaatcccatgatcgatttgacgctgaaatgcatcaagtactggctgcggcgcacggaaatccatatccgctacccacatcggaataatattttttctgccaaataattcttctgccccatcccacttctctgaattagttccaatacgcggaatgacttcatcaaattgactcaaatatgtcacgctccttctctttcattcgcctcaattatagcataaatttcacctttaaagctcgccatagaaggatttagaataattgttaaagtttcgcctaagtgttataatttataaaatattgtaaggttgaaagtaggtggaatgaggatgagtacattcaaagtaggagacgtagtttctgggaaaatcgcaggaattcaaagctacggagcatttgtagcactagataattcgacacaaggcttagttcatatttcagaaatcacgcatggttttgtcaaagatatccatgattttttagaagttggccaagaagtcaaagtcaaaattctagatattgacgaagaaaaaaataaaatcagtctttctattagagcgacagaggaagcaccaaaagaacaaccaactaaaaagaaacaagtttcatctagcgaaaacgacgaaggttttaacactttacgcgataaactagaagaatggattaaaaaagcagacaaataaaagtcccaatcagcttggtat

SEQ ID NO: 3306 - DNA, 1965 bp, Listeria monocytogenes 4b
  misc_feature (1)..(end): n can be any nucleotide: a,g,c or t/u
gaaataatcgaaaaagactctcttccaagtccagagtccataaataaatcgacaatatctttcagtcgacaattttctttattaattaaaaactcgctatcaccattacggtanatacgtctagtaacagctacttcgctataatcaagtggtaaaaaatggtcttcattttcgaggataagtgacacttccgcaaaattaattggtttccgtgtatcacttccagcaaaaataacatcacccattcggccaccacggagcgatttagcggactgctcaccaagtacccagcggattgcttctgtaatattacttttcccgctgccatttggccctacaactgcagtcatgccgggcacgaaatctatcgcaactttgtcagcaaaggatttaaagccattcatttctaatcgttttaataacatgtccggacacctccatttttgtttatctgtgtgttagttggtttatagcaaattgtgccgcactttgttctgcttgtttttttgttctgccgctgccttttccgagtacttgtccgttaacaattacttgggcatcgaatgctttattgtgcgctggtcctgtttcgccaaggatatcatattcgatcaagacatcacggtcccgttgaacaatttcttgcagttgcgttttataatccactgtttgtagatatgcccctgcatcaatttttggaaaaataacacgttctaaaaatgtcacaactttgtcaatcccattatctaaataaagcgcgccgataaaagattcaaatacatccgccagaagtgccggacgagttcttccaccggctttttcttcccctttaccaagtcgtacgtatttagaaaaatgtactgcttctgcaaactcgactaaagaaggctcacaaacaattgctgcgcgcatttttgtcatgtgtccttctgccatatctggatatttgttaaatagataattcgatacagtgagttcaaggactgcatcaccaagaaattctaagcgttcattatctttcacattttcccggcggtgttcgttcacatatgaggaatgtgtgaatgcttgttttaataattcaacatctttaaaatcgaatccaacgctttcttgtaactcttcccattgattcatttcacttgctcctctctttaataagcaagttcattttctaaacagccactagcaaaaagctgcttagaaaatgaaccaacaaaatctcgtgaccttgaaaaagaggccacctgcactacttgtctcgcgtgcggaagttaccacagcaaagataagtaacacgggcaccctcatttatccggtcacataaagttttatgcgttcgcctctatgtacttcactgcatcaccaactgtgttaatgttttcagcgtcgccatcagagatttcaactccgaactcgtcttcaagttccattactaattcaacaacatctagagaatctgcacctagatcttctttgaaggaagcttctaaagttactttggattcctcgacacctaaacggtcgacgatgatttttgtaactttttctaatacttctgccatttttcacttcacctccctccaagtattatataggattatttctcctacgtaaacaaaaatatttaaagtaatgcgagccaattaaattcgcattcattaaccaattttacatcaccattccgccatcaacagatagtgtttgaccagtaatatacttcgaagcatcgctcgctaggaaaagaactgcatttgcaatatcttccgttgttccataagcaccaagcggaatttgcgctaacattgcttcttttgttttttcatctaatttgtcggtcatatctgttgtaatgaaaccaggagcaacagcatttacgttaataccacggggcgcaagttctcgagcagttgtttttgttaaaccgataacgcccgctntacttgctacgtaatttgcttgaca

SEQ ID NO: 3307 - DNA, 1468 bp, Listeria monocytogenes 4b
  misc_feature (1)..(end): n can be any nucleotide: a,g,c or t/u
accgccaccgccaacaccgattactttaattgttgccaaactttctgaactagtgtcaaattctaacatattattgcctcctatttgccgatttatacgatacgattttcttgctggactatcagctattcgcttttattcaaaaaatgcgccgaaaaaattcttcacattcgcggagacacttttgcgtcatctgatttcttttgttttggtttaggttgcttttgttttggtgcttcatcgtcgtaacgaggttcgcttgccgaactgcttacgtcgcgtccttctaattcagccatttgataagcatatttaattaagcctactgcggttgtaaaggaaggttcccgaacaccaatataatcaggaatcgctagtctaacatgcgctgctaaggtttttccagccaaatcaattgctcctggaatagccatcgaaccaccagttagtacataacctcctggaagatgcgttttaccgacacgagtaagttcttccactactaattggaaaatttcttccatacgcgcttcgataatatctgctacttctacttgtgtaaaatgttgtttttggtcactaccgataacatcaatagcaaaaacttcatctggagaagcatcatcataaaatgcatagccatgatccaatttaacgcgatcggcatttgcagtagaagtgtttagtccaagtgataagtctttcgtgatattatctccaccaactggaatgacaccagtataagttagtcgtccttgttcaaacacgctaacggttgtagttcctgctccaacattcacgagtgctgttccaaattctttatcatcttctgataaggaaatggatgcctctgcaagtggttgtaaagcaatatcagaaatttcaaggcctgcacgttccacacaacgtaatgtattatgtaaaattgtttttgaaccagtgattaatgtgccttccatttctagacgaacaccaatcattccacgtggatctgtaatcccagttaatccatctacaacaaattgatctggaatagtgttaataatttctctttcaggagatagaggaacaacttgagcggcatccattacattccagacatcttcatctgtaatttcacgattttcgctacctactgccacaattcctcggcaagcttctaaatgcacttgactcgatactaccccaactattacttgagaaatttcaacgccaaccattctttctgcttgttcaattgcctttttaatggattctacagtcttgtctatgtcgataataattccttttttaatcccggaagattcgacattcccaacaccgataatattgagtctatcgtcagccatttctgcgatgattactttcacagaagctgttccaatgtctaaacttacataaatttcgctatcacccatttatcggcacctccttttattctagtcatttaacatgtatttatttcatt

SEQ ID NO: 3308 - DNA, 1781 bp, Listeria monocytogenes 4b
  misc_feature (1)..(end): n can be any nucleotide: a,g,c or t/u
ctttttggatgttattttacttattgcgcttcttgcatttatcggaacggtttcctttgccaaatttattgagaaagggaaggtgattgatcgtgaacgtgataattgagattattatttctattatgattttaatcggtggtttgcttagtattcttgccgcaatcggggttatcagattgcctgacgtgtacactagaacgcatgctgccgggattagtaatcaggttagtccggaaatgtttcaatatatgcaaaaggaacttccttcagcagcggaaatgcaagatacagaaaaacgtttagcatttatggaccaacatggtattgatatccaagtactctcttatggaaatagttctccgcaaaacttagatccaaaaatttcggtagctctgtgtaagcgagctaatgatgaactagcgaaggtgattcaacaaaatcctacgcgatttgccggttttgctgtcttaccagtaggatcaccagaagatgctgctattgaattaaaaagagccgtagaagaacttggtttcaaaggtgcacttgtaaaagggcagtttgaaaacaaatattttgataatcgcttttattatccgattttcgaaatggcggagaaactagatgtaccgatttcgttccatccatcgtttatcccagaaactattacagaacaatattttgccagtgatgcttggtctgatgtggtgacaggggtattttcatctgctggttttggttggcatatggatgttggcattcaagtcgtgcggatgattctttcaggtatatttgataaattaccgaatttaaaaatcatcacaggtcatttaggtgaaatggtgccaatgtttttaaacagaatggacaatacactcggccactggacaacgcttgaacggaaaatttctgattactaccggacgaatgtgtatgtgacaccaagcggcttattataccaaaatgaatggaagtttttattaaatgaattagatgaaaatcatcttatttatgcgctagattatccttttgtaaaaccagaaaatgctaggactttcctagatacgcttgatttaacggatgaagtaaaagcaaaaatcgctcacgaaaatgctgaaaaattattacatttataaaaggtggaactgaaaaatgactttatcaaaagaacaaatcaaagcaacgaaaagtgagtttgcggagaatttggcgcttgcgaatttaacaattgccgaagtagcgaaagaactaaatacaagcgaagtaaaaatagaacggattttgaatttaaaacagcgttctttaaatgatggttggattttgcggaattacttacttagaaaggtagcggaagtagggaagacaccagttccgtttacggcgctcagtggggattatcataggtattggtttttagatggagaagaaattgattcagggatattaagtttagggaatcattaaaaatagccacccgagaggtggctatttttctattaatctcgtttcaacaaaacaatatcttcattcttagtgagcaaaagatccacatgattctcgccccataagcaaagtttgttcaaaatctccgacaacgattcgccgtattcactcaatgaatactcgacttttggtgggatttgttcatatactttgcggacaataaccccggatttttccagctcgcgcaattgttgtgtgagcattttttgtgtgatgttggggatgagtcgttttaattcgccagttcgttttttgccttcgcgtaaatggcaaggatg

SEQ ID NO: 3309 - DNA, 1308 bp, Listeria monocytogenes 4b
  misc_feature (1)..(end): n can be any nucleotide: a,g,c or t/u
gtttaatggaccgttttacgcattatgcaattgcaagtgctgaaatggccgtgcaagactctggtttagttattgatgattccaatgcaaaccgagttggtgtttggattggttcaggaattggtggaatggaaactttcgaaacacaatatgaaattttcttaaatcgcggtcatcgccgagttagcccgtttttcgtacctatgatgattccagatatgggttcaggccaggtttctattcgttttggtgctaaaggcattaattctacaacagttacagcttgtgcaactgcaacaaactcaatcggcgacgcgtttaaagttattgagcgtggagatgctgatgcaatgattactggtggagcagaagcaccgattactaaaatgtcacttgctggttttactgctaataaagctttgtcattaaatccagatccagaaactgcatgccgtccgtttgataaagatcgtgatggttttattattggtgaaggcgcaggtatcgttattttagaagaatacgaacatgcaaaagcacgtggggcaaaaatttacgctgaaatcgttggttacggtgcaacaggagatgcttaccacattactgctccagctccaaacggtgaaggtgctgcgcgcgcaatgaaaatggcgattgatgatgctggccttacccctgataaagtagattacattaatgcccacggaacaagtacaccgtacaatgatgaatacgaaacacaagctattaaaactgtctttggagatcatgcgaaaaaattagcgattagttctactaagtcaatgactggacatactctaggtgcgtctggcggaatagaagctattttcgccctattgactattcgtgataatattattgcaccaacgattcatttgaaaaaccaagatgaagtttgtgacttggattatgttccaaatgaagcacgtgaggcaaatgtaaatgtagtaatttctaactcttttggctttggtggtcacaatgcgactttagtatttaaaagaatagaagactaaaatataatcaaaagccttacctctaaaaatgaggtaaggctttttttgagcaaaaaactagctttcattattatgattggttacaattaaattgtacacaacttaaaaggaggagaacatgttggacacgaatacacgcatattagaagagcaactatgtttttctgtttataatgcatccaaacaatttactaaactttatcgtgaagctttagagccgtttcaattaacctatccacaatatattgctttgcttgttctatgggaagtt

SEQ ID NO: 3310 - DNA, 950 bp, Listeria monocytogenes 4b
  misc_feature (1)..(end): n can be any nucleotide: a,g,c or t/u
gtttaaaggtggattttttgccatcttaggtaccttcttaattgctggattttctttccaagggactgaaatggttggtattgcagctggtgaaagtgctactccagaaaccagcgtgccaaaagcgattaaacaagtattctggcggattttgctattttatatttttgcgattttcattattgggatgattattccttatactaacccgaatttacttagtgccgaggcaacagatgtggcaattagcccatttacactcgtatttgaaaaagctggtcttgcatttgcggcttccgtgatgaatgcggttatcctgacttctgttttatctgctggtaattcaggtctttatgcttccacaagaatgctttgggcaatggctcgtgataaaaaagcacctaaattcttgggtaaagtaaaccgtcgtggtattccgatggcagctttaattgttacgacgattgttggtgcaatgacattcattacaacgctaacagaaaacggcacagtgatttatacgtggttactttccgcctctggtttaaccggatttattgcttgggtcggcatcgctatcagtcattaccgtttccgaaaagcatttatcaaacaaggacatgacttaagtgaactaaaatataaagcaaaatttttcccattcggacctattttagcactaattttatgtattttagttattgtcggtcaagattacgcggcatttttgaaaccagaatttacgaatcctgcttggtggcaaaaaatcggtatttcttatatcggcctccctattttccttgttttctggctatcttttaaatttacaaataaaacaaaagttattccactggaagactgcaaatttgatcaaaaataaaaaaacatctcttgttcattcatttttacttgaatgatacaggagatgtttttatttactctttttcagt

SEQ ID NO: 3311 - DNA, 965 bp, Listeria monocytogenes 4b
  misc_feature (1)..(end): n can be any nucleotide: a,g,c or t/u
tcggcaaaagtattggaatcggcaaaaaatcttaaaatcgtggcgaatattggtgccggttttgacaatatcgatgtaaaaaaagcgcaagaattgggcattgcagtgaccaatacgccagatgtgtcaacggaagcaacggcggaactaacgcttggattgattttggacgtagcacggagaatttcagaaggcgaccgattatgccgcgaaacacccgagcaattcaaaggctgggcaccaacgttctttttaggtactgaattaagtggcaaaacgctcggaattattggattaggaagaatcggacaagctgttgcaaaacgtgcggctgcttttggaatgaaaattatttattctgggcaccatccgaaagaagcagcgaaagagtggaatgcagagtttgtgagccaggaagaattattgaagcgcagcgatgttgtaacaatccatgcggcatacagtcccagcttgaagtatctgttgaacgaaacaacactgaaaacgatgaaatcaagtgcctttttgatcaatgctgctcgcggtcctgttgtagaggaagctgcactgattaaggcattagaagcaggcgttatcgccggcgctgcgctggatgtgtttgagttcgagcctaagattggcgaggatttggctaaactggataatgtcgtattaacaccccatatcggaaacgcaactgtggaaacacgcacagcaatgggcaaaatagccattgcaaatgttgaagctgtcttagcaggaaaagcaccaacattctgtttattaataccgaaaaatatagccgcagcgagtggctgcggctgtgttttatcgctgaattatggtataatattttttgtcggaatacgacaacgggttgttagctcagttggtagagcagctgactcttaatcagcgggtcgggggttcgaaaccctcacaacccatattggaaaaccgcctaa

SEQ ID NO: 3312 - DNA, 1750 bp, Listeria monocytogenes 4b
  misc_feature (1)..(end): n can be any nucleotide: a,g,c or t/u
tctataaatagattggagcgattaacatggaaaaaagacaaacaaaattttgcaaagaatcactagtaattaaaacaagccgggttttcccgtcggacacgaataatcataataccctttttggtggtagattgatgacttatattgatgatacggcttctatcagtgcctctcgtcattgtcgtacggaaattgtcactgcatcgacagactcagtggatttcttaaaaccgattaaaaatgatcactctgtttgcttagagtcttatgtagcttcaacgggcagaagttcaatggaaatcttcgttaaaattattgcggagaatttgaaaacaggagaacgttacttagcggcgacatcctttttaacatttgtagcgttggatgcagatggtaaaactgtagaagtgccactcgttaaaccagaaacagaagaacaaaaaagaatccacgcgggtgctgaggcaagaagcattgctcgtaaaattcgtttaaaagaaaaccaatcattagcggaatcattatcaacagatattccatggtgaattaataaaaactagctaagcagctagtttttatttaatttagatagaaagcgcttacgtgaaaaaatatacaaaagtgcttgccaaaaatttttttcatggtaaaatgaaaattgtaataaaatattcgttcatcttcggggcagggtgcaattcccgaccggtggttaaagtccacgatctgcttttttagcagttgactctggtgtaattccaggaccgacagtatagtctggatgggagaagatgttggcagaccttttcgtttgtcttcacgagcatgtgttagcaagctgtgatgcttatttgagtatccggttcttgtttattcattcacaaactctccctcaactcttttcagttgaggttttttatttgcttgggttgcattcgtctagtgatgtcactcgcttcttggtgaacatcaagggagaaatgacaatgaagaattattcaatgaaggtttttgtaagtgtggcggttcttggtactttagcatttattttaatgatgctacaatttccgctactaccgagtgcaccatttttaaagcttgactttagtgatattccagctttgattggtggcttattattcggaccactcgcagtgattttagtagaactaatcaaaaatgtgctactttatattgtgtcaggtagtccagttggagttccgattggagaaatatccaattttattaatggtattgtttatgtattaccgatttattatttatttcactggtttcgttcaacaaaaggaatggtgttttcaacagcaattggaacgttagtaatgacagtcgtcatgtcgatatttaattatttcattttattaccattttacattaaacttggtggacttccggcggatacagatgttgcttggttagtcacatatgcgattataccattcagtttattaaaaggagtcattgttagtgctgatctgtcttcttactanaatgatgtaacactgagacgcgatgaagcaggnnnnnnnnnnnnnnnnnnnnnnnnnnnnnnnnnnnnnnnnnnnnnnnnnnnnnnnnnnnnnnnnnnnnnnnnnnnnnnnnnnnnnnnnnnnnnntnnnnttncnnnncncncccctccccttctataagggggggggtggtttttttttttttaaaagagaagggcgggggcgcctcttaatcaaaattttatttgattttggaacg

SEQ ID NO: 3313 - DNA, 1341 bp, Listeria monocytogenes 4b
  misc_feature (1)..(end): n can be any nucleotide: a,g,c or t/u
aaaaatgtttagctaattcgctaacagttgctatttttcggcttttgacatattggacgatggcgcgttttcgttcgatagatagcacttcttcccctccttttgtttaactatatggcaactccaatggaagaaaatcgcaaacaaacaaaaaaccttggagcaattggccccaaggtttggaagtgaaaattaatcgtttaagcgtttttctaattctgcttttttgtcttcgaagcctggtttgccaagtaatgcgaacatgttggctttgtatgcttctacgcctggttggtcaaatggatttacgccatttaggtaaccgctgatagctactgctttttcaaagaagtatactaggtaaccgaaagtgtatgcatctagttctggaacttctacaacaaagtttggaacttcgccgtctgtatgtgctagaagtgttccttcgaatgcttttgtgttaacgaaatcaactgtttcgccagcaagataatttaagccatctagatctacctcttctttattgatagttaagttgtggcgtggtttatccactttgataactgtttcaaaaaggttacgacggccgtcttggatatattgaccgatagagtgcaagtcagtggagaagtttgcgctggatgggtaaataccttttttgtctttaccttcactttcgccgaataattgtttccaccactcgttaaagtattgtaagcctggttcatagctgattagaagttctgttactttgcctttacggtaaagaacgttacgagctgctgcgtattggtatgcaatgttattttttagttcaggtttgtcgaaatctttgcttgctgctgctgctccattcataagagcatcgatatcaacaccactaactgcgattggaagtaaacctactgcagttaaaacagagaaacgtccgccaacgtcatctggaacaacaaatgtttcgtagccttcattgtcagctaatgtttttagagcgccttttgctttatcagttgtagcgtaaatgcgttttttcgcgccttcttcgccatattttttgattaaaagttctttgaaaacacggaaagcgattgctggctctgttgttgttccggatttagaaataacgttaacagagaagtcacggtcgccaactacttcaattaagtcatgaaaataagaggaactaatgctatttcctgcaaagaatacttgaggtgttttacgagcacctttttcaagtacattatagaaggaatgatttaaagtttcgattgcagcacgtgccccaagataagaaccaccgataccgataacgattaatacgtcagaatctctgtggat

SEQ ID NO: 3314 - DNA, 1186 bp, Listeria monocytogenes 4b
  misc_feature (1)..(end): n can be any nucleotide: a,g,c or t/u
ttcgattgctggtacgctgattgcggcgctttcgccaacgtttgcaatgttaatgattgggcgtgtagtgcaagcagtaggtacggcgctattactaccattaatgtttaacacgattttactgattttcccagagcataaacgtggctcagcaatggggatgatcgggctggtaattatgtttgctccagcagttggtccgacaatttcaggactaattttagaaaacttaacttggaactggattttctggatttccttgccattccttattattgcgttattattcggaatgaaatttatgcaaaatgtttcggttgttacgaagccgaaaattgatattttatcgattattctttcgacgctaggttttggtggagttgtatttgcctttagtagtgcgggagaaagtggttggggaagcgcaacggtattagtttcaattatcgttggtggacttgcgcttggactctttgtttggcgccaactaacaatggaaaaacctttgatggacttgaaagtatttaaatacccaatgttcacattaggacttattttagtatttatcagctttatgatgattctttcgacgatgattttactaccgctatacttgcaaaatagtttagcgctcgcagcattttcagcaggattagtattacttccgggtggggtgctgaatggtttaatgtcaccatttactggccgtttgttcgatgcatacggtccacgcgcacttgttatcccagggtttatcgtagcggttgtggcactatttttcttaacgagaatagaagttggaacatctgcattaaccatcatcgtacttcattcggtgttaatgattgggatttcgatggtcatgatgccggcacaaacaaacggattaaaccaattaccgccaaaattatatcctgatggtacggcgattatgaacacgttgcaacaagtttccggcgcgattggaacggctgttgcgattacaatcatgtcagctggacaaaaagcttatatggaaacggcgcaaggagtaggaccagagcaaatggttgcttcactgacagcaggaattcaaaatgcctttgtctttggactgattatggcttgtattggtcttctgtgctcgttatttattctttccagncacagtggcggccgctagagcagcatctggtcgccaagatag

SEQ ID NO: 3315 - DNA, 1007 bp, Listeria monocytogenes 4b
  misc_feature (1)..(end): n can be any nucleotide: a,g,c or t/u
tggcaatacactgatatggttattgtctacggtgagtgtctgtaatttagggaacgcatgtaggttctctatttcagtcactaaattctcagatacgtataaagtgtttactgcagataaattttcaagtccttctagtgtagtaattttgttgttacttatatttaccattgatacttttggaaggttattaattactaactcttctatcgcgcaacgatctaatcgtactgaagagcttattgatggtaaattttctagaatcaccttacttaatcctggtgtactcgaaaaaacaatatcattttgataagcactagagccattacctgcaactatcaaaattggaagattttttagcgtaacttctgtcaactctgaactactacctgtgtcacactcaatggtgcgtaatttaggttggtcttgaacatttatattttttaagttattactacgaatatcaacagcgcttaacataggtaaattactattcgcgtttaggttgaaacttgttattttattattagatacatttagattggacaaattcacgagaccattgagtgcagaaatatcagtgatttggttcccgcttatacttaaagaggttaattttgaaagtaaatctattcctgttaaatcaactatccctttagatgtagcagttagtgaagtgattttattcaagtctgtttgcgatacttcttgcgtgatatcctctgaaccagttgctgcttttgcaattacagtagctaaagctgcatcaggaaaaacagtttcatatgtttcgcctgcttgaaggacagttttttcttgcttcagattattggtaagggtaggtttctgaggcgttttttcttcgagagctactttaggctctaacgtggtttctgtatttactgatttcgattcattttcttccgccatggtgattaacgggtatgcgaagagtgattgaaaaaggaccactccaatcatgataatctgttttgttttgcttttca

SEQ ID NO: 3316 - DNA, 1106 bp, Listeria monocytogenes 4b
  misc_feature (1)..(end): n can be any nucleotide: a,g,c or t/u
tagatgcatgcgtcgatcggccgacagtgtgctggaaaggattgttgaacaaagtcaatccagttagattcgtcaaattagctagcggagttatatctgctatttgattattattcatcaaaatatcaactaacttagttaaatctttaagtggcgttatatccgtaagttgattattgctgaaatttatttgtgttaaattgttcaagtattccaatccatcgatagattttatccctaatctatctgcctgaagcgtcgtaacttggtctaaatcagtttgcgagaccgtgtctgttacattcgtttttcctaagaccgtcttcattttttccgctagagctgtatctgtaaaaatctgattaacaggagtatcttgtgtaattgtagctgcctgagcatttgtcccgttactcgtgttaatccatactccactgccaaatactaatattgctactagtatacttttcaaccatacatatcgttttcttctcactatatacactcctttttcaatagttagaaacaatatcaggtttcgttgtataggattttctcctgcatccgaaaaatcatgtctgcttactttattaaactatgcgccccatgaattgttcctatggtattcagtagttaatctgtctacggagctgcttagtgatatctttcatctcgttcgttccagcacattttccctatatataatatttttatgtatttcactatcgaagcttaataggaattcaaccatgcaaatcatattatgttgataccacacgtgtcattccaccttttaaaatggtctattattgacgaactcaagccccgcactcttcccgccaaaactctctttttttcacttcttctatataatcacccctttcaaagcccattaaataataataactatttttctccaaaaaagaattaacttatgttatcctctaccctttatgttcaaaataacacataaggatgtcgagatttttggtgaaatgtatacaaaaaaagataacacggtgtgattgtgttatctttttactttgtatgcgttgctggttgatagttctttttgtttctgaactgagaattgatttcttcgagtt

SEQ ID NO: 3317 - DNA, 1292 bp, Listeria monocytogenes 4b
  misc_feature (1)..(end): n can be any nucleotide: a,g,c or t/u
actattcaaaaaggtggcgttttttcttatccgataggtgatgagtatggtttcgcacttgtaattggttgttttcaggcgtttcgaaaacaaaagataatgcctcaagatagctcgcattacctccgattgatgatgggggttccgcttgtgatacgaagctttaattatacaagcaatcaaaacacagtcgatttgccacttttgaaaaaaaaggaactcttaaatccggaatttattatggatgatttagtgttgcgtggagattttccgattattggtagggtagttttggaagaggcggatattctctttccaatgaatttttcttttaatggactgtctacaacgtatgccggttatcaagcaataggtgaaccagataggaatattattaaacggtacgaagaggatattaccattagatttgattggggatttggaagcaaaacgatgcctgcgaaagaatttttgaagagaactagtggaaaagagctctttatgccttattccggattaggaatgacaccaattgctggatactcgaaaaagttagtttctcctaaatccatcttttcagaagggaaactaaagcaaatttatgcggttttagatataaacgaggaaatgtcgtttgatgattttaatgaaaattataacggccttaccgctcaaaatattttatcgatttgataggaaataacgtccaaagtaaagggacgctagttttccattatatttgacgtactatacaaaaactttcccaatttgctcaaatagaaattctcgaccaaataaaagaatgaaaatcaagaagagcatgacaatactaaaaataaaaatgccgaatgtaagatcgcgtggatagctatagtcatggttttttatatcctcacttaatgaggctaatttggcatcaaattggtcaattaacgcaacaaaattggtacggccgataaaatcacattcaattttttctaatttattttctgtatgaaagaatagttccatcgtttctggaataggatgtccaaagctcggacgagaaggttggaagttataacttattcttttcacatttgcaagatgaatcgtttttgtttcgttgcgtttatgaagaataaaagcagtctttgtgacctggatccattcttttggcgggagtataagtttaacaattaaatatcctataaaaaatatagtaataagaccatagtaaaataattctggtttttctattgacaataaagttaataagccaaacatgaaaataaaagataaagaagttaaag

SEQ ID NO: 3318 - DNA, 1389 bp, Listeria monocytogenes 4b
  misc_feature (1)..(end): n can be any nucleotide: a,g,c or t/u
tggagcctagctggatcgaaccggtgagctcctgcgtgcaaagcaggcgctctcccagctgagctaaggccccataataaaaatcaaacaatcgggaagacaggattcgaacctgcgaccccttggtcccaaaccaagtgctctaccaagctgagctacttcccgtttaataaagtgcgcccaagaggagtcgaacctctaaccgcttgattcgtagtcaagtactctatccagttgagctatgggcgcatataaaaataatgccgaggaccggaatcgaaccggtacggatatcactatccgcaggattttaagtcctgtgcgtctgccagttccgccaccccggcatattggaacttttgtaaacaagcggaagacggggttcgaacccgcgacccccaccttggcaaggtgatgttctaccactgaactacttccgcatatttaaaataagtgcgggtgaagggacttgaacccccacgcctcgcggcgccagatcctaaatctggtgcgtctgccaattccgccacacccgcaaaagtgagccgtgctgggttcgaaccagcgaccctctgattaaaagtcagatgctctaccaactgagctaacggctctctacaataaaaatatgtattatcataaagttaatattaatggtgccggctgcaagagtcgaactcgcgacctactgattacaaatcagttgctctaccaactgagctaagccggcataaaaaatggaggttaacgggatcgaaccgctgaccctctgcttgtaaggcagatgctctcccagctgagctaaacctccagaaatactgcccggcagcgacctactctcgcagggggaagcccccaactaccattggcgcagagaagcttaactaccgtgttcgggatgggaacgggtgtgaccttctcgccataactaccagacaatataaagttgttgaaagattgctctctcaaaactagagaagaaagggttcagttaggtaacttcgtttcattttttggttaagtcctcgatcgattagtatttgtccgctccatgtatcgctacacttccactccaaacctatctacctgatcatctttcagggatcttactttccgaagaaatgggaaatctcatcttgaggggggcttcacgcttagatgctttcagcgtttatccctgccacacatagctacccagcgatgctcctggcggaacaactggtacaccagcggtgtgtccatcccggtcctctcgtactaaggacagctcctctcaaatttcctgcgcccgcgacggatagggaccgaactgtctcacgacgttctgaacccagctcgcgtgccgcttctatgggcgaggagcacaacccttaagacctggtacaggca

SEQ ID NO: 3319 - DNA, 1731 bp, Listeria monocytogenes 4b; identical to SEQ ID NO: 1953
  misc_feature (1)..(end): n can be any nucleotide: a,g,c or t/u

SEQ ID NO: 3320 - DNA, 1657 bp, Listeria monocytogenes 4b
  misc_feature (1)..(end): n can be any nucleotide: a,g,c or t/u
atacattgtcgccagaatcctcgacgcgggcattcccccacccccacccagcccatccccccctcccccatcccatcccctgcccagccatcccccagccgttcccctgcccccgcccacccaagccagtcagccaaacacacaccagtccgtgcagatattgccattatcacccattattgcctacatgatcgctttcctcaatcaaacactgtaaccaaagttgcatgtgtacatttgcaaaaaactacaacaatgggggaaacaatatggtttagccccagattggattgataaccgtcgaaaaaactttccgcattatgatttgtttggcgagatgcaactcgttgtactgaaaaaagaaaaagcctttgaacaaatcgagcggtttcatttggaggagaaataacaatgattaaactggaaaatgaagtattgcttgtagaaatgaaaacagctggagcagaattaacgcgaatcttccataaagataccggacttgagtatttatggaatgctgatagcaagttttgggggcgtcattcacctgttctatttccaacagttggaaggcttgtagaagatacttacttagtcgatggaaagccgtaccacttagggcaacacgggtttgcccgtgaccgtgattttcaagtaatcgagcaaacagaaaaatcggtacgttttgagttggatgcagacgaagattcattagcagtttatccctacaaatttaaactatcgattatttatacaatagaaaaaaatacggtagctgtttcctacgaagttgaaaatacggataacaagcgaatttatttctctattggtgcgcacccagcttttaatttaccattaacagacgggacgacatttgaagattattatttggatttcggaacagaagagaatttagaaacactttgtttagaagggccataccgcagtggcgaaattaagaaggttgtcgataaaccagcacaatacttaccactgagctatgatttatttaaaaacgatgcacttatttttgaagcactaaaacaaaaagaaatgaccatcaaatcagataaaacacctcattttgtaaaagtatctttcccagaattcccatttgtaggtgtttggacggcaaaaccggggacccctttcttatgtattgaaccgtggtacggaattgcagatggtgctggagaatctgttgaactgcgagataaagcgggaatagagcatttagagccagaagctgtctttgcttccgaatatgaaattacagtaggttaaaacgaaaacccagaagagcgaaatgcatcttctgggttttattacatccattttattttgggttcttcgccgttacgaatccgagtgatatttgctcggtgacgccagatgacaaagagtgcgatacaagcaacaagaataattaaaatccagtctcccatgaaaagagaaataattaacgctgcaagtgctccaatcatcgagctgagcgatacatatttgcctttgcagtccactggtggttcgttcagcctgtctttttagggtccaattgcctctattgcgacgcccctcntaatttactggcctcnctctcctcctctccctttctcgtcacntttttgtctatcccacaaaataccgtgcagtggta

SEQ ID NO: 3321 - DNA, 1960 bp, Listeria monocytogenes 4b
  misc_feature (1)..(end): n can be any nucleotide: a,g,c or t/u
gagaagactgcacctgtatatgcaggcatttcaaggacattttctaccatttctggcaacgctacattagcaagtacctgttcataagtaccttcaatgcataattgattttcagaatcagaaaaattcacgatgattaagagctcagcgtcatctgttttacgtttgtaagcaataacttcatcacttgattctactggcagtaattctccataaacagccacttctttatatttactagaatcacttcttaaatggattaatttcttataaaaattcaatacggaattatcatcgatttgttcctgctctacgttaatatcaaggtaattagggtttgctttcaaccaaatttcatctgagtcggaaaaaccagcgttcttttgattattccattgcatcggtgttcttgaattatccctactacgccgatacattccttcaagcgcttcttccggactcattccagagagaattgcgcgatggtattgatcgtgcgtcgcaatatcgttataatcatctatactttccatccgagtattactcataccaatctcttgtccttgataaatgaacggcgtaccgtgcaacatcataaataacgtgcctagcatttttttgctacgatcatcttggtattcttgaggtaaatacttatttatcgaacgcggttgatcatgattttctaagtattttgccccccaaccatttcgctgtgtcaccagttcattggtaattattttctcttttaattcttttactgtccattctgaattcttgaaccattcgcctgtttcaggagtatcaatatctgtatagctaaaatcaaacaccatacggaaatgaccattttcacctataaattcagaaagtctttcttcaggcacatccgcctcagccacagtaaatgcattatgttttttaaatgtccgttcgtcaatctccttgagccactcttcaattcccggctgatttaaaatccaatgaccgatgaaaaccaagccatcttccccgtccgctgggaaagtaccgtactcaattcttttcttcaaatttaaaatggcatcaattctaaagccacctaaacctttttcaagccaccagttaatcatttggatacattcattacgcactacaatgttttcccagtttaaatctggctgttttttagaaaaagcatgtaggtaaaacatgttttcctcacctggtacggcttcccacgcagatcctccaaaataagaacgccaattattaggcgggtttccatttacaccctctcggaaaatataataatctcgatatttactttttgggtcagctattgctttttcaaaccattcatgttcatcagatgtatggtttaccaccaaatccatcaatatttttattcctaatttttctgccttctcaattaattcatccatatcactcatcgttccaaacattggatcaatctcatagtaatcagaaatgtcataaccaccatcatccataggtgatttatagacaggacaaagccaaatcacattaatacctaaatctttcaaataaggaagtcgttctataattcctctaatatctccaataccatccccatttgaatcttgaaaactacgcggatagatttggtacactaccgattctttccaccattctttcgtttctgttatttccactattaatctatctcctatcctttaacagcaccacttgtaatgccttcaacataatatttttgcaaataaataaacagtattgtaattggtaccgcaatcaatatacagccagccgcaaacgttgtatacattgtatttgccgttgtttgattcaacatggaatataaacctatcgacactgtatatttaggcacattgtctcccataatcactttagcaaaaataaaatccatccaaggcaacataaatgccattaaagctgtgtatacaataataggcttaga

SEQ ID NO: 3322 - DNA, 1741 bp, Listeria monocytogenes 4b
  misc_feature (1)..(end): n can be any nucleotide: a,g,c or t/u
tactggtgcagaacttgctatccgattttgcttttcaagatatttgttagtggaatctacaagcccgcttattacagaaacagaaataaattttttctggagaagttaatttggaaatgatggagcagattgtcgtttctaatatagcgaaatataatattcacatgacggacatttcagttaaaaatttgattattcatatcgcaattgctgtatgtcgtgtaaaagataattgttatgtacctgcaacagatttggaggatattgaatttagtatgccggaattaagggcggctcaaggtattataaaagaaatagatctttcagaaggaattcgtttcccggaaagtgagactgcctatctgctgctacaccttagttcgaaaaacagaaaaagtgactttaataattaccgagaatatatcatcgtggataagatgttagaaaagattaaagagctgtacggttatgattttaagcaagaccagaaaatgatttccaatatcgctttgcatttaaagccagctattaacagaattaaatttaatatgaatatacaaaacccgtatttaaaaaatctaaaagctaattatccactagcttttgaattagggttggttgctaaagaagtccttgagcaggagttaaaaacaaatgtagacgaagcggaagtaggatatttggctattcactttttgtatggcttagataaggaaatagggtctgagaagcaaaaagtattgattgtttgtgcttctggtttagggacgtcgcaacttttggaatctaaagtacgaaaagagtttgagaatacgcttgaaatagtcggcgtgtactcatttaaagaatatgagcagagtggaacggcatgtgactttgttatctctacagtaccactgcgaatgaagttacatccatttattcaagtatcgccatttttgacaaaggcggatattcgtaatatcactgcgttaatgaagcaagatgagacgaagaaccaatttgaagtggacaaggtttttaaggaatcgttattcttaattagtgataaaaaggacaaagagcaagttctggtagatttagcgagtcttttgctggaaaataatattgttggcgaggactatttaccatcactttttgagcgcgaagaaattgtgccgacttatttaggtaatggacttgcggcaccacacccaattgaagcaaacgtccaagaaacagctattggagtatgtatttttactggcggtggggtaaagtggaatgaggaagatcaggcacaagtgattttcatgttagcggtaaaaaacaagcaacaacagcagcttgcgacggtgtatgagcttattagcaatttagtagaaagtccaaaagcaatgggagagctaaaacgtgtgacaagttttgaagaatttatgcgtgtgttacaaacgatataaccaaaaggttcgttagactttcttagagagaaaagttaacgggcctttttttatttccgcatgttaaatacagatgcggaaaaagactagatttatttaacaaaaagaaagcgctacacttattgtcatatcaaaggaggtataaaaaatcgaaaaagttcatccggaaattaagttggttatcgcacaggccggaaatcaaatgcattaaagtctatgcctgatgcatttgctactttgtcaccttgtgtcgtggtggccggttgctgggcgctatttatcacgcaataataaaacaagat

SEQ ID NO: 3323 - DNA, 1847 bp, Listeria monocytogenes 4b
  misc_feature (1)..(end): n can be any nucleotide: a,g,c or t/u
tcctgcacccatcactaaattagagcaagctatctcgattttttgtccattttttctgccgttaacgataattttttccattatgcttccaccccactcgcggcaattttatcgactacaagtgttgtattcgaatcttttacgagtgttgcaggaatcgctactgtcggttctttttccactacttgtttcacgatatcaatttttttctcgccagttgctactaaatatatttctttcgccgctaaaatttgttgcataccaagagaaattccgtgtgttagtggcaaatctgtatcaaaatatttgctcatgacgcgtttcgttacatcatcaagttccacgacatgacagttcacatctactggcacaaatggctcgttgaagccaatatgcccattaagtccaatccccagcaaaataaaatccattccgccacggtcgtcgataaacttgtctacacgagcgcattcatccgttaagctcgttgctttcccatcgaaaaagcaaatttgttcactagaaacatttttcaaacggtcgaaaaatgcatcatagagtgtttggatacagctaccttttgtttcgcgtccaaggccaacccattcatccaaaccaacaaattgcgtctcactaaaatctacttcgcccgtttgattcgctttaataagcgcttctattgttagtaaaggcgtgtccccaccagcgatacaaattaaacttgcaggtttttcttttaccaattcaatgattctttggctcactgtttgcgccacgagttgttcattttcattaataattaatttcattttaaaatcaacctttcttattagaaatccaagtctagtgcatcgtgcgcagcttggcgttctgatacaacttcttcttctttaatcaagctcttctcatacattttgaagaacggatagtacatacaaacggctgctgcgagaacgaagatgattaaaataatcgcgcgccaatccatcgtcgccaaatactgcgcgagtggaatcggtgtaccgccaacattcgcaatcggcggacgaacccaaccaaagtggaacacaaaccattgccctactgctaaaattggcgttccaagtacgaatggaataaacaaatacggattaaaacagattggcaaaccgaatacaactggttcagaaattgtgaaaatcgctggaacaaccgacacttttccgaccgcttttaattctcttgatttactaaatagcgcaaggataactaatgcacctgtaataccagaaccagagaagcccatgaagtaatcccagaagtttggcgcaaatacgtgcggaattggttctcctgccgcatatgcagccgcgttcgctcctaaatattgtgtcataaatggaagcacaaaaccaatcaaaatcgcataaccatttagaccgataaaccagaatagcatttcaaggaaacaaataaggaaaaccgcataaggcgtatcaatactattaatcgccggagctagcatcgtcgtaaaggcttccggaatgatttgaccgctagtgacactttgcattaaaatacttagtccaacagcactgaatagcagtacaactagtggaataattgcttcaaaagtagtcgcaatccccgccggtaaccctttaattcgaatcgtaatattttttctaataaataaaccgataagttctacagaaatcagcgctgcanaaatggcgataaatagccctcttgaatccagaaattctgtattaagcaccccgtcaaccattttcgtattgaggatgagcgtcaccataacagctgccatcacactatgtaacacaggtactttcatttgttttgcgtgg

SEQ ID NO: 3324 - DNA, 2256 bp, Listeria monocytogenes 4b
  misc_feature (1)..(end): n can be any nucleotide: a,g,c or t/u
taagtcccggacatttacagcaccttctaatttaatttggcttcctggtttgactgtttgctcggttttaacgtttgcctccgctttttcttctgactgcgctccgcatcctcctaatagtaaagtcgcgcttagcacccctgcccctgttacttttacccaatgtttcattctttctcctccttttgtaagcttcttgtactttatagcaacgcaatttgttggttgaatgaagggtttgtaaagaaatgattttagggatgttaaggtatgaaaaaaagccaaaacccggaatgggttttgacttttagaattaaaatggcattttgaaattgccgaatggatttttgccttttttgcctttgccgccaccagtcatttgcttcatcatttttttcatttcaccaaattgttttaggagacggttaatttcttgaaccggacgtccgctaccacgtgcaatccgttttcttctacttgcattgatgatatctggattgtctttttcatttttggtcattgacttgataattgcttcaatatgacctagttgtttatcatcgacgttcatgttgtcgaggcctttcattttgtttgcccctggcatcattttaagtagttcatctagtggtcccatttgttttacttgttgtaactgttctaagaagtcatctagcgtcatgctgttgtctttcattttttgttccatagctttcattttttctgtatctacatcggtttgcgctttttcaatcagggaaagcacatcgcccatgccgagaattctggaagccatacgatctggatggaaagtttctagagcttccattttttcaccagtcgcgataaatttaattggtttgccagtgacggaacgaatcgaaagcgctgcaccaccacgtgtatcaccgtctaatttggttagcacgacacctgtaatttctaattgttcgttgaagctttgcgccacgttgacagcatcttgcccagtcatggaatcgacaacaagcaggatttcggttggcgttgcaatttctttcacttgttttaactcatccattagcgtttcgtcaatatgaagacgacccgctgtatcgataataacataatctaaatgttcttcttttgctttagcaatagcttgtttggcgatttctaccgggcttacttggtctcctagagaaaataccggcatatctaattgcttgccaagtgtttctaattgtttgattgcggcaggtcggtaaatatctgctgcgacaagtaatggtttacggttatattttttgcgtaataaattagcaagtttgccggaagtcgttgttttaccagccccttgtaaacctaccatcataatcacggttggtgggcggtccgctgttccgattttgctttcttctccgcccattaagcttgttagttcttcttgaacgattttgataacttgttggccgggtgttaggcttttcataacgtccgcgccgacagcacgttcgcttactgttttaataaattgtttaacgactttaaagttaacatcggcttcaagtagagcaagacgaacttcacgcatcatttcttttacgtcagcttcgtttactttccctttgccgcgaattttgttcattgtttcttggagtcttccagctagtccttcaaatgccatgattctggcctcctaatcgatatttttaagctgttcgagcgtatctttcacttgctcgtccagaaaattcttcttggttaattgtgcttctaattgactaaaaagtttttctcgttgttggtatttttttagcatccctagtttttcttcgtatttttctaggctttcttcggttcttttaatattatcataaatggcttgtctactcacttcaaattcttcagcaatttcgcctagcgagtaatcatctagataataaaaagaaacataggctttttgttttgttgttagtaattcctggtaaaaatcaaataataaattcatacggtttgtcttctcaaacaaggcatttcacctctctccttttaaaggatacggggaaatcgcgggaatgtcaaggaaggttaaacaaaagagaaaaaagccagaatgacgagaatcattcggctttctctgattatttttcgttatcaaccatatcagcaaataagccatacacatattcatttgcatcaaaggcttgtaggtcgtccatttgttccccaagaccgacgaatttcactggaatatctagttcattgcgaatggcg

SEQ ID NO: 3325 - DNA, 1496 bp, Listeria monocytogenes 4b
  misc_feature (1)..(end): n can be any nucleotide: a,g,c or t/u
agtaccgggagttaacgcagcagctttacaatctagtatggatggcggtattttggggttcttaaatacatttaatggtggggctttaaaaaacttctcaatttttgccatgggtgtaatgccttacattacatcttccattattgttcagttacttcaaatggacgttgttcctaaattgactgagtggtcgaagcaaggggaaatgggtcgtaaaaaactcaatcaacttactagatacatgacaattggacttggtttagtggaagctttcggtatggcatatggatttaaccgcatgtcttcagctggcttagtaattgaaccttccattggtagatatgcaattatcgctattgtattgactactggtacaatgttcttaatgtggctaggtgaacaaatcactgttaaaggcgttggtaatggtgtttccatcattatctttgcaggtatcgttgctcgtattcctgatggagttcgtcaattatatgtttcgcaaattgaaaacgctggtgatcaacttttcctacatgttctgacattagttggtgtagggattgcaattttagctattgttgtagctgtaatcttcttccaacaagcactacgcaaaattccaattcaatactctaaacgtgtagcaggagcaaaacaatcgggcgcgcaagcaacgcacttgccgttaaaacttaactctgccggagttatccctgttatctttgcaagtgcatttattattacaccacaaactatccttactttctttgatcaaagtaacgatgttgtaaaagtattgaaagatgtgtttgattacacaaaaccaattggtatgattttatatgttgcactaattgttgctttcacttatttctatgctttcattcaagtgaaccctgagaaagttgcagacaacttgaaaaagcaaggtgggtatattcctagtaaacgtcctggtcgggaaacacaagcttatcttacatcggtactttaccgtctaacatttgttggtgcaattttcctttcagcggttgctatacttccaactatcggtactactgtgtttagtttaccgcagtcacttgccgttggtggtacaagcctactaattgttatcggggtagcattagatactacgaaacaactcgaaggacaacttgtaaaaaggaactatcggggatttatcaaataacacgcagttcttgttaggtcttcctagcaggagctagcgcgtaataaggggcgaaacagttgaaattagtattaatgggactgcccggcgccggaaaaggcacacaagcggaacagattgttgagaaatacaacattcctcatatttccactggagatatgttccgagcagctatgaaaaataatacggaattaggaaagaaagctaaatcctttatggataatggcgaccttgttcctgatgaagtaacaaatggtatcgttcgtgaacgtttggccgaagatgatgctaagaatggtttctt

SEQ ID NO: 3326 - DNA, 1437 bp, Listeria monocytogenes 4b
  misc_feature (1)..(end): n can be any nucleotide: a,g,c or t/u
gctcggaaagaaatagaccaaacggaagcacggataaaagctggtcggttgacactttccgcgtgttaaaaccagtaagaatgctatcgccttttaataaattatcaaaacaatagtcgcggataattgtaatcgtttgttgtaactccggttttggaaaagtgtttttcacatctaataatgcagagtatacacttgaaatagttgctaaataaatatcattttcagctgaaccccaaatagacttttcaggacgattccagttttcaactaaaaatgcaattactggctctacttcttctctatcataatgattgattttactgctaagccatagccaagaagcggtttcaaggactgaatcagttgtaaagttaggttttgtttccagcaggattggtttgattttttcgttttttccttctattaaatgcaagtaaccctgcattaattttgtgaatttagacatgttctatttcctttcttggatatactaaagtggcagtctaatttgtaaagatacttacaaacgtccctgccactcgttttacttatttaaatcccattgttttgttgatgttgtcttcgctgtttttcagtgctttttctggagtagaatcgccatttaatactttttcgaattcagagtttgtataatcactgattttgttccaatcttttacaactggaggtaataccatatattgtagagattcgaatactgcttctctgttatctggaggagttgcatctaaatatggttgtaaaatctctttgttttcagtcgctggaagttcccagttattatcaattctgattttcgctgcttcttcgttcgcgctcatgaaggaagcgaatttgaaagctgcttcttttttatcggagtctttagaaacaccattgccgtttgcgaggaagtgagttgctttttgcgtgtttcctgcttctacttgtacatcccatttgaacggagcatcttggaacatatcgaacaacccactcccggtgtgaagcattgcgatttgaccattcataaatcactcttcctggcctcggtcccatccattacctggtgaaggcccctctttcgaatgtgccccttcttgctgcccgccagtccctgccttcccctcccctcgaccgctgccctcccctcccccctccccccccttttcttcctctctcccccctcttcccccccctctttcgccccctccttcctcgcccctcctttcttctcctccccccgcttcgtccttcctcccctccttccccttttctctctctccccccttcccttcttctccctctgtttccctccctttttccccctccctcttccttccttttcctcccgtcccccctccctttcccttctttttttccttcccgttgctcttttcgtgtctccctcccatattcgccaaccataaaaat

SEQ ID NO: 3327 - DNA, 1595 bp, Listeria monocytogenes 4b
  misc_feature (1)..(end): n can be any nucleotide: a,g,c or t/u
gttatttttgatcgtttgtttgcgaaaagcttcgatggttcttcaagaaactaaggacgtattgcttaaaccaaaaacgctgattgcgattattgcggcagcttttatagtgacagcaaactggtatttattcatttatacggtgaatagtgggcatgtgaccgaagcaagtcttggttattacatcaatccacttgtaaacgtacttctcgcaacagttatcttaaaagaacgcttgagtcgtggcgaaattattgctgttatttctgctactatcggtgttttaatcctcacatggcatcttggatctgttccttgggcggcaatcggtatggcggttactttctcgctttacgggctaattaaaaaagtcgtttccgtatctgtttggactggtttaacccttgagacaatgattattacgccattcgcgcttatttatgtaatctttttcgcgaccaatggattaatgcagtacgcggcacaaaccaatattattttagttggtgctggtgtcgttacagctatcccgctccttctgtttgccactgctgcgaaaaaaatcagctatacaatggttggcttcctgcaatatatcggaccaacattaatgctcgcactcggcgtattactatttaaagaaagtttcgatcatattcaattgtttgcattcatgtttatttggttagcactgattattttcacgatttctcacatttattccgcagccaaaattaaacaattagcaaacgccgcaaaaaaataaatgtttcccagtcccctctttcgggaataattcttctatcaaacgagaatctattccataaaaatgaatagggggcttttttcatgaaaattggtatcattggtgctacgggccgagctggttcgagaattttagaagaagcaaaaaatcgtggtcacgaagtaacagccattgttagaaacgccgggaaaatcacgcaaacacacaaagatattaatattttacaaaaagatatttttgatttaactctttcagatttatcagaccaaaatgtcgttgttgatgcttatggcatcagtccagacgaagcagaaaaacatgtcacttcccttgatcacttaatttctgttttaaatggaactgtgtctccgcgcttacttgtcgttggcggagcagctagtctgcaaattgatgaagacggaaacacgcttttagagtccaagggcctacgggaagcgccttactatccaactgcacgtgcgcaagcgaaacaattagagcatttaaaatcacatcaagcagaattcagttggacttacattagcccttctgccatgtttgagcccggcgaacgcactggagactatcaaataggaaaagatcatctcttatttggtagcgatggtaatagttttatcagtatggaaaaatatgcaattgctgttttagatgaaattgaacatccataatcacttaaatgcacgctttacagtagccggaaaatagacttaaagtcgaaggatcactttgatccttggacttttttgtacaaaataaaactcccaattggagagaacttcgctgtatactattgctatatgtaaagtac

SEQ ID NO: 3328 - DNA, 1513 bp, Listeria monocytogenes 4b
  misc_feature (1)..(end): n can be any nucleotide: a,g,c or t/u
tgaaaatggaaaagtggctcattggtgtatatgcccttgtagtattaatgtgtattattatttactttgcaacagaaagtataatcttattgttactagggttcatagctcttcttggaacaggattccaaactttaagataccgaaatgcaaagaaatcaatcaaagctaaataaacaaaatgtaggttgggataaaattatcctgcctactttttatttatgtgtagaattcttttaatcattcccacttggttttgagtgcgtttgttcgtaagatgttattaagagatgacaaacatgtataatataattgattacattatagaacattctatatcttttagcagatgtacttaaacgtaattggtcaatagaaacattatacttaaagaacaatcatcatatgcaatacaagtatgtagttcctgttaatttagatcacgaaagaaacataggttaattaaagtgatttgacgaacgattaattgatattaatatagaagatattgttgtttgtaaggttgtgacatgagagtatatagctttaacgattcaaaggcttgtaaaaatttatagaaaccgacaaaagaaaaacttttcacctccctcagccggacttgggtatttccccactatgacatagaatgctgacaagaagtattgtataattgtaataacgaaaatatcagcgtttttataaaaggagcggtctggatggaaagaaaattgattcaggaaattaatttactagaaaataaaaaattggttatgaatttgaatattgttgcgattgctattgtactcatattaactgttttaggaattgttttttcaggtggttttgcaattacgaatggttttatggggattatttggatgtttggtggttatgcagtagcaattgttattcacgaagccgtacacgggattttctttaaagcatttcgtccagacgcaaaagtgaaatttggttttaaaaatgggatggcttatgctggaagccccggagcattttatacgaaagcacaattctttattatttcgattgcgccatttatcgttcttacgggtttgttcatttttctgcgatttcttggggtgaatgaagcggttctttatttaatttttgcgttacatacgtctggttgtgttggggatttttactactgcattctcttgattaatcaaccggctggaatcgttgtggaggatacggataaaggcattaatttttattcagaaggttaagcttggtatcgatcacaacaaagtgttagaataaggatatacttttagaaagaggtgcttagtttgaaacgaataacaattcccaatagcgctttaacagcttcagaaatttcgctaggatgtatgagaatggcggatcttagtaaagaggatgccaacaaagtgattaatacagcacttgaaaatggcattgatttttttgaccacgcggatatttatggcggcggtaagtcctaggccgtttttgctaccgcaattgatat

SEQ ID NO: 3329 - DNA, 2630 bp, Listeria monocytogenes 4b
  misc_feature (1)..(end): n can be any nucleotide: a,g,c or t/u
acaaagacatacctaattatgaagttgactctggaattactggagcagaacaaaattatatttataattttaaaaatccaatccctatttctgaacaagaattacaagacatttgtgatacttttggtgagtttatggtttctgcttattttttagtggatatatttgggccgtatgaggaattacctggagacaaaaagaatggctataaaaaagttgttcttgcagatgaatctatggagataaagaaaaagatgtttcatttgtttttagaaggtgatgcttatccagacgcaaacaaaatatttttgttcaaggagaaaaaagaattaaatgctagaaaaaacatggaaatagaagatggaatgatagtgatttctcctgttttagatgttactgctataggcatattttcaaaaggaatagatttggcgcagtttttcaagtaatcagagtggatggtatgactgcgagaatattgcctaaaacattaaagatgctttgaataaagctcaattgctaaaataatatatctaaattagaaatataagttactggaatattatttctatagtttaatcgtgtagaaacaatttgaaattgctgctgattatgtataccaaagtaaagagataatctttattgacatcataggcgacgagacgccagcaattggaataatcgctgaaaatgactatgaaggattagaaattactttagtggatgacgaaggtcgattagatggaacttgttggataaaaaaagaagatattctagccctgcgtttcggcggcagtgtagaacaagatttgatgaacaaactaaaaaaataaactaagaataagccctccatttttacagggagggcttattctaaaagtaagagatgtaaataatacatatcaaaagaataatctctgcgtgagcataagcaagatagtaagaatacaatcctagagaatataaaaaaagaaaaaggaaagaaaataaccaaattaggagattgaaatggattcaatgttgaaattaataatggatttggaattcatcggcataattataatgtgtatagttattatagattttaagaaagacagcttcttttataggtgtatgcaagtattaatattgttaactttatttgcggttacgggaataattatctacttttaagaaggatcgagggataatatgttatttgtgataataatatattttgtttttctacttatattaattattggctatgaaacgagacgtaagaaaaacaataaaaccgtgcttaacaatatagctatcattattttcctgctagcccttataatttattgtataatgctagtccctcggttggacatttaacgaatgaaagccactatagaagaattagcgtttgaaatctcaatattaatctctattcaaatataaagtgagctatgtaaagtgaagagaaaaacattatgaacattacaggagacaatcatgattgaatttattatcgatgtatcaataaatgttattacatttgcaattagtttgcattccgctgcttctctcagaaaaaactaaaggtatcttggaaatcgtaggtgcaagcatactttttgcggggattatgatagttggaacaggtattttcataagcagtagcgaaaccctgaaatcatatatttatgtgattttggtagtgcaaataattattttgtgcagcgaactcatattagttttatggagtaaaagtaaaggaaagtctacaattttatctatcctatcagcaatattaggtatagtcgctttaggaatatatatttattatgttatagcaagttttatttattgaaaattattttccaaagataggaaaaatttgcagaaataaagaaaaaataataaaaagaattaataatcagtgattcgcctagcttagcagtattttcctgatattgaggaaaacttaaacagttagataataacaaaaagatttcggaacacaagcaaagagacggtttagtgtataagattgaagtaaattgaaaatgggagttgaatacttattggcttttatcagaaaaaatagctttctactgtttttaatattatttctcatgagttctattttaattcatatgtttttttataattttctcacagatattattgtaactgtgtttttgggattagaaaccatttttattgtcattatctcactagaaattatggatgttaaaaagataagaaagcggacaaaaagaattatagaaatatattttttaaccttacttggtataacagtaatcacgtcatatttattttattaaggaggttttcctatcatggctatctcaattgcagctttgattaacctagtaataattgcaggattatatttaattaaaaaaagtaggataagtatgatatttaaaggtatatgtgctgttgtcctatgtactttttcagttggaatgtatgcttatctcggggtttatgtcggattgttgggctaagggatttgtgaaaaagaggcggaataaacgaagtccaaagcatacacagaaaagagggctgttatgataaacctagaatggaaagaactagaccaactggagatagaagaaaaggttcaagaggta

SEQ ID NO: 3330 - DNA, 1744 bp, Listeria monocytogenes 4b
  misc_feature (1)..(end): n can be any nucleotide: a,g,c or t/u
cgacgtgtgctggaaagggtttgacacaggaagttttttaatcgatgacaatttgaccgattattcaccagcggatttgatgttaatgtctattgccagttgtagcgccattgtttttcgtaacattttaaagaaaaaacgagtaaactttaccgacttatggatagacgccacaatggaacgcatcccagaagatataatcgtataatctcgatacatcttcattttaaaataaccggtgctgccttggatccaaaagcacttgaaaaagcattaaaattaacaccgaaatactgttcgatggttcgttctgtcgaaaaaagcatccttgtcgatgaaagtcttgaaatcatgccataaactactgacaagctgctgtttttttgttagtattaatgaagacttggaatgatggaggaaaataatgaatcaaaatccagtagaagaaggacaaaaattcccgctaactattcgacgcatgggaatcaacggggaagggatcggctactttaaaaaagcagttgtatttgtacctggcgcaattaccggtgaagaagtagttgtcgaagcggtcaaagttcgcgatcgtttcaccgaagcaaaattaaataaaattcgtaaaaaatctccaaaccgagttaccgcaccttgcccagtttacgaggcgtgtggtggttgccagttgcaacatgtggcctatagcgcccaacttgaactaaaaagagatattgttattcaatcaatcgaaaaacatacaaaaatcgatccaaccaaattaaaaatccgcccaacaatcggaatggaagacccatggcgttaccgtaataaaagccaattccaaacaagaatggtaggcagtggtcaagtcgaaacaggccttttcggtgccaattctcaccaacttgttccaattgaagattgtatcgtccaacaacccgttaccatcaaagtaacgaattttgttcgcgacttactagaaaaatacggcgtgccaatttatgatgaaaaagctggcagtggtatcgtccgaactatcgtcgttcgtactggcgtgaaaaccggcgaaacacagctcgtcttcattacaaatagtaaaaagttacctaaaaaacgcgaaatgcttgcagaaatcgaagcagctcttccggaagtcacttcgattatgcaaaacgtgaatcaagcaaaatcctcacttattttcggtgacgaaacgttccttttagcaggaaaagaaagcattgaagagaaattaatggaactagaattcgatctatctgctcgtgcctttttccaattaaacccgttccaaacagagcgactttatcaagaagtcgaaaaagcactcgtactaacaggcagtgaaacactagtagatgcttattgcggtgttggaacaatcggccaagcttttgccggaaaagtaaaagaagttcgtggtatggatattattccagaatccattgaagacgctaaacgaaacgccgagaagaatggcatcgaaaatgtttattatgaagttgggaaagcagaagacgtattaccaaaatgggtaaatgaaggtttccgcccagacgcagtcatcgttgacccaccaagaagcggctgtgaccaaggcctaataaaatcattactagatgtggaagcaaaacaacttgtttatgtatcctgtaatccatccacattagcacgtgacttagctttactcgcgaagaaatatcgcattcgctatatgcaacccgtcgat

SEQ ID NO: 3331 - DNA, 1610 bp, Listeria monocytogenes 4b
  misc_feature (1)..(end): n can be any nucleotide: a,g,c or t/u
ggatgagtcggttaaatcaagcgaatgttttagcgatgagtggtcgtgcgattgaggcagctggtgatgtggatgtgcttttgctcgataaaactgggacgattacactgggaaaccgcaaagcaagcgaatttttgccagtggatggtgtgacggaacaagagctggcagatgcggcgcaactttcctcgattgcggacgaaacagcggaaggcaggagtattgttgtattagcgaaagaacggttcgacattcgcggccgagattttgctgaaatgcacgcagaatttgttcccttcactgcaacaacccgaatgagcggaattgactatcaagaaaatacgattcgaaaaggtgcggcggatgcggttcgtgcttacgtaacggcgaatggcgggacgtacccaaaagagtgtgatgcaattgtgagcaaagttgctggtgctggtggtacaccgcttgtagtagtccgaaataacaaagtgctaggcgttatttatttaaaagacatcgtgaaaaatggagtgaaagaacgtttccttgatttacgaaaaatgggtattaaaaccattatgattaccggtgataacccaatgactgcggcagccattgcggcggaagcaggggtcgatgattttctagcagaagcaactccagaagcaaaattggaattaattcgtgaatatcaacgggaaggtcatttggttgcaatgacaggtgatggcacgaatgacgcaccagctcttgcacaaagcgatgttgctgttgcgatgaatacaggaacacaagcggcaaaagaagctgggaatatggttgatctggattctagtcctactaaattaattgatattgtgcggattggcaaacaacttttaatgacgcgtggtgcactgacaacatttagtgttgctaatgatttagcgaaatactttgcgattattccagtgctgttttacggtattttcccacaacttgaagcacttaatttaatgggattaaccagcccgacgagcgctattttatccgcgattatttacaatgcggtgattatcattattttaattccgctttctttaaaaggcgtgaagtatcgtgaaatgccggccgggaaattactgagcagaaatatgttgatttatggtctgggcggtttgattgctccatttatcgcgattaaattgattgatatgctgttaactgttttaggaatcgtttaagagggggagaaaacatgaaaagatttatgcaaatttggaagccggcagtagttggatttctacttttgacattgatgtgtggtgtggtttatccgggtattgtcactatttttgcaagtgcagctttccacgacaaagcaaatggcagtataatagaagaaaaacgagcagatggtacgaccggaaaagttggttctgctgaaattggccaaacgtttactaagcctgagtacttgattggacgggcagcaagtgacggggtggcgacaacttaaccctactagcgaagaacaaaaccatgggtggaaaaacgaatttgcttggcggcctaaactatatccgacgaaccatggcgtcctttcatgggtctccctgccgtaacatgcgaggtgg

SEQ ID NO: 3332 - DNA, 1337 bp, Listeria monocytogenes 4b
  misc_feature (1)..(end): n can be any nucleotide: a,g,c or t/u
tattttggaaccattaagccaacaatattgatgagtagctctgaattagcgatggcaggattaatcatttgatgcgagacatttgggatggttttggtttctaggttttcttttttaatttgttgggtgtaaacatcttttgtttctgctgaatcaacatttttatctttttcagctaagacgaggtagatttttgcttttacttttgaaaggtctagggtggcatcttggttcatgtttttgcggataaagttgtagcgatctggggtcattttttctttaccgccattttgtttgtagctttcgtaggttttgtttttagaaataagggtgctgtcagtgaggaaattttgttgtgcttgcttgacttctttcgttgttttaccagcgtctttctcttgccagccagtgttgtattctccttgacgcatccagttaatagcaggggcggcaaggattgagaaagcaatctcattatttgcattcattgcttttgggatcacccagccggcttgactagcgccccataagccaattttggcggtgctatcaggatacttcactttcatccactcaataacttggttgacttcgtttgcgaggtcttccatggactgatttagccaattgcctgaggatttaccaacgcctaatttatcccaagaaacagatatatatccttgtttggcaaagcgttccattagcggtttgtagccaccgttttgagttgcttcttgtgccccgtcaccatgaacaaacacaataatgccttttggtttctcgtgttttggagttgtcacgactgcagaaagttttccaccagtagttgggattgtgactcttgtttcgttcatttcgaaattatttccgatgaaaagaatcgctactaatatgacgatgattgcgctcattacgatagttatttttttccaacgtttcattgtatccactccatttttcgccattctttgataccggtgagtactcccatcaatgtgctattttctttttgaatcacttggaaacctaaagttttgtacaacttgtaggcgccattattgttcttggcaacgtataaagtaatctgttcattatgaaaagtttctaagtaatgagaaattaatatttttccaataccttgaccacgaaaatttggcgaaacggttataaagtcaatatatcgttcattttgaacaggtttgtgtgatagaagactgagtaagaaaatcaatttgaggggccttggggaaatgataaaaattttcttagtgcttgataaagttttggatgagagtcacctttgcttgtaaaaatatgccaccgcaaactaactcatc

SEQ ID NO: 3333 - DNA, 1177 bp, Listeria monocytogenes 4b
  misc_feature (1)..(end): n can be any nucleotide: a,g,c or t/u
aaagctatttatgtggatcagttaaagactaaggttttaactactactggtagcactttcccgtcagcaactggttttcctatatcaatataatcaccattatcgactttgacactatccaagcaaattagtggatgcccggctggtaaatgcccgaagatgctttgtccgagggcttttgccatgtcgtgccatgtaatgataattaagggatgaccaagtgcgattggttctttcattccttcgcaaatggctttcgcatattctgttacttgctggaaacttgggctattttcgccttcaattgcaagtgcaatatgttccatttcattctctattttgaaccagctaagtttttccttgatgacttctgccatattttcatcttcttcttgtttggcaagtttcaaaattggaatgttttttactgggaaaattttctcggtgtaagtaatcgtactaccgctaatttcagctgtgtgtgaaccggctccgaccactgttgcccgtatggtttcgacagattcgatatactttttttcagtcattaaactagattctgcaatcgcttttcctagcaataacccaatatccccatatctaaaaggatcacttagcgcacccgttgagatgcagtctgcaacgcctccggaaaaagagatacattcaatctccgttaagaatttcaatcctttattcgtaatgattgtttcataaaaatcatttggcgccccgaggccaacactattcttaagcagctcaaccatttcacctaaaacgggttgcaagttttctggtgaagttgtttcaccaagtttaaccggataacctcgtttttctattaaagcttgaatttttggagcaatataggtgatttttcttgtttcacggtctactttaattaaccgaccaccaatatctaagcaagcagtatcaatgagttaaacgcgatcaaacagcgataagttcgtggttccgccgccaatatccaaattcacaacagaggtattattctctttggcataggtatgagcacctgctccttttccagcaatgatgctttctaagtcaggtcctgctgttgctacaacaaaatccccaacgaaaccactcattgcatctatttccagcacacgtcggcgctcagcagttaagtgacgtagccncaaaagttacc

SEQ ID NO: 3334 - DNA, 1267 bp, Listeria monocytogenes 4b
  misc_feature (1)..(end): n can be any nucleotide: a,g,c or t/u
tattcccagtgcatttagcgttaaatttactgattctttaaaagaagcaatgcttgaagagctgctccgttttgtcatccaaatgaaaagcgtcgtaaacacggttaacatgagtgagctaacgaaaatgatagaaccaatcatcagcaccatcgataggaaaacaaatgcttggttttccaaataccactgcgccgacacccaatcaacgagcgactcgcctgacgttatttcgcttaaggtcgcgtcttttgggtagctaacttcaaaagtgtaaccactcgaatccgtaagcgtcatttcttggtctttgaaattaattacattcttcgctccactaagttctgctttcgttaaattcacaccagcaacaccattcgctgtttttttgacgatgtgcgcatttttatcggttaacgccccattttcgagcgtcagtgcactaacttctgtcgccaattgatccgtgacaagcgccgccatttttggcattaaacttggtaaatcaaagggaggctgattagcaaagtgcgccgaaacaggaagcaacagtaacgcatttaagaaaataaatacgatgaccatttgccagaatttcagtactttccgaccctcaaaaatagcggttggaccgagtgtactttttacatattgaatgataaacggaacttttttcattgatatcacagcctttttaaaaatcaattatccttttgttccaccggcagttaagccagaaacaaaattcttttgtaagaagaagaacagtaaacaaattggtagcgcggctaaaatggcgcccgctgcgaataaggctactttttgttgttgtgggttggcgatgaacgtttgaagtcctaccgcaatcgttaagttttctggtgttctaagaaggaatttcgcaaggaggaagtccccaaacggtcccataaacgcccataaagcttgaacggcaatcatcggtctaacaagtggcaagatgatttgagcgaaaatgcggaaatgtcctgcgccatcaagtttggcggattcatctagatcacgcggcacggtatcgaaataccctttcatcagccatgtgttcatcggaatcccaccaccgatgtaaatcaatgttaagaaccaatattgatcaagtgcgccaagtagcatcgctaacacgtagaaagctgttaaggccgccatcgttggtaccatttgaataataaggaagaaaatcaagctgtttttacgacctttaaacggtaacggctatacgtataacccg

SEQ ID NO: 3335 - DNA, 1322 bp, Listeria monocytogenes 4b
  misc_feature (1)..(end): n can be any nucleotide: a,g,c or t/u
gcatgctgttcgagcggccaccagtgtgctggaaagagccgaatttccgtggttaaaagacgaacgtgagcggataaagcgattaagtgaacagcataaacctgtttttggtgtctgcctcggcgcacaacaaatcgcagcaacattcggaagcgaaatcactgtaaataaagaaaaagaagtaggctggtttcctgtcaaaagaacttccgacaaattatggtttttcccagaatcattaaatgtgtttcactggcatcaagatacgtttgcgttaccagctggcgccacgcgtttatttgctagtgagggttgtttgaaccaagcttttttgtccgctgaaaatattatcggttgacaggttcattttgaaatggaaaaagcggggattgagacgattttgcgaattgatgaggcgtttatcacatctggaaaatatgttcaaagcgtggaagtgatgcgagagaaggatgttccagaagataataaacaaatgcttgaggctattttagattatttaataaatccaaaaaccatctgacgagaaagtcagatggttttttctttagtatccagtttcaacagaagcgttgacgatatacattaaatcgtttttgtcttctttgtcttctaagaaaatgccgcttgtagtcatcattccgccagccattttctcaatagttacagtgccataagggataatcgcgcgaatggtatcttcgtcaagtttttcttcatcacacggtagcgccaatttgatattaacaaccatgttttgtaagtcgccatctggaagaagcccttgaataccgggcatagagttcgtaaaaatcgcatttcttacagctcgttcggctgcttttgtaatattttggccgtgaacatcaacgccaaagccagtttggataaatagaatttgttccatcataaatcactccttaaaatcttttatcaaagcggcgcctggtcggtttttcgcatatccttccataacttcagtgaaatgtaatccgtcagtatcggaggaattggcgaatatttctgccatttgcttacgttgtgcggcaccaagttcattttctaattctttgcctgctgtagttaggaagatgcagcgttggcgtttgtcgcgtctaccttgctcgatcgtgagaagttcgcgctctttcagttcagcgagcggctggtgtagggcttgttttgatatttctaaaaaagttaaaagttcattaattgtaagtccaggcatccgcgccgtgaaaaataaaatacgatgatgcaatcttttgagtgaatgtttggcaataatcaaatcagcggtc

SEQ ID NO: 3336 - DNA, 1434 bp, Listeria monocytogenes 4b
  misc_feature (1)..(end): n can be any nucleotide: a,g,c or t/u
ggccgcagtgtgctggaaaggtgtatgagcttctatccccggtgtcacgcgaattaaaaccgatgccttttcatttcgttctattaatatatcttctaataaactaatttcataataattatcgataacaaaacaaccgatgccatagtcaagcgccatatgtatttcttctgcacttttattatttctttgaaaatgaattctctcaggaggaaaatttgctttaattgctgtataaagttctccgcctgaaacaacatctagtgataaaccttcttcggccatcagctgataaatcgctactgcagaaaatgctttgctcgcataagccacttgtgcttttacgcctagttcctcgaatgttttcttaaatcctcttgctcggtcacggattagcgctacatcataaacgtaaagtggcgtaccatatttttcagtaagctttaaagtgtccacccctccaatttcgagatgtccttctgcatttacattcattgttccaagccgttcaaacgtcacgccaatcccacctttacattatagatttttaaaagttcttttatatagtagcacactaagaagccgagcgacaataactatctgaaaatattatcaaatacgtaaaaaactcagcccaaatctattatctccttgcttcagaaaataacaaatttggactgagattagctaccaattattttaagaaattttagcaacaatagcttttacatattgtaaaaacgtgctacgaacttgatctgttgtttcaataacttccgtatgagaaagtggttgatccagaattccggctgccatattggtaatacaagaaatacctagcactcgtaatccagcatggttcgcaatgattacttccggtacagtggacatcccaactgcatctgcaccaagtgtgcgcatcatttgaatttcagcaggtgtttcgtaagttggaccgctaaatccagcataaacaccttcacggatagtcaaattaagttcttgagcaataagtctagcatccacacgtagagctaaattatacgcctcggacatatctgggaaacgcggtccaaaatgctcatcatttggtccaataagcgggttcgttccagtaaagttaatgtgatcagaaatcaacattaagtctccagcagaatataattcatttacgccacctgccgcattcgtcacaacaagcacttctacaccaagctctttcatcacacgaactgggaaagtaacatcttgcattgaatagccttcataaaagtggaaacgtccttgcattgcaacaacttctttattttccaactcaccaaaaacaaattggccagcatgtccttctactgtcgaaacaggaaaatgtgggatttcgctataagaaagttttgtcggattgtttacttcatccgcaagcacacctaaacctga

SEQ ID NO: 3337 - DNA, 1102 bp, Listeria monocytogenes 4b
  misc_feature (1)..(end): n can be any nucleotide: a,g,c or t/u
aataccagttttcgtttggtttggtactgtatttaataaatacgcgtgaattctccaagttagcgaattctaaatgtaatttattcccagtagtatcgacttttgttgggtagtttttatcacctgttttagctactgttccaacagagttaagcgggatgtataaattcatcatctcacttgtggaagctacattacgatattgtagtgagccttctacgtatgttaatccagttggaatagcatcatcaaaaatcaagttgtcatagtttttcgccatagcatttacagatacgatccaatcgatattccccgtagtggagttgtatgatccgtatttaccaccatttgtcatcatagctgggtctggtgtcatggaagcttttacatcatcaacatacttgataattccgccatcgtaataagaaatggatgctttattatcaatcgtttttgttacatcagaaaggtcaatttctgtgacgaaatcaactacaatttttttgtctgttgtagcataatcgccgataagttgaatataaaaaccagctggtgtcacatctttatcaatcgtataatctttgccttctgttaataagacgctattgatattatctgtataggcacgaacagtgtagctcttaagggcttttacaccagtagaaaattcatctgtgatattaagattccccatcttaattctgtcagagttggcagtgattttccatgtcatcgtgttattaaaatagtcaattgttccagcttcttttttcagtaaatctggttgaatcgcgatcgttgcgtcagcggaaacaccattttcatctgtaatttcatttttaattttacgatcactaaagtccgtgattttcgtggaataagtgatttcatatgcgtttgtgtttgtgtttttatacgttaaattaaaattcccatttgccgagattgctgaagttgtccaatcacttgaagcgtcacctccaacgattggcgatccattcgttgcgttaaaagttactcgtttaattttaagtgaatctgctacatattcgacatcattatccggtaaaacatcggtaagcaatgttgaaggagatatttc

SEQ ID NO: 3338 - DNA, 1723 bp, Listeria monocytogenes 4b
  misc_feature (1)..(end): n can be any nucleotide: a,g,c or t/u
attttgaatatttaattcctggatataggtttgttttacatcgtcgctccagtgcaattgtttagccatttcatccacaacagcgtctttccattcaagtaagtatggcatatcgaaaagcaagtagccagtgcgacgtaataagaaatcgattggcgttgtcaatgcttcgtgttgaatcgagtagcgtagttcagcatacaaactgtttggtaaagtggtttcgttttgttctttatgttcatgtgcataagtaaataattgatcgatattactaccgaaacgtttagccatctcacgaccttcttctaaagtccagccgaaacgattattaccttctttcgcttttttagataggaaagcttctaattgttctgagccaccaatgtcaccaccagaaattggtaaatgttttgtttgaactgttttgtactttttaccagtttctttcgctaatgtttttgaaacgtcatctaataatttttcggccatttttctgtaaccagtgagtttaccacctgccatcgtgattaagccactttcagaaaaccaaacttcatctttacgtgaaatttcagatggatcttttccttcttcatagataagtggacgaaccccagcccaacttgattcaatatctttttcggtaatatgcacatcagggaacatataattaatcgccttaatcacataattatgatcagattcaagtgcttttggattaattactgcttcgtcgtacactgtatccgtcgttccaacatacacttttttatcgcgcggaatagcaaagaccatccggccatcaggtgtatcaaagtatactgcttgttccatcgggaatttttgtttatcaataaccaaatgaattccttttgttaagcgtaaatgtttgttgtttgttgcataatctaattttcttactttatctacccaaggaccagcagcattaataacacgatgtcctttaatatcgtatgctttgcccgacaaacgatctgttacggttacaccaactacttgtttattgtcatcatataagaaatgctctgcttttgtatagttaatagcattcgctccgagttctactgcttttttcataacttctattgttaaacgcgcatcatccgtgcggtattccacgtagtaaccagaaccttttaaaccgtcttttttcacgaatggatttttggctaatgtttcttttgcgcttaaaattttacgtcgttcatttttctttacccctgctaaatagtcatataaacgaataccaaatgaagcggtagttttacccatattgccgcctttatggaatgggagcatcatccattcaggagtcgttacgtgtggtccattttcgtagactatcgcacgttcttttcctaaatctgctacttctttaatttcaaattgttgtaaatatcttaatccaccgtggactaattttgttgaacggctcgatgttccgctcgcgaaatcacccatttcaacaagtgcgacactcataccccgtgaagtggcatctaaagcgattcctgcccctgtaatcccgccgccgacgatgactaaatcaaatttttcctcttgaagatttctttcgattgtttctctgtcaaacgctgaaaataattgtaccattttgtttgcccccttcaaattgtttaccgtctgaattatgccttcttggttacttttccacttttcaatctaactgaaacgcttt

SEQ ID NO: 3339 - DNA, 2121 bp, Listeria monocytogenes 4b
  misc_feature (1)..(end): n can be any nucleotide: a,g,c or t/u
agtgtttctgattgagcggaaaaactatgtaacgtcgctatgtctaccgaagcatgttgatgaagcaagcgaattagctcaagccctccgtatcctgttgcaccaataatggaaactttcatcctaacccctcccgttaattattaaatgatacttttcattataatgatgtatatttataatgtcaaatggttttttattaatatttaaaactattttatgcatttttagttatttattatgtatataatatacaaaaaccgtttatccagaaaaggataaacggttaatcttaaaataaatcagcaaactcatctttgacttgtgcagtttccgctacattcacagaaatggtttcaatgttgactaatgctttcgcaattaacgcttgaaaatctgtgaaactttcgtaatgctcgattttatctagttttggttttgtttttggagatggtggcgtgaaaatggtacagcaatcttcaaatggttgcactgataaattatacgtatcaatcttttgcgcgatttgaatgatttcatttttatccatggatacgactggacgaatgattggtgtcgctgttacggcgttaattgctagcatactttccaatgtttggctggcaacttgccctaaactttcgccattaacaatcgctaaaccgtttctcctgcgacgaagttcatccgtaattcgaagcatcattcgacgagttacggtcataatcacactttcaggaatttgttgtttgatcacttcttgaatctctgtaaatggaacgatgtgcatttgtacctgtccgctgtatttagccaattttgcagctaaatcaaccgccttttgtttcgcttgttcacttgtatacggtgggctatgaaaatgaactgcttcaatttctacgccacgtttttgggctaaatagcctgcaaccggactatcaatacctcccgaaagcattaacattgcacgacccgatgaacctactggcagaccagctgcaccaagaattgtccggcatgataaaaatacgccttctttacgcacatcaatggttagttttacatcaggatttttaacattgaccgttaaatcttccatattttgtaatacataagcaccgatttcttggttgatttcattagaatcaagcggaaactcgcggtggctacgtcttgctgcgactttaaatgttccgttctcctcatgcgcatcttgtactaaggcaagtgcagcggcttttacttcctctacatctaaattgacgcgtacagctggactaaaggattggattccgaaaatcggttttaaacgttcttctacgagctgataatctgccccatttaaaataatatacattcggtcacgttctccgtgaatacgaacttccggcaaatctgtcattgcacgtttgacgttttgcgccaactttgtcacaaattgttttctgttttttccttttgtagataactctccgtatctaattaacatacgatcaaattccaatttatttcaccactttatttagattttcaatgatttcttgcagtttttgaataaaaattttcgcttcagataaacgattttcatacgataagctaacacgtactgctcctgttgcttcttcgtccgtcacacccatcgcttttaacgtgctgcttgctagcttctgcttagaagaacacgcactagtggtggaaatgtaaatatcttctttttctaaagcatgtactaaaatttccccacgatgcccttttgccgaaaaacaaacgatatgcggagccgcgacactttgtttcgtatgaactgtcatatcagacatttgcgcaatttccgttagtaaataatcgcgaatctcgattaatgcttcttttaaaaaaatcattttcgagcgttagtcgtaatgcttttgccagcgcaacattcccagctaaattttctgttccactgcggtagcccatttcctgcccaccaccaagaatttctgaatgcaaatgcacattttttcgtttaaacagtattccggttccacgtagagcatgaaatttatgcccctttccagcggactgctggctctcgaaacatgcaganagagttactttcagggttttnnnaaaagttaa

SEQ ID NO: 3340 - DNA, 1654 bp, Listeria monocytogenes 4b
  misc_feature (1)..(end): n can be any nucleotide: a,g,c or t/u
tatatataatttttgttcccaccgcgccgctagttctggggattccagatcttcacgcactaattctagcaattggcgttctttggaagctatatgaatgtccttgccttgctcttctaaggacaagctattgacaagtttctcaatgatgtctgcacgagttgcaactgttccaagtccacctgtctcacccagtgttttggcgagcgccttgttcgttgtttccatgtacttagatgggttttccatagctgaaagtaaagttgcctcgttaaatctcgctggtggttttgttttccccgtctctaaattgattcgtttaactgggatagtgtcgccttttttcattttagttaattgatctggttcgcgcgactctccgtaaatacttttccaaccaagggatttgacaactttaccttttaaagtgaattcttcttggccgattttagctttaacagaggtttcttcataaatatatgggtctgaaagcactgctaaaaagcgtttgacgacaaggtcataaattttccgttctttatcgcttaaatctccgagggaaacaggttgctcggtcggaataattgcgtgatggtcgctcactttgctgttatctacaaatgatttgttcgctttgattggttttccgctgatttgacgagcagcttttgcattttcacccaccccgcaggccgctaaacgttcttttagtgttgggacaatgtctgttgaaataaagcgcgaatctgttcgtggatacgttagtactttgtggcgctcgtataatgtttgcataatattcagcgtttctttcgccgaaaaatcatatctattattcgcatcgcgttgtaattcggttaaatcatataaacctggtgagaaatttttcttttctttcatagaaacgtctgtgattaccgcattttccccttgtaaagactttactagtttttctgctaaagctttatcaaaagtttgcccattgttccacgtgaaactttcttgttcggttagcgcggtaattccatagtactcacgtggtttaaaattacgaatttcttcctcacgatgttgaatcattgcaagggttggcgtttgcactcggccacaggaaagttgtgcgttatatttcgttgtcaacgcacgcgtagcattgattcctaccacccagtcagcttcagaacgagcgactgcagagtgatacagattttcataagctttccctggttttaagtgttcgaagccttcacgtatcgctttatccgttacagaggagatccatagtctttttagaggcttcttgattttcgcataatcaataatccagcgagctacaagttctccttctctacctgcatctgttgcaataacgatcgtggttatatctgtacggttcattaacttcttaaccgtttcatattgctttctcgtttgcttgattggttctagcttcattttctctggaagcattggtaaatcttccatattccagtttttatacttcgaatcgtagcgctcagggtcagctagtgttacaaggtgtccaagcgcccaagttactacatattttccaccttctaaatagccgttcttaccttgtttagccccgagtacccggccgatatctttaccgacagacggtttctctgccagt

SEQ ID NO: 3341 - DNA, 1881 bp, Listeria monocytogenes 4b
  misc_feature (1)..(end): n can be any nucleotide: a,g,c or t/u
aaaacgaattaatttttccaaatcagctcgtgtactaaaaccacttttttctaaataagcatataataaatagcggcgcatggttgttagttcagcaaaactccgcaattgataccgtgttctgatgaatttcttagctcgactgtaaatcaaaatgtagtataagagaggaatacataataaacttaataaaataactggaataaaataacgatcattcacgaatttcataacaatcaaatcagcaattagtaacaatagtagcaagaaaaaaaatgctcgccaaaatcctttcaaaaagctatgtattaaattccagttccctaattttttaaaataaaaatcatttaattttttgatggccatttctacaccttttccttttttcctaaattcaagtttaccatgagtcacctatttattaaagtttgtaaggagatttccacttttttatcgtaattagtttacaataaggccaaaattaaatataattaatattataaaatatatttaatgggtgagtgaatgaaaaaactactatatcaaaaagtctatgatcagcttaaactgtcgattcaagaaggtaagattcctgttggcagcaaaatgcctgcagaaaatgaattgatggctcaatttgatgtgagcagtattacgttaaaaaaggcgctagaattattaaagaaagatggttatatttcaagacgccctcgggttggtacatttgtaattaatgcttcgccagttagcgaacaaatagaaactagaatgtttgataaacccctttttggttgtattatgacaaattttgacgatacttttggtactactttattatctgggatgttagagcacagtgactctaaagctcatattattgtaaaaaaatcacttggcgatacagagcgagaagaagaaattttgcaagagtttattgaaatgaatgttgcagggatactgattttacctgctagttcgaagtttgtttcaccgaccttactagaacttgcttctcaaaaatttcctttagttgtcatagatcgtacattagaaggcttaccaatatcttctattagttcagataatacagaagctggtcgaattattacagaaaaattatttgaacttgggcataagcatattggaatgataacatctactagtccagtctctacgcttgatagtcgagtaaacggatttattcgagggcatgcatcttttcacacagcttttcactctgattatgtttttcgcgaaattgaatcagtaatgccaaattcaaccgtttccatccaaacagatattgataaaattgcacattttttgaatacacattctgaaatcacggcacttgtagcaactgaatacaatattgctcttttgataaaacaagcatgcaacaagttagggaaatccattcctggtgatttatccgttgtttgttttgatcatccagataatttttttgataactctgccttccagtttacacatattaaacaagcccaatacgaaataggcgtgaaagcagttgacatgcttttaaatcaagtgctaaaaccagatactataaacaaagaaactctacctccaatgcttatagaaggagattcggtcaaaatgctaaaaagcacctccaagtaggaggtgcttttttatcgttctagttttgccgccatttcaagtgcgatcattccacttaattctgctgaataaggaattttcccagagggattttctttccaattcattcccattaacaaatatccatctaattttgcattatcaactagcacttggcagctattaaatacaaaattccgataagttttatttgcggtttcttccattaaatcagtaaaatatctgtaaaaaatccct

SEQ ID NO: 3342 - DNA, 1918 bp, Listeria monocytogenes 4b
  misc_feature (1)..(end): n can be any nucleotide: a,g,c or t/u
attccaacttcaaatgttgcttgttccccgacttcgcgaatgtgttcgtccacctctttacgggctttgtccaccatttcttcaattcgagctggatggattcttccatcttgaacaagtttttctaaggcgattctagcgatttcacgtcgaattggatcaaatccggaaagaattactgcttccggtgtatcatcaattatcaaatcaatccccgttaacgtctcaagcgtgcggatattacggccttcacgtccgataatccgacctttcatctcatcatttggtaaggtaacaacagataccgttgtttctgccacatgatcagctgcacaacgctggatagctagtgagagaatattctttgcttttttatccgactcttccttggcccggttttctgattctttgaccatgattgctgtatcatgtgttaattcctcttctacctggttaaggatgatagatttcgcttcctctttgctgagcgcagaaattctttcgagttctgtctgctccgcttgaatcatctcagctagtttgctttctttctcttcaatttgttgttgacgtttactgatactctcctcttttctttcaagtgtagcttctcgtttacttaaagaagtatctttacggtcgaggttttcctccctttgcaataagcgattttctgctttctgtgtctctgttcttcgcccacgaagttcattttcgatttcagtacgtaacctatgattctcttccttcgcttcaagcaatgcttctttttttgtagtttctgcttctttcttcgcatcctctacaattaattccgcagtcccccttgcagcagccagttttttctctgtactagatttaaaaattagagaaccaacaactagaccgacgattaagaaaagcaaactggagatgatcgtgattgcgattgtcatccttacacctcctttgctattcaattttcgttattgttatgtcggtggccagaattctggcacatgcgtatttttcatcaacaaccgagtgctaatctccccattcagttgaagccgattttcaaaggaaaaaacttcccccttgtctcccagcaatataaaatatacaacttaattttataggtcaaagcatacaatgtcaagaaaaggaatgaaatgtacggttattttccttagttttttttaaatagtaaaaaatacgtgacaggaagtaaattcctatcacgtatttagtattatttattcatcatctagtaaacttaatgtttcttcgccttcatctaaaggttctttattgcttccgtcgatttcgtactcttcacgaacacgttttgaaatctcatcacgaatatctgtatgttcttttagatattgttttgcgttttcacgaccttggccgatacgttcttctttgtaagaataccatgaaccactcttattgattacatccacttcagcggccatatcaacaagctcgccttcacgtgaaataccttcaccgtacatgatatccacttcagcaatacggaatggaggagctactttgttttttacaactttaatttttgttttgttacccattacatctgtaccttgcttaagttgttctgcacgtcttacttctaaacgtacagtcgaatagaatttaagcgcacgaccaccaggtgtaatctctgggttaccaaacataacaccaactttttcacgaatttggttaatgaaaatagcaatggtttttgatttattaataacaccggaaagtttacgcaatgcttgggacattaaacgtgcttgtagcccaacgtgtgcatcacccatctccccttcgatttcagcacgtggtacaagtgctgcaacggagtcaattactagcatatctacagcaccacttctaactaatgcttctgcaatttctaatgctt

SEQ ID NO: 3343 - DNA, 1512 bp, Listeria monocytogenes 4b
  misc_feature (1)..(end): n can be any nucleotide: a,g,c or t/u
ggccttgcaggaattccatctcttagcggcttcattggaaaattattgattgtggaaggtgctttctctgccggtcaaatagtcggcggaataatcatcttactatccagcttattcgtccttatgtctttaatcaaagtctttacaaaaggcttctggggcgagaaaaaaggcgtattcaatttacaaattccgtataaaaaaatgcttgtgccagtagttattctacttgcgatttcgattggttatggtgtgtttagtaatgcaatttatccgtttattgaacaggcggttgaccctcttgttgacccttctgtttatatccatgcggtgataaaggagtgataaaagatggcttttcaacttattcttaatataatacttgcttgtttgtggatgtttcttgagtcatcatttagttttgcaacatttatcattggctttatcatcgggattttcttgctattctttatgcgacgtttccttggatcaagattttaccttttccggttattcgcccttgtcaaactggttttccgctttttgcatgatttaattgtttctacagttcatgtaagtcggattgttttaaagaaagacatgaacattcgaccggggattttcagatatgatacgacgcttgagacagactgggaagtgacgatgctcgcactactgattacgttaacgcccgggacactttcgattgatatttcggatgattataaagcaatctatgtccactcgcttcacgtccctaatattgaagaagaaattgcaacaattcgtaagtcttatgaaggcgcgattatggaggtgttccacggatgattattcaaatcgctttatccattggtttacttctctattcgatttcaactttcttatatctttaccgtattttaaaaggaccaactacttctgacaaagtggtggcgctggattctattggaatgaacttagtggccattgtagcgctactttcgatgttttatgatacgcatgcctttttggatgttattttacttattgcgcttcttgcatttatcggaacggtttcctttgccaaatttattgagaaagggaaggtgattgatcgtgaacgtgataattgagattattatttctattatgattttaatcggtggtttgcttagtattcttgccgcaatcggggttatcagattgcctgacgtgtacactagaacgcatgctgccgggattagtaatacttttggtgttagcttacttctgtttgcaacggttggttactttttccactcaggcgaaggttttaatgcacgagtacttctggccgtattgtttattttcttaactacaccagtggcttctcaccttattaaccgggctgcttatgataccggtgttccgctagctattcgaattcgtgaccaattgcgttcggtgaaaaaagacgatattaagaaaaagaaaaatcttattatccgtcaagaacaaattgaaaaagcacgacaagagcgggaagaattg

SEQ ID NO: 3344 - DNA, 1614 bp, Listeria monocytogenes 4b
  misc_feature (1)..(end): n can be any nucleotide: a,g,c or t/u
gtgaagaaatccgttctgctattgcaattcaagcctttacggaagaaaaacgctttttattcgttactaaaaacggcatgaccaagcaatcagctattacgaattacaaaccacaacgctattctaaatccatgatggcaattaaattaaaaggtgacgatgaactgttaagtgttcatttgattgatggcacagaagatattttcttagcaaccaaaaatggttacggccttcgttattctattactgaaattccagaatcaggtgcaagaacagcgggtgtaaaagcgattaacttaaaacaagatgatatagttattggcggtatagtccttatgccgaacgaacaaaaacatattcttcttgccacacaacgtggctcactcaaacaaatgaaagcaagcgaatttgaaccaatctcaagagcgaaacgtggcttattgatgttacgcgaactgaaaagcaatccacatcgcttcattggtataactcttgctgataataacgaccacctatttatcgaaacaaacacagaccaaattgttgaaatagacgttgccaatctacgaataacggatcgctattctaacggatccttcgtactcgatgaaacaatggaaggcgaaccaacttctatttggctagcaatacccgaaataaaagatacctcagatgcaaaagatgaataaggaagaaaaagagttcttgtatagaaatatgcaaggattcttttttttgatataataacaaagaataagaggagggatacgcatggcagaaaaaatgaatgtagaaagttttaatttggaccatacgaaagtaaaagcaccttttgtgagactggcgggaacgaaagtgggcgtccatggagatgaaatatacaaatatgatgttcgcttcaaacaacctaataaagaacatatggaaatgccagcgctacactctttagaacatttgatggcagaacttgcaagaaatcatactgacaaattagtagacattagtccaatgggatgccaaactggcttttatgtttccttcattaatcatagcgactatgatgatgcactagaaatcatcgccacaacactaacggatgttttagctgcgacagaagttcctgcatgcaatgaagtccaatgcggttgggcagcaagccatagtttagaaggtgcaaaagcgcttgcggcggaatttttagacaaacgagacgaatggaaaaatgtatttggtgaataaaaatgaaagcatctatcggaatatcggtagatgctttttataaataacatatttttatcaaaattaataacgaatttaaatgtcgtatggaatactaacggagacttgccatgcaatcacttgtattttttgtgatttgcccagattagtctatctgattctaatgttctggagatacagccatctctgttttgaaaactagtatagtcaaatcaacgcaaacagaaaaattagtaccaacaactatcgcagtggtaggattcatagttattataattattcgtaaaaataaataaaaaactatctactcaaaattctcgagtggatagttttttatctatannatagcttataaaaaaattatgattncatttc

SEQ ID NO: 3345 - DNA, 2363 bp, Listeria monocytogenes 4b
  misc_feature (1)..(end): n can be any nucleotide: a,g,c or t/u
ttaacctgagaaacaatcctaaagatgaaattcatggccgatttgtgattatgttcacatgcattaaagaagcatgccgatatcttccactaatgctgaattcaccgagtaaatatgcgtggttacttgctttcttaaattaataagtattagcttttttaaacagttcattgtggagagacatggaagatggggagatattgaaagaggtgccagagaagcgaaaacactttgcttttgagcaaacataggacaatatcaagacgaattggatcgcttaatgctcaggaaaattaataataaatctgattttgagagctcatgtaacttgttcatatcaatatcatatcatagcttacattgtaatcgcgcggaactagctgctatggaatatgatgagagttcgaaattaatcgaactatcaaatctgaaagaagttgttgggaaatgttgcatattgaagcgcaaattacggtcaaaaaagaacaaaccgaagcttttttgcaggcgactaaggaagttattgctgcatcaagagcagaagctgggaatcatggttatgaattagtgcaatcaacggaaaacgaaacagttttttatatgttagaaaaatgggcggatatggaagccattcaacaacacaacgacagcgagcatttcaaaaaattccagaaattggctgctgattttgttgctaaagaacttgaaatttcagtattaacgccacttgcgcgataaggaggaccataatatgacttatgtaaataatgattttgaagacttaatgaaaaaccgccgctcgattcgagaatacgatgaaacggtgaaaattagccaagaagaaatgaaagctattctagaggacgcggtaacggctccttcctctgtaaacatgcaaccatggcgttttgtagttgtggaaagtgatgcgggtaaagaaaaattaagctcgttagttcgctttaatacacgtcaaaatgaatcttcttccgcgatgattttagtttttggcgacttagagaattttgaaaacggtgaaaaaatttacggagaatcagttgaacgcggcttgatgccggcagaagtgaaagaacaacaaatgggttcattaagccagtactttgcatccattccgcgccccagaagcagaacgtgtagtccttattgacggcggaattgtagcgatgcaattaatgttagttgctcgggcgcatggttatgatacaaatccaattggtggttttgaacgtacggaagttgctgaggccttcaatatggatccagagcgttatgtaccggttatgattgtttctatcggtaaagctaaaaattctggctaccagtcttatcgattaccaattacggatgttacgacttttgcttaaaagagggcaaggaaatagctgatatttccttgttctttttttgttcctttcttgatataattaaaataacatacagccaaggaggagaagcaactatgactatcaaaataactcgtaaaactggaattggcagcggtattactccggtgaaaattagaatcgaaaatgaagaaattgtaaaactcgacaatcatcagtctcatttttttatgcctaagatggagaaaacaaaggtttgcgtgactaattggttttatgggagtcaggaagcggttttggaaaataataatgatgttattgtgcggattaaccgtaaagcactaatattaaattattcaatgtttccatttctttttttcggacttttggccactagttgggagtctacagtcattgcgttaatactttgtttggcatcatttttttattcgcgaaagcattggtttgaatttgtgaaaattaaataataattcatggatagcgtgggatatgttctcatgctttttttatctgtgtaagtttttattccatctgtgtatcttaggaaggggtcttaaaccgcagaatgacagcgctttcttttggcatgataattgcatgatatacagatgctcggaatgaatctttaattggagggaggaaattagagagaagaacattcgggcaaccacacaaaaaggggtacagagagacaaacttagaactaccgaaatgaggtttataaatcaaaaatcggggtgaagagatgaataagaagatgaaaaagctttttagtattacttctgttgtgttgttagttttatcgttagtggttgtatcaattggtgcagagccaaaacgggcgaaagcggctgaaaatgtaccacagtatcgaaatgttatgtattacggtgattggtcgatttggggaggagaagggaacttttatccgaaagatattccagctgatcaattaacacatttgaattttgcttttct

SEQ ID NO: 3346 - DNA, 2005 bp, Listeria monocytogenes 4b
  misc_feature (1)..(end): n can be any nucleotide: a,g,c or t/u
gtaatccaaaaccagtaagaattaatgcggtacatccagcaactcctagaaccgtcatgagcattctttgtttgtagcggaataaatttctcgcagtcactttgcttgtgaagttcattcgtttccaaataaaactaattcgttctaagaaaatccgtttgccaatttttggtgctttgggacgcattaatgttgctgcattggcgcgaagttcggcacgacaagctacataagcagtaaatgttgtacagaataacgcaacaaataaggatagcaaactgtagctccagtaaaagccaatatccactggtggcatttcatacatcgatttataggcgttaaaaatgatattcgggaaaaactggaatccaattaatattccaagaacgctcccgattatactcgcggtagaaccatatacgaggtatttcaaaataatgctaccattagaataaccaaatgctttcaacgttccaatttgtgttctttgttcctctaccatccgcgtcatcgtcgtcaaacaaacgagcgcagcgattaggaagaagaaaattgggaatgcggttgataacgaggttaaacgatctgcattttctttatattcgctgtagcctggattgtcgtttcgatcaaggacataatattttggaagtttgagcgcatctagtttttcttgacccgatcttaacctctttttcggcgctagctagcttgccttctgcttttgctttctctttttcaatcaaagctagatttttttcgtattccgcttgacgtacgtttaatttagcaagtgcgctttgtagttctgtggaacctgtttcttttccatcagcaagtcgatgttttgcttgctaaattttttctaaacctgcttgatatttagcaagaccttcttggtaggcagtttttgcatgttccagttcttgtttttttgcagctaaagtttgttcgccatgttgtattttttgtttttcagcgtctaaagtggctctggcggattggtattccttttcagcgtcaacctaacttgcgcacgtgccgcgtttaaggcttccctaatttccgcatcactaatattgccattttcataatcatctagtaactgattcatctgattttcatattcagcgcgctctgcacttgataaatcaagttctgatgcaagcatttgaaatgaatttgttaagctgttccggtctattctctattcaggtgtttttggttgttctaaagcattgtctaatgtctttttagcacttcgcaaataaccatttgctgtattaagaagattattggcatcttcccaagccgctctaccttcttctaattccatctcagcttgtgaaagagctgtttcgccttggtcaatctgtgtttttgcggtatcaagttgtttttttgcgcttcttagttctgcttcaccgtttgcaatctctgcttcgccatgcttgattttggcgtcatagcttgctttggcagcattatattcagaaaatccttcttctaattgtgctttggcatttgcaagtttagcttcattttcctgtagttctgcttttcctttgttaatttctgctgctgcatcgcctaatttattttggtccttcgcctcgattttattgaattctctcttctccgccgctctgccgccgccccgcccccccctcctcctatccttcctctcccccagcctacatcctccctccactccccggctcccaccctccccacccctaccgcatcgctctcttctccctctatatcggtttgatcttcgtctccgcccccgccgccctccggcccgtcccgtcccccttctctggcgttacccctcactccgccccgttccccgatctatcccaataccatgtcgtcatctccgcttttcaccccccgcctatttcgccagaaattggcctgtatacctgcctcatcgcgcctcttttcacccccctactcttcttctccctcctcctctcataccccacttcacctattataa

SEQ ID NO: 3347 - DNA, 1765 bp, Listeria monocytogenes 4b
  misc_feature (1)..(end): n can be any nucleotide: a,g,c or t/u
tggcggtgaaattgaaatggacggcttagccattcgcgtcaaaggtggccaaacatttaccgggcaagaaatgacggttccaggcgatgtttcctctgctgcgttctttatcgtagctggcttaatcacacccggcagtgaaattgaacttacgcatgttggcttgaaccctactagaacagggatttttgatgtagttgagcaaatgggtggaagtttagttgtcaaagattctagcagaagtactggtaaattagcgggtacggttgtagttaaaactagcgatttaaaaggaacggaaatcggtggcgacattattcctcgtttaattgacgaaattccagttatcgcacttttagcgacacaagcagaaggaacgacgattattaaagacgctgctgaactaaaagtaaaagaaacaaaccggattgatgcggttgcgacagaactaaacaaaatgggcgcagatattactccaaccgaagacggcttaattattcgcgggaaaacaccacttcatgcggccaatgtaacaagctacggggatcaccgtattggcatgatgctacaaattgcagcacttcttgtcgaggaaggcgatgtggaattagaacgcccagaagcagtttctgtttcttacccgactttctttgaagatattcgctcacttttaaaataatcacttctaccagtgctgtatgctaatcacatcagcgctggtatttttatttaagagaggcaatcactttttcttatgagtgaagtaatggtataatagaaaaacgacttattattaaagaaggtgcagaaatggaattagctaataaaatgttacatgcgttagagcatgaagatatggcgcttgcgaagaaatattttgatgaagtagtgcaagcgggaacagatgaagaacaatattatttagcagaagaattatttacacttggattcctagatgaaacggaagatttatacgaacttctattagcaaaatacaaggatgagggcgagttgcttgtccgtgcagctgaagtagcacttgaaaaagacgatatcgactctgcgcaagactatttagaaaaagtaaacaaagaagatgaagcatatattgaaagtttgctcgtattagctgatttatatcagatgcaaggtttattcgaagtcagtgagcagaaattactcgaagcgaaacaaatggcgccaaatgagccgattattgattttgcacttggggaatattatttatcgcaagcaagattcgcatccgctgtacagtcttatcaaactgctgtagaagcaggattaacgattatttcgaatggtgcggtgtctgtatatgaacgtatcgctgaagcttttgctgctagtggggcatttgaagaagcgttatcttactatgaacgcgcgctcgaagataaggaatcggttgatacacttttcgggatgggtttaacggcttatcaggcaaaagattacacgaaagctattcatgcgctcgaacatttgcgtgaacatgatccctcttacacaacgctctactcttatttagcgaaaagttatgaggagaacggcgaaccggaaaaagccattgcagtgcttcgggacggcttaacgcaagatgaatttaataaagaaatgttcttagaggctgggaagcttgctgttacgctacgtttgccagaagaagccgaagaattttatcgtcaagcaattgtgctagatgaagaatattcngaagcaattatgcagttgaacaaattattaa

SEQ ID NO: 3348 - DNA, 1728 bp, Listeria monocytogenes 4b
  misc_feature (1)..(end): n can be any nucleotide: a,g,c or t/u
acttaaccctgaaaatccaaaaacaagtgcaccaccagcaaaactttcttttgaacatgttactttccgctatgaaggcgctgaaaaaccagtaattgaagatattacttttgaagctaatgctggggaaacagttgcaatcatcggaagtaccggtgctggtaagtctactttgattaatatgattccacgtttttatgatgtcgaaagtggtgttgtaaaaattaatggaattgacgtgcgtgaaatggatcaatccagtttgcgccaaaaaattggtcttgtgccgcaaaaagcggttctattcacaggaacaattgcttctaatatgcgctacggaaaagaagatgcaaccgacgaagaaatttgggcagcacttcgaacagctcaagcggaaaactttgtatctaaacttgcaaatggtttaggaagccgcgtagaacaaggcgggaacaacttctctggaggacaaaaacaacgtctttccatcgcacgttctttaattagaaaaccagaaatttatatttttgatgatagtttctcggcgctcgatttcaaaacggatgcgaaactgcgtgaggctttgaaagctgaaacaaccgaagcggtgacactcattgtggcacaacgtattacctctgttgtcaattccgaccaaatcattgttatgaatgaaggtaaaattgctggaattggaacacatgaagaattgaaagaaacgaatcaaatttatcaagaaattatgaggtcacagctgtcagaggaggaaatcgcatgagtggtccaggtccaggtggtggcatgagaatgcaaacgaccgccaaaccaaagaactttaaacaaacactattccggcttcttggctatatgaaacctcgttctgtcgcaattatcgtcgtgtttatctttgcgattttatccacgatttttaacatttttagcccgaaagaactcgggaaagcaacaacggaaatttttaaaggtgttatgagtccggctgggattgataacgataagattttcaatatattaatgattgttttagtcttataccttggtagttccttatttagtttcattcagcaatacgtcatgtcgagtgttgcgcaacgaactgtttatgatatgcggaaagatttaaaggcgaaaatggctcgcttgccgctgaaatattatgatacacgctcaaatggtgatattctaagtcgttctgttaatgatatggataatatcgcgaacactttgcaacaatcactaacccaagctattaccgcgattgtccaaatgattggtgttttaatcatgatgctaacaataagctggcaaatgacattaatcgttctagtgacagttccaatcagtattattttagtcgccattattgctggtagatcacaacgttacttcggcgcacaacaacgtaatctaggtattttaaatgatactgtagaggaaacttacggtggccaaacgattattaaagcctttggtcaagaaaagaaaacgttagtaaaatttgatgaagtaaatgaagattatttcaaagcagcgaaaaaagcgcaatttatttccgggattatgatgccggtgatgcaatttgttggtaacttaggctatgtcggtgtctgtgtggccggtggtatttttgttactaatggaacgcttcaagtgggggatattcaatcatttacgcaatatgttcaattatttacgcaaccaatttcaagt

SEQ ID NO: 3349 - DNA, 944 bp, Listeria monocytogenes 4b
  misc_feature (1)..(end): n can be any nucleotide: a,g,c or t/u
agtcgcaaccagcttgagcattaattgcaaatagtgctggtaaggcgtaagtaactggaatagcaccaatcgcaatttgagaaccaatcagaacgccgattacttgagcgataactgctccaggaccgagaataggtgaaagaaatggcaaactacaaataaaagcaattaataacattccccagagtgatccagctaaaggagagagcgtattcgcaattaatttcccaatcccagtgtaattaataataccgataatcatactaataaaagccataaacggaataatatttttaataagcatatccacagaatcacgccctgcttgatagaacacacccattgctttaccaatgccacgagaaaatttcacaaggaaaccttcttttaattggcttgcttcttcttgatcttctttaatcttggcataatcttctttgaatttctctctgtcaaatggtttcccaggttcagtgcttctgtctcgaacttcaatatcttcaggtttgacgccagaaacaaaaatatcttctgtaatatgttttgcgagcggacctgatggagaagaagggagcacatcgactgttggaatacgtttcatcggataaacaccaattctcgcagtgccaccacaatcaataacaacacacatcatttcttcttctggaattgaatttttaaaaccatccacggcttcagctccagataattcggcaattttcagtgctacaggatgaataccaccaccagtaatagaaacaacttttgttctcggttcgctcggagtaatatctagtccgactccccaaccgccttgacctttattcacatgaattgattgatacatttcatttgcctccttctatttcagactttttcttttcgcattaagaatttcgtaattgattctgtaatcacaccacgcattaatataaccaccattc

SEQ ID NO: 3350 - DNA, 2160 bp, Listeria monocytogenes 4b
  misc_feature (1)..(end): n can be any nucleotide: a,g,c or t/u
atcggtaattgaattcgatgaaacatcatttgaatcgcactaattcccggaacaatccggacatcttctgaaaaatttgccagcgcccagttgccaatcccatataatagtggatctccggaagctagaataaccacgtttttgttttgatgcgggatgtttttcaaatctgctagtttttttggcaaaagcattggcgttgctgtcgttagttctgtgatttcttgtaattgtcttgttgatccatacactatttcggcggtacttaacacttgttttgcttcgtttattaccaaatttgtatctcctggtccaatcccaactactgtaatcatcgccattcctcccggagtacatcgatatctttcgttgcagcaagcaacccacgttcggtcgaaaaagtaactacatcgacttccacactaggtttcgtgaatttcaaaaatcgttctgatcttgctttgattttttgcacaatgacgtcatatacttgggtaaagccagcttcttcaattaattcgcctgctgcctctgtcgtattgcacttctccactgcttgtaaaagcgataacggggcgccgagcaaagctaaattagcgactaaaatttccgcccgcgcatctgcatctttactgtacgtcgtaaaaatccctgctgaaaccttcaccaatttgccaaaatgaccaaccattagcacttttttgaaagctagacgctgtgtttcttttaacatataaccaacgaaattactcatggaaacaatatttccgcttgaaaaaccaagcgtattctgaacaaaatcatccccgtaattaccgggaacaagaataatttggtcgagaccttgattccgtttcatttcaagctccatcgataaggattttttccagccttcatccgacataggggtaacaatgccagtcgttcctaaaatagaaattccaccgataatccctaagttgctattcatggttcgtttcgcgcgctcttctccttctggtgcatagactagtatctttgcaccacgattttcgccaagcgattcgcgtacggttgctaaaatatttttccgcggtgccggattaatcgccgcttctcccactgcaacagaaattcctttttgtgtagcgcgaccgataccaacaccaccatctaatacgacttccgcgttatcggttagatcaacatctacaaaaatccacattccgtgtgtcgcatcaatatcatcgccaccatctttttgaaccgctgctgtggctttgtctttcgaaaacttttgatacgccacggggatttccagaatcgttccgccagtagttgtgacttgtactgcactcacttcttcttgcgttagaatcatttccacacaagctttagcagcagcagccgcacacgtaccagtcgtatagcctttacggtattttttgccgttataataaataaaatcttccattactcgtcgccttctttacatcgtaatcaagattgcattaatgatagctgcagcaagattactaccgccttttctaccgcgtgcgacaatggctgggatatctgtttctaaaatttcctctttacattcagccgctccgacaaaaccaaccggtactgccactactgcatctgcttgcaattccccactttctgtcatctcgataattttatacaccgcagttggcgcatttccgaggacaaatagtttcggtccatcttttaaagaagcgagtttaattccagccatagagcgtgtaatcccatgctgtttggcaatctccatcgtctctgggtcactcacataacaatgatatttacacccaagttcatctaaaagtcgtttattaattccactaagtgccatattcgtatccgtgaaaatagttcctttattttgaagaacatgaatgattttcgcgatggcatcttgttgaaaaacgaggctatctaagtaatcaaaatctgccgtcgtatgtattgcacgctggatatcctcttactgctgatgcacgcatcaatgatatcccnngnnanatcnggaaccaaatatcctgaattattttggggaataatttcacaagcttttcttcttcaattttgggcggatttcttaatattaagtcattctggcccctccctttaaataataggaggataaatacttga

SEQ ID NO: 3351 - DNA, 1815 bp, Listeria monocytogenes 4b
  misc_feature (1)..(end): n can be any nucleotide: a,g,c or t/u
ctgagcagccgaaccgtgctcgaaagatgtagttgtcattgaatctttcatgttaattagatatgggaaagttacaagagtttatagcatgtatacggcattatttattataagattcttagtatttggcccccaacttttaattggtgtgtcggagatcgagttcgttactacaaatgctttagctgccacaaatggcttaactggaacgcttgcatacttattaggagattcttttgctgaagtctttctaggatatatcgcagacccaacaaaagcagggatacaaatatttggctatactctacacggatggggcgcaactattaccattatgtttacagctgtaatcatggcaggcttaatgatgattccagttgcattaaaacaagagaaaatcatccgacaagcaaaagttttacatctataagttgaaaagtaatgagtgaagataaactaattactaaaaaggtatcctaattaatagtataaggatacctttttcattacaaaatggtttgttaaatacgaaaaacattattttgctaaagaagtctttttataaagaataaaaattgcaacagtgattaaaaggacacccataatagctggagcggcatggccaagcgtaatataaagttgcccaccgataacgggtccgataatacgcgccaccgactgaatggcttggctacctccttgaatccgaccttgttcgctagcgctagcagattttgaaaccatgccgttaaacgaaggtccgaaaatcgagtcgccaaaaccgaaaacgaacattccgataacgagtagcggcgcaagtgtgaaaatcgaggaagctgcaataagcaaatagccaataatctcagcaatcatccccaaaatagctatttgtttgtccgttaacttgagtagtaattttggcataacaaaagcttgcgacaagatatcttgaattcccataatggaaaacatcatcccaattaaagctggcttccaactgaaactatcaatggcgaattgagacatgacagcttgcaaggaaccattaggaacccaaatgaaaaatgcagcaatcagtaaacgtcctaagtttttgatggtcagaatattaagcagctgggaaaacggattgagtcgcataagcggaattcgttttaaacgatttgcttcttctaaactctcaggcatgtagaaatanccgaataaaaagttgatgaaagtaatcgctgctccaaagaaaaatggcattgcgtaaccaaagtgggcaagcaatccaccgaaagccggaccaagcgcagcacccgcaccagctgcagcgctaacccaaccaaagtatttcgtccgctccttttgaggcgtaatatcagcaaagaaagcaaatagtgtacttatgctaccaccagtgattccttcaataattcgcccaagaaagagcacccaaagcgccccaccaagaccgaaaataaagtaaccaatcgcagagccgataaaacaaatgagtaacactggtcgtctgccaaatctgtcacttaaagcaccaagaccaggcgcagcaaagaacacgcaaagcgcataaacagatgtgagcagaatcaccataagcgcttgatcactagcatttgttacgtaaggtgttacgagaaacgggacaacgggcataataatactaaaacccatcccacaaaggaagacagatataagaccgaaaagtaaagttttcttattaataatagatttagttgaagacatgtaatactcctatcgactttccagcacactgtggccctcgcagatgcgtggagagttactacagtt

SEQ ID NO: 3352 - DNA, 684 bp, Listeria monocytogenes 4b
  misc_feature (1)..(end): n can be any nucleotide: a,g,c or t/u
tcaacatcatttactatatcaaagaattgcttcttggacaatgaatcaatccgaattatttgactttttttcactaatttagttttctgagaagaattttctcgttttttgcggattctgctaagtcaatgacgagttgagtaagtttttctaactgctcaacagatactgtttcttcttctgtgtgcgcattttcgtatccagctgataagagcatggtcggaatacctttttcattcaacacatttgcatctgttccgccttctaaaaatatttctcttgtttccaaagattgtttttttgcggctttttgaaaaatattcattagtggatgcttagagcgaattcggtacccttcataaattaattttgtatcatgcgtcaaaagagcaccatatttctcgcaagtttgcgcaaatcgttctctaatggtctggatatgcaaaagcgccttacggaaacttgctgctgatgtaaaaagaacttctaattgggcatcttgttgattttcatcatttattccaccagaaaacgactgaatttcccatttgttttctcggtcaattctgcctggccgcgtggcatgtaacgccattctcgctatagaaatcggtgacatttgggcagcttcagaacttgcaatagtaaattctaatgcgactaacgtatttgcttgtaattgat

SEQ ID NO: 3353 - DNA, 1544 bp, Listeria monocytogenes 4b
  misc_feature (1)..(end): n can be any nucleotide: a,g,c or t/u
aaccaaggtgaataaatactgatactaaatgatttccgttcccacctcacacggttaaaaccagccagtatcgctaaaagaattcctacatacaatgctggttgtagaagtagtctccctattccatttagtatttcaacaaaaacatccattttctacaccagctttccctaatacttctataatataggcgataaaagtcggcttaccgcttctttaaatttaatccataaagatcgttttgcatataattcaggtgttagttgatacgattttagaatatcttccaaaaaggcatcttctagtttttgcaccatttgtttttcataaataaaagcatttacttcaaaattaagtcggaaactccggaaatccatattcgcggttccaactgaagcaatttcgccatctacaacgagtgttttcgcgtggataaaaccattatcataaataaagattttcgctcccgtttccattaattcaccggcgtagttagtagttgcgcggtaaacaaaagcatggtcaggcttattaggaatcataaccctgacatctaccccagaaagtgctgcgattttgattgcttcaagcaaacttgcatctggaataaaataaggagattgtaaataaattgtttttttagcagcattgatcattttgatgtaaccatttttgatttgttgccattcggaatcaggaccactcgaaacaatttgcatacttgtatgacctttcccatgaaaagtcgggaagtatcgcgctttgtaatcaattttatgtgtggatgatgcagaattccagtccataataaagcgagtttgcatcgcataaacagcttttccatgtacacgtaaatgtgtatcacgccagtaaccaaatttcttcgatgccccaagatattcatcaccaatattaaaaccaccaatataaccaacatctccatcgattatagccaatttccggtgatttcggtagttgagacgaaagttaatcaatggtaatttagacggaaaaaaaggtctaactagaccaccatttttttgaaacgtacggaaaaatgattttttcgttgtccttgaacccattgcatcataaataattttcacatttaaaccttctgctgcttttctttccagcacgcgcattaagcgattgcctagttcatcagaatgaaaaatataatagatgagatgtatatgatctttcgctttttcaatatcagcaattagcgcatcgaatttctcatgtccatctacaaaaagttccacttcattgtcttgcgttaaaatagcaccatcgtttacgagtaataaatagattaaatcacgatgttttttcacattcggatcgctaaatggaaattctttttgccgtatcatttctatttgattggcagtagattcctgtatcccaattttttcttgtcccttccaatcgaaaatctttttgcctgataattttctcccaaaaatcaaatagataatgaaaccaaatatcggaacaaaagttaagactagcaaccaagcccaagtggcggatgtatc

SEQ ID NO: 3354 - DNA, 1720 bp, Listeria monocytogenes 4b
  misc_feature (1)..(end): n can be any nucleotide: a,g,c or t/u
ccttttgggccacttactgcatgcttgagcggccgccacgtgtgctggaaagttatacgcaggtgtgattttacatgatttaggaaaagtcattgagctttcaggccctgtatcaacgacgtatacactagaaggtaatttaattggccatatttctatcgtagtagaagaagtgagcaaaattgcggacgaactttcgattgatggtgaagaagtcgtagttttaaaacacgttcttctatctcatcatggtaaaggtgagtgggggagtccaaaaccaccgcttgttcgagaagccgagattttacaccaaattgatttaatggatgcttccttgaacatgatggataaagtactaaaacatacaaaacctggtgaattcagtgaacgagtatttgggttagataatcgttcgttttataatcctatatttgaataaaaaacacgcttggaaatttccaagcgtgttttttagtgcttatttagatgagtcgctttcactggatgaagagccatcaaaatctttaaaagcatctttcaagtctttatcttccacttttacgttagcatctttgtattcttttttaagcgttttttgcatgttctcagtagttagttgagactcaaggtaagaagcttttacagcttttttatctttttcgaaagttgtttttgttgcaggtttgtccatttggatgatgtggtatccgtattgtgtttttactggagcgctgatgtcgcctttgtttttaagggcataagctgctttttcaaatgcaggatccatcttaccaggaccgaatggagctaattgtccaccattgtctttagtagcagtgtctgtagagtattcttttgctaaatcagcaaattttgcgccgtctttcagtttttgttcaacttctttggctttgttttcatcagctacaagaatatggcttacagtaatatctggttgccatgtttcatagtattttttaagtgttttgtcgctagtatcagtattggcttcagtagctttttgaactaacaagttgtacttaagttggcttttgaatgatttctccgttaagccactttgagctaaaactgcagagaattgatctccgtattgtgatttatactcgttgaatttcttatcaacatcttcgtcgcttactttgtatttatctccaagaattttttcgaaagtaagttgttgtacaaactcagaaccatatttatctttcattgcgtcgtaaagctcatcttgcgttacatcgccagagtctgtcttaacgacatctccaccgccaccgcacgctgctagactgaacaatgccatcatcatgacaagtccaagaattaatttcttcttcattaaataaaacacactccttagttgttggaataattcccgcttaacacaataactatcataacataaattaaaggtaaaaagaaaagatgaaagaaatttaatgatattcttatggtttagtcagaaattaaaacagaaaatccgcgttctgcactttcgataaagcaattcttcggcattttccataattttttaatatgtgtaaaatcagaaaagctcattccaaagtggacagatagtaatatcaggaacatacctgaatgtccgatgggcgttaaaagcattaacacgattaaaatagtagttataatcacaaatggtagaattaacgaaaaaatgtaatgccattttggtattatt

SEQ ID NO: 3355 - DNA, 2348 bp, Listeria monocytogenes 4b
  misc_feature (1)..(end): n can be any nucleotide: a,g,c or t/u
tagcatgcatgcttcgagcggccgaccagtgtgctggaaagataaatgcacccaataattactttttgcgaaatccaaagtaatatgtgtctttttaataagcaaaatgaattggaaacactttaaacaccttttaaaatacttttaatatcatcttttctttgcaagtacaaaagcacttgaaagtaagagcattccaagaataaaccataaattagttttcttagaatctcccgtttgtggcagtttttccgattttttcacatttccagctctttcattagaagaaactgataaagcgctagttttttcatacacataagttactttttgtgagctattcaaaaatttccccgatgcatttttaggtgtttgatacaatttatatcccgagatttttttggccgaagttcgataacttgaatttaattttcctgttaaaacaatcgaatcagctaatttttcaccattcttatcgacataatcgacaatgatgtttccggctgtcactttttgataaacaaaagtaactgtctgtgctttttcgttaaatgttccacttacattcgcgggtgtttttacaagggtgtagttagtaatttttttctgttttgcagtgaatttttctccgtaagctcctgttaatgtttctgggctggcaatttgtttatggttttgatcaacatattgcaccgtaactggcgcaacactatcatctaaagccactcctacttgggccggctcaattacttgagaattatttacagccacagcaaatgaattccatgctgctcggtcttctttttttgtttgctgatttaaaaatcccttatctatttggtttttctttggtgtttttaaatcaaattgaattttcatggatttcccaggaatccactcaataccttcttttaattccattttaaaagagtaaattttggaccaatcttgtacttctgatgcggttaaccaatctgcttccgttgcttctgcgttatcaactagaggctctgaaccagttggataaatcgtgtgcttatcgagaacgcccgcacgtttagggtttttggcagtactatattttacgtcaaccttatctttccattcatttggaattgccactgctttcgttagctccaagttgaatttactaccacgttcgctgttatctgtaattcctaaatcattttcacttggtaaaacatccattaaaaccatattagctattttttcatctgaatcattttccagtgacaattgatatgaaacaatggaatttgttgtggcatttgccaatccgctgtattctttatcgcgattacccttagcttttttactaattttcaaatgattactcgtatttaaaatgtaatggtttcccgatgtgattctagactcttccgaattcccattttgattaatgtcatctgagtcaatttccatttttgtatcagaaatggttggagttccagtcacttccggcacattaaaatctgtctcctgcaagaaaccaaacatctcaacagtcatattactaggtgtgtcttttgcaacactcacattaatttttgccgttaatttttctgctggaaaaagcgtctttttatcccatttgacttttagtaattgacgccctgcgttttggtaattctcgttcaacactgttacattaaagtcattttgctccgtttttttcattttgacccctgaaggtaacaaaaccactgcttcaaaaggaccttttaatcgtgaaatagaagctttattgctttctaaattaacagaaatagaattatcacctatgttgattaaattcccatcggtatcatcaaacgcaactgatccttgtacaaatttatttttaccagtaggttgcggaatgatttgagcggttcggtctcctgcataatttttccaagcttccggccaaggatttgtatcgtcataataatggatatagccttgactatccgctccgtacatgttgatttgtgtactatttctaacctcacctacataaccttctttgactgttgtaaagaaagataggttagcagcatacattccagctggagcatacgtgaaatgaagccatactttactcacgtgcttatcatctggaatcccaagatcttttctcgaatacattttgctcagttctacatcttcttttagtgtcgtccagtcgctatcaccatcatatttcacgagtaaattatacttaggtgatttctttagttgcgcccaccagggtaattaacatttggtttaaagtaaaaatcgccgctctggaaagtatccaaatttaattatcatctatattgtagtaagcatcataataaaggaag

SEQ ID NO: 3356 - DNA, 1939 bp, Listeria monocytogenes 4b
  misc_feature (1)..(end): n can be any nucleotide: a,g,c or t/u
atgacttacccacaattatcaaaagaagtggcacctaacgaaattgaagcagaaatgattacaaaccgaggaactatccgcatcaaattgttccctgaaattgcaccaaaaacagtagaaaactttgttacacattccaaaaacggctactatgatggccttattttccaccgtgttattcctgaattcatgatccaaggtggcgacccagacggccgcggtactggtggcgaaagtatttggggcgaatcttttgaagatgaattctctacagaagctttcaatttacgcggagctttatccatggcaaacgctggtccaaacacaaacggcagtcaattcttcatcgttcaaaaaccagatatgcctgctgacatgcttggtcaaatggaacaagctggcttcccagtagaaattatcgaagcttacaaacaaggcggaacaccatggttagacggccgccacacagttttcggtcacgtaatcgaaggcatggacgtagtagacgaaatcgccaacctaccaactggcatgcaagacaaaccagtgaatgatgttgtgattgagaagattaatattaaataatgaaattagagcactttcttggttttaagaaagtgctctttttgtataggaaatgtaatatttatttaaagtaggggataaatagttgaagttatacattgttttctttaaaaaatgtttattntgtgatagaataagcatgcctgtgtttttagaatacagaatatgatgtttcaaacagtcaagtaatactttatcggcattgtcggttaagaattgctttaagttaacttcaagaatcattaacaattcttgaattaaccagtttgataagatgatgattaaggtaattataagtttcatacatgtggttcctttcgggttatcgtctatattataacataatagttaaatcattcgacttctctcatatattcaatggtcataagtatgggaatattgacctaaagagacgcagaaagggattttaattaagtgtcggacttgttgtccctttccgctccaaaaaaaaggcgtgaatttaagatgctagattcaacaaaactagattcaacaaaattagattcaacaaaatataaaacaaaaaattatttacactttgattatagagttaaaattgaaaatgtagaaagctatgtaactgatcattcgaagattggaaatcatagctttttaccgttaatacgttatgtatcatcttttgaaaaaagaatagaagaaaaaaatccagagtttgacaaccggccaattaagactaaagatagagtaattatgtatgctggacatatggataactttatttataaatattatgcagaagtgttgaacaaggatttttacaataaattttgtatggaaaaaggtatagatgattgtgtatctgcatatcgaaacaataaagtggggaaatctaatattgattttgctgctgaaatcattaatcaaatggttaattataaggaagcttatatattggtgggagattttactaattactttgataaaataaatcacgaattacttaaaaagcatttagcagaagtgttaaatcagccaaggctgtcaaaagattggtttaatgtgtttcgatcaataactaaatatggatattatgaaaaaagttttttgaatgaggaatatggaagtgatgaaagtatcaaacgctctaataaaaaaagttattttgaaaatatttctaaatttagagagtttcaaaaaaataacaaaactttatgtaataaaaataaatttggtatacctcaaggaagtgctatcagcgcagtatttgcaaatatatatgcatcggaatttgatttgaagttaaaagagatagtcgacgactaattctgctgggatatatagatgatactcagatgattttatactagttatc

SEQ ID NO: 3357 - DNA, 1655 bp, Listeria monocytogenes 4b
  misc_feature (1)..(end): n can be any nucleotide: a,g,c or t/u
tctatgtcaacagtgtgttggaaagtataattcgactatattaatggaccatttcaatgggggaaacggtgaaaaaatgttgagaattatggaaacagttattccgggagaggggaaaaaatatataaatgagttagttgaatctggacaattagattcaaagtattacctaacatctggttataataatacatatagtaaactttggtgggatggacctagttcaacaattactaataatctatccacgccatcttctttcagatgtatacctccaatacaaaatagagcatttacccctcgagaaggagctaggatacagtctttttcggatacatttcaatttgttggcagtaaggaaaaaattaatagccaaattggtaatgctgtacctcctttattagcgattgttattgcacaagaaatatataatttttttgaagagaacaattggatatagaagattttattgaaataacaagaggtgaaaacatgaacgaaaaacaaaatgaaatcccatttgatttttcttattatgctttacatttattaggtaaagggctttataaaaatagatggagtgcaatatctgaattaatagctaacggaatagatgctcgtgcaacaaaaataagtttatatatgaatctaatcgataaagagaaagcagttatagaaatttttgacaatgggacaggtatggactatgacgatcttgtttcgaagtatgtacatattggaagaaataagcgtgatgaagaattggatgatgttgaaagaaatgctctcatggggcgcaaagggatagggaaattagcagcactaaatctttcacaaaaatattatttaatttctaaaacaagaaatgaatcttccctatggtgtctggatgcgactgaagtaaataaatctgacactccgaagttaaaaagagtagaaagcaaatcagtagcattggaaagcatagaacattggaaagaaaattcaactggtaccatgataaaattaaccaatgttgatatgactggctttggaattcagagtatggaaggattaaaattaaaactttctgatttctacttgttaaatcaaatgagctgcgaaatagaagtagcttacattactacaaaagaagaaaaaaataacatcaagtttaaaaaagtggaaaagaaggtagcatttaagaatttttatgctttttttgaaaatatggaaaatgataaatataaagcttccctagcggatacagttagatttccatcggtatatgaaacaattactgaaaaaccaagaaaggttctttactttgataaacaaaattttccggaaattaaaggaaagagaagatttaaaaataaaaatggaactttaagtgagaaagaatacgaatttgagttgaagggatggatagggatccatacatcaacaaaaaaagatgatgcagaaaggaatgatattactttctttagaaataacacctatactcataataaattgagactttatatacgggataaattgattgttgaagattttatggcccagtatattcgaagtactcaagcaacttctggatatattgaaggtgaaattagttttgatattcttgatgtcaatgacttagaagatattacaacatcagatagacaaggatt

SEQ ID NO: 3358 - DNA, 1622 bp, Listeria monocytogenes 4b
  misc_feature (1)..(end): n can be any nucleotide: a,g,c or t/u
aaagtcattggctggttagataaaaaagctttcgatgtatatgacaatattaattacaacaaagcggttaacttagatgctgtagtggaaaatgtgacaggcaacgcagtttggactgctccatataagagtaagggtgttaaattagttacttcagcagccacatataaagataaagcaactaaaataactcgagaagcgcaaacaagtagaggaacttactacgaatttagcgtaaacggcaaagtaatcggttggttagataaaaaagcttttgatgtatatgattctattgagtacaataaagcgattaatatgactggattacttagcaacgcgccaggtaatggcatttggacagagccgtatagagttattggcacaaaaaatgtaggacaagcaactgcttatgctaacaagacagtacagttgatacgcgaggctaagactacacgtgcaacttactatcaaatgagtgtaaatggtaaaatagttggttgggtagataaacgagcttttacaaacgttaaatagactaaaaataatcatataaaaacagagtgagatttctcactctgtttttatatgattatagattaagatttagtgatgtaaataagttccttcaagaagtctttataataaggggattcgaagtgagaaaaggaatgcccaaatggatagttgaaatcacctatatagccttttttcgaaaagtcgattacttttgcttcaggcaatttagataagaaataattatttaaacgttcccagaagtaattattcttttcgatggccattttgtttttgtaagttgcgacttctccatcttcatcataataagacgttgtaaatccacctaggtttaaaataacccgatcagtaggaattatttctgtaagtttttcgataaattgatcagcatagcctttccactcattgaagtaggtttcattatcaatatgatctaaaattctctcgtaagaaatgtcattaagtaattggctttgttctataacataagataatgtaatagctgaattattatttaaccaaataactggtcgaataacatcaggatataggtcaattaagaaataatcagcgtcagaatttttcaggttagtaaagaaatcttttttccaatcatcttctataaaaggtttctcgctttttttaatatcagtatacttatctagattaattaagttagcgggttcggtcattatactaattatagaagaatgaaactgcgtaaaactgcattcaaaaaaagctttataatctggattaaagaatggagatgagttaaaagcatttcggctaaaacaagttcccattacagctatttttgttatatcttgnttgattttaggagcaacggctgtaagacaagctaaattattggagtcgtttcttgttaattgcgccataaattcgctattagcaacattgaaaaatcccgaagaactaaagtcaatagtatttggcgctaaataggtaaatctggcatgtttgcaaacgaaggaagaaatcccatgtcgcatcagctctattgattggtccggataagaattcatttttattaatttgagcagtatatttagtaatccctttcttta

SEQ ID NO: 3359 - DNA, 1995 bp, Listeria monocytogenes 4b
  misc_feature (1)..(end): n can be any nucleotide: a,g,c or t/u
acaaggtattcttgcacactcaggtttgaaaattgttgttccatcctcgccatatgatgcgaagggccttttaaaagcagcgattcgtgataacgatccagtacttttctttgagcataaacgtgcctatcgtttgctgaaaggcgaagtaccagaaacagattatatcgtaccaatcggcgaagcaaatgtcgttcgtgagggtgatgatattacagtaattacttacggacttgcggttcaatttgcccaacaagcagcagaacgtttagcagctgagggtgtggaagcccacattcttgatttacggacaatctatccactagaccaagaagcaattattgaagcaacgaaaaaaacaggtaaagtacttcttgtaacagaagataataagcaaggaagtattattagtgaagtggcagcaattatttcggaacattgtctattcgatttagacgctccgattgcaagactcgcaggaccagatacgccagcaatgccttttgctcctacgatggaaaaacactttatgatcaatccagataaagtggcagatgcaatgaaagaattagcggaattttagacccgttttaaaataaaggagtgaagacctgtggcagttgaaaaaatcaccatgcccaaattaggggaaagtgttacagaaggtacgattagttcatggttagttaaaccaggcgataccgtcgaaaaatatgatgctatcgcggaagttttaacagataaagtaacagctgaaattccatcatcctttagtggcactatcaaagaaattttagcagaggaagatgaaactctagaagtaggcgaagttatttgtacaattgaaacagcagatgcaggaagttcggaacctgtagctgaagtagaagaaacagaaacaaaagcgccagaaaaacaagaaacaaaacaagtgaaactagcagatgcaccagctagtggaagattttctccagctgtactgcgtattgcaggtgaaaacaatattgatttatcaactgtagaaggcactggtaaaggtggccgaattacaagaaaagatttacttcaagtcattgaaaatggtccagtagcgaaacgcgaggaaatgaagtctgctccacaagaaaaagcagcaatgccaactcctcctgttcgttctgcagctggtgataaagaaataccaatcaatggcgtaagaaaagccattgctaaacatatgagcgtgagtaaacaagaaattccgcatgcttggatgatggtggaagtggatgctactggtcttgttcgctatcgtaatgcagttaaagacagctttaaaaaagaagaaggttattcattaacttatttcgcctttttcatcaaagccgttgcacaagcattgaaagaattcccgcaacttaacagcacatgggcaggcgataaaattatcgagcacgcgaatatcaatatttcgattgcgattgcagctggtgatttattgtacgttccagttattaaaaatgcggacgaaaaatctattaaaggcattgctcgcgaaattagcgaacttgctggaaaagcgcgtaatggtaaactaagccaagccgatatggaaggtgggactttcactgtaaatagtactggttcatttggctctgttcaatcaatggggattattaaccaccctcaggccgctattcttcaagtggaatcgattgttaaacgtcctgtcattattgacgatatgattgccgtgcgagatatggtgaacctatgtctatccatcgatcatcgtattttagatggcttactagcaggtaaattcttacaagcaattaaagccaatgtcgaaaagatttccaaagaaaatacagcattgtattaaaaatgttttaatctaggtttagcgggtattgtttagtacatctagatccatacccctaaactccctagatgtcttgggtagtactttcgggtgctgctcttttttttgagaaaaaataaaaaaagcctgaa

SEQ ID NO: 3360 - DNA, 1480 bp, Listeria monocytogenes 4b
  misc_feature (1)..(end): n can be any nucleotide: a,g,c or t/u
tgcccatcatgcgttatattagactgcgtttcccaaaaaatctatgcaactaatttaatagtgcgggaatatccatgcttatttagtatgggtaacgggattggtcttgcgtgcatgtatggcacccaaaataaatatgggtagaatgaaggtggaatgcgcttcatttgaaagcaagctagtatctttggatgctatttttgtgttttcttctactcaaaaaccctgaccgcgctgaatctatttcaggaggtccttttttatggagaaaaaagtattaatcgttggtataagtcagaaacaaaaagattttgattattcaatggaagaattagccaatttagcggctgcaaataatatggaagtagtgggcgaaatacggcaaaatatcgaccgtgaaaatcgcgctacttatgttggaaaaggaaaagtggatgaaatcaaagggctggcagaaatgcaagatgctcgcttgattatttttaacgatgaactttcaccgtcgcaaattagaaacctagaagaagcgttggaactggatgtaatggacagaacaggcttgattttagctattttcgcgaaccgagcaaaaacaaaagaagctcaactccaagtccaaatcgccaaattacaatatgaacttccgcgaatttttggacaaggcgaagacatggaccaacaaagcggaaaaggcggacttagcaaccgtggttcgggcgaaaagaaaattgaaaccgatcgccgtaccatcaaataccaaatccgccatttacaaaaagagttagacatgctcgtggatgaccgtgaagtacgccgtcgcaaacgaaagaaaaatgaaattcctgtggtgtcacttgttggttataccaatgctggaaaatccacaacgatgaatgggctagtacgtgcttatagtgaaactgctgaaaaacaagtttttgagaaagacatgctctttgctacgcttgaaacaagtgtgcgcgaaattgttttaccagataacaagcaatttttactcacagatacagttggttttgttagcaaacttccccatcaattagtgaaagcattccgctccacactagaagaagcacgcgatgcagatttactcattcatgtggtagattattcggatccgcattataaaacaatgatgaagacgacggaagaaacgttgaaagctgttggtgtggaggatgttccagttatttatgcatacaacaaagcggatttaatagaaggagaaatttatcctaagcaaacggaaaatacaattgtcttttccgcgcgtgaaaaagaaagtttggaatttctaaccgaagtaattcgtaaagaactttttgctagctacgagaaagcgacttttttaattccgtttgaggcggggaatgttgtcgcttatttaaatgatcatgcagatgttttagctactgaatacttggagaatggcacgcagattgtggctgaagttagtccggcc

SEQ ID NO: 3361 - DNA, 1907 bp, Listeria monocytogenes 4b
  misc_feature (1)..(end): n can be any nucleotide: a,g,c or t/u
ccctcgttcgtcacctacagctgctcggcggccaacatgtgctggaaagcgactgttagttcagcgacttctaccgctcaagcgccgctggatatgatagcgtaacaatttcaatgactggcggcgcagcagttccagtaatggcagctaaagatatgcaaacagctacaccgaccaactttaacgatgaccaggggatgggcacatggacagatagctttggcctccaagcagtgtccgtaacagatacttccaaaccaaaattatccattccgaaaaacgtcgttgtcgctgatggaacttatcaaagtacattaacttggactttaagcgatacaccagcagtttaacatttttaagagaaaacttcatttttggatgttgttttctctttttacattgagcaattaggaggaaagagacacttgaaaaaaatatgcgctatcatctttgcttgtgtactagctattctttgttttccaggacagcaggcgtacgcaacagaaaatagtagtttttccgtaaaagcaattctccctgacaatcaggcatctagtgtgacctatttcgatttacaaatgaaaccaaagcaaaaacaaagtttaaatgtagaaattacgaaccagagtaaagaagaaatcaccgttaattgcgttgccaatacagccgttaccaatgagatgggctacgtggattattccataccaaatacgaaaccagataaaacgttaaaatacccctttgcagatatggtgaaggaaagtgtctctgaggttacacttaagccaaacgaaaccaaaatttggacagcggctattcaaatgcccgctgaaaactacgacggtattattttaggaggattacattttcaagaaaagaaagaggaggataaagaaaaagactccagcgaaaacgatgtccaaattaaaaatgaatacgcctacgtcattggtgtcaaattaaccgaaaaaacgaccgtcgtaaagccagaattagaattaaatcaaattaaaccagcgaccagaaattaccgaaatgtagtagaaatgaatttgcaaaatacaaaagcgaccttagttggtggactggccgtggatgcaaaaatatataagaaaggcagcgaaaaagttttacatgaatcaaaacgcacagatttatccatggcgccaaattccaattttaattatagtgtagattgggaaaatcaagagttaaaaccaggtaaatataaagtgcatttagttgctaagaacaaagaagataaatgggagtggacaaaagaattcactatctcttctgatcaagcaaaaaaagccaataaagtagctcttggactggagaaagactacacgtggatgtatatcgtaggtggagtattgcttttcattcttcttattatcgcaacttactttgttggcaaacgagcagcaaagaaaaaacaggaaaatgaaaaatagcctaacgaaaaaacagcttgaaaatgagaatttacctcgttttcaagctgtttttattatttttcgattttttctgtttctacgacacgaagtcctttgcgttctaagtgggaaacaatttcgtttttcttatcttctgttacgccaactggtaaggaaacaagtacgcggcgaatgaaatcttccgtttgattgtctaaagtgatcaagcttgagatgctcgaatagcgatcgataattttagtgattttagttaaggccccttgaacttcgccagtcgcaatcgtaagaacatagctagttgttttcacattccagccatcttggagtaaaccaagtaattttccgtgcgttaaaattccataaaagttaccttgctcatttaaaaccgcaatatatggaagctctttgattgtaaaaaagacttcaaagaaagatgcattgacgcaa

SEQ ID NO: 3362 - DNA, 1425 bp, Listeria monocytogenes 4b
  misc_feature (1)..(end): n can be any nucleotide: a,g,c or t/u
tgagatgtttacagaatggtcgacagtgaagtaatgatcatagataggtacagatatattgtacgccccaccatttttaaactgatcaggaatattataagtttgagaactcaaatcgattttcgcgttgtactccattttttcaagattatcaaaatctgctttacttacatcacttactgttaagccatcactcgtaattgttaggcgattgccatttacttgtttctcattcattgcaaagtaagtgtcgctgcctgcagttgattttacgaaatctggtacatagccatcataattaactgttcgttccgtcatcaagctgaatgggacgtataatgtttgcttttctgcattataagttaatgcactacctttaatatcggagttaattagttttttaccccctatagtttgggaaaatgcatacagttgattcaatttagggaaatcttctatacctcgataatcatgtactccgtcaaattgaatatttaagctcttaagttctggcaatgttttaagtagcatgatatccgttattgcaccattataactaaggtcaatactatttactttaggaagtgtgtttattttagttaaaatagaatcatcatgtgcactgtgcgaaatatccagtagagttaaactcgtcagcccacttaaatttggaattttatcggatgtaacatcttttcccataattcttaatcgttcaagattactcaacccgcttattggattatagtttgttgcatgaatattatttatggttaaatcttttatattatgagcatattcaatacctgttagatcagtaacatttatattcgctaaagtaatatatgttaatgaattcatttgtgcttcagtaatattcgctgtactcgattgtcctaataatccatttaagtacgctttaaatgttgaatctggaatgttcacattatcctgacttgcttttaatccagtttgctctgcagcaaataccgggaatgttgtttgcgatacggggacagcgagtactgcaaagcataccccaatttttacgatatttgattttactgacataagttattaccatctccactctgttatattcgcctagtaaattttaagaggtatccttaaaagaaactttatgatgtaattatagtctcctcagcatatgagaccaatagacaaaatgtgtacaaaaatggttgaaaaagcaaaatttagtatctttttaggatttttctattgccatctcctgattttatgcggcttttatttggcattccaaactaccgcaaaaaagggctatccttgcccaatgctcgccccatgcaaccatcgtccccgcatccgccgtcccatccatcaccaccttcccctcgccgaatccccccccacggcccccgctccctccccgccgccccgccg

SEQ ID NO: 3363 - DNA, 2304 bp, Listeria monocytogenes 4b
  misc_feature (1)..(end): n can be any nucleotide: a,g,c or t/u
tcaatgatacaatttttttatcattaagaaaggagagctggggaataaaagggttttaaatattgagaagttatttaaaccgcctaacacaccaaaaaaagcccgattaacctgtggaaaggaaaatcgggctttttttatctgtttaaatcttcaatttcgccactcttcaagtaaacaatccattcgcacacatttgttacataatcaccaatacgttcgatatactgggaaactaagagtagttgtgaaacatcttctatatgctctggctcttcttgcataaaatgaatacatttttgataaacgattttatgaagcttatcgacttcattatcgcgctcagcaattttgcgagcagcaacttcatcttctgcaaggtaagcttttaatacgtcttgtagcattgcttttacaatttcgcccatttctggtatttcgggaatcggctttaaaaccttactttcaccaattaaaatagccgttttggcaatacttactgcgtggtcaccaatccgttctaaatccgaacttgtttttagtactgtgacgatttttcgcaaatccataccaactggctgttgcaaagcgatcaactcaaaagagcgttgttccagtgaaagctccatgttattgattgctttatcttctgcaactacttgtttagcaagctcggtatcgcggtgtacaagtgacttgactgctttaaaaatcgcttcattcgcaagcattcccatttccattagatgttggtgcaagtcgtttaactgttccgtaaaaatttttctgactaccataataacactcctttatccaaatcttcctgaaatatagtcttctgtttccttttctgctgggttggtaaaaatactcgtcgtatccgcgaactccacgatgcgaccatttaagaaaaaggcagtttcatcggaaatccgggatgcttgttgcatattatgcgtcacaataacaatcgtatagtctttctttaattctaaaatcaaatcttctacttttgctgtcgaaattgggtccagtgcagaagttggctcatccatcaaaataacatccggtttaacagctagaactcgtgcgatgcaaagccgctgttgttgtccacctgacatcccaatcgccgaacgatccagcctatcatgcacttcttcccaaagagccgcttgacgcaaacttctttctacaatctcatcaagtacttttttgtcttttataccatgcatccgcggaccataagcgacattatcataaatcgaaaacgggaatgggtttgcttgttggaaaaccatacccactttttttcgtaagttaaccatgtcaattttaggatcttgtacattttcaccgccaatatggatttctccagtcgttttcacattgggaattaaatcattcattcggttaagcgtacgcagaaaagttgatttcccacaccccgacggaccaattagagcggtcacttgatttttcttaatatttaaagcgattttttgtagtgcttgtttggaaccataaaataaatctacatcttttgtttcaatgatatactctactttttcagcagtttcagttgtcataaaaaagctcctttctagccaaagttaccagaaatatagtcttcggtttgtttttgttgcggattcgtgaaaagttcggatgttcctgagaattccacgacttcccccagatagaagaaagaagtgtagtcggatacacgagccgcttgttgcatattatgcgtcacgattataatagtatatttatttttcaactcattaattaaatcttcaattttgcttgtcgaaattggatcaagtgcagatgctggctcatcaagtaacaatacttttggctgcattgcgacagctctagcaatacaaagacgttgttgctgcccaccagaaagggatagtgcgctttttcctaaatcgtcttttacttcgtcccaaagtgctgctcggcgcaaacttttctccacacgttccataatttcttttttattcttcatgccatgacgtttgaggccaaaagcaacattttcatagatagatttcgtgaatggatttggtttttggaataccatgcctatttctttgcgaacattgtataaatcaacttctttacgattaatattaatcccatcgtataaaatttgaccttccatgcggcaaccatcaatttcatcgttcattcggtttaatgctcttaaatatgtggatttaccgcaaccagatggtccaatcaaagctgtcactttattttccgggaaggttaaatcaacacctttaattg

SEQ ID NO: 3364 - DNA, 1910 bp, Listeria monocytogenes 4b
  misc_feature (1)..(end): n can be any nucleotide: a,g,c or t/u
tgctggaaagatattatcgtttccggttttttcccagcgcttcacgagcaagaagtatacactttctacgggaaaatgcaggaacatgctaaatttggtcaacagtttaaagcagaccgatttcgtaaggaaatgccacaatcacgagcgggcttaattaattatctatccggtgaactttttaaaggcattggtaaagtcactgctgaaaatattgtggatacgattggcgacgatgctatcacaaaaattttatccgatccgagcttgctaaatacagtacctaagttgccatctggcgcggcagaaagtttgcttgcttcccttagagaaaatcaagggttggagcatgtgatggtcggattaaacgaatatggctttggtccacaattatccatgaaaattttccaggcctataaacaaaatgcgattgaagtgttagagaataatccttataaattgattgaggatataaaagggattggttttcagcgtgccgatgagcttggacggaaactcggtcttggcgggaatcatccagaacggcttcatgctgggattttatctatgttagattcagcttgtatgcaacaaggtcatgtatatatggagcaagaggttctgatcgtagaagtgacatatttgcttgaagaaagcgaaggcattcgtattgaccaaaatattttagtggctcaagtagaaaaattagctgaggaacaaaagattattacggaaaatacacgtgtttacatgccatcactctattattcagagagcggctttgcatatcacgtgaagagaatgcttaaacaaacagaataccaagaacaatttccgcaatccgaatttctgctagctctaggagaattagaagaacggattggcgttcactacggagattcgcagcgacaggctttagaacaagctttaatgtctccgatgctcgtacttactggtggtcccgggacagggaaaacaacagtcattaaagggatagtggagctttatgcggaactaaatggtgtgagccttgatccccatgcttacaaagatggagcgactttccccgttcttcttgctgctccaactggccgtgccgctaaacggatgtctgagtcaacagggcttcctgcgatgaccattcaccgtttacttggaatgaatggtcaagaacaaatggatgatgatgcagaaagactgattgatggacgactgttgatagtggatgagatgtcaatggtagatatttggcttgctaatcaattattccgtgctttaccagcgcacatgcaagtggtacttgttggcgaccaagatcagttgccttcagtcggacctggtcaagtactcaaagatattctgcaatctgaacaaattccaactgtagctctttcagatatttaccgccaaaaggacttctcttccattattgaaatggcgcattatataaaagaaggcatgttgtcagctgatttcaccaaaaatagcgccgatcgctccttttttcattgcacggtaaatcaaattggtgatgtagtcgaacaagtggtaaaaaatgcaaaaaacaaaggatttcgagcaaaagacatccaagttttagcaccaatgtatcgtggtcctgcaggcattgatattttaaataaaaaactacaagaaattttcaatccaaatgatacagggcgtcgtaaagaagttcaatttggtgacataaagtatcgcgtgcatgacaaagtactgcaattgattaatcaaccagagaaaaatgtgtttaacggtgatattggtgaaattgtgtctattatatacgccaaagaaaataccgaaaaacaagatctgattgtcgctcaatttgaccaaacagaggtttcttactatcggcaagaatctaatcaattgacccatgcttattg

SEQ ID NO: 3365 - DNA, 1545 bp, Listeria monocytogenes 4b
  misc_feature (1)..(end): n can be any nucleotide: a,g,c or t/u
atgaaatcatcgaagaaattggcgtattatctgaaaatgcgcgtggttggcggaaggaattaaacaaaatcagctggaacggccgcccacctaaatacgatatccgcgactggtcagaagatcatgagaaaatgggaaaagggattacactaactgatgaagaagcagaagtactaaaaaaactgttagattgagggctggtgtaaagaatgagaatgtttgcttatgatatttacgaaccaattggtagaaaagatgaagatacttttccagtgatttttgctcttcatggttttggtggggacgagctagaaatggcgggacgactagaattattaatggatcgtttcgttgttgtttccatgcgtggagacgtagaatatggtccggcttacggtttttatcatatggtgacagaaggtgatcccaacccgcaagaggtagattatataagcctgcgtgtcgcacaatttattgataaaatttgtacggattacatttcaattgataaagaacaagtttttcttgcaggatttgatcaaggcgcagttctaacaatatccattatgcaaagctatggtggtcaatataaagcagcagccttgttaagcgggcgtttgccgtattatatggaagaaagacccgctaacttaatgttgaaagacaagcgaatttttatcggtcacggtatagaagatgctgttatccaaatttctgaagcagatgacatcgcccgacttttcgagaaaatgggttgtcacgtggagaagcatcgttattttatcggtcacaatgtaaacgaagcggaagaagatgacttatatagatggtttgaaagctttttgccaaaccaaccagtgaaaaataaataaaaaacagcgaccgcactcggtcgctgttttttagatatctaaagtaagaaagagcacttttaaataattcccctcaggaaagtttttatttaccgtgaaatctgcgggtaaggaatgagtttcaacaattttataagtacggtcgcttgtttggaaggcctccgcaattaattttttaaatgctttcataccgaatcctgcataatttgttgaagcaacgatggtgccgtttggtgcagtgatgtcaatgatttcacgaagcatagcagggtaatctttcgccgctcggaaagttactttttttgtgcgtgcaaagcttgggggatcaacaacaactaaatcaaaagttaattgtttgcgcgctgcatatttgaaataatggaaaacatcttctacgataatcgcttgctcgtttggatcaagaccatttacttctaattgttcttttgtcttgctgagcgaacgaccagccacatctacgcttgtcgttttactcgcgccaccaaataaagctgctaccgagaatgcccctgtatacgaaaatgtatttaagacattttttgaaacagaataatcctcactaattcttctccgcacatcccgttgatctagaaagatacctgtcatccaaccatcatctaaataagttgcataattaatgccattttcttta

SEQ ID NO: 3366 - DNA, 2083 bp, Listeria monocytogenes 4b
  misc_feature (1)..(end): n can be any nucleotide: a,g,c or t/u
acagaaaaagttatccctttattaaaagaaatgaattttacaacacttttgaaaaatatcgagggagatacaccagaagaaacgaaagaactaaaagagttgtcttttgaaatcgtaacagaattaaaagaaaaacattttggtgggaaaaccgcgctttatgtggagctagaaaacgataattaccatacagctaatttcattggattaacagtacattctagccaagggacgtatttctttacaaaagaaacagccgaaagtagtgaggtattccgcaaatgggtagaaagtgatcaaacaaaagtagtgtatgatgcgaagaaaacaatggttgcaatgaaccgcattggtttggccatttctggtatcacctttgatatcatgttagcatcttacttgctaaatccatctgattcgattgatgactttacaagtgttgcaatacgacatgattacacagaagtagaaacagatgaagcagtctacggaaaaggtgctaaacgtagcactcctgaagaaagcattgttgcggcacacttagctagaaaagcagtggctattgctgacttagagaaaagactagttgatgatttagaagaaaatgaacaactagctttgatggaagaccttgagctacctctaacttttgtattagcagaaatggaaatgcaaggggttagtgtagatacagaacgtctagagaatatgaaagtggagctagcgggtagactgaaaacattggaagagtcgatccattctctagccggcgaagaattcaatattaattcaccgaaacaactaggtgtgattttatttgaaaagcttggtctcccagctgtcaagaaaacaaaaacaggttattcaacggctgccgatgtactggaaagtttatctggtaaacacgcgattattgatgaaattttgttatatcgtcaacttggtaaaattcagtccacttatatcgaagggctgcttanagtgacagataaagaaacacataaagtacacacacgtttcaaccaaacattaacgcaaacaggacgcttaagttcagttgatccgaacttgcaaaatatccctattcgtttagaagaaggacggaaaattagacaagttttcgtaccgagtaaaccaggttggaaaatgttttcagccgattattctcaagtagagctgagagtcttagcacatatttcggaagatgaaaatttaatttatgcatttaagcacgattatgatattcatacgaaaacggcgatggacgtgtttcatgttgagcaagacgaagtggattcattaatgcgtcgtcaggctaaagcggtaaactttggtattgtatatggaattagtgattatgggctttcgcaaaaccttggtattacgcgtaaagaagcaaaagactttattgatcgttattttgtgagctatccagctgtgaaagaatatatgcaagatatcgttcgttttgcgaaagaaaaaggctatgtagagaccattttacatcgtcgtcggtatattccagagattgtcagtcgtaattttaatgttcgcggatttgcagaaagaacggcgatgaacacgcctattcaaggtagtgccgctgatattatcaaaaaagcgatgattctgatgagcgagcgtttagtatctgaaaaattagaagcaaaattattactacaagtacacgatgaattaatcttcgaggcgcctgaagctgaaatcgctaaattagaagaaattgtcccagatgttatggaaaatgcagtagagctttctgtaccgctaaaagtagatagcgcatttggtgacacttggtacgacgcgaaataaatagagaaacggggagtttatatatgccagaaatgccggaagtagaaaatgtccgcgcaactttacaagaattagtcccaggtaaaaaaatagatcaagtaattgttcgtgttccaaaaatgattgtatcaacaccacccgatgagtttgtgcatatgcttgtcgggcaagaatagagggtgtacgccgtcgtggtaaattcttactttttgacttaaccaactgtacgattntatcgcatttacgaatg

SEQ ID NO: 3367 - DNA, 1538 bp, Listeria monocytogenes 4b
  misc_feature (1)..(end): n can be any nucleotide: a,g,c or t/u
acaccagaagaatttatggtacgaatggcagaaacaaaagaattaccaaaatcttctcaacctgcgattggttcttttgtggaagcatacgaaaaatatacggctgaaggctatgaaattctttctatccacttaactgaaaaactaagtggtactgtcaatgcggctcgccaagcagctgatatggtagaaggaaatattacggttgtagactgcgattatacagctcgtgggcaagcattccaagtactaaaagctgctgaaatggctcagtcgggcgattattctgtagaggaaattcacgcaaaaattaatgatattcgtgacaaaacaaaactttatatcgttgtcgtaacactcgataatttaattaaaggtggacgtgttggacggatgcaaggcttcttcggtagtcttttaaatatcaaattaattgccaaattaactgacggacaattggaagaagaaacgaaagtccgcagcaacaaaaaagtattacaatattgcctaaacctaattaaagatgaaccgaaaaaaattcagcatctagacgttgttcatgcggatgggcttaatctggcggatgatttcatcgctgaatcaaaagaaataaccggtttaacagaaattccactattttttgcagacccagttatctccacacatgctggaactggtgcgtttgcatttatgtactatactgactaagtgagtgattgcatatgacaaagaaaaaatggctgtggcttacagggagcgtgcttgttatcgcacttcttgttggcgcagtttttggtatcaagtattataaagaatcaaaagaaattccgattaatctcgttgccatgggtgattcattaacagaaggtgttggtgatgaaaacaaagagggcggatatgtcggcattatccctaaagaactagaagaagaatcaaacattccaagcgtaaaaacgagtaattacggggtatctggaaacaaaataacccaactcgaaaaacgtttaaaaacaaacaaagacttccaagaagatgtcaaaaatgcgaatgtaataacaatcaccattggcggaaatgatgtcatggctattttgcaatctcgtctgttaaatgtaaatgtagatgattttacaaaagcaaacaaagaattccaacaagagttagagacacttctaaaagacattcggtcctataacaaagatgcagcgatatttttaatgggtatttacaatccatatacaacttatttcagcgatatcaaacaatttgacgagattatctctgattggaataaagcttccaagaaaactatccagcaagatagcaatgcttattttgtacctattgcaaaagttttagaagatcgaaatgcagataataaagataaacctaattcgctactgtcagatgattatttccatcctaatcatagaggatatgagaagatgacatcggaattagacaaagccatcgtaaaacaattaaacgaaggcaatattcccaaatagaaaggtgttaaaatcgtgcagagagaaaca

SEQ ID NO: 3368 - DNA, 1496 bp, Listeria monocytogenes 4b
  misc_feature (1)..(end): n can be any nucleotide: a,g,c or t/u
tgacttgattgctgatttaaaacaagcactttctttcattaagaagggaagtgttgcgaaatgaatttaagaaaagatttaagtgaaaaagtattaattgctgacggcgcgatgggcactttgctttattcttatggagtggatcgttcgtttgaagagctaaatttgtctcatccggaagatattgttgcgattcataaagcatacattggtgctggggcggatattattcaaacgaatacgtatggtgcaaattatattaaattagcgcgatatggtttagaggatgaagtgaagcgtattaatcaagcagccattcggttagcaaaggaagcggcaagagggactggaacgtatatttttgggacgattggtggaataaatggcgcagtggatgcaagacttccagcggctccactcgaagaaatcaagcgaagttttagggagcagctatactgttttttgttagatggtgtggatgcgattttgctggaaacgtattatgatttagatgagcttaaaacagtgttgaaaattcttcgtgagactactgatttaccggtagttgcgaatgtctctatgcatgagccgggtattcttcaaaacgggaaaaaattgccggatgcgctggaagaacttattgcgcttggagcggatgtagttggtattaattgccgacttggtccttaccatatggcgcgtgctcttgaaacagtgccgctgtatgataatgcttatttggcagtttatcccaacgctagtttgccagagatgcaagaaggaaaagtaatttatcagtctgacacggattattttgaacattatggggaggtttttcggcaagaaggtgctcggattattggtggttgttgtggcacgacgccagatcatattcgtgctttacgaaaaggccttgaaacaacaaaacccattttggaaaaagaagttcggccgatattggaacttgttccagaagaagtggaggatgtggattctggtgaacgtttgcttgataaagtgaaggaacgtttaacgattttggttgaactagatccgccgaggacttttgatacgacgaaattttttgaaggagcccaggcgcttgacgaggcaggcgttgatgcgattacgatttcggataattcgcttgccacgccgcggattagtaatatggcgctagcttcgattttgaagcatgaatatggtattaaaccactcattcatttgacgacgcgggatcataatttggttgggatgcattcgcatgtgatgggatttcataaattggggctgcatgatgtgcttgcgattacaggtgatccaactaaagtaggtgatttccctggagcgtcttcggtgtttgatttaaggtctgtggaattagttcagctaattaaaaagttcaatgatgggatttcttatactgggaaatcactgaaagaaaaggcacgattccatgttggagcggcatttaatccgaacgtgctgaacttaga

SEQ ID NO: 3369 - DNA, 1478 bp, Listeria monocytogenes 4b
  misc_feature (1)..(end): n can be any nucleotide: a,g,c or t/u
actcatcgcctactctgccccaccggccgcccgggtgggggcgcacctggcatcccgcagggacgccgcccagtgggctggaaagactggacccatccggacaaccagatcccgctggctatatgtgtcgaggaacggatctttgtattgtacgtcatctggaaatagtaaaacagcgtccattccgtccgaggtggcgcttttcacgacattttgtgccattaagcttgaggtcgcaccgccagcacaaacaatcatcaacgtttgcatttgtcatccctccaaaaaatgattccaggagagccccagaatcattcttgttgttaaaattatatgccttttccaccgagtatgtctaattcttgtatttgttttatttcttttatcatcggttttgcgcgtgcaatggtttcttgtacagctgggttatcaagtgatgctgcatgatgccctttgtcgacccaaatttcagaaacaaacaccgtgtctggctcggtttcagattcgctgacaatatactgaatacacgtgttgtaatcatccaatccttcagccgcttcaagcaaaattttcactaaattatctttttctcctggatgtgtataaaatgcagttaataaaccataaccaactttcatttaaacagcctcctatttccagaaatcgtcaaatatagtaattgccatatggcgtttatgttcggttttaataaaccagttctcaatttttgctgcagcatctgctggaacttccttaccttccaagtaatcgtcaatttggtcataagtcacaccaagcgcgacctcatcaggaagtgccggtttattatcttctaaatctgctgtcggttttttcaaatatagatgttctgggcagccaagctctttaagaagcgccttgccttgtcttttattcaagcggaatagtggattaatatccgttccaccgtcgccgtatttcgtataaaagccagtaactgcttctgcggagtgatcggttccaactactacgcctttatgcatcgctgcaattgcgtattgtactttcatccgttcgcgcgctttttcgttacctttagcgaaatcagatagttccactcccgcttccgcaagcgccgcaacactcgcatccactgaagctttaatatttacggttaaacgattatctggttccataaagttcagtgcatcttgacggtccgattcatctagttgcgttccgtatggcaagctcacagcgaagaattggtactcatcgtcacccgtttctgctcgcatttcgcttatcgccatctgtgctagttttcctgttaaagtcgaatcttgtcccccagaaatcccaagaacaaagctttttaagaacgtattcttttttaaatatgcttttaaaaactcgacactttttcggatttcttcgtgtgcatcaatcgtttctgccacttgcatatctgctaaaattctttctctgatttccattat

SEQ ID NO: 3370 - DNA, 1527 bp, Listeria monocytogenes 4b
  misc_feature (1)..(end): n can be any nucleotide: a,g,c or t/u
gccacgtggaacgagactgcgtgaaaaattaagaattcgctaggaggattatatgaaaaaaacaccatttattattagcggtatcgctctccttggatttattttctttatgacaggcgttatgaccggtgcaaagtggattcaacattttgatgattattggaacagtattatccgtgtaggcattacgaatacgaaaacaacggtgatttcttatctaacggatattggcggagtcgcgaccatttgtattttaacagcagtcattgtcgttatatttgttgtcattcgaaaagtagatatggcgatttggtttggtggtattgttttaattggtggagcacttatcccgtcaattattaaaaatatcgttcaacgaccaaggcctacgtataaattaatcgaacaaggtggatttagttttccaagtggacattcgaccggttctacggtattttatggtatgcttgctttcttgttaattctatacgtgagccgcagatggcttcgatttacaattggcattctagcctttggtctggttattttcatcatgtattcgcgtgtttacttaggggtgcactttccaagcgatgtggttgcaggattcttaatcggcaatgcagcacttttcagtggcattggatgttacttcatttggaatcaaaaattagcattatgggcgagtagatttaaaaaagcatagaaaaaaatcctctctttcaaaaagggaggattttttattaagcatgttcgtcagtttcgctaaaaattttcaagtaagtcggtaattcttcggcaatttcggttggaagtaccacatagcgttttttagccaaaatttcgccgatatagctgtgaagaaagaccgcggctaatgtgccggtaatcggtttttcagtttgcgccattaagccacaaattgtaccggcaagcgtatcacccataccacctgttgccattgctggtgttccgtacatattttgccaagcagactcgccagaatacacttttgtacggtgcccttttaaaacaatcgttgcgtcgatagcaagcgctacatcagttggtgttacggcatctggcgctaatactttaagcctttcccattctccagcatgaggcgtaaaagttagtttcgcggcaggatggggattttctccttttgcataaatagtaatcccgtcaccatcaataattacttgttgctgttcggttgatttttctaaaactaaacgaaaaatttcttccgcataggcatcaagtccaagcccaggaccaattaaaatcgtatcaaattggctgatttgttcgctgagactcgagatattttcataatcaataaacatgcattcaggtattcttgtttggagagcaggtcggttgacactatcggaggccacggttgttaaaccagcaccacttttgacacaagcttctgccgccataatagcagcaccaccaaattgtttatttccagcgacaatcagaacgcgcccatagtcacccttatgtgtttcatcttca

SEQ ID NO: 3371 - DNA, 2282 bp, Listeria monocytogenes 4b
  misc_feature (1)..(end): n can be any nucleotide: a,g,c or t/u
tggtaaaatgttttttctggggcacgagaacccgaataagcagacagccataccagccgcatatcccatgctgatattgaaagaattgtacgagacgtgaagacatacaaaaaagaaactctcgtcgttatcgataatacgcactggggcgtcgaatatcgcgaaacaccaacggattatcaaacccaatttggtcatgcgattttagatgctggtgctgatataattatgggctctcaccctcatcgcctagaaagcgttgaaaaatataaagataaatacatcgtttatagcatgggcgactttgcttttggagctgatcctacgctactttcccgtatgacatcgatgttccaactgcgctttacgaaggaagataataaaatcgttctaaaagatatttctatcgttccaacttatgaaaattcagatggtagtacgacagaaaacaattatcaaccgctccctgtgtttggtgatgatgctaaaaaaatcgtcgatgaacttaaccgtattagtaaacctatcgagggcggcgtaacagaatacacttacttcgatccattttgataataaaaagcgtagatatcttctaacaaagatatctacgctttttttatctagctattaaagtatcgcaaattgcatgagccataatataagaagaaacactaccaagaactagcttttctactcggttcatcccagtcgctccgcaaataattaaatctgcttggaactctgctggaatatctgtggaaagtaagattttcggattacctttagcaacaaaagtttctacttgtttcactcctgccgttctagctttttctgcgtattcattaacgctcgtttttaattctagttcggctttttcttctaagctaccatcataagaaacattcggggaaaaggcacgtaaatcgacaatactagcaattccaagcacgccgtctagtttgagtgctaatttcagtcccttttcaaaggctaattttgctggttcagaaccatccactgctacaagaatgcgatgatatttttccatcatataaaacctcctacaacttttcttatagtattccataccctataaaaatgattttaggcctgccattcattctttttgctaatgaattcacaataacttaagatttgctttttctgaaaatcagcagtgccgctaaactcagcattactcctgcgattggtaaggtgctcttattagtatcaccagtttgtggcaaagcttttgttttcggttgatttgttttttctgctttatctgctttttctactttgttttctttcgttgttaaagaagttttatttgctttttcttctgtttttgcattattttctttcactgggtcttctgaattttcgctttgaggttctgggatgattgttgggtcggtttcttcttgaggtgtgggttttacttctggagttggtggaaccggattaacatgtccgccgtcgctagtagtcactgtcacaactacggttacagggtctgctttttggccgcgatcatttattgcatttaaagttacggtgtattcgcctggggtgtttaaatctactactttatcaaaatcactagttaaaactgcatttccagttaccgaactatggatttcttgcaaaaattcgtcgactgatttagttgattcttttttataagaaatttgggaatcggctgtaataactggtttttcatgaacggttactttaactgttacgggagttgcttttagtcctgcagcgttatccgcatttaatgtcacggtatattcacccggtacatcaagcttaactacttgatcaaaatcgctctttactgctgtgccatcatctgtttcagcatgtacatcttttaaaaattgttcttctgatgttgcatcgtattgattatagtcaaaactttcatccgccgttaaatctagcgtgtggctaatatcaaaatattgatcatatgtcccgctggagatggtgtaagaattcatgcttggtggtgtcgggtaacttccagtcggaaaatcatagcgtgcattatattcaatttcatccagattgtcgaattcttcttttgggacaccgctgactgtgatacccttctccggcctggatagacttgcgctcgggagcgcccctctttggctccttctccgtgttacttcgcgcatcctctttctcccgtggcgctgcttcgtcgtttccctctcccctctgtcctgcccctccgttcctgggccgacattaatacaccatcaaaaaaa

SEQ ID NO: 3372 - DNA, 1660 bp, Listeria monocytogenes 4b
  misc_feature (1)..(end): n can be any nucleotide: a,g,c or t/u
tacttttgtaacgataatgaaaatcattttcaattagggaggaaatacacaatgtaccaaaagcataaatgggctgctattttgatgactgtgcttttagcagtagtattaaccgcttgtggcagttcttcggataaagactcaagcaaagaaaaggaatccgcaacaaaaacggtcactgatacaatggaccgtaaagtagaagttccaacaacaccgaaaagaattgtcgcacttcaaaatgtaagtgaaatggaaattcttggcgttaaacctgttggtacaactgattattacatcactacataccctgaggcaacaaaagggaccgaaagtgttggtaatgacaaacctagtattgaaaaaatcgctaatttaaaaccagacttaattattattagtgattaccaaaaggatcttttagagaacttggaaaaagtggctcctgtttatatcacgcattttggtgatactccggacaaacaactttcgaacattgccaatctcttaaataaaaaagcagaaaaagaaaaatgggacaaagattacgcggcaagctctaaagaagcaaaagcaacactcaaagatgctggtgttgcgaacgaaaaagcggcagtaattcaattttatggcaaagaaatctatgtgcacgatgcaaaagtctttgacggcttatactccggcgcaggtttcacaccgacagatgctgctaaagcaaacaaagaaacaaaagctatttctagtgaagcaattcctgaatatgcagcaggagcagatcgtctctttatcttaatgccagctgatggcaataccgattctgtggatgaaatgctaaaaggtgtttggaaagatattccagctgtgaagaaaaaccaagtgtataaagtggataatactaaatggagtgactacagtgcctctgctcaactttatcaaatggaagatgctgtaaaacaaattactggtaaataataaaaaaacccgattctacaaatagaatcggttttttttattatttatttaagaaaccataaatatcattattcacttttccgaatgaagcaatgtggttttggacgttggagaataatataacataagttcttcctgtatgactgacactattagatacgtcccaaccggtcacaactccgtgactattataactacctggatccacatagaatcccattccataagttgatttgcttcctgatgtgaacatttttttcaaacttgcttcagaaatcaattttttatccatcaatgctttgtcaaacaaatacatatccgttgtagacatactaatgtcccctgcaccatataatttcgttaagtctgcaagctttggactttgaaagactccattttcatcaattttatacctgttgatacgttttttcccccatcaacatctttttgatagtatcctgtatgcttcattcctgcaggggtaaatatattttcttgaagataggtagctaaaggttgcccactaactttttctacaagataacctactacagcataattagcatccaaataatcccatttcccaggttgtgatttaattcctcgcttttcaatagctttaataatttgatccggtgtcatattactcgttaattttggtcgtccaactataccagatgtatgattc

SEQ ID NO: 3373 - DNA, 1571 bp, Listeria monocytogenes 4b
  misc_feature (1)..(end): n can be any nucleotide: a,g,c or t/u
ttcacgtactaagcggctcattccaaaaccttcactaccaataacaatagcaagcggcatatccacatccatcgtccggtaatcgctactacctttcgcatctgttccaaaaatccaaagcccgcgtttttgtagttcttccattgtccgtaccatattcgtcacgcgaaccactggtacatattccatcgccccagtacttgctttggctacagtttgcgtcaaacctacagagcgacgtttcggaataataatcccatgtgctccaacagaatctgctgtacgcataattgatcctaagttgtgtggatcttctaattcatccaaaataatgaaaaatggcatttcatctttcgcttcagcagcagcgaataaatcgtctaactccgcatattgataagccgccacttgagctgcaacaccctgatgcgctccactcactactttttcaattttttgtttgggtacaaattgaacttggattttccgttctttcgctaatgttaagacttgttttaatacgcctttttgtgaaccttcttgtacatatattttatggatatctctatcagatcgtaatacttcaagaacaggatttctcccgccaatccactcttgctcattttcttgttccattagttggtttccactcctttttctactatttcaagcgccttttccatccattcttgtaaacgatccaactcaccagctaagtaaagataacctagcactgcttcaaaagatgtggacatactgtaagttccagggtcagtatttttaggcactgtatacgacttggcattacgcccacgctttgcaattctatcttcttcttccgtcaaaaaaccttccgcaatcatagcttttagcgccacagcttgcccttttgcagaaacgaattttgtcgccgttttgtgtaactgattcggttttgtctttccagcagcaagtaaatattcgcgaataaatttttcataaactgcgtcacccatgtaagcaagcgcgaggccattaagttgtttgtattctttcacttctgccatgatttacccccgtctaaaccgcgtgccttgcgcagtgtcttccaaaataatatttttttcttttaaaatgtctcgaatttcatcagcacgtgcaaaattacgttcgtttcgcgcttgcagacgttcttcaattaacgcttctacttcgctatcatccagcgaatcagtttgcgtattttctaatttcaagcctaatacttccgcaaacaaacgcatcatgcttaagaattcgcgcagaacattgatagaaacagtttctttagccaaataaatattggcacgctttgcaagttcgtgaaaagtagtaattgcatttgccgtattgaaatcatcatccatatcatcttcaaaagcttgttttaattccgttagctgttctagccactcgtcctcatgcgcttcttccacatattcaccgtcatctgtttgaatacgatgatcaatattttggtatgcaatcattaaccgttccaaaccatttttcgcatcttctaaaattgcatcattcagtgtaattggcttccg

SEQ ID NO: 3374 - DNA, 1478 bp, Listeria monocytogenes 4b
  misc_feature (1)..(end): n can be any nucleotide: a,g,c or t/u
taacccgttctttttaacagataaagaaggtaattttatagccaagaaggacgatatttctaaccgcgaacaggagaaatttcaagagatttatcaatcggatttgcatcattctgaaacaacgattttcttagtagatgatgatgatatcattcattcctacgagccagatttttcgatttctactaaacgaattaataaaaaaagagggattttggtactgtattctcttcctgatactttaaagttaggaatgactgaatcggaagtctatgcgtttatttggaaaactttcttgcatatacaggaaatcattccatccagccgaattttctacggacaagaaacatcagaaaatgcagatgaacttggcgtatttcttccaattcaccattttgagaaaaaaatgctgcaaaatattgagcaagttaatgagctagttgatgctcttcgtgaacaaatggttaataaataagaaaaaaaggatgaaaaatcatggcaagatctagacaaatttcagaatcaatcggtttggggcttttacttgctctggctggcggatttatggatgcttactcttacattgaaagaggtcaggtattcgctaatgcgcagactgggaatatacttttatttggaattaatatttcggaggggaactgggctatcgcaattcagtatttttggccggttgtctcttttacggtcggaattgcgatatctgaagtgattcatcggcgagatattagacgtctccactggcgtcagctttctgtcttgatagaggtggtaattttaattggagttgcatttatttcacttgatcataatctaattgccaattcgctcatatcttttgtatgtggtatccaagtagaaagtttccgaaaaatgcatggtagagggattgcgacgacgatgtgcatagggaatttgcggagcgccacgcaaaatttatgcgattatttcgagtacaaggaaaaacaatatttgcgtaacagcttgctatattttaccgttattcttagttttatcattggtgcggttgtagggaatttctttattcagctattcgcacaatatgctattctcgtttgtgcatttttacagtttatcgcctttatgatgatgtttattgatagagaaagtaaaataatataaaaaaactgccaacaaaatgatttctcactttgttggcatttttttattttacttcttcatctacttttttaaattcgaagttcttcatccattttttatttttgcgaatggagaagtagccgatgatggatatcacgaaagccccgaggaagtcgacgaacagatcgcccattgtatcagcaactgctgcatgaccttgaagcatcgtgccatcttctagcattgttttttgcatgttcattccaactttccagcacatgtcggccgctcgagcagcgtggaagtgtcactaagtatggtnncaccaggggtagggc

SEQ ID NO: 3375 - DNA, 1725 bp, Listeria monocytogenes 4b
  misc_feature (1)..(end): n can be any nucleotide: a,g,c or t/u
gtcacagataaataatttgtcagtaaaataaaggctgcacccattaaaataccaactaaaagatacgaaactttacgccaggaaaagattaccactagaagaaatataacagccataaagcatgcaaagtaaccatctaataccgttgtaaataaataaccttctttaatattatccgaatgtaattgtctaaaaatagttactgcagcaaaaaccgatgtcactgctccaaggagtgagaaaacacctgctgcataacgccatttcgttttccaagcttgatctgcttgtatttcttttgcttgaaattttggtccaataagtaatgcgattaatactaaaagtcccaaaatacataataaagttcccgaccattcaaatggctgtgcatactctaattttgaaagaattcggagctgataataatacaccgaaaacccttggaataaaacgaaacagataacgccaataatacttgcaaggcgaaaactttcttttctcataaaaacaaaaccaataataaaaagtcctacaccaaaaaataatagcatccaataattccatacaaaaacaaaactattttcttctgcattaaaataaccaataaccgcactaataaaactgtatagttgcgtaataccaagagcgattaacaaactaccgcatattcctctccatttactaggcaattcgcccacttccttcctatttatgccttgccatgttaccctaagagtgaggtgataaaaatgaactggaccatctgggacaaaagccaaccagtcccactcactcttttgttagatgccgatcctagtgaaaaacaaattgcgacatacttcaacaaatctcatgtgttgcaattaatgcaagctgatacaatcatcggcgttgtttgtttatttccactaaataagaaccaactcgaaataatgaatattgttgtttcttcagaatacagaaaccaaggtattggcaaaaaattactcgaaaaagcttttgattatgcaactcataaacacttttcaaaaattatcgttaaaactggaaattctagtattgaccaacttgccttttaccaaaaaaatggttttcggatgcagcatattatcccaaattattttactgaaaattatcctaatcaaacaattatcgaaaacggcattgcttgcttagatcaaatcattctattaaaagaaataaaatcctgatgaagtttatcatcaggattttttgtttgttgttttaatcgttaagtgccatttctgaacgaacaaccgctgaaatacgttcacaatattcgtctgtttcttctttcgtagcagcttctaccatcactcttactaatggttctgtacctgatgggcgaacaagaactcgaccattaccagccatttcagcttctacttcaccgattactttacttactttcggattatctgttacatggtttttatcacttacacggatgttttctagtttttgcgggaatgttttcatttcagccgcaagctcagataattttttcccagttgctttcatcacgttgattaattggattcctgaaagaagtccatcaccagttgtattatgacctaaccaaataatatgaacagattgttctccgccaacttccagcacnctgtgnnncntccagcagncggcngagtgaatgaaggacngtncnaaaaggncagggcanngcnnccctcatnnnnggcccac

SEQ ID NO: 3376 - DNA, 1062 bp, Listeria monocytogenes 4b
  misc_feature (1)..(end): n can be any nucleotide: a,g,c or t/u
gcggcaatggcataaatcaaaataaccgtttgacgatgcgtgaagcctagtcgtaataaacaatgatgtaaatgcgacttatctgccatcgcgattggttgtttcgttaccatgcgtcgtataatagcaaaaagtgtatcagaaatcggtacacctaaaattaaaattggtacgattaaagagataaacgtaacatttttgaatcccatcacggataacacggaaataataaaacctaagaaaagcgcgccagtgtcacccatgaaaatttttgcaggattaaaattataaggtaagaaaccaagtgtcccagcgattaacacacttgctatcataattactagtgcatctcccataataaacgccattcctaaaatagtgagtaaggcaatggttgaaacacctgcggcaagaccgtccagtccatcaattagatttatagcattcgtaatggctacaatccaaataattgtgagtgggatacttaacaccccaaaatggatttccccaccgaatggtaagttgataaagtcgatactaatgttaccccaaaacacaataataaaggcagcggtaacttggccgattaatttatatcttgctttaaattccataatatcatctaatagcccagtcaaaaccatgacaaatgctgcaatcagaagcggccataagaattcgttttcaattgggagtaaaaacattccgatagtaaaactgataaacattgctagtccacctaaactcggaattggtttaatattaatacgacgttggtctggtttatctgtaatatcaaagtatagagctatttttcgaattagcggtgtaagtaatacggacgcgccaaaacatatcaatataatcatccagctcatggctagtcctccccgcaaattttttactcatctcattatacttttttatttgcaaaaagacaacgaaaatcattatgcaaaaaagcttggggcagacagattccgcctcaagcttttatttattgtttaatcctagctacaaattgaaatctactacctacatactgggaacgcgtaaattcaa

SEQ ID NO: 3377 - DNA, 2485 bp, Listeria monocytogenes 4b
  misc_feature (1)..(end): n can be any nucleotide: a,g,c or t/u
gctatccaaggtaacttgtgaaacacttttttcacaaagctcaaacacgttgctaccaaaggcttttccggaggtttcatttgtgaatttctgcgcttaaattagaaaagaaactatgaattaattgtaacaattgtttcggtttttgccttggtaattaatgaagtccatttcttacaataaccatttcaccgtgttgaacagaatgcaccattttctttgtatctttggaagatattaaatcatattcacccacaacagctaaaagtggcgcgcttattttttgcaaatccgcttctgacatatgtggatgataaatcgttaaagcaagttgtcgtttcatccgctcaaaaaagcgactaaatggcgctaaaagaaatgcagccccgtatgcgacacgacaaaataaatctggtaaaaatcgtatttgatttacatgatagtttgttccaataacaacggatgcgatttgacggttcggttgcaatttccccattccgagagcaacaataccgccgtcgctctatccgataactttatatttatcaattttcaaataatcgagtaacgaaagcatatctagcgccattacttcaaaatcaagcggtgtatttcccgcttcacttttcccgtgtgcgcggctatctacggcgattacttgatgattagtagagaggtcatcaatcatccgctttaaagaacgatgattttgaccattcccgtgaataagcaagattggttcttctttaccgattatttgataaaacaagttaattccattgatttctgcaatcatatagcatttctccttgctgaaaacattttctacccttattttacacctgattatacttgatttcctataaaaaagcttccattttcattaaaatacgcctgattcttttaaaactagaatcaggcgcaccgtttatttcataagtcttcggtgaaactgttgttggggcatatctgcgttaatgattttcttttgcacagaatgtttttccgctaaggggtggcttttttcatgcaccacagcgtctttgatttttggagtttcgagcacttttgaggcctgactattttttactttcatcagcattacctcctcttccaaatcattacccctctcgctatttttaaaacagaaaaaactccgcgaaaatgttacttttcgcggagcttagcgttttattcaatcaacttatttttttaagttgtagaaagtttcgttaccatggtattcagcaagatcagccaaattgtcttcgatgcggagtaattggttatattttgcaacacggtcagtacgagtaggcgcaccagttttgatttgaccagcgtttgtagctactgcaatgtcagcgattgtggaatcttctgtttcaccagaacggtgagagataactgcagtgtagccagcgcgtttagccatttcaattgcatccaatgtttcagtcaaagtaccgattttggttaactttgattaggatggagttagcgatacctttttcgataccttctttaagtttagttgtgttagttacaaatagatcgtcacctactaattgaacgcggtcaccaatacgttctgtaagtagtttgaatccgtcccagtcgttttcgtctaggccatcttcaatagagatgattgggtatttagtaatcatttcttcataccaagttaccatttcttcagaagtacgagttacgccttcacctttaagttcgtatttaccagtttcgcggttatagaactcacttgatgcagcatccatcgcaagtttaacttcttcgccaggtttgtaaccagcatctttaattgcttgcatgattgtttcaagagcttcttcattggatttaaggtttggagcgaatccaccttcatcaccaacaccagtgtttaagcctttacctttaagtacagctttaagtgcgtgtaggatttcagcacccatacgtagagcttctttaaagtttggagctccaacaggcattaccataaattcttgaacgtcgacattgttatcagcatgttctccgccgttaaggatgttcatcattggaactggaagaactttaccgttcactccgccaagatattcatataaatgtacgcctagttcgtcagcagcagcacgagcagcagctaaagaaacaccaagaatagcgttagcacctaatttacctttgttaggtgtaccatcaagttcgatcattgctttgtcaattccgatttgatcagttacgtcaaaaccgataattttgtcagcaataatgtcgtttacgttttcaacagcttttaaaacaccttttccaaggtaacgagctttgtcgccatcgcgtaattctacagcttcgtattcaccagttgaagcaccacttggaactaaagcgcgaccaaacgcaccagcttcagtataacttcaacctcaacagttgggttaccacgggaatctaagacttcgcgagcataaacttcagt

SEQ ID NO: 3378 - DNA, 2726 bp, Listeria monocytogenes 4b
  misc_feature (1)..(end): n can be any nucleotide: a,g,c or t/u
gcgttaattgaacgattagtcgatttagcgaaagaacgccacgcagccaaaaatgcacttaaatataaattagaagactaaaataaacaagaaagcagttttcatatgcggaagctgcttttttatggaagagagcgatttaatttgaaaaaaacagtaggcgaagtagtagcaatgttagatagttccatccatgttgatgcatttcgcgatgtcgtcattactggcgtttgttttgatacaaggcaaataaagtcaggggatttatttgttccatttgttgggaatgtgcgcgatggacatgaatttgtgagtcaagcacgagaaatgggtgcagtggctactttctggcaaaaagatgtacccaatccaccgatggatttcccggttattttagtagaagatactttgctcgcacttcaagaactagcggcgaaatatatccaacaagtaaagccaaaagttattgcgattaccggaagcaatggtaaaacgacgacaaaagatattatggctgcgattgtagaaacgacgtataaagttcattatactggcgggaattttaataatcatatcggcttaccgtacaccattttaacgatgccagaagataccgaagttgctgtacttgaaatgggcatgaatcatcgtcatgaaatcgaagtgctttccaaaattgccaaacccgatatcgcgattattacgaatatcggcgaggcgcatattgaatatcttggttcgcgtgaagaaattgccaaagcaaaactggaaattactgccgggcttaatccaagcgggattttaatttatccgcacgaagaaactttactgctaggaaatattaatggcgatttcagacagctcacttttggtaagtcggaagctgcggaaatttatccgttagaaattcgtgcggaagcggaaggcacttcttttataactaattgggagccggagctagaaatttttgtccctattattggtgaacataatgttttcaatacaatggcggcgatgcttgcggcaagagaaattggaattgaaggtgaaaaaattcaatctgcgctgaaaaatatggaacgttctaaaagtcgtttagaatggattacaacgaaaagtggcgcgcgtattttgaatgacgcttataactctagtccaacagcattaaaaacggttttaaaaacatttatgcatatggattcgagcggcaaacctaaatatttggtccttgctgatatgttggaacttggagatttgtcgacaaagttacatcaagaatcagccgaagtattagaaaagggtatgattgagaagattttcttgtatggtgaggcgatgaaagcttttggtgacatagcggaagccaaaattggtcagggaaaagttcatcattttaacacgaaagaatcgcttgagacggcgcttctttcagaaatgaatggaaatgaatggatactggtcaaaggttcttacggaatgggcttgaaagatgtggtagaaaatcttattattaagtaacgactaaaattggacagaacatattaccgcttaattggtaataatttggacaggaggaaaggcataatggttgcttgtttgtgtattcatggttttactggttcgccgtccgaggtgaagccgctcgctgactatttgcgagagcatacagattgggatgttttagcacccacattacctggccatgatcacctgcgccacttaaaaaatgtgacgtataaagattggattgtttttgtagatagtattttaagccaaatgctaaaagaagacgatgaagtatatattattggtttttccatgggtggactgctcgctggatggctcgcgagacattatccggaagtaaaaaaactagtacttctgagcacagccgtaaatgcaatggaatggccgcaacttgtcgaaaattccaagcaagtattaacggaagcaaaagaagtaacgctcaaaaacagcccgatgtttaaacgttatcaaaagaaagtaacggaaacgccttggacttccacgctacaattcaaaaaaatggtagctttagcaaagccggtttttgagcatattgaaattgcaacttttattgcacaaggcagtgccgaccaagtagttcctgctgaaaaaagtgttaatttcttaatggaaagtattcctggtccaaaagaattatttatattagaaggttcgaaacacgtgatttgtcaggacgaacaagcggacaaattatttgcagctgttttaacatttttgcaaaaagatgtcgctgttttaaatgctcaataaagaaaaccgattcagctttcactcgctgaatcggcttttttgttttcaccaacagaatctcgggctattaaattagtagcaagcgccagatgaacaaacccttcatctggttttcttatgcgattatacatgagttcgacagccttctcacccatatagcttaggttggtacacattgtagttagctttggattgcttagtacagtaaactcggtattatcaaagcaaataatcgataagtcattagggatattatagccttttgattgcaagtaagtattgagaataaacccaagtcctgagttgacacaaaaccaagcagtagggagttcgtccagttcatctaaagttctatataatgtcgtttgttcttctttgatacgagtgatggcgtatttttcgttaaaaggaatgtgatagtagtgcaa

SEQ ID NO: 3379 - DNA, 2079 bp, Listeria monocytogenes 4b
  misc_feature (1)..(end): n can be any nucleotide: a,g,c or t/u
gaagtccatcagtgtgttggaaagtttgtttccattttgacattaccgagagaatgctttagctaaaacaatacaaacgtatgttagagcttgatgatgtagaacttgaattcgaaccaactgctctaattgaaattgcgaaagaagcgattgaacgcaaaaccggagcgcgtggtcttcgttcgattatcgaacagattatgcttgaagtgatgttcgaaattccttctcgtgatgacattacgaagtgtataattactgaaaaagcagctcgtggtgaagaagaaccgcaactgcaattagaagatggttctattattccaattaaaacatctgcatgattagaatgcgcgtcgtaattggcgcgcattttttctatcaaaccagcttgttttactgtaatatctgacttgtttcgtgctatactttattaatattaattggagaggataaaaagacatgaaaagtgaaaacaaatttttttctggggcatttggatggataaaaataattctcatcgcgcttatacttgcttttggtattcgctattttttaatttctccagttactgttaatgggaaatcaatggacccaacacttcatgatggggaacatttatttattaacaaggtatcagatccgaagcgttttgacattattgtatttcctgcgcctgatgaggaaaatgcagagtacattaaacgcgtcattggccttccaggagataaagtggagtacaaagaagatcaactttatattaatggaaaaaaatatgatgaaccttatttagattcagaaaaagaagctctaaaaaacggttatttaaccactgatgcagaaggcgatcctaattttacgatggcagacattccaaactctgacggctctctcactgtccctaaaggagaactttttgttttaggagataatcgtcaagtaagtaaagatagtcgctacattggctttatatcacaggataccgtgcttggaaaagtaatttcatttggaaaatccttagaacgttaatgtgaccctacaggaagtctaggaggagacatagatgacagatcaatatgacaaaaagcccaagaaaaaaagcggggcgcaccaattattaagctgggtgctagttatcgttgcagcgcttgcaattgcacttgtgattcgtaactttgtagttgcaccagtaaaagtagaaggaacatctatggttccaacatatcaagatggcgatagaattttcattgaaaaaatttccaagcctgatcgtttgggcattatcgtgtttgatgaacctccaatgattggttcaggagagcatttcatcaagcgagtgattggtttgccgggagataaaatagcatttaaaaacggtgaattatatttaaatggaaaacgaaaagtagaaaattacttgccagaaggaacattaaccctttggaatccagatccaacgcaaaaaccatacatagcggattatacgctggaggatatgacaggcgaaagtactgttaagaaagggaaactatttgtacttggagataatcgcggcgggagttcagatagtcgcgttttcggatttattgatgattccatggtaaacggtacagtgatacaatttggaaaataatgtgaagtccgtgaagatactttttcgcggatttctctattaaatgagcgttttttcgtttataataagactgttagtataaaatagggcggtgcgattttttgaaggagaagaatttaaaacggttatggtcatggatttgggcggctgttctagcagtgttaatagctgttataatccgtttttatttatttgtccctattctcgtcgatgggatatcaatgatgcctacacttcatagcgatgaccgtgtaattataaatcgcttcggaaatgtagatcgtttcgatgtgattgttttccgagaatcagatggaaaagaatacatcaagcgagtgatcggtttgccgggtgatacagtagaatacaaagaagaccaactttacatcaatggtaaaaagtataatgaaccatatttggatacttacaaagaaaagaaaaagatggct

SEQ ID NO: 3380 - DNA, 1738 bp, Listeria monocytogenes 4b
  misc_feature (1)..(end): n can be any nucleotide: a,g,c or t/u
ctttaggcactctccacccatgctcgagcgccgacgtgtgctggaaataatggagccaaccattaatatcatccctgcactagttaaaatagctccaatcttccgtctggctgggaaaaataaaattacgatacctgcgataaaaattaagaaagcacatattccggcaatgatccaaatttccatcttatttgctccttttatgcgaatttctccctcactatttcatatttagcctctagttcaaagcagttaagtcacttgctggagatggataggcaaatataacagattgcaaatcacccaaagttagattagctttcattaagatggcaacgtaatttatcatataatctgcttcttcactaagaaaatgagcgcctttgatttgccccgactctctatcttcaatgatttttgcaagcgcgatttgttcatttgttcgtttataagtataccaatttgttgtgtcgtgatttttaatttgatatttttctggatgcgcttttgcttcttctgcgcttataccaatgcttgccagtttggggctcgtaaaaacgacgcttggtattgctggataaatcattttttcgtcgccgccaatgacatttttagcaacaaatgctgcttccatgctgacaacgggtgttaaaggtgctccttttgttgccgcgacatcgccacatgcgtagatatgagggttattagtggtttgaagtttttcattaacgataatgccttttttagtgtagtcaatgttggcattttccaatgataaatgcgcgatatttggttttctaccagttgccccaataattaaatctgtctgtaatgaaaatccatctttgccatgaatatgcagtttttcccctttattttcaaccttcgtaatatctgtgtcaaaatggaaatggataccttcttctttcatatgggtaactaatgccgccacaaaatcagaatcaaatttctttaaaggttcactattatgatggataatatgcacttctctgcctgctgcgagtgctatggaagcaaattcaaatgaaatatagccaccaccaataaacacgacagaatcagggagtttttcaagtgataaaaaatcatcactggtttgaatgtattcttgcccttctacttttaacgtgcttggtgttgctcctgttgcgatgacaattttattagcttgtattaaatcatcgccgacttgtaaggaatgggaatcttggaaactagctgcaccaaagaatgtttcaatcccggcttcttgaaagttttccaaacgactttctggcacattctcaacaaaagtttctttaaatgccattaaatctgtccagctaattgtcgctgcttgcttaatacctttgccgcgaagtctggtagaaagatttcttgcttctcttgctccgacgagaacttttttagggtcgcatcctctgaggacacacgttccaccccaactccgctcctctacaattgctacttttaatccagctgcctgtgcttcaaatgctaccgttgtaccacttgcgccacttccgattattactacatcatatgtaaattttgccatttaaatcactccttcctagcttgttttcccgtctgatttcactttcaaacgaaaaaaactgccacacacgaatgtgcagcagttcattctagacttccataataattggtaaaatcattggacgtcgttttgtttgttcaaataagtagcgatttaatt

SEQ ID NO: 3381 - DNA, 1394 bp, Listeria monocytogenes 4b; identical to SEQ ID NO: 1916
  misc_feature (1)..(end): n can be any nucleotide: a,g,c or t/u

SEQ ID NO: 3382 - DNA, 2592 bp, Listeria monocytogenes 4b
  misc_feature (1)..(end): n can be any nucleotide: a,g,c or t/u
atcactctaaaaaaaggtcctcaacaccttaacgctgagcaagctttagcactagctcgtacacgacacatcgatagtgatatcgaacgtggcaaacgtcaacaactaatcattaaatctattgtaagcgaagcaacatccatttcttctgtaagcaaatattccgatatcattgaagttgttggagataacatgaaaaccaacttaactttcaatcaaatgctttctatcgcaaaatatggaatgacaaataaaattgatattaaatcccttaacttaaaaggggatagcaacccaatggacggtatttattactacaaacttgatgaaagctctgtgcaaagtatttcgaatgaatttgctgatgaacttggaattaaacaaccattccctggtgcagcaccgtattcagacgaaagttctaacacaactagcacttctaattaaaaaaagaccaacaactaataaatagttgttggtctttttattttcgttttcgatgtattttttgaagtaaatttaagattggtcggtaatcctcaccaattaacccaataaattcaacaataatctcaatactaaaaattaataataacagtaataacattgctccccaagtagtggaaaacgaaaatacgaagcccgtcatagagaatagtaatgccatacagtagattagtaacaccgtctgtttctctgtaaatcctagcgccatcagcctatggtgaatatgagatctatccgctgaagatatcggtatccgctcttttagtcttcttacaatagcaaaaaaagtatctgacaaaggtacacctaaaataataagtggtactaacaatgagatgaaagtaacgtttttaaaacccataagtgataaaacagcaatcatataaccaaggaataacgctccagtgtctcccataaaaatactagcaggcgggaaattataaatcaagaaagccgcaactgctgctacaagaattaacgcaaccggcgcaacaaaaacatctttcaaaagcaaagccatacctgcaatggtcattaaagcaataatagaaataccaccagcgagaccatctaatccatcaattaagtttaacgcattcacaattgcaacaatccaaataatcgataatggaatcgcaaaatacccaaaatctacttgtccgtagaatgggacgttaataaagttaatagtaatgtctccccagacagttacgcaaagagcagctaaaatctgtcctaacattttccattttggtgataaatcaaatatatcatctataaagcctgtcgcaataataattaatgctccgaaataaattggcaagaaacctgatttatctattggggctaagatcatccctaccgaaaaacttataaaaatagctaatccacctaaagtggctgtagtttttgtatgtttgtgtctttcacgcggtgtatcaaccgcattaattcggaaagcaaacttcctaattatcggcaccataatgataccaactgcaaagctaatcaatatactccatattagcaatattttttcagctccatcctttatttagcaaaattctttctgttgatttagtatatttttgtagcacatctaaatctaaagcaactccaaccccttgaccagttggcacagtgagttttccttgatttaatacaaatgctggcgaaacaatatcttcattaaaataacgatttgatgcagaaatatctcctgggaaagtaaattccgctctagcagcaagtgcaatattgtgagccctacctataccagcttcaagcatgccgccacaccagacaagcaaattattatcgctacaatacctcgctatcttaagagcctcagacataccaccaacgcgcgctaattttaaattaactgcctgacaacttcctaacatatgagcctgtttcaaatcatctaatgacctaatattctcgtccaaacaaatacgcgtttttaattttttttgcaaccaagcatgctccacaaaatccttagttccaaatggttgctcaatcatttctaaattaaagtgatctaattcttttaacaacaagaaatcttctctattatacgctgaattcgcatcagccatcaagcttagattaggaaatttttctcgaacagctttaacaaattgaatatctttcttaggtgcgattttcaacttcactctttcgtagccttcatccatatattgactaactaactggactaacgcttccgcactatgctgcacaccaatgctcacgccaaccgcaatcgagtccttctttgcgccaatcattttagctaatgagagcttctcattttttgcaaaagcatcccaaacagcaagctccacagccgctttcgccatttcatttccttgaatccagctaaacatctggttaacctcttcaggagttcgtatttctttctgcgcaaggattggcaacaaatgctgtttaataatagaaatagcagtgcccaaagtctcttctgtatagtcaggtaacggaaaagcttccaactctccataaccacgtataccctcctcattcactaactcaataatataaaaatctttactgttt

SEQ ID NO: 3383 - DNA, 2281 bp, Listeria monocytogenes 4b
  misc_feature (1)..(end): n can be any nucleotide: a,g,c or t/u
actggaggcgtatgctcttatgattggaatgtaactattaattaatttctactaaaaaagctggaagttcaaaaactctgaacttccagctttttatttatttccacgcgcgtgaatattgttttggtccttcaattgtttcgcctaattgtttggctgcatctttagcaaaataaggatttcgtaataattcacgaccaacaataattaaatccgctcgttcattgcataaaatttcttccgcttgttcgcctcgtgtaataagtccaagcgctccagtcgcaatacccgccccgctatccctccaagttcccctaaaatcgccttagcgagcggcatatcttcaggagttgtcagcttaatattataatagcttccttggacaatagcaacaggacaaggaagtcgctcaaccagactagcttcatccgttcctaaaaactgttcttttcgagcaagctgatgcgcttttcgtaaaataggcagttcaaaagcttgcggcgtttgaacttgccaaagattttcacggtcaacagtttcttgaacgacacctttcaccactcgtttcaccgtatcttttacttttactgcacaaatcgcggcctttacttttgctctacaccaattaataatcgatcaataatatctaacgtgataaacggtcttgcgccatcatgtactaagacaacccgctccgtcccacaacgttcaagacctgctgccacactatattggcgttcacttccgcccttcacaatctcaattcggctttcagcaacgttaagctgactcattaattcttttacatgctttctttcctcttcttgactcacaacaatcactttggaacaacgattatctgctaaaaaaggacgcaaggcatgaatgaaaattggttcaccaactaactctagccacattttatttttctgggcattcatacgtttcccttgacctgccgctaaaaaaaccaactcataattcatgcttatttcctccttttaatcaggatggtttagcaaaaatcattcttcctgctgatgtttgaagtacactcgttacttccacttggattgtttcattaataaatttacggccatcttctacaacaatcatcgttccatcatctaaatatgcaacgccttgattgtgttctttaccatctttcaccataagaacagtcattttctcacctggcaaaacaactggttttacagcattcgccaaatcattaatatttaaaaccggtacattttggaattcacatactttgttcaaattataatcatttgtaacaacaataccgcccattactttagcaagtttcacaagtttactatccacttctggcgtatcttcaaaatcaccttcatacatttccacttgaatagcctcttctttttggattcgatttaaaatatctaatccccggcgccctcttgtacgtttaagcgtatcggatgaatccgcaatatgctgaagttcggctaacacaaatagtggaataaccaccgttccatctaaaaatccagtagtcaaaatgtctgcaatacgaccatcaataattacactcgtatccaaaattttatatgttttcttagatttctcttctgttttctcttcttctggtgttcttttctttgcatttctgttattgacaaaatttccaaattcgttgcgacgactaattccgatacggaaccctaaataacctagaactaatgttaaaataactggtactactgaatttaaaagcggaatatttgtttgacttaatgcattgctcgcgaaaaacgcaatgaccaaacctacaaataaaccaagtcccccataaacaagggttgcaatagcaattttagctaacttttcctctaaccaattaagtgcggcttctacatatttcaccgcccagaaagtaataagataaaatataagtgcaccaatcagagcatcagtataaggattattaattagcagaatgtgacctattccaagtttcacccatagagcaggtagtgaaaagactcccgttgtcccacctagaattaaaaaacacactcgaattacccatgtaagcatttagtttcctcctttccatttttaatttatatatataattgggctattaccaaatatacatatagcactattttacactattaaaagactataccgcaaatagtactcacggaatcaacgaagtatttagttttaatctggtaaagctttcttcaaagcttctccaatcgtttccaccccaaccacttgcacgtctttcggt

SEQ ID NO: 3384 - DNA, 1162 bp, Listeria monocytogenes 4b
  misc_feature (1)..(end): n can be any nucleotide: a,g,c or t/u
cttttggtccaaggacacggcctaatttaccaacttcacccatcatgtcaggtgtagcaacgataacgtcaaattcaaaccaaccttggttgattttttcaacgaattcagattcaccaacgtaatcagctccagcagcctcagcttctttagctttttcaccttttgcgaatactaatacgcgttgagttttaccagtaccgtttggtaatacaacagcaccgcggatttgttggtccgcttttttagggtcaacgccaagacggaatgctacttcaacagttgcatcgaatttagcgaagtcaatttttttagcaagttcaactgcttcttctgcagtgtaaactttgtttgcatcaatttgttttaaagcatcttgatactttttgcctttcttagccatttcttttcctccttaattgtcaaattgtgaaacacacgattagtcttggatagtgatacccatagaacgtgcagtaccttcaaccattagcattgcagattcaacatttgcagcgttaaggtctggcatttttgtttcagcaatttcctgtacttgagcgcgagttacagatgcaacttttgttttgtttggttcaccggatcctttttccactttagctgcttttttaagtaatacagctgctggtggagttttagtgatgaacgtaaacgaacggtcttcaaatacagtgatcacaacaggaataataagaccagcttgatcggctgtgcgagcattaaactctttacagaatcccatgatgtttacgccagcttgacctaatgcaggtccaactggaggtgcaggatttgctttacctgctggaatttgaagtttaacttctttaatcactttttttgccacgagacatacctccttaagtccgtgatgtggttgactggggctgatatttcccctcccacgttaaaacatacgtcaaaaacgtacttatatatgataccattttaaatgtgtagttgcaagattattttatgaatttactttaaattccattgcttctttatcgaaataaacatttttattttcacgccataaattcaaatacgccgtgtaaccttgtgctgccttatctatccatgccggattcaccctttccagcacacgtcggccgtcaagcagctgctaagtgccacagtc

SEQ ID NO: 3385 - DNA, 1089 bp, Listeria monocytogenes 4b
  misc_feature (1)..(end): n can be any nucleotide: a,g,c or t/u
atgatagattgtgagtgatagctaaaatggtttgggatgctactaatatctttttgtttgcggcaaacatcttgacggtactgtatattttgtataatgatgcagtaattccactttggaaagggaagacggttttaagtgtcaaattgcgttctcgtggacgctgggacggttatatttttgttggaattatcgttctgttattcgtttccaatacgttctttcgtgaaggaccattttccacttctgttctgcttgggattatgggtgtgttattcatctatatctgcttctttcgcagttcgaaagctgttttcaaagaatccggacttttttacgccctgttattcttcccttatgcaaaaatcgaacggatgaatttatctgaggatggtgtgctcgtgattgaaaccaatcgccagcgtttgatgctctttgcaagatccgagaaagatttagaaaaaatgctcgctgtatttactacatatagctaaaaaacgccacgcttacttccctgtttttagggaaatgaagcatggcgtttttttatgttcactctacttaaatttagaatcaatgatttttcttaaaaatgaaaagtatgccaatcagtatacttttacatatgttccatttagttgtagacgataaactttctctattaagagaaaaaataaactaacgctttttattaggctacttcatagcctctgatgcaataaaatattcgccgtcttctttaaacaaaatagtccttggaaactcatctccatttttcgctttataaagttctgtcccttcgcttaaataattagatgtgaaatttttattcggtatccggtaatggcgaattctatgctctatctcaccaattttctctaaagcatcttcttgctttgctggttcatacgacactatatataaagtgtcgtcaacttgcatcatttctacaagattgtctctatataacaaccattttatcccgaatattattgcacaaagaactattactgccattattaattgcaaccattttttcttcttcattctattatctcacttttcattttatttattaccgcttttaat

SEQ ID NO: 3386 - DNA, 1269 bp, Listeria monocytogenes 4b
  misc_feature (1)..(end): n can be any nucleotide: a,g,c or t/u
ttggaacagttagttatgagctaagtccaggaactgaaaaagcgagctttactttttctgtacgagtagatgcagcaaaatattacggagcagttgacttagccactccaataaaaacagaaatttttatgggtgagacaacttcaccagttgcttccgcggaacaagcgattcatgcggaaggaaataaggttgtaggttatacgaatcaggatcatgtgaaaactatgttccgaacttggtatagtaatcaaaggctaacagaagtacttgcaagcacagatacaacagattcttataactatacaaaatcttactctgttgtgaatggattaaataatttagacaaccgtggatcagcgtattatctagcaaaaaacatagagatgacgctttattatccagaaggtatggagtttgtaaacgttgtgaatcatggtggtacgcctttaacggataattccaacctaactattactaattatccaagtgaaaataaggttgtagttgattgtaagcaattaaatttcaactcagcgaataattctatttacggagtcaaatataaagtgcctaaaggaacgcctgttggaacttatagcactgcaaaagcgccacatgcggttatcacaacgtatgatggagaagtattcgaaaccgatgcattaactaacaatactaatgatttaactactttagctcctctagatacttgtaaagtagttgatacttccaataataaaatgaatttattttcagcaaatggaacaatcaacccggataacgaaacttgggctggtagtatccaaatcgataataaaagaacatctggtgtgaagaaaaatcaaatgtatcacattgaatttgatcctaactgggaagcctacatggtcaatatcccttttgatagcaccatttcagaaaataaaataactgatgttcaatataaaacaaatttaaacgacacattccgaacgtatgaaggagcgctcactaaaaataataaccaaatgtatcgcttagatgcaaacgcagtggagcttcaagaaggtgagtatttcacagaagtgaaagcgaatgtgggagacttttcacctggatatcagaatacagaagcttcggctacctatcgttggaactcaactgtttcgtacggaaaagttaagccaggaattacatcagttcaatataaaggttccatttgggatgctgatgatgaggccgaaacaaaatcttctgcgacatcaacttatagtgttttaaatacag

SEQ ID NO: 3387 - DNA, 2593 bp, Listeria monocytogenes 4b
  misc_feature (1)..(end): n can be any nucleotide: a,g,c or t/u
cgcgataaaaaatatttttagtacataaccatagcatttaccctttttccaaaagagtttcaatgctatacaaaaagagtaagcaagtttatggtggtggctagctctttcaacaagaaagggtgatgtctatgaatatttttgttaggattgcctggaaaggataacccatgactgtttatgaagcactgtcttttgcaaccctggtgttgttattgaacagtcaaaataacaaaaaataaccactcataaactttggtcggtttagtggttatttttataatctattaagctagctgtcacattaaatgggcttatacttgagagtcatcttagcgcatgactctcttttcatatttaataataacataagaccatttgacaacatatgacattaggtactactcattactatatctgaaacgaaagcagcaactgctttcgtttttattttaaatagccaatttcaatcctaattttatcttttttcgttctgccgccagttgatagtacttttacccgaccatatccgcgagcagacaatacatcttcttcttcacattcaaaatccgggttttccactgttttccagttgacttttactagtcccgcagtaaccaattgtttcgccttctgtctagaaatatgatgtacattactaataatcacgtcaagtcgcatactagaaacagttaagcccatttcttcccaaacgaccggggcataaacagcattagctaaatccgtttcctctaacatcacattcactttaccgattttttcaagctgtaatgttaaataatccttcatcgtactttctactaataactgccattcactaccattatttaaaatatctccaaaaatatcacgcttcattccaagcgacatcagtgttccaaggattttttgatgtgtgagggtcgtgaattttaccgggtagcgtatatggaacaaagcaatctcaaaatccgcttctgtcggcgtataataatctggataaatcagtgcgcgccgtcgttccgcgtgcgccactccaccaaaaaactgtacattgatctcatcataaccaccgataactgtttcggtataaaacgctgcctcggatccaagaaatccgtaagttgtggcgtgtattcattctcaacgtgcatcgtaatccctaaaatcttatcaataaatgcgtattcttccgcgcgaaaatgctgataaattccatccatcctaatttctccctttcaatccgttccgagtctttagccctattataccatgaaaacagctgctactaggctaatcttgcttattaataaaaaaagccacccattttgaaaacgggcgcgctttttaaaatagcattggaatgacatacacttgaattaaaccggttaaaactctcatcgcgtattggaaaatgaaataagccacaagggacgaaatatcaaacataccaatcggcggaataatccttctaaaaggctctaaaatcggttcaaaaatacgagctaaaaattggccgatttttgattctcttgcaccgggaaaccagctcatcaagaaataaataaacatgagtgttggcaaccatctgataataaacaaaatgatttccaccacttgatataaaatactttgcaatctagctcacacctctacttcatcacataaagttttgttcatcgagcatttcggaaatagagccatccacttccacattgtctggagtacataagaaaatattattgccaacgcgttgaatatctccacctaatgcatatactgttccactcaagaaatcgacaatacgtgtcgcttgatcatggctaatacgttgcaagtttacaacaacagatttatattctttcaaataatccgcaagttcttgtgcctctgcatacacacgcggttcagcaagtaccatacgactagaaaactgagctccctgcatactaaccaccttcgcatcatcttcttctacagcataaaaacgatttttatttggtttttctttcttcgttttcttttgcataggttctggttccctcgctacttcctcttcgtaatattcctcttcttcatctaagaaaaagaatgacttaaatttattcgatagtcccatttgttacacctccatattatcgtcactcaccaaagctcttcctactcgtataaatgttgcaccttccgtaattgcaactccataatcattcgtcatccccatagataactctgtacatggaatgttgtttaactgaagcgcatgaatttcttgctgcaattgctttaactcatgaaatacgtgatgcagctctatggcgctattggtaataggtgccattggcattaaaccaacaatctcaatgaacgtgaaatgcgcttcttgtgaaaaagatggcgcctcttctttggaaaaaccatgtgggctttcctcaccagaaatatgcacttggaggacacatttgcactgggggagccgctcgctgtgcagatttgctttggctggcggttatcgggccgtctaatgcagattatcgtttgttgttagaacacttgatcttgaccggggggtcagaaccattgggatgcgacgata

SEQ ID NO: 3388 - DNA, 1875 bp, Listeria monocytogenes 4b
  misc_feature (1)..(end): n can be any nucleotide: a,g,c or t/u
gatgcttttgaaacttccaatacatatatgctgtggacacggtttgacacatatgaaagagaagccactcgccaaatgcgagacggccttgtgttcccagcatatgattacgtattgaaatgtgcgcatacgtttaacttactagatgctcgcggggtgggttcagtaactgaacgcgcacagtgtatcggggggtgtcagaaacttagcaagacgtatcggcaaaacattttatgaatcacgagaaaaacttggcgttcccattagtcaaagaagagggaggaaaacgtgatgagtaaagactttttattagaaattgggttagaagaaatgccagcaaaatatgggactagctctggactacaactggaaaaacgagtaactgattgggtaaaagacaaccaaatcgaatttaaagaaattaaaacttattctacaccaagacgttaactgtcctagtagaagaaatggctgaagaacaagctaatcgtgtggaagaagcaaaaggccctgcaaaaaaaatcgctctagacgacgaaggcaactggtcaaaagcagcattagggtttgcaaaaagtcaaaaagttgcgccagaagatttaactttccgcgaaattaaaggtgttgaatatatttatattaaaaaagaagtaatcggcgaaaaaacaacggcgttacttccaagcttagaaaaagtagtaacaagtatgactttcccagtaagtatgcactggggtagtaatgatttacgttatattcgtccaatcaaatggcttatcgcaatgtttggcgaagaaattattccatttgaaatcactggtgtctcaactagtaatacatcccgtggacatcgtttcttaggaaaaacagctacaatcaaccaaccgagcgactatccaaatgcattattagaacaatttgtcgttgttaatgctagtgaacgcaaacaggctattgtagaacaattacgtgaactagaaacgatggaaaattggcaaatcagagaagatgacgacttattagaagaagtaactaatcttgtcgaatatccaactgtactagcaggtaattttgaaaaagaatatctggaactacccgaagaagttttaattacgacgatgaaagaacaccaacgttacttcccagttttcagccaagaaggagaattgttgcctcattttgtaaccgttcgtaatggtaaccatgaaaatctagatacagtggcacgaggaaacgaaaaagtactacgcgctcgtttgtcagatgctgatttcttctatcaagaagatttaaaaataaccattgatgaagcagttgctaaattacaaaatatcgttttccatgaaaaattaggcactttgacagaaaaaatgaaacgagtgcaaaaagtggcattaatgcttgctgattatttaaattggcaagaagaagataaacaagacattatccgcttaacaaatatttataaatttgatttagtaaccaatatcgttggtgaattccctgaactacaaggtttaatgggcgaaaaatatgcattgttgcaaggcgaaaaaccagcaatcgcaacagctattcgtgaacattatttaccaagctcagcagaaggcgatttaccacaaacagacttaggttcacttatcgctattgcagataaattagaaacattaattggcttcttctgtgtaaatattgcaccaacaggctctgctgatccatttggtttacgtcgtagtgcttttggagcggtgcgtattatccaagcnatgggtgggacattncatgcttgaagtggtttctctattgtgatatgagcgtgcgaaagggtctccactctccgttcaaggtgtataaaagagggccttttctaaaatt

SEQ ID NO: 3389 - DNA, 2095 bp, Listeria monocytogenes 4b
  misc_feature (1)..(end): n can be any nucleotide: a,g,c or t/u
caaccatctgtttttggataaccgagcgggttaaaataactgctactaatcccaaagcaactattgatcctattacttctaaaattacatattcagcagaagtaatggccaaaagaccgaagtatagctctaatcgggtttcaggagttacctattcgtgggacgaggacattccgtgggggggtagcaataatctagttgaatacaatggtacgttttacaagccattaacttatgttgaaccgccccaagttgtgtcttacaattcaggccttacttatgagctaggtacaccacttacggaacaacaatttctaaacgatctcaatgtgataacagatcaaccaacaacgattactacaaattttgataaggtgctaaaagatgtgaattctgtaggcttttaccctgtcactatcaaagcttctaacatagaaggaaatacggagttcactacttcggtactgattaagtataagccaccagttataaccgcagatgcagaatacacctatttagtaggagataaagtgaatgctactcaatttcgagcagatgtaaatgcaactttgacaggtgaaggaacactaagagatgactttatatataaagtaagacttaatacggcgggagattatgttgtaactctttcttcacctaaaagtggctactatgagcaagatgcaatacctgttacagtcattgttcacgtaaaagaacttttggaattgcaaatcccagatgaatttcgaatggatatagatgcaaatgcagattccgtaccaatttcagataagaaacaaacacttacatgctatggttcgtctggaaaggctgagttagaggtgatcgatagacgaactgtgcggcaaggctggacgataacgggtgcgatgacgccatttaccaatagcggcggcgatatactacaaacttcgctaaaatatcaaagcaaatcgccttccagtagtccgatttatttaaatacgacgaatcaacctatcgaaaagaaacaatcagctgtgacagacccaaaatatgattctaccatcgtcaatctggaagacagtttatccatggaaattgagccaaatgatgcgctagtgaacgattcctatgagtcgaaaatcacctggacactagaagatgcgcctcgaccataataagcaatcagctacatcaaacaaaaggagctatctaaattgaaaaaaatgggattcattttaatctgttgtttatttgtgtgcgcctcgccgttttatgtaaaagcgaatacggataaggcgacaagtaaagcgggagtgattttcacgcatgacccccgaaaaccaagaactggaacagatgacagaagcggcacttttccgaccaaagttcctccaaaaagactgccgaaaacaggagatacaactgatttttatcttgttttactagggtttggattcattttaatcgcgaaaaaaggctattttaaggaggtgagggaagaaatccggtgaaactgcacgacaaaaaaaggatatcagaaagaggagaataataatgacaagtagaacagtaaaagtaacaacagcgagtttattagcattaggtttgattgtggcaccagtactttctggagattttgcttcagctgccacttccgtaacgaaagattccaaagggattgtaaaatttgataaaagcaccacgccagatccggatccagtaaatccagatccagttgatccagacccagttattccggatccaactgatccacccgtaggtacagacggactttggattttagccatatctgactgggattttggtacgcataacgtttctagcttatcttcaggtgcgttaaatgtacatgcagcggatgatacgatttctacttatgtagacgcaaatggtaatggacaacaagatttgccaggggaagtttcagtaactaagaaagtaactccttatgcacaaattagtgatgttcgtggtactaatacaggttggacactttccgtgacgggtagtgctttcaaagattcttctacaccagcaaaaacgattccaggtgcagagctaactattcccaaatcgactgttagtt

SEQ ID NO: 3390 - DNA, 1119 bp, Listeria monocytogenes 4b
  misc_feature (1)..(end): n can be any nucleotide: a,g,c or t/u
tcctgtacggcccgcttgcatacttagattacggggtagcaggtgttggtatttccactgctgtcgcaaacttcgtcggaatgggtctagccatctggatgcttcgaaaatatatcggctatactttccatttcaaaaaactggagcaagtttccaaaaaattactttattcgattttacgacttggccttccctctgctggggaaaatttatcgtatgccggctcgcaactagttgttaccgcaattattgcgattcttggtacagaggcgcttaccacaaaagtttatgcttcgacggttagccagtttgtcgcactctttgctatcgcgctcggtcaggcctctcaaattattatcggtcgcgcggttggtgcaaaagaaatcgataaagcttataagcaaggtctacgtagttggaagattggtttggttgtcgcaattgtggtcagcgtttcgatttaccttttcgcggaaccaattatgagtttatttactaccaataccgaaatcattgcgatgacgaaagaattgttcttactttcgattttcctagaacttggacgtgcgacgaatattatcattattagcagtcttaactcaacaggcgatgttcgttttccatttatatgcggacttatcgttatgtggattgttagtttgccgttctcctatgtacttggtatctctgctggtcttgggcttgtaggtgtttggctcgcctatattattgatgaaggcgttcgagctgttctaatgtaccgaagatggcgcagtaaagtttggtccctaaaatcagtcatataaagaaacgtctctttgattttttcgaagaggcgtttttgtatatgacaaaactgtcatcttcctctgtatatcgtcacctaattcgatggttccatttctctttccccgctatactagacttataaacaaatgagaggatagatgagaaatgttagataaaaaaattattagtgcgcttagttatttcagtcttttctttgccccggtcattactcccgcgattatctggtgtacaacaaaagataaagaaattcggcatcatgtaagatgggcactcctcacacagaccacttttgccgctggtgtacttgta

SEQ ID NO: 3391 - DNA, 1768 bp, Listeria monocytogenes 4b
  misc_feature (1)..(end): n can be any nucleotide: a,g,c or t/u
tgcaagtgagtcagttgacacattagttcagttgatcgaagcaggaatgaacgttgcacgtcttaatttctctcacggagattttgaagagcacggtgcgcgtattgtaaatatccgcgaagcatcgaaaaaaactggtaaacaagtggctatcttacttgatacaaaaggtccagaaatccgtacaaacgacatggtcggcggaaaattagaattccaaacaggtgatgttgtacgtgtttctatgactcctgttgaaggaacaaaagaaaaattctccgtgacttacggcgaactttacgatgatgtagaaattggttcttccattttacttgatgacggcttaatcggtcttgaagtaatcgaaaaagacgaagctaatcgcgaactagtaacaaaagtacttaacccaggtgtacttaaaaataaaaaaggtgttaacgtaccaaacgtttctatcaacctaccaggaatcacagaaaaagatgctgctgatatccgctttggtttagaacaaggtattgattttatcgctgcatctttcgtacgtcgtgctacagatgttcttgaaatcactaaaattctagaagagcacaatgcactcacgtacaaatcattcctaaaatcgaaaaccaagaaggcgttgataatatcgacgaaatcttacaagtatctcaaggcctaatggttgctcgtggggaccttggtgttgaaattccagctgaagaagttccgattgtacaaaaagaacttatcagaaaatgtaataaacttggtaaacctgttattactgcaacacaaatgcttgattccatgcaacgtaacccacgtccaactcgcgctgaagcaagtgacgtagcgaatgcgatttttgatggaacagatgcaattatgttgaccggtgaaacagctgctggggattatccagtagaagcagttaaaatgatggcgaaaatcgctgttcgtacagaagaagtactagttgctcaagataaatttgcacttaaacttcaggaaaatacggatatgacagaagctatcggtcaagcagttggccatactgcgaaaaacctaaatgtacaaactatcgttgctgcgactcaaagtggtcacacagcgcgtatgatctctaaataccgtcctaaatctcatatcgttgctgtaacattcaacgagcatgtataccgcggtttagcactttcatggggtgtttatcctcgtctagctactccagttagcaacacagatgaaatgttcgaccttgcagtgaaagaatctcttgcttctggcgttgcaaaacaaggcgacttaattatcatcactgctggtgttccagttactgaaagtggaacaacaaacgtaatgaaaatccaattaattggtgaaaaagttgttaaaggccaaggtattggcagctaaatctgttatcggtaaagcaatcgttgctaaatccaatgcagaagcacttgaaaaagcagaagaaggcggaatcttaatcgttaaaacaacggataaagaaatgctacctgcattcgagaaaagtgcagcagttgttgtggaagaaggcggcttgactagccacgcagcagttgtaggaatcaacgtaggcattcctgtcatcgtaggcgctaaagatgcaacatctcttgtaaaagacggtgaaatcattactgttgattctcgtcaaggtgttgtatataacggcaaaacagcaacacattaatagttcactttctaaaagcgtcccgcatgcgggacgcttttttta

SEQ ID NO: 3392 - DNA, 1660 bp, Listeria monocytogenes 4b
  misc_feature (1)..(end): n can be any nucleotide: a,g,c or t/u
tattgccgttctttccatccactggagatcgagggtttgcgccaagtgattacacaacagtagatagcgacctaggttcttgggaaataatcgagaaattaggcgaaaagtattatttaatgtttgattttatgattaatcacatttctcgcgaatcactcttctttcaagattttaaaaaagagcatttaaactcaaagtataaagatatgtttattcgtatcaatgatttctttcctccgggtagaccaaatgaaaaagacttagatttaatttataagagaaaagataaggcgccttttcaagaagttgaatttgctgatggggaaacggaattagtttggaatacttttggggaagaacaaattgatttagatgtgacagccgaagttacaaaagaatttattcgtcaaacgataaaaaatatggctgcacatggttgttctattttgcgtcttgatgcctttgcttatgcaattaaaaaattagatacaaatgatttttttgtagaaccggaaatttgggatttactggatgaagtgaaagcagaagcggccaaatatgacatggaattattaccagaaattcatgaacattattccatccaaatgaaaatcgcgaaccatgattattatatctatgattttgcgttacccatggtgatgctgtactcgttatatagtggccgagtggaacgtttagctaactggttagaaatgagtccgatgaagcaatttactactttagatacgcatgatggcattggcgttgtggatgcacgcgatttattaacagatgaggaactcgattatacttcagcagaattatacaaaataggagctaatgttaaaaagatatattcctctgaaaaatataataacctggatatttatcaaattaatagtacctattatagtgctttgggtgacgatgataaaagttacttgttagcgagagtaattcaatgttttgcgccggggattccgcaaatttattatgttggtttacttgctggcaaaaatgatattgaccttttagaggaaacaaaagaagggcgtaatattaatcgtcattactacacaatagatgaaattaaaaatgaagtaaaaagaccagttgttaaagcgttgtgcaatttactgaggtttagaaatacttctgaagcgtttgatttggaaggaagtatagaaattgagacacctagctcaaatgaaatcgttattattcgcaaaaacaaaacaaataaaattacagcgacattaaaagcaaatttaagtactaaaacattccaaatcagcgaaaatgaaagaaatattttaatttaacattttataaacacgaatgagcctcttcgttcgtgtttatttctattttctattgacattggctaatggttattgtattattatataatgccaaaagaatcgaaactgtttttttgtgtttattattaagcgaaaatgctgtcggaaatcaagcatttgcaatcgattttggcaaaatagaagacatagatgtggctttcaaaaatacaaaacggtataaactttttccgtcttgtactgacacttttaaggaaaattattttctagggagtttcagccatatgaaatgcggtttttttttgtctaaatccaaatttcttctgaccaaaaaaaaa

SEQ ID NO: 3393 - DNA, 1720 bp, Listeria monocytogenes 4b
  misc_feature (1)..(end): n can be any nucleotide: a,g,c or t/u
aaagtgcaggattttcttgccataattcagctaatgttttgcctttatattcgccgtttttgattaccgaaggaccgttcggatgagcggaaatcgcccagtcttctccagtagtatcagacgggatatcgtaaccaaaataatcatgtaatttcgttccaccccaaattcggtcttgaaaaacagggtttaaaaataatgcttctgtcattataaaattacctccattccagcgtttttgctgggttttgtcaattaaaagtatatactaataatggcgaagatgctagttatttcccgcctaaaaagcctctttcttttatttgttctgttaaatttggataataaggtctgtcataaaatttggctaaccgttcggtataagaaacaaagccttctcgctctgaaaacggaataatctcttggtcatatgcttctagtaaaggcatgacatcagtttggtacgtctcttcaaaataaactgcttcttttggcaaacgtggttttacaggtgcttcgacatccggaacgccaatacaaagtcccacaacgggcatgacgaattctggtaaatttagaaattcagcggttgccgtaatatttctgcgcaaaccaccaatacaaatcgtcccgtaatcaagcgactcagcagctgttaaagcattttgcatacaaagtccgatgtctgttgccgcaaccattagtaaatcttcttccccggcaatttggaaacttttgccgtgcatgtcactcgctacttttacgcggtgaaaatctgccacaaaacaaagaaaaacggaacattctgctatgtaaggttgatttccgcaaagttcggccattttatttttacgttcttgatctttaatcgcaataatcgaatagtgttgaccattaatccacgacggggctgcttgagctgctcggataatcgcatctagattttcttccggaatctcaaccccttttttatatttacgaaaagagcgatgatttcttagcaaagttaatacgtcattcatatttatgcctcctagatttatcatttagttaaagtatagcttgtttttaggcaattgttaatgttttctcttgtatttctgccagatattttctacacttaaagaaaaagaggtgaaaagatgtgcgccaacaacaaatagattttaaatggcttgaagaaaacttcctgactgcgaatgaagccgcgacttacttaggcatatctaagcaagcactcctttccttagccaaacgcgatgtactcccctttacgaaaaaaggaaatatggttcttttccaccgaatggacattgaacttcggcttgaaaaccaacaaagcttacgtgaaaaataccgtccttttgaaacgtaaatttcacaaacagcgaaacggacgaactacttcccgtatgttacactttagttagtgatattctaaacaaggagtgatacataatgaatgaagcagtaaaaactttagatggatggttttgtctacatgattttcgttcgattgactgggctgcgtggcgtgaactaaatccaggtaatcaggaacttatgttaaatgaactcagccactttctaagcgatatggaaattactaaaaatatcggtgaaggtgaacataccatttacagtattcttggtcaaactttccgggacatgtcggccctcgagcatcagacaggttacctttagccctttcaaaagaaag

SEQ ID NO: 3394 - DNA, 74 bp, Listeria monocytogenes 4b
  misc_feature (1)..(end): n can be any nucleotide: a,g,c or t/u
aagtatgccagctacgtacgcgctctttccgtagtacgagccgccagtgtgctggaattctgcagatatccatc

SEQ ID NO: 3395 - DNA, 882 bp, Listeria monocytogenes 4b
  misc_feature (1)..(end): n can be any nucleotide: a,g,c or t/u
tgagctaaacctccataattactattttactctaaaaacatgaaaatgtctctagtaagtttaataataaatgacccgtacgggattcgaacccgtgttaccgccgtgaaagggcggtgtcttaaccgcttgaccaacgggcctaagtgaaaatatgatgcattattatgtgtaaacggagagcaagggattcgaacccttgagacagcttacaccgcctacacggtttccaaccgtgctccttcggccactcggacagctctccagaaaatggctccacaggcaggactcgaacctgcgaccgatcggttaacagccgattgctctaccaactgagctactgtggaataataaattgcccggcagcgacctactctcgcagggggaagcccccaactaccattggcgcagagaagcttaactaccgtgttcgggatgggaacgggtgtgaccttctcgccataactaccagacaatatttaagttgttgaaagattgctctctcaaaactagagaagaaagggttcagttaggtaacttcgtttcattttttggttaagtcctcgatcgattagtatttgtccgctccatgtatcgctacacttccactccaaacctatctacctgatcatctttcagggatcttactttccgaagaaatgggaaatctcatcttgaggggggcttcacgcttagatgctttcagcgtttatccctgccacacatagctacccagcgatgctcctggcggaacaactggtacaccagcggtgtgtccatcccggtcctctcgtactaaggacagctcctgtcaaatttcctgcgcccgcgacggatagggaccgaactgtctcacgacgttctgaacccagctcgcgtgcc

SEQ ID NO: 3396 - DNA, 2224 bp, Listeria monocytogenes 4b
  misc_feature (1)..(end): n can be any nucleotide: a,g,c or t/u
tgaaaacagcttcagaaaaaccacttaaccacaaatattctttatttcgaggaaaacacgaactaaaacaagccgctgcggatttttacgcgcgtgaatataatgtaacaattgatccaaacacggaagtagctattttgtttgggacaaaaacaggtttagtggagctgccgatgtgtttgatggatccaggtgatacgatgcttttacctgatccgggctatcctgattatttgtcaggagtagtgttaggtgaagttcaatttgaaaaaatgccgcttattgccgcaaataattttttaccagatttcactaaaattccagaagacatagctgaaaaagctgaattaatgtatttaaattatcctaataatccaactggcgctgtggctacggcagatttctttgaagaaacagtcgcttttgccaagaatcataatatcgttgttgcgcacgatttcgcatatggaggtattggctttgacggtaaaaaaccaattagttttttagaaacaaacggtgcaaaagaagttggaattgaactttatacactttcgaaaacatataatatggctggctggcgcgttggttttgcagttgggaacagcgaagttattgaagctattaatcttattcaagatcatatgtatgtaagtctttttccagggattcaagatgctgcaatcgaagctttaacaggagatcagacttgtgtgggtgaattaaccgctcgttatgaaagtcgcagggatgcctttatttctgcttgtaagaaaattggttgggaggcagttgcgccggcgggttcgttctttgcttggatgccagtcccggaaaattttacaagtagcgaatttgctgattatctgctagaagaggtgagtgttgccgttgcggatggtagtggctttggggagtttggtgaaggttacgtccgcgtaggtcttttaatggatgaagagcgcttggaagaagcagtaacgcgagtttccaaattgcatttgttcgataaagttacacagcagtagccaatttatccaattttaagagaaaatcgcttgtaataattcagataattaatgggatgtgttataattggttagtaagtctattcttagcatgttgttttatgaaggcaggccagaatttaaaatgtttagtgagatttttacgcattaaataaaaagtatctgtcccggttaaagccggcgaaatccaggaatgagaggactgtaaaaaaatggcagaaaagaaaattcttgtagtagatgacgaaaaaccgattgcggatatagttaagtttaatctaaataaagaaggctttgatgtatattgcgcctatgatggcgatgaagcgttagaacttgtagaagaagttcagccagatttaattttactggatattatgcttccaggtcgtgatggtattgaggtatgtcgtgaagtacgtaaaaaatatgatatgccaataattatggtaacagcgaaagattcagagattgacaaagttatcggactagaacttggtgcagatgactacgtaacgaaaccatttagtaatcgcgagttaattgctcgagtgaaagccaatttgcgccgtcacagccaagtcagctcaaatgcagccgaggaagaagaaaacagcgaactagaaattggttctttgattattcatccggatgcatatgtggcttctaaacgtggagaaacaatcgaactaacacatcgtgaattcgaattactacattatttagcaaaacatatgggacaagtcatgacacgtgaacatttacttcaaaccgtttggggctatgactacttcggcgatgttcgtacggtggatgttaccgttcgtcgtttacgtgagaaaattgaagataacccaagtcacccagcatggttagtaactagacgcggagttggctattatttacgcaatccagaacaagaatgaataacaagaagtggtcgtcgaagtgaaaaaaatggggtgaccactgctgtctgggcatagtacctgactgagggtctgtcggcgtcaatgaatggcacccatttaacaggaaaaacaatgtcggcgccaccatctcataccgcttgcttatccgaatgttttgctcctcgtgggagtccgaagacgcccccctttaacggcatttttccacccttcaattttaatcctcgccctccaaacttcctccctattacctcccacttctatata

SEQ ID NO: 3397 - DNA, 1420 bp, Listeria monocytogenes 4b
  misc_feature (1)..(end): n can be any nucleotide: a,g,c or t/u
gatgaatggcaaaattcaccgagcgactgtaacagaagccaatctaaattatgttggaagtattacgattgattctgctattttagaagcagtggatatgcttccaaacgaaaaagttcaaattgtaaataacaataacggtgctagaattgaaacctatattatcccaggtgagccaggaagtggtgtgatttgtctaaacggagctgcagctagacacgtccaagttggcgacgtagtaattattatgagttacggaatgtttactaccgaagaagcgaaaacacatgaacccaaaatagttgttttagatgaaaaaaatcatattgaaatgattcttccagaagaaaaagcgcatacgactttataatcagttcggggagcttgagtggatttctgctcaagctactcgtttgtttgcatcgttatttttgaataaaagcagtgaaggaaagaggtggagcagatgaaacagaaacgctatatagtcgtcgatttagaaacaacaggaaatcaagcttcacgagaggaccgaattatccagttcgctgcttgctttgttgaatcaggaaaacgtctggaaacatacacgacatttttaaatccagaaaaaccgattcctgcgtttattcaagaattaacgggaatctccccaaaagacgttaaaaatgctccactgtttgaagatgtcgcaccgattatcgcgaatttactagaagatactatttttgtggcacataatgtgtcatttgactggacatttttagaacgagaaatgacgcgtgcaggaatttctcttggcaaaatgaaaaaactcgatactgtggaattagctagaattatgtatccgggcatcgatagttataaactacaagacttgtccgatgaatttaatcttgggcacgataaaccgcaccgtgcggatagtgatgcggaagtgacagcagatttactactccttctcttagaaaagctagaaaatttaccactacctgtcattcgtcaaatgacaacgatttctggcagtctaaaaagctatttaccagagctcttatttgaaattgaaatgcgaaaagagcgagaaaacaagccacttgatccagcattcgtagaacatcgtggactagttattcgcaaaaaagaagtcgaaaagcccacctatagtagagcagatttacttgaatttcctgaaacagacgaagctaaaatggcactattcaaaaaagctggagcgccactttatgcaagaagtggtcaatttgaaatgatgatattggttatccaagcgatgaaatcaggacaacatgccttgattgaagcgggaacagggattgcgaaatcgttaggttactttttaccagctatttaccaagctttgcacacactgctggccctcagactactgcacagccaccaacaa

SEQ ID NO: 3398 - DNA, 1458 bp, Listeria monocytogenes 4b
  misc_feature (1)..(end): n can be any nucleotide: a,g,c or t/u
gcttgttattcattatttatgcagcctgctacctaagtgtcataaaaaatacatatttaactgatgcataagttgttttttatgtaaaaatccttatttatttaattttttatcatattccataaaatgcaagtgaataaaacagtataattattcattaaacctaaaaattattgattcttaataaatatgctcgtaataataatctcatactctaatttttatactcatgtcacgcaagaaaagaaagattccactgcttctctttttcctaattttatgctaaaataaaatctgttgaaattgattttatagtcaaaaacattcaaacatcctcgaaacattggatatcaacatggagaaatacccaagtccggctgaaggggacagactcgaaatctgttaggcggtgtatgccgcgccggggttcgaatccccgtttctccgtagaaataaaaaggttcacgcttaaaaatagctttgattgctatttttagacgtgaacctttttgctgttacttcttcaccgcaatactcacatacataccctcatccaactgccaattcttcaccacttcaaacccaaatcccgcaagctcttccttcaatttctccgcagaaatctgaatttccattggtgggccttttaaatcagtccctttcgtgtcaaattccaaactagcaaagtagccgccagtcttcacaactctactcacttcgcgcaaaacatctgcgagcgaatctgcttcatgtaacacgagcgatgcgagcacaacatccacggaatttgcctcaagtggaatatcatccatgctggcttctaacgtttctacattagccaaacctgcttccttcgcttttgactcaattaattccaacattttcgcatctaaatctaatgcaaaaactgtattatcaacgaattttgcagctggaattgttaaaaatcctgttcccgctcctaaatctaaaatacttgctgtttttccgattggcattgcctgcaaaaaatcctctggcgacagcacttcactccgctctggtcgatccaaataatctactttccgcttaaaaccagcttccccgtgatgattatgatgatgtttcattttagcactcctttaatgttgatgtttttcaatttctacgacaatactacctactgtttgtttgcttaaataatcttccatttgttgctccgccttattcatcacttcgccaatcaagcagtgcggctggctttcgctgtggtttttagggtcacaatggaaaaaggcgcccttcccttcaatcgcttgaatgacatcaagaaaactaatactacttgctggttccgctaacttatacccaccattgacgcctgttactgattcaataaagccagctttcactagcatcgtcaacactttagatagataagttggcgacacattccgcttggttgcaagttctttcaca

SEQ ID NO: 3399 - DNA, 1458 bp, Listeria monocytogenes 4b
  misc_feature (1)..(end): n can be any nucleotide: a,g,c or t/u
gaggaatactcgtgagaagagagaaaacgatggatacgttaattcgttcgattatgattaaatccaaacggaaaatggacgcaaaagtagctcaatttgggctgacaactcaacaagctagagttctagggtttttaaatgataatgcggcaaatgaaattatccaaaaagatcttcagcgaatcttccaaacgcgtggcgcaagtattactagcctcattcaaggactcgagaaaaaagaattaatttctcgtaaaccaagcattcgagacggcagagaaaaagtggttactttaactgaagaaggtaaacgaatagtggacgaatttaatgaatccttcccgcgtgaagatgataaagcgaaaaaaatcctttccgctgacgagtataaaatctttattgatctacttagtaaaattgatgacaatacggaataaaaaaatttaactatatagttagagttctaactaattttgagggggaaccaaaatgaaacactcagataattattatttaacaaaagcgagcattcctaaagcgatagcacatttatctattccgatgatgcttggaatgtctgtaggggtcatatataaccttatcaatgcgttctttataggcttgttgcatgatacgtcgatgttaaccgcggtgacacttggattaccgatgttcaccgttttgatggcgattggtaatatgtttggagtaggtggtggaacgtatatttcgcgcttgcttgggaaagaagagggaataaaggcaaaacaagtatccgcctttgttttatatggaagtttagtattaggaattatctgcgccatcttacttggctttttgattaatccagttactcattttcttggggcagatgcaacgagctttttacacacgaaaaattatacgttggcgcttttaatttgtagcccgtttattattgcgaattttgctttagaacaggtggttcggtctgagggagcttcgcgggtttctatgaacggaatgataattgctacagttgttaatttagtatttgatccattgcttattttgtattttgattttaatgtggtgggggccgcagtttcggtaggattagcaagtttattttcgctgatttactatgcttggtatttagagaagaaaagtgagtatttatcgattcgttttaaatggtttaaagcaacaaaagaaatcgttcaaaatgtgtttaaaattggtgtttcagagttgcttttatcgttattcctcattgtgacaacactcgttttaaatcattattcgatgatttacggggaaggagtagttgcaggttttggcgtggcgcttcgggtggtgcagctccctgaatttatttgtatgggactttacatggggataattccgctgttagcttataattacggttcgggtaatattgcgcggtttgaaaaagcaatacgggctactgcaattagt

SEQ ID NO: 3400 - DNA, 1389 bp, Listeria monocytogenes 4b
  misc_feature (1)..(end): n can be any nucleotide: a,g,c or t/u
tcaaacaagtaaaaaacatcgaaatcaatacagattctggtgaagttgaacttgatctaccgggtgattttaaagctatttatgaagcaagtagtaattcaggtagcgttaaagcaccaacgagtgattcaaataccgataaccgagtaacggtgaaaacaagttccggagatattaaaatcgaaaaataaaaaatcagtgcgctaattatttaattagcgcattctttttgttaaaaaggggtaaagtcagataaactgtttcatcaatttgcgcaagtgaaaggggaatggatgatgaattttcatattaggaaagcaactaattcggatgctgaagccattcagcatgtagcgattacttcgtggcatcatacctatcaagatttaattccaggcgatgtacaagacgattttttggaaaggttttataacgttgagacgcttcataatcgtatttcagcgactccttttgctgttgtggaacaagcagacaaagtaatcggatttgcgaattttattgaacttgaaaaggggaagagcgaactcgcagcattttatttactaccagaagtgacacaacgcggacttggtacagaacttttagaagtaggaatgactctatttcacgtgccattaccaatgttcgttaacgtcgaaaaaggaaacgaaacagcgattcatttttataaggcgaaagggtttgttcaagtggaggaatttaccgaggatttttacggttatccgctggagacaattcgttttaatttgaatcatcatgcgtttgaagaagaataaaaaaatgtctattctagttgaatgaatcaattaggatagacatttttttatttcgtagcggcttttccactggtagattttccaccgcgtaaaaagaagaagatgatggcaagtagcgccatgataactcctgcgagaatggatacgccaacagaaatgagcataccagaaacttggataatacttaaaatgatgactgctgcaacaaccccgtaagcgaagccccatatagcaaatgtgaagtaactagcttttttgctaaacccgtaaaaaatttcgcctaacgtagaagcaactaaaattacaggagctgcaaaaagtatcgctgaaaacacaagctgtggcgtaacgttgtcatagaggattgtttcgactaaaagcgcagaaaaaattcctaaaacaaaaatcgataaataagcaataataaaacgcatcaaaaaaacctcctaaagtacactatattatagcataaattaggaagttagcttaacatctagcccaattatcgtcactatgctttacgatacgtgtaattccccgaatcaagttgaaaatgagtatcgatacatttagaaaaacgataaaaaataca

SEQ ID NO: 3401 - DNA, 2309 bp, Listeria monocytogenes 4b
  misc_feature (1)..(end): n can be any nucleotide: a,g,c or t/u
agaaatgatggagctttctgtcattgaaaacttacaacgcgaagatttatctccacttgaagaagcggaatcatatcagttccttatgaaaaaattgggcttaacgcaagcaaaattagcagaacgcgttgggaaaagtagaccatatatcgctaactttgttcgtcttttgacattacctgaagaagttcaagtaatgttacgtgatggctcattgtcagctggacatggccgagtgttactaggtttgaaacttaagaaaaatattatcccaacggctaaaaaaactgtggcgcaagggctgacagtacgacaattagaagatgtggttaataatctaaatgaaaatgtttcacgtgaaacaattaagccggctagagttcctatctttatccgtgaaagcgaaagccaattacgtgataaatttggtacggctgtctcgattaaacgtcgcgataaaaaaggtaaaattgaaattgaatttttatctgatgatgatttagatcgcattttagagattttagatattcagtttgatgatgaataggttgtgatgtttatggaaaaaaagcatttcgatttaaatgatattgtggaaatgaaaaagcctcatccttgtggtaccaatcacatttaagattatacgcataggggatggatattcaagattaagtccctaatggttgcggtcatagttgagatgatcccccgccgcgatttcgaacgaaaagtgaacaaaatcttagttaaagctgaacaataatagggaacagacgatgaattaggtcgtctgttctttcttaagcctctgagttgaagtttgtctcttccttctttaaaatataaatagtatcatttaataattattacaaataaaaaatgatatagaattgttatggaggtatatacatatgacagatagaaaaaatttaacgacgaatcaaggtgtgccagttggtgataaccaaaattcagatagacagcgggacgtaaaggaccaactttgatagaagattatgtgcttattgagaaattggcacattttgatagagaacgagtaccagaacgggttgtacatgctcgtggtgctggtgcgcacgggaaatttgtcactaagaaaagcatgaaaaaatatacaatggctaaatttttgcaagaagaaggaacggaaacggaggtttttgctcgtttttcaacagtaattcatgggcaacattctccagaaacattacgtgatccacgcggtttctccgttaagttttatacagaagaagggaattatgattttgtcggaaataatttgccggtattcttcattcgtgatgcgattaagtttccggatgttattcattccttgaagcctgatccacgcacaaatattcaagatggcaaccgttactgggatttctttagccttacaccggaagctacgacgatgattatgtacttattcagtgatgaaggaacgccggcttcttaccgggaaatacgtggctctagtgttcatgcgttcaaatggattaacgaagaaggcaaaacagtttatgtaaaactgcgctggattccaaaagcgggaatagtgaacctttcgacggagcaagcttctcaaattcaagcaaaagaatttaaccatgcaagtcgtgatttgtacgaagcaattgaaaatggagactatccagagtgggatttatatgtgcaagtgttggatccgaaagacttggataactttgattttaatccattagatgcaacaaaagattggtttgaagatgtatttccttatgaacacgtaggaacaatgacgcttgaccgcaacccagataatatttttgcggagacagaatcggttggttttaatcctggggtacttgtacgtggaatgcttccttctgaagaccgtttattgcaaggtcgtttattctcttactcagatacgcaaagacatcgtgtagggccaaactacttacaactcccaattaacagtccgaaagcgcctgtcgcgaacaaccaacgtgacggtcatatgccgtttaaacaacaaacaagttcgattaattatgagccaaatagttacgatacagaaccaaaagaaaatccagcgtttatcgagccagagcaagaaatccgtggtgatatttctgggcgcctgattgcagaaaaaccaaataactttggccatgcaaaagaagtatgggatcgttattcagatgcagaacgtgctgcactcgtgaaaaacattgtcgatgattggtcacaagtacgtgatgatattaaaatccgcaacttacgtaatttctatcaagtagatc

SEQ ID NO: 3402 - DNA, 2146 bp, Listeria monocytogenes 4b
  misc_feature (1)..(end): n can be any nucleotide: a,g,c or t/u
ctcatctgacaatcactctagtgggaggtaaacaggcgaacggagacaaggggtgggcgtgggggatgcaggagggaggagatggttagtgggatgagaagtgaatgtcgggtgagggggacgggtgagtggaacatttaagcaggggcattaatggatattcagaggttaacaggagccacccgaggtgctatgttaagtggtagccaaccagcaacaggtcgtccagttcttctagggatcacaaaagcttcccttgaaactgactccttcttgtgtgctgcatcattccaagaaacaactcgtgtcttggcagatgctgcaatcaaaggaaaacgtgacgagcttctaggacttaaagaaaatgttatcctaggtaaacttgttccagctggtacaggtattggtcgttaccgcaaactgaaatccgaagttatcaaggaaacagctgaagtaactgacgaaatcacaaatatttaatcttacaaagccaagtgtgccgttcgcgtacacttggctttttttgttatactctagaaaaaggagtgaagtgatttgattacacatgttatttgggatatgggcgaaacattaaacaccgtaccaaacacaagatacgaccatcaccctctcgatacttatccagaagtagtgctacggaaaaatgccaaagaaacgcttgaaaaagtaaaacaacgtcggattcaaacaagcaatcctcagcaataccgcaacaagtgacacagaagtaattaagcgcgtattaactaattttggtatcatcgattattttgacttcatttacgcctccaattccgaattacaaccagggaaaatggaaaagccagacaaaactatttttgatttcacactaaatgcccttcaaattgataaaacggaagcagtcatggtcggaaatacattcgaaagtgatattattggtgcaaatcgtgcaggaatccatgcgatttggctgcaaaacccagaagtttgtttgcaagatgagcgcctacctcttgtcgcgccgccatttgttatcccagtttgggacttagctgatgttcccgaagcccttttactattaaagaaaatttctgcttgacctgtaatgcattacacagagtaaactaaaaaagtagaagaaattagccggaaggggcgaacgaaatgactgaagtgaaaaaacaatttccaaaaggatttttatggggtggagcaactgctgcgaaccaagttgaaggcgcttacgatgtagatggtaaaggcctttccacagcagatatggtcaaattcattccaaaagaagaacgcacacaagatcatgcattagatgtatctaaagcagaaatcgaagcaattattgcagggaaagtagaaggtagattccctaaacgtgatggcgttgatttttatcatcactataaagaagacatcgcattatttgccgaaatgggctttaaaacattccgactatcactaaactgggcgcgtatttttccgaacggtgatgacaaagagccgaatgaaaaaggccttgaattttatgataaagtgtttgatgaattattaaaatatgacattgagccacttgtgacactttctcactatgaaacaccactaaatcttactttaaaatataacggctgggctgatcgtcgcgttatcggatttttcacgaactatgcggaaacagttttcaaacgttataaaaacaaagtaaaatattggctaacttttaacgaaatcaatgttatttcacttagcgcatacactggtggtggcgtgcttttagaagacgcgaagaatccacttgaactttcttatcaagcaggacatcaccaattcgtagccagtgctcttgcaacaaaattggcgcatgaaattattcctggatcacaagttgggtgtatgttagcgcgcatggcgacttatcctgcgactaacaacccagatgatatcctaaaagcacaatacgaaaaccaacaaaatctatttttcacagacgttcatgctcgcggtgaatatccaagcttcatgaatcgtttcttccaagagaacgacattcacatcgtaaaagaagttggcgacgacgaaatcttgaaagcacatacagttgatttcatttcattcagctattacatgtccc

SEQ ID NO: 3403 - DNA, 1541 bp, Listeria monocytogenes 4b
  misc_feature (1)..(end): n can be any nucleotide: a,g,c or t/u
tatccgatagtctaagttcgcctagttcactagtttctttagttaaattaaatctcgcatccacagtagctttatccggattgactttactcggcatcgcttctagcattacctgtgtggctttgtctacttcaggaataatctctaactggtaaactgtattaccacccgctgtattaaacaccgctacctgactagttttttctgtctcagagaaactttttaaagcagtactaagctcaatatcataattaccttcttgcacaccatctttaaaaaaagtaatggttaattcacgtgtgcttgcattcaaatcccatttcgcttcagttgaaggtaagaaatctcctgttaaattagtcgttccaaagttgaatgaatctggtaaaaccgttttaaatgtatctccagctttgtagtttttccctgagaaagtaaaattcattttcagaactactgctccgccattttttatacggttagtcgcaccaagttcatttccagttccattttccacctttactgcagtaaaaatattatctgttataactgctttcagattcccttttttagagggttgttctgtaacagatggagttttttctgcctctttttttgttgaactagaagttatagcctcttctttatcagctaaagtgacgttataagtttgttcgtctaaagtatatcctggagcagccttcttttccttaacaatatattctccttctgaaagtgaattttctataattgtcccgtgttcagttatagaaacttcttttgtttctccagtttttttgtttttaatttcaaaagaagaaccattgattttttcttttgtatctttatcttctttgattattttaagcgttatcattgttgttttttcatcaacaatggttgctaatacaggcgacacgttttgaaaaacgagtaaaccaataattgcaacgataaaaaaacctctccatttcaccatatatttcattaagctgttttcctcctatgcaagttgtgtctgttgtataagacctatgacttgttgaattataacaatgggcgagaagtcgaaaatgttcttaaagaacaacaaagcggatttattgtgtctttttagtgaacaaaaaagtatgttttttgctaaaaatatactttttcaatacaaaaccctcttttcctgcattattatatggaattttttctatatataatagataaaaaagtcgctatcctgttaagaatagcgactacaattattaatcatttacttttttggattttcttagtaagaaaagtcctagtgtactagcgaataatccggtaatgattagattagctagggaattatctcctgttgaaggaagactttgtgcttttttcactgtggcttgttttgaagggtttgctgatggttttgttggtttagaaggtttaattggtttagtagggtcgacaacgagtggtgatttatttttctcatatacaaaggttactttttgatctgcttctttgtatatgccgactttattcgtagggtcttt

SEQ ID NO: 3404 - DNA, 2306 bp, Listeria monocytogenes 4b
  misc_feature (1)..(end): n can be any nucleotide: a,g,c or t/u
gcggaagaattaatcaaaaacaaaacatgcgaactgccagatgtaattggttgtcgtgatgatattatggttttcctaatttatcaagggctagaaagttcattagcctttaagatcatggagtctgtgcgtaaagggaaaggcttaacggaagaaatggaagaagcaatgatggcgaataaagtgccactttggtacattgaatcttgtaaaaaaatcaaatacatgttccccaaagcccatgctgccgcttacgttttaatggcagtccggattgcttatttcaaagtacattatccactatatttttatgcaacttatttcaccgttcgtgccgatgatttcgatttaacatcgatggtaaacggaaaagaagccgtgaaagcaaccatgaaagaagtaaatgataaagggatggaagcttcaacgaaagagaaaaacttattaaccgttttagaaattgcgaatgaaatgctagctcgaggattccatttccaaaaagttgatttgtataaatcgtctgctgatgagttcattattgacggagactcacttattccgccattcaatgcgattccaagtcttggaaccaatgtagcaaaacaaatagttgccgctcgtgaaaatggagagtttttgtcgaaagaagacttacaacagcgcggaaaagtatccaaaacaatcattcagtacatggatgatcaaggatgcttggaaggattgcctgatcaaaatcagttgtcactattctaaaaaagggcaaaacttgcttgtagtcacaatttgtgataaacttatttaagaaatactacgataactcagccaagcgtgggccaatgcccacgctttcgttttgcaaatctgtcaaagagtcacctgtggcagaagtaggggacgaattagctggaaaagcgtatctcttaaggaggctgaaatgagtaaagtactagaacaagtagaagcaattgttacaccaatcacggatgaacttcaactagaactcgtagatattgcctttgaaaaagaaggtccaaattggtttttacgaatttttattgacaaagatggtggcgtagatatcgatgaatgcgcagccgtgagcgaaaaagttagtgaaaaaatggacgaaaatgaccccattacacaaaactactttttagaagtatcttctcctggggctgaacgtccactgaagaaagagcaagattttgaaaatgcggtaagtaaatatgttcacgttacttcatatgaaccaattgatggccgtaaaatgtgggaaggaacgcttgttagttatgacgggacaacactcgttattactatcacggacaaaacacgcaaaatcacttgtgaaattcctaaagacaaagtagccaaagcaagactcgcaattcaattttaaaaagcaaagaataaggagctgaataaaaaatgagcacagaattattagatgctcttcatgtgttagaacatgataaaggtatttcaagagaggttttagtagaagcaattgaagctgctcttacatccgcgtataaaagaaacttcaaagatgcacaaaacgtacgtgtagatttaaatatggaaaatggttctatccgtgtcttagctagaaaagaagcagtagcacaaggatctggtttctgattcctcgccttgaaatctctatggaagaagcacacaaagtgaatccagtatacaaaccaggtgacgtcgtggagcttgaagtaacaccaaaagattttggccgtatcgcagctcaaacagcgaaacaagttgtaacccaacgtgttcgtgaagcggaacgtggcatcatttacgatgaatttatcgatcgcgaagatgatattatgactggtattgttgaacgtcaagattctcgttttatctatgtaaaccttggtaaaatcgaagcaattttgtcccaaaacgagcaaatgccaaacgaaacttatcatgcacatgaccgcatcaaagtatatttaacaaaagtagaaaagacgacaaaagggccgcaaatttttgtatcccgtacacaccctggcttactgaaacgtctttttgaaatggaagtacctgaaatctatgacggcgttgtagaaatcaagtctgttgcacgcgaagcaggagatcgttctaaaatctctgtttacactgcaaatgaagaagtagatccagttggcgcatgtgtaggaccaaaaggcgcacgtgtccaaacgatcgtcaatgaacttaaaggcgaaaaaatcgatatcgttgaatggtcagaagatcctttcacattcgtagccaatgcacttagccct

SEQ ID NO: 3405 - DNA, 2575 bp, Listeria monocytogenes 4b
  misc_feature (1)..(end): n can be any nucleotide: a,g,c or t/u
aaaaagtttggttgctttatatcgcagaggtaaaacgtagcatagtatctgtcaggaatttagtgtccctaattcaacttttggaaaatggataaaaaaatttaataatgatgacaatattgaatcgaacgaaatcttaaatatcttgcaagcgcaggaactaaaaaaccaacgggcgctattagaagaagaattatctatcttaacagaagcaattaatgtctttgaaaacccgccaattaaaaattgaatactatgttcaaagtgaaattatttatatcatagtaaagaaaacaaccgttctctatctaaaattaagagaacggttgttttttttagtaagaaatattttctattaaatgctttttgacaatttttagtcacatttagtctgtaatcgcttatattaatggactaattgggagttctaagtagatataatggtttttagttaggtgcagagatacgcaagaaaacacaggagggcttgggacaggtcaaaccatactacaaaggaggagatgtaattgaagaagattttacatattgttatcgcacttagtgtaatttgttcgataattttagtgccagtagattggtccgcaaaagcaggcggtaataataagcgagatgatcttattaaatctgtcagtttttataattcaaatggacaaaatgtaacggcgaaggaaaactataatgaaaaactaaattattttttagaagtagcttttggagggaattctttccaaaaaggggactattttaatattactttatcatgtgatgccttactgtatacagagaaagcctatgatttgaaagtggatattgacccaacagcggtaactaatgaacaagtagttggtaaagttactgtagaaacaattaatggatcaccaacattgcactttgtttttacagaagattcagagtctttttttataaacagctttgatgcgagttttaaaatacaggtgatgccagcgcatggcgataaaaacgttattaatctttcctatagtggcgctgcaaaaaactttaaaaacattgggacgagcagtgtggaatggaacgtaaatatggcagatgactggccgccagttggaattagcgatttttctaaaataagtggcgatttataccatgcgattttagtgtatgaaaagccgagtagtaaagtgaattacgaaacagaaattttggtatcgtatccgctttttgaaaaacgaattccacttggaaatgtgcaaaatattaaaattgaagtttgggatgaagcgaaggagatttatagagttggtgtagccggggtggattacggaacgattacatacgatgttggaactccatttgtaggcggtcctattttccaaatgaattgtactattccgttcaaagggatttctactaaaactcgtgttagttttgatattgatacgaatgtggacgggaaacctggaacaacagatccgtacttagttagtctttcttccgtatcatcagctacaaagtcgctggaattctatccagtgaataacgctgatacgaaaatgacagctgctttttttgggaaagtaacgacgcgctttgaggatgagttaggcaatccagttacttttgataattatagtactgtaacaacaccagggaaagtcaatcaagatggtaaatttgaaatagcggaaccttttttacacaattccgtccaaaacgtggataaacacgcctatgatacccttttggatactaataaatataaattattagaggtaacttctcctaataaactatctgaaacagcggataatttaagtattcaaataaagcgtggttatcagaatgatgttttatacaaaataaaagctctccaaaaacctgtcattagcgcgcttcctgaaatcgaatatagtaaaacagtgaataggaccatggaagagtttttggaagatgtggaagcaaaaacagatattccagctgatatagactgtgatttaacgaatgtgaaatggggtgttccgggggattacctagttcttataaccgcggtgaatgaggataatcaagcagcggatcctgttcctgtaacgattaaaatttccaaaaatcccgcaccagtcataacggtagacccggaaataatctacgataaaacagtgacgaaagaggagagcacattactaaatgaagtaaatgcgcgaacaaatgacggttcgacgataacttctaacattaacgacaaagtaaaatggggcgtgccaggcgattacgaggttactttgaacgcggtaaatgaagacggcgtggcagcggaatcgaaaacatttatcgtccgcattttaaaaagcccagcaccaataatcacggtagatcctgaaataacctatccgaaaacaataactaaaacggaagctgaactccttcaagaagtaaatgcgcaaacaaatgatggttcaccgcttgtttctgatatgaatgacaaagtaaaatggggcgtgccaggcgattatgaagttacgttaaacgcgataaatgaagacggcgtaacaccggaaggcaaacactttatgcgccg

SEQ ID NO: 3406 - DNA, 1657 bp, Listeria monocytogenes 4b
  misc_feature (1)..(end): n can be any nucleotide: a,g,c or t/u
agaattcgcgcttggaaaattagaatatcgtctaactccaaaagccatccgcgaagctcgggaagggggagaataacatgaagaaaaaatttatcgcgttattcagcgtattactactaactagttctcttttcttatctagctgttctttaccaggacttggaggcagttccaaagatactattcgcatcggtgcaatggcaacaactgaatctcaaatcgtttcgaatattttaaaagaattaattgaacatgatactggcctaaaagtagaaatcgtcaacaaccttggatcaactatcgttcagcaccaagcgatgttaaatggggacgtagatattactgcaacaagatataccggtacagatttagttggtccacttggtgaagaagcaattaaagatccagaaaaagctttagcagctgttaagaaaggttttgaagaacgtttccaccaaacctggtttgattcttacggttttgctaatacgtatgtgtttatggtacgccaagacactgcgaaaaaatacaatttaaacaccgtaagtgatatgcgaaaagtagaaaatgagctcacagctggtgtcgataattcttggatggaacgtgaaggcgatggctataaagcattttcaaaagcctatgatattgaattcaagaaaatatttccaatgcaaattggcttaatctacacagcgcttaaaaacaatcaaatggatgtggcgcttggttattcaacagacggacgtatcccaacttacaatttaaaactattaaaagatgataaaaaattcttcccaccatatgatgcttcagctctagcaacagatgaaattttaaagaaacatccagaattaaaaacgactatcaataaattaaaaggtaaaatttcgacagaagaaatgcaaaaacttaattatgaagcggatggcaaattgaaagaaccgtccatcgtagcgcaagaattcttgcaaaaaaataattactttgaaggtaaaaactaaggaggtgccaaaagatggacacattaaaacaattaattgattattaccaaacaaatggaagttatgtcatggaagagttctggcggcatttcttgatgagtgcttacggagttatcttcgcagcaatcatcgcaataccgctcggagtatatattgcaagaaaaaaacgcttagctggctgggttatccaaatcgctaatatcatccaaacaattccggcactagcaatgttagccgtacttatgcttataatgggcttagggacgaatacagtcgtcttatccttattcctatattctttactaccaattctaaaaaacacctatacgggcattagaaacgttgatggcgcacttttagaatctggtaaagcgatggggatgacaaaatggcaagtactacgcctcatagaaatgccactcgcattatctgttattatggcaggtattcgaaatgcacttgttattgctattggtgtagcggcaattgggacattcgttggagcgggaggtctcggtgatattattgtacgcggaacaaatgcaacaaatggtactgctatcattttagctggtgctatcccaaccgcagttatggccatattagccgatgtacttctcggttgggtcgaacgcacactaaacccagttaaa

SEQ ID NO: 3407 - DNA, 1891 bp, Listeria monocytogenes 4b
  misc_feature (1)..(end): n can be any nucleotide: a,g,c or t/u
agtaccacaagctactatcacgaaccaaaagtaccgttctatcggacttggaacatttggttggcaccatctgcttgctcttaaaaatatcgcttgggactcagaagaagcggagaaatatgccgatgaattatatgaacaaattaactatttagctattcgcgcaagtaacaaactagcgcaagaaaaaggtgcttataaagtctttaaaggcagtgactggaatactggagaatacttcgcgcgtcgtaactataattcacctgaatggcaagaattagcaaaagaagtagcagaaaaaggtttgcgtaatgcatatcttgtagctgtagcaccaaatatgagtacagctcaaattgctggatccactgcttcaatcgacccaatttacagtgcattctactatgaagagaaaaaagattaccgtcgtccagttattgcaccggacttaaacttaagcacatacccatactacgaaaaaggtgcttacaaagttgaccaattcgcaagcgttcgtcaaaacggtcgtcgtcaacgtcacgtagaccaatcactaagctttaacttctatgtaccaagtggtatcaaagcaagtaaactacttgaactacacatgacggcttggaatgaaggacttaaaacaacttactatgttcgctctaacgatatcgatgttgaagagtgcgaatggtgctcaagctgatacatctctaaaatactttacacttagtacaaaatgaaagggagggcttgcctagatggctaaccaaaaagaacaactgacacgtattaaaattttagaacctttatttcctaatcgttctacttcaatcataaacggagaaactagtgggattttaaattggaatgacatcccgtatccttctttctaccgtgcgtataaagaactttctactaactactggattccagacgaagtagacatgaaaagcgatgcaaaacaatatcccgctctttcagaacaagaaaaatatgcttttgatgcaatcattggcttacttgcaacactggattctccgcaaacacgttttatttataatattgcggaatatattaccgatccagctgttcatgcaaacgcagcgattatcgcgcaacaagaagtcattcataatgagagttattcctatgtacttgcatctattaccaatttacaagaacaaaatcgcgtatttgaacttgcgagaacacatccgacaatcatcaaacgtaatgagccaatcatggacgcatatgatgacttcatgaataacaaaacaggtgaaacacttgtaaaagcattaattcaatcttctattttagaaggaattaatttctatagtggttttgcttacttctacaatcttgttcgtcaaaataaaatgactggaacagggaaaataattagctttatcaatcgtgatgaacttgctcactcgaagttcatttcagaagtaatccgggcaatccttggtgaaaacccagaattacaaacagaagagctagtagaatacacacatgatgctttccgccacgctgttgaacttgaaacagaatggtctgaagaagtgttacaaggtattgaaggtattgatgtggaagaaatggttgactacgtgaaatatcgggccaacaaaatgctaggaatgcttggtattccagaactttatccaggacatagtgataacacaatgacatggattaaagcttacgcagataactttacagaaacaaaaaccgactttttcgaaatgcgcaattcaagctataaaaaaacgaatatggataacggattcgacgatttatgagaattttgttagcctatgattctctaagtggtaatacgaaaatggtggctgatgaaattgaagagattttacaaagcgaagga

SEQ ID NO: 3408 - DNA, 1412 bp, Listeria monocytogenes 4b
  misc_feature (1)..(end): n can be any nucleotide: a,g,c or t/u
gcttatatttgaagtataacttaaatggaagcgcattcaaaaatgaaaggtcaagtatatagtcagaatagttttatttttatagttttctattatttatttaataattcggataaaaaatcacacattagttgcgttcttctatctaattctgctaaattgaaagtaataaattagtaggaaagccgggttattgttgtggataatttagagacagatcgattaatattaattaattacacactagaaatgattcaggcaacgattaatgggacagaagctttggaaaaagcaagtggctaccatgtgtcacctgactggccaggaattgatttctttttttatttaccatatgtattagaaaacgtgaaaaaagacgatagaatgattaaatggacacgcctagtcattttaaaagaagaaaataaaattatcggcgaaattggtggacaaggaaatccggacgaaacgggcgaaatcgaaattggctacagcatcgtaccagattatcaaaataaaggttatatgtcagaagcgcttataggtatgattgcttggctagaagaacagcccgccattcatcgcatatttgccagaagctacgagcagaacatggcatccatacaagtactaaaacacaaccatttcgtacatatcaaagaaaaagatacagaagagaaacaaggaagagtgatgatgtgggaatatccaataaaacgaacctgattattattgcatctggaaaaccaaaaatatgggataagtcgccagatattggtccagtaaaagcaagcgaagtgtatacaggaacatttcatcgtttaagtagagcctatgcggaacagtttgcaaatgaatatttaatattatcccccaaatatggttttttgcgaccggacgatattatttcaaaaacatatgatgtccgcttcaccatgaaagggactagtgctgatacgattcaactcgaggaattaaaggagcagtggcagaaactacaaataaaccctaccgaaccaattccgatgttaggcggcaaaaagttcagagggttattgacgagcatcacggatggtaagcaagtatttaatttcccacttgacggggcatcaggaattggtgtcatgcagcgaaatttaaagcaagctatcgaaacaggaattccattaaatcgtactgagtaaaagaagtgcagcagttatgagcaaaaacataacgcccatattaacatttttacggatgaagaaataaatcgtttgtaacgccatcaaaatagcgagtgacagagtgataatgtgtagcataaatcgacatcctaaatagtaagcggaaaacttaattaaactttccagcacactgtggccctcgncactgctgtagcttgactttagttcnnccaacaaggttagcct

SEQ ID NO: 3409 - DNA, 1220 bp, Listeria monocytogenes 4b
  misc_feature (1)..(end): n can be any nucleotide: a,g,c or t/u
taaaagtagcggataatgcaagtgaaataaatgttcaagcagccttatctaataaaacgagcattttctatttttaccaaaagcttattgcattacggaaagaataccctgtcattcagacgggtgattatacgccatattggacggatgaagatttgattatagcctataagcgttcaaatgaaattacttcgcttctttccattcaccattttggctcgactacgaaaaaaattcaactaccaaatgagtttttaaatgctaaagtacttctttctaattatgaacgtcaaacaatcagttctgagctggaattagcaccttatgaaacattaactttaattcgataaaaaaagcctgagaaacaattctcaggctttttagcgtcttcttgcaaaatctataaaacggaatttatccagtcggtgacgcgattctgtgtattgaaaaagtgttgtatcttttaaaaacacggtactttttacgacaactacatgcgtatcaccatgtaatgctaagtattttttatcttcggcgttcagcggttccacggttatttctttttgagcataactgatttcatagcctttctcattttctaagtattgatacaaagagtcttctaaaatctcattcgcaattggttcagttttgtctaataaataatcgtaatccaaaatagttgcctctccttctaaatagcgcactctgaggatagctaagcagtttgagccgtgcggaagaccagcaaaatcagcaattcgatctggtaaagtggttcgttcatttcggatgacttccgttgtcgcattcatatgttcggatttttgtaattccttaaaactagttaaaccagagactggaaaagaatagcgttctcggtcaatgacaatcgatccttttccttggagcttttgaatacagccgttttcaagcaataatacaagtgcttttctaatggtctcacgggataccgaaaaacgcttcgccaggacattttcacttggaagtagtgtgcctgctggataaacgcctgatgtaatgtcttgctctaattctaaataaatgtcaaaaaacttattttttttattcaaatttactcacccaaggctattgtagcacatttacccataattgtaaccgaaatttgctagctcgctttattaccaaaatcacgtgaaatttggtacactattagtagtaaggtctgaacatgtgtt

SEQ ID NO: 3410 - DNA, 1162 bp, Listeria monocytogenes 4b
  misc_feature (1)..(end): n can be any nucleotide: a,g,c or t/u
ctcgtagagctctagcagcatgtcgtatgggcgacgtgtgctggaagatatgcatcggaatgaaccattcaccttctgaattaaagcgtttcgttgcacctgtaatcaattttgaaccagtggatattgcaccgtcatacattagttgaagtgcatagttcggaataatatcatcactgtccacaaagcaaatatacattctattcgcaagacgcaacccataattcctagccgaagctggtccaccatttggttgagtatgcaactgaaattttggcttatctgatatatattctgtcaccatttctattgttttatccgttgaaccatcgtcaattaataaaacttcgtacatgtcaaatgtttgctcatggatgctttcgagcgtttccaggattacttcctccacattatataatggaataataatacttattcccgcttctcgattcttattgatgttattatttgaatcactgttcatttatagactctccctaattcaaaatatatgtcatctattatctccagttttccttctaaacacataatatgttcctgcaaaaataattataacacccaaatcaaaaatagcggagacatatttcggtattattggttcagaagcaacatgtgagacagtgaagcccatatcttgcttctcttttttaacaccattaacatacagtgctccatacggataaagatctactgcatctggagtataggtacctaaaactaatggtttttcagggtttttattttccacttgatagacttcaataacatattcagttttaccttttggcttttcatttacattaatttggtaatttgtagcttctacaaaatctgatccagctataacttcatcgtaaatatccttcttatttgtcttatctacaactttcaaacgatatttactagcttcatctggctcttttagaaccgctatttggatagaattgaacggcgaatctacattaaacgtttgcttaacaatttgtttgctagtaacaggaagatctatatgcgcataactttgttttacaagatatttattgatatcctgtgactcgcctgctaccgaatttccaataaaagcaaaagcaactgtacttaataaaaatacgcagaaactcgcgattaaaaagccttttct

SEQ ID NO: 3411 - DNA, 1997 bp, Listeria monocytogenes 4b
  misc_feature (1)..(end): n can be any nucleotide: a,g,c or t/u
gcattagtcaatattctttctaaaggccggaggattttgtaaaaaacgataagtagataataaatcttttaaattacctgaaatatagaaactaaaagcaataatcggtagataccagtaaagcaataatctggttactaccggtgtggctaatcctactggaaatccatctagtattggtaatgttttgaacggtaagtcaaagtccatgaataatattgcttgtagaaacaaacaaataactactaaaatgataagtttattattcttcatactagtaaaaatccttttttataaaggtattagaactaatcaagtataggataaatgctaccgcggcgtttggaattagaatgaacggtatatcagaactaatagaaccattttgtaaccaaagatcaaagaaatttaaattgtgaagaggtgtccagtatataccttctaaaattatccaatcaataagataaacaatgcatatcacgaaagctccaaagataagcgcttggccagttgaagtagttaagtcatatataattctgaaaagaaaaccaatagctaaataaaagagaacaagtagcaagaagtaaaaaaaattccactataaaaatgagtagcagtgagcaatttattacttagaaaaatgaaagaatatagcaaatttacgctaagatataaacctacaaatagtactgttgcaataactgtatctttcaatattttatgatagaatcgtaaacggtttttttctctagctaaagcaacaatttgttctttttttgaaaatagtagtaaaaagataagatacgggaaaacaagcatcaagcaaagggatttgattgagatatacccatacaaactaccattcataatgagaacaagttctctgtttttagggaaacttaggtactccatgttttgtgtgaaccaaaaaacagaaaaaaagaggaacatggaaaaaattagaagaaaatatctactctttaacatatttcacctcatataagtaaaggacaccaacaattatcaaaactattaaactgaaaactagaaaaataggcaaaattatttcaaagccatattctgtaaaaggttggaaaataaacataattgaattgtttggaagtatcatcagaaaccaaataaaaaatgcagctggatacgcaaattttttattcaaaaagaacagactggagctagtagcgataagtccagccattccggccattaagcaagccataaatccaaaaccaaaatctgctaagtaggggttttgaatgctaaaatcaaatagagtattaagcgatcctaatccatttaaccccattttataagtgccacctaagaatacaatagaaactaaaataaaatttaataataaagttgtaagcatggtgataaaacaaagaataaaacttacagctaatttttgaagaatataagcttttttccctattttattaataataatattacgaactcctgtctgatattcctgaatgggcgagtctgctccgagtaacagacttaaaacagttaagaaccaaagtaataatatttgagtgatatgacctcggcttgaacctgcaagaaaaaatgcaaaagcaggatgaatattaactgcatctggctttaacattatgtataattgaacgatttcaatacaaggtataaataagattaaaatgaacatcccttgagtagttttattgttaattaagtaggtaacctgatttttcattttatgtactccgtttcgttattttaaaaaggaaagggagttaaatacatccctttcctggttagaataattaccaagtttcctcatcccaaataccatcgacatagtatgttttggaattataattattattttcagcagctaaataggttgtatttttattagcgcctttataagcgccgcaataacgtgtttttgcaccttgtttctttgcgagcacagtggcggctgctcaggcatcgatctggtggctaacgaa

SEQ ID NO: 3412 - DNA, 1407 bp, Listeria monocytogenes 4b
  misc_feature (1)..(end): n can be any nucleotide: a,g,c or t/u
aaaagacgaaattatggaaatgtacttaaaccgttcttactttggtaatggggaatggggagtagaaaatgcttccttaaaatattttggtaaatcagcggcagacttaaacataccagaagctgcgacaattgctggattgcttcaagctccaagtgcgtatgatccataccaacatatcgacaaagcgactaatcgccgcaacatggtattaaatgcaatggtcgaaacaggcacaatttcaaaagcagaaggcgataaatacaaagctacaaaaatagttttaaatgatcaatcaaaagatccacttgcgaataaatatccatggtacgtcgatgcagttattaatgaggctgtaaatgaagcagatataacgcaagatgaaatcatgcaaaaaggatataaaatctatacggaattagatcaaaattatcaaacttccttagaaaatgtttacaacaatgatgggttattcccttctaatgcaaatgatggcacactagttcaatcaggagctgttttaatggatccagctactggaggcattagagcgcttgttggtggacgcggagaacatgtcttccgtggtttcaaccgggcgacacagatgaaagcacaaccaggttccacaatgaagccacttgcggtatacacaccggcgcttcaatctggttatgacgtggattcaatgctaaaagatgaaaaaataacctacaaaggtaactacacaccaaccaatgttggcggcgtttatagtggagaagttccaatgtataaagctgtagccaactcgattaatgcccctgccgtttggttacttgatcaaattggtattgataaaggtgtaaaatctgtcgaaaaatttggtattacagttccagaaaaagatagaacgcttggacttgcactcggtggtatgagtaaaggtgcttcgccagtagaaatggcaacagcgtatgcaacctttgctaacaatggtgccaaaccggaatctcatattattactaaaattgtcgatccatcaggcaatacagtttacgaaaatgttcctaaaactaaacaaatcatttcagaaacagtatctaatgaaatgacttccatgcttttagatgttatcaatacaggaactggtcaaagtgcagctgtttccggtcacgaaatggctgggaaaacaggttccacgcaagttccatttgatgatacaagcggtactaaagatcaatggtttgttggctacacgccaaacctagtcggagccgtttggatgggatatgataaaactgacaaagagcattacctaactacaaccagttctgctggtgtttctagtttggctcactacgtaatgaatagtggtttgcagtatcagaaatccgcagactttagtacgaagagtgctgcacaaga

SEQ ID NO: 3413 - DNA, 2501 bp, Listeria monocytogenes 4b
  misc_feature (1)..(end): n can be any nucleotide: a,g,c or t/u
tattcgtaaaagagtttaattaagtgaggccgacgccctgttgctcctcgtgggccaatgtcggaaatatgtgatccccatgttgatatgagcaaggtacagttagcattgttagcaaaaatgcagcaaaatctggccaacttcttttcatcttaaaccctcctactctctgtaagcttaacataaaacaagccatgacaacaaaaaaacaagctacattcatagcttgtccgaggttaaatcttaattaaatttaaagcaaaaagggcgataagtaaaacattgaatagaatcgcaatccatttttcatccaggagtttatttaatcttgtgccaattagcgcaccgatgattgcccctggtatcatgtaaataccaatcgaaaagtcacttccaccaatgattgcataggaaccgatacttgcaagggacgtcagtaatgtcacataactggatgtcgcggatgccgttttttgattcaacatgaaaattaacagcaaaattggtataacgattggcccgccaccaataccaaataagccagctaaaaaaccgataattacaccgaatacatatggaattatccgatattcacttaaaaaatgtggtttttcattatgtcgtttctttttccaaatcattatccctagtaaaacaacgattaatgctccatacaaaaagcgatagactgcttcaggcaacatttgattcaccattgcgccaagaaaagtcgttggaatactagttacggcaattttcagtgccaagcctacattcccttgctttctcttgtaataaatactacaagtgaaaatcgccatcgtgaacacagtaagagccgaactaaatgctgctgttccttgagaaacacccattaagagtagaattggcaaaagaataactccgccacctattcctaaaaaactccctacaacacttgtacttagtgcaattagaaagtacgtaattatatccattatactttacctctcttctttcaactgtttcagcataacatatttccaaaatttaaaagtactaaaaaaagacaataagttattgtcttttgcattttaaatactcggaatcggttccacgatcaaatcatttcccgtattatctatataggttactttcattgcagataaatcagcttcccacagtctgacacctgctagcccagctagtttaataaatatttcaaaatctatttttcccgcttgtgcttgtttaattgcatctttcagtctgtcgcgtgaaatttcttcggagattggcatagaaactccatttaacttggattctacttgattatccatttcatcccaaaatacataaatacctttttcgactaaaaattgatatttagtacgcctacattctttaaaactttgaactactttaggaaaatctccggcgtttttttcacttgttgctgcttgtaaaattgtttgttcattaatcataactagtctccaatcatttaggtctccctaaattatacacgatttctagttaaagctaaataagtggtttttcttctttatatgtttcgattaatgcttcctctaaatcatagagtgaatcattcgtttggtctagcgtataaccatgatctaacgcaaaaataataatcgcatcccgccgattttttgcataaagaggtggatattctgtatattttaataatctacttgcttctaaaccagttaatttaaatccaaaagaaagagcgatcgtccggtcgcgtgacggtcttctaacgccactgaaaatttggtatccatatgtttcatggagtctcgccgcacgaatgacgcttgcttttgttaattttttctctgctaataattcttttaaataggtaaccatttcgcttgatttaaattccgcctcgttttcatctaatacttggcgtaaattggtcgctttttttaattcatgaagtaacttacttgtctctttttccccatccataaggcacacccccgactgtttttttcattatagcacgaaatatgtacccgactactatgcttcatgctataattttactataaagtatagaaggggttttagataaatgggagaaatgacactcgcttttatagaagaacaatacaaagaattagataatctaaataataaagaaaaccctgctgtgctaacgagaaatacatctactggagaattatttgtccgtaaaataattccaagcagttttgcccctgtgatcgaacagcttaaagatttatctagtaaatatttgccaaaaatcgaagtgatgattccaaatggcaatcaattaattgtttatgaagaatacataaatggaaaaaatttggctgatttaatgaaagcaaatgctacgtttgatgcggatgaagttacgcggttaatgctgatgctatctgatgcacttacagaattacacgctaatgcgattattcaccgagatattaagccatcaaacattatgatatctagcgacggcgtattaa

SEQ ID NO: 3414 - DNA, 2008 bp, Listeria monocytogenes 4b
  misc_feature (1)..(end): n can be any nucleotide: a,g,c or t/u
cactgatgggcactgtcgatgctgttcgagcggccgtcagtgtgctggaaagagttttcgatttatctaggtttttattttgctaaatactaacaaaaaaggagaacaagatgaagaaaaatatttttaaattgatgatggcgttatgcgcagtactattaattgcaggttgcggtaacagtacaactgcagacaagaaagagacaaaagaaactaaagaagatggcactgtgacattttatgtagtacgtcatggtaaaacaatgctaaacacaactgaccgtgtacaaggttggtctgatgcggttcttactcccgctggtgaagaagtagttaaaagcgctggtaaaggcttaaaagacgttgatttctctgcagcttacagcagcgacagtggtcgtgctatccaaactgcaaacttaattttgaaagaaagcgataaatccgctgataaagaagtacaaactgatccacgtttccgtgaattcaattttggttcttatgaaggcgatttaaatgaaaatatgtggactgatattgcgaaaagccaaggtaaaactttagaagagtggcaaaaagctggtatctcgccaaaagattttgctgatagtgtagcagctcttgataaaactcgtgtgaaagaaggcgaaaactggcctgctgaagactatgcaactatccaagctcgtctaaaagaaggtttaacagatgttgctaaaaaagaaagcaaaaatggcgatagcaatgtattactagtttcccacggactaagcatcggtgcgcttcttgatactatcgaaccaggatacaaactgcctgcagaaggtatcaaaaatgcaagtgtaacaaaaatcacttacaaagatggtaaattcactattggtgatgtaaatgacttaagctatgtggaaaaaggttctaaataaatagccagacaaaaagcccaaaacaatttattttgggcttttgttttactaaatatagacttgtgtttcttccttacaattactatacttagaaaaaaaggaactacggaggatatctagttgaagagacgtacctatgttattattactggtttagtacttatttttgtcgctggtgctttttggattacaaattctactaatcaatctgaccaaaaagccactcaaaccgagccactaaaaaaaacaagtccagctaatgttaaaaccatttcatcagaagctaagaaaaccttgaattccctagcaagttcaggagctgacaaagcttctatttccgatttaaatcaattaattaaagaactaaaatcctatccagttgaaaaaaatgattctggcgcctatctccaaaatctcacagcctgtttagaagctgtaaaatcgtatacgaccggcaaaacagatgaaaaaacgcttgggaaagtatatcctgcttttcttgcaagtgaacaaaaactatcagccatcgaaaaaacaaatcaatatgattggttttatgccgcagccgcaaccaatcaacaaggtttgaaagaaaaaggtgttgtcactttgaccatggttggcgataattcatttggaacctatcctgaaacgcccgaacacctcaaattcgataacgtattccaaaaaaacaacggcaataatacctatgtttataaaaactgccttccttggtttaaatctgatgactacactgtcattaacgctgaaagtgcctttacgaatgcaacaaaagcagaaaataaaaaatggcgcatcaaaagtgaccctgcacacgtcgcctttttaccagcgagcggtgtagaagcagcaaatttggccaataaccatacaatggattacttccaagttggttacgatgacacattaaaggcttttaaagagaataatattcctgttttcaataccgacgctccacttgaaacaaccattaaagggatgaaaactgttctactaggctacgattgccgtatgagtcagcaatcccctgcttatcttgaaagaattgtaaaagacgtgaa

SEQ ID NO: 3415 - DNA, 1683 bp, Listeria monocytogenes 4b
  misc_feature (1)..(end): n can be any nucleotide: a,g,c or t/u
acatttaaaaacacgtccaaaaaaatagtaaaaaaagcaagtagctcaggctacttgctttttgtattatttagattctggttttttcgttttaggatagaattttttctctgcttgtggttttttatcgccttctggttgttcttttttctcaagcaaagctttacgtgataagttaacgcgaccttgttggtctacttcgataactttaacagtaacttcatcacctagttttaggatatcttctactttaccaacacgttcatgtgctaattcagaaatgtgaactaagccatctgtacctttgaataattcaacaaatgcgccaaatttttcgatacgacgaacttttccagtataaacttctcccacttccacttcacgaacgatgtcttcgatgatagcaattgctttacggttcattgcttgatcttgagaagcaatgtacactgtaccatcttgttcgatatcaatttttacgccagtttcatcaataattgcattgatttgttttccgccaggtccaataacatctttgattttctcaggtttgatgttaagtgtaatgatttttggagcataagcagaaagttcttcacgtggtgcgctaattgtgctagtcaagtgttctagaatgtgtaggcgcccttcttttgcttgcgttaatgcttcgtccaaaatttggcggcttaagccatcaatcttgatgtccatttgaagtgctgtgataccatcttttgttccagcaactttaaagtccatatcgccaaagtgatcttccataccttggatatcagaaagaatggtgtaatcatcgccaagtttgacaagacccattgcgatacctgcaactggcgctttaattggaacaccagcatcaagcattgcaagtgtagaaccacaaatacttgcttgcgaactagagccattagattcaagaacttcagatactaaacggattgtgtacgggaattcctcttcggaaggaataacatattgtaacgcacgttcacctaatgcaccgtgaccgatttcacgacggcctggagcacgacgaggacctgtttccccaacactaaattgcgggaagttataatgatgcataaagcgtttgtactcttctgtccctaaaccatcaatgatttggtgttcacgaagcggtgccagtgtacatacacttagagcttgtgtttgaccacgagtgaataaacctgaaccatggacacgaggaagcataccaacttcagaagaaagtggacgaatttcgtttactttacgaccatctggacggattttatcttgagaaatcaaacgacgcatttcgtctttttcgatcatttcaagaatatgagctacttcgctaagaatttctgcttcgttttctagttcttttgctttatagctttctaaaatttcttcttttacatcttcaattgctgcttcacgtgctttattctcttctgttttgatagctgctttcattttgccttcacttgctgcttttacttctgcttcaagttcaggatcgcttacgaaaagttcaatttcgcgtttttctttaccaactgcagcgataatttgttgttggaattgacaaagacgtttaatttattcgtgaccgaacatgatctttccagcacacagtgncccctcgaacatgcgtggtgaagttaccgancaggg

SEQ ID NO: 3416 - DNA, 2034 bp, Listeria monocytogenes 4b
  misc_feature (1)..(end): n can be any nucleotide: a,g,c or t/u
tggattcatatctggcgtcgaatctacatcggtaattgctccgtctaaagtagaatcaccattaaagttagaaaatgaaccgatttctccagccatgtaaaagtctactgcgctataagtcccatcatctggcatgccgatagctttcatgtacatggtcgcatttgcagttgcacctgatgccatgcctccagaaagtgtaatggagtaaactttgatatcactccacacaccgccaccactaggtacggttgtttcgtatttccatttatcattcgtagttttgaaatcagatgtatcattatttagttcataacctgctggtacataggcataaacgacaacatcttttgtataattcccttgattaatcgctgtatatgttacgccaactgtgcttccttctgatatagaaacgggcgtagttgtgctactaacagcaccaatatatttattgtttttatcgtaagtggaactaatttttgtcgtaattgccatgtcataaacatctttcccacttggtgttacagaaccagatttaccttcgccgcctttagttgggcttttagtaacattagtcaaatctttcgttggatctgttacttttgctgcgatcgttttataaataccgccaccatttttggagattgtctgagctggggaaaatggtaattcgtacctagttgcgccaggggcaaggtttgtttggtctgctgaagctacccagccgcgttgaagcgaagagccagatgcagttgataacgcctgccattctggtgagccttccgtaataatggaaaaaccagctggtaattcatctaccattttttctaaaacggcattttccgctgaattgttcgtagcatacacataatagaaaactagatcatctttttcaggtgtatagtttgtagatgatgtagcgactttaagatattttccagtgtctttatctaaccgccaagcagaatcgattgctttagacgcggtgagtacaccattatctgtatcgggagttggtggtgtcacggggacttcaatattactaatatctacgtctttatcatcttcaattacaatagctttatagtcatctttcgttgtaatagtcgtatttattgttgcaaacatatcaaatttagcgttagtaagcggctcatcttcatattttgccaaggcttctgggctttggttaaatttgagcgtgtaaccaatatactcgacaccatttattgtttttgttccaatcgagtttttcatggagtcgtctgtaaaaacattttgtctcggtgttaatccatcaattgctggattaacaaatgttactttgtctccttgaaagaagtctttttgtatccaaaatgtataagtttcatccaatactgattctgaataggatgggattgccaaacttattgaaaacttgagtgagtctcccggtgcataagtttgttttgtattcccgtttgcgtcagttactttatttgtaaaattccagtcaacagagccttttagtaattgctttccattaactagatttttagttgtctctctattgtcagatgttacggttgttttgttttcatctgctcctttttgttcatctgattgtgctatttgttgggttgtttttgtttgattttcttctgctccggcgaagatattagaccacggaaccaattgaaaaataagcgcaaccgcaaccattacaacgaatactttttgccagttgtgttttagcatgataattctccttttgctactaattattgaaattactcatagtaactttttttgttctacttgatagtttcttaaagtttctctaatgtttgacgcatcaaactgcttaaaagatcactccatatgnacaaaactgnctattttaaagagagaatngtgacgtttncgtcctatttacagttgaatccccccgcacaaaattggtaaaattattactttttttattgaacaaaccaggattcccttggattttatgaaaatatggaaaatcggggcccttaggaacaaaat

SEQ ID NO: 3417 - DNA, 2079 bp, Listeria monocytogenes 4b
  misc_feature (1)..(end): n can be any nucleotide: a,g,c or t/u
acttctacagaaaataatgaagatatcctagaaacaacttatttcaaaattagtaaacggacacgagaaattttttatcaaggtgagctacttgacgcacttacgccaaaagaattcgatttactctattttttgatgcaacatccacgacaagtgttttcaagagaacaatctgctggaacaagtcttggggttatcagttctatggagatgagcgcacagtggacgttcacatcaaacgtttacgccaaaaaatcgccaccgaaacaaagccatttttgcacaccgtctggggtgttggctacaaatttgatgaaacggaatgaagcgaatgaaatttaaatatgcttaccaattatttttcacacaatttatcattttgcttattgcttgtatcatgattggggtgcttgtctctcactccttaaaagattatttttaccaaagccaagtagatgacttaacaagttatgggcaaacgatttctagggatattcgctattcgccacaagatgcaacgatgcaagttttgaatacgtatcagcgaattttagatgtgaaaaaaattcattatacaatcaaaaacgccaacgatgaaaccatttatccaacacagatgaatcagccgttaccaaaggatttctctatttcttcggatgataagaaaaaacttgaaagtggcgaaacagttagtaagaaaatagataatcgctttaataaagaaatgacaattgtgtacgtcccaataatgaatggcgacaaatttgtcggttctatcgtgctcaattcacctattagcggtacggagcaagtaattggtacgattaaccgctatatgttctacactattttactttctataacggtagcacttattcttagcgcaatcttgtccaaactacaagtaaatcgaatcaacaaactacgagcagcgacaaaagacgttattcaaggcaattacaaagctcgattgaaggaaaataattttgatgaaattggtgcacttgccattgatttcaataaaatgacacaaacccttgaaacatctcaagaagaaatagaacgacaagagaagcggagacgccagtttattgctgatgtttctcatgaaatgcgtaccccgctcacaacgattagtggcctcacggaaggtttagtaaatgatattattccaaaaagtgaaacagatcgttgcatagcactcattgatacagaagctagacgtttaacgaaactagtcaatgaaaatttagattatgaaaaaatccgcagtaacaaaattaaacttcaaaaaacacgttttaatggtaaggaattccttgagttaatcaaagaacaacttgattatgtatcaagcgaaaaaggtaacactattactgtttctatcgataaagacatggcgatttacgcagattacgatcgtttaacacaagtatttatcaatatcgtcaaaaatagtgtccaatttactgaaaatggtcagattactctaactggcacacaagattataaagaatctgttttaacgataacagatactgggattggtatgaatacagaggaattagaacaaatttgggaaaggttttataaagcagatatgtctcgaacaaataccgcttttggcgaatctggtattggcttatccattgtgaagcagttaattgaatatcacgatggatcaattacagtgactagtgaaccaaataaaggtacttcatttactattcgccttccttttttccaagataacgaacaataaaaaaagaaccactttctatttttttagagagtggttcttttttatcctgccataaattgttctggagtaatcccttccattccaatcatcggatcaatttccgtaatattttcagctgtgagaattcgtttatttgtcatttgttctaataaaacatcttcgctcattaaacgttcagagagtgttgtattacgtttattttcatcaattcgttctatccccattcgaaaagcttcttcttccccgcaaagaatgagaaattgtttacttcgcgttactccggtgtataataaatcgcgccgtaacatccggtagta

SEQ ID NO: 3418 - DNA, 2826 bp, Listeria monocytogenes 4b
  misc_feature (1)..(end): n can be any nucleotide: a,g,c or t/u
tttgttccataaagaatcctccctcacgttaataatttcttttatctaaaacacgaacgatttgttttaatggttttaattcaggcacttgcggcaaagaatccagtatttctacagctttctttaagtaggctgttgctacatcttcggcctgttttgcgcccgcttttttgacttcttccactaaaacagcaatttcttctgctggagtttcctccgtaacctggctgatgcgtttttttagaaaaggatcttccattgcaaagaatactggcaatgtcacatttccttgtcttaaatcttccccagctggcttaccgagttctttttctgttccaacaaaatcaagtacatcatccgtaatttgaaacgccatgccaacataataaccaaaacgatataacttctgataatcagcttcactttgaccagaaacaacaccaccgagtccgcaactagctgctatcagtaaagctgttttccgtttaattcggcgtaaataattacgcacactttggtcaaaattatatttatcttttaattgttcgatttcacccgtagaaagctccaccgtaacatgtgatagcattttatgcgcagcaacgtctttaatttctgtcatatattccagtgatttggcaaacaaaaaatcaccggtatacatcgcaatatggttgccccacttcgatttaatcgtctcacgtccgcgtcttaaatccgcattatccaccacatcatcatgcacaatcgacgccatatgaattaattcaatcgctacactcgcattttttactgcatcaaagtctgcattaggagcaagtcttgctgataagcaaacgaacattggtctaattcgttttccaccagcctctaataaatgaagtgctgcatcagaagtagtttcagcagctgcgccagaaagggcctttttaagttctttttcaactgagtcaatgtctttttgcatatttgcatataaaaagttaagtttcatgcttgccaccttattgttccttctttttaaatccaaagtgggttgcactcgcgccgccactgtgtgaaatatatcttacgtatgaaaatccggcttcttgaaacatttccgcaagtctagccattcctggaaactcacgcgttgattcttgtaaccagctatattctttataacttttcgcaaaaaacttcccgaaaacaggcattacatagcgaaaataagcattaaacacttgtttccagccaggaatattgggttgagacgtatcaatacatgccagctgtccacctggttttagcacacggtacatttctcgcagcacttgcatataatccggtacatttctaagcccaaagccaatcgtcacatagtcaaaactattatctggaaaaggtaattccattgcattcccatgaataagttctacattgtgcaaatccgcttcttttactttttcgcgaccaaccttcagcatattttcactaaaatcaagccccgtcacatgaccttcaggaccaatttcttccgccatcataatcgaccaatctgccgttccacagcaaacatcaagaacattcgtccctttttgaacacgcattagcttcattgtctctttacgccatttcacatgtagtttaaaactaataacactattcattcggtcataacttggagaaattttctcaaatactttatgtactttttcttctttagtttccgtcatatcccgaatctccttctatttatcagtcgttaataacttcgatgattctttttcctagtatattagaaagcggttctgatttatctttcaaccgtttcacttcacttttcacatcacgaataatcgctactaaccagctttcaaaattagatacggcttccttcgcaaaatagccatgatcaaacgcccgcttcaatctggacgcaccaatttctttgtaagtagcaagttctgtttggagtcttttgagcaaaaagaactgacaaccaagcgcgataaatgtgtcatctttcataaaatacttcgcaaacttggcaaaaatagccgcatttgttaacgtaagctgagataaatactcttcatctgttgcgacatgtaactggtaaatattggtttttgctgtgtttgtttcttgaaccccgctttgcaatgctcgaagcagtggaatcatttctaattcagcaagtgtgcggtaatagagagcactataaaaatccccagcgagaaccgtcaactcttgctccttacgtgttagctgtacaacatcgcctggttcatcaattttttcatgtgtatcatgcgctaaaatcatgtacagcgttgcactaacgacgcgatatgcagaagcatcagtcaaatcagagccagaaatcgcttcatgaagaaatagcatttgatctttgtccatttgcccgccttcattattctcttgtaaatattgatagactgcttgctcatgtaccaactgctccacttcctttagcccagcctctcttgcctgataagtcatttaacaatcccctttgaatctccttattatgtaaaaaattataccataaaggatatttaattatgcttaattaaagctaaaacttcacttctaagcttatcgtcatttttaaaagcaccacgaacagcacttgtaattgtttttgttccaggtttatttacaccacggatagtcatgcacatatgctctgcttccatgatgaccattacacccaaagcctttagtttttacatcataatttctttccagcancactggcggccggttctagcggancacgtgcggtgaccgtagtcggcaggctttnaaaaggcaagg

SEQ ID NO: 3419 - DNA, 2529 bp, Listeria monocytogenes 4b
  misc_feature (1)..(end): n can be any nucleotide: a,g,c or t/u
tctcgctataaaaagtcacatgatgctttacttgtgaatcattacggtgatcctttgacgaccaggggcattaggtattgcttgtcgaaaataattagtaaagcttcattactcggaaaattcatccgcatatgttacgccacacatttgcaacagacttacttaataacggggcggatatgcggacggtacaagagttacttgggcacgctagcttatcatccacccagatctatacgcacgtgacaaaagagcatttaaagtctacttatatgaaacatcatcctagggcttaaatttggaggaggttaaagaaatggaattgcacgctacaacgatatttgcggttcaacatgacggaaaagcagcgatggctggagacggtcaagtgacgcttggtgaatcggtcgtaatgaaacataccgccaaaaaagttcgccgtctttttcatgataaagtaattgctggatttgcaggttcagtcgcagatgcttttactttatttgaaaaatttgaagcgaaattgaatgaatataatggtaacttagaaagagcatcagtcgaacttgctcaacaatggcgcagtgacagtgttttaagaaaattagaagctatgctaatcgtgatggacaaagatacactacttttagtttcagggacaggagaagttattgaaccagacgatggtattttagctatcggttctggaggtaattatgcgctagccgctgggcgagcacttaaaagacataatggtggtcaaatggaagcaaaggatatcgctcgtcatgcgctagaaatcgcttctgaaatttgtgtgtttacaaatgatcatattacagtagaagagctttgaaggagtggttaatttgacaaatataacgttaatgaaccagttgacaccaaagcaaattgttgaaaaactggatcaatatattattggacaaaccggagcgaagaaatcagttgcagtagcactaagaaatcgttaccgtagacaactaatggatgaatcaatccgtgatgaaattattccgaaaaacattctgatgattggaccaacaggtgttggtaaaacagaaatagcacgtcgaattgccaaaattgttcgtgctcctttttccaaagtagaggctactaaattcacggaagttggctatgtcggtcgcgatgtagaatcaatggttcgtgacttagtggaggtatctgttcgtttagtaaaagaagaaaaaatgcaattagttcgtgttaaagcagaaaaaaatgcagagaaacgtctgattaaacttttagcgccaagccaaaagaaaaaacaaacaacatcgcaaaatccgttagaagcgcttttcggcggcatgaatcaaccagatgaatctcctgaggaagaagtagatcaagaattaaagaataaacgtagccaaattgaatggcgtcttcaaaacggcgagcttgatgatgaaatagtaacagtagaagtaaaagaacagcaaaatccaatgcttgatatgatgcgcggcgctggaatggaccaaatgaatggtatgcaggatgcgctttcgggcatgttcccagcgaaaaagaaaaaacgcaaagtaaccgtacgtgaagcgaagaaaattctttttgaagatgaagcatcaaaattaattgatgcagatgaacttgcagcagagggcattcatcgtgcggaacaaatgggtatgatttttatcgatgaaattgataaaattgctagtaaagaaggcggcggaaatgcacaagtttcgcgggaaggcgtccaaagagacattcttccaatcgtggaggggtcgcaaatttctactaaatatggtacagtcaacacggagtacattttatttatcgcagcaggggctttccatatgtctaaaccaagcgatttaattccagagcttcaaggccggttcccaattagaattgagctggataaattaactcaagaagatttctacaaaatcttaacagaaccagacaatgcactaattaaacaatacaaagctttactgaaaacagaaggaattgacttgattttcaccaaagaagccgtagaaagaattgccgagattgcattccaagttaatcaagattcagataatatcggagcaagaagacttcataccattttagaaaaattactagaagatttactatttgaagcaccagaaatcaatatggaatctattaaagtaacagaaaactatgttaatgaaaaacttgcaccaattatgcagaataaagatttaacacaatttattttataaaatactaggaggatctaataatgactttattagaaaaaacaagaaaaattaatgctatgttacaaaatgctgcaggaaaaacaataaacttcaaagaaatggcagatacacttacagacgtcattgaagcaaacacatatatcgtaagccgtaaaggtaaattacttggctattctgaagcacttccaatcgaaaatgatcgtatgaaacaaatgctaacagaaggccaatttccagaagaaatacgcaa

SEQ ID NO: 3420 - DNA, 2280 bp, Listeria monocytogenes 4b
  misc_feature (1)..(end): n can be any nucleotide: a,g,c or t/u
ctgtataagaaaaacgctgaatgaataattgtgaaggattatggcgatatacatggtataatatgaatgaatttgaaaatgtgtgattgtttttgaatgaaaacggttgattttgaaagaaaaagatggtaaactgactttggatggaggagtaataatgttaaatgcagagcgtaaacaacttattatggagagtattgagaaacttggtgtgattaaattacaagaattagttgaaggtcttgctacctcagagtcaaccattcgccgtgatttaatcgagttagaagaacaaggattaattcagcgcgtacacggcggggcgaaacttgtaaaacttcataatcaagaaccaagtatgaatgaaaaatcattcaaaaacattcaaagtaaaaaagtaattgctgcatattgtgcaagcctagtggaagaaaatgattgtatctatttagatgcaggatccacaacattagaattaattactcacctagcaaatcgaaatatcacagtagtgacaaatggattaacccatattgaagagcttgttcgtcaaaatatagatgcttatcttttaggcggcaaaatgaaagtgcatacaaaagcaattattggtgcagttgccttagataacattcaaaactatcattttgataaagctttcattggtaccaacgcgatgcatccggagcatggctacacaacacctgatatggaagaggcatttgtaaaacgtgctgcaaaagaacgtgctgatcgcgtttttgttgtagcagaccatacaaaattcaatgaagtgaatttttcaaaaatgttttcaatagaagaagcaactattgtgacagattacattccttctgcagtaaaagaatcctttatccaaaaaactaaaataatcgaggtagaaaaatgatttatacaattactttaaacccatcaattgattatattgtacaaatcggccaattaaatcttggcggtcttaatcgcatgaagcaagattataaactacctggtggcaaaggaattaatgtcagcagagttttaaatcaattaaatgtaccaagtcttgctacaggatttttaggtggatttacaggcaattttatcaaagactggctacaaaacgaaggtgtgaaaactggctttgtaacagtgaaagatgacactcgtattaatatcaaactaaaacacggagaagaaacagaaattaatggtctagggccagctatttctgaaaaagaaatcaatggatttttgaaagtgatggataaagtaactgctaacgatattgttattttatctggtagtgtgcctccttcacttggaaatgatttttacaataaaataattcaaatttgcaaagaaaaaaaagctgaatttatgattgatacaactggacaagaactgctagatgcattaccaaaccacccgattctaattaaaccaaatcaccacgaactagcagacctatttggcgtgaaacttggtagcgtagaagaacttatcccatacgggaaaaaatgtttagaattaggcgcgcaacatgtaatcgtgtccatggctggtgacggagcgcttctatttacaggagaagatgtttacttcgccgatgcattaaaaggggaactgaaaaattccgtaggtgctggagactcaatgattgcaggctttgttgggacttttgataaaacgagagatcccgttaaagcttttgctgcaggagttgcaacaggtggagctactgcattttcaacagatttagcccaaaaagaactaatagatgaactattaccgcaagtgaagataaccaaaataacagggaggaactaaaatgagaatcactgatttattaagcaaagatgttatgattatgtcattacaggcaacgacaaaagaagctgccatcgatgaaatgattgcttcgttaaagagcaacgggaaaattaatgatgaggtgctgtttaaagaagctataatgaaccgtgaagcacagagttctactggtgtaggtgaaggaattgcaatgcctcacgcgaaaacaaaagcagtaaatgaaccaactgttgtttttgctaagagtgaaaaaggattggattatgatgctttagatggtcagccagcacacttattctttatgattgctgctccagaatggcgctaatgcaactcatttagaaactttagcagctctttctagattattggttcatccagcgtttgtgcaatcgttaagagatgctaaaactccagaggaagtaatcaatttattcaacaatgaac

SEQ ID NO: 3421 - DNA, 1827 bp, Listeria monocytogenes 4b
  misc_feature (1)..(end): n can be any nucleotide: a,g,c or t/u
ggtgttggaattattccgaccacagacgaggaagcctcgactgaagaaccaaccaaacaagaagaaaaaacggagaaagttgataataccccaattttaaaagcagaaacgacttttacaacagatgatgaaggtaccttggtcgtcgaagggaaaacaaatccaggggcagaagtaacgcttgatttcgttgcaattcctgacgccgtgactacagctgatgagaacggcgctttcagtctttctgtaaatcaactggataaagcacaagatgccgttctttctattgtcattgatggccaaacgaaagaacaaacgcttaaactagcactaacccctgcttacgaaacaaaacttactgctaaagcggaagcagagcgagtagccgcggaaaaagcggaagcagaacgagtagaacgcgaacgtgtagcagcggaagaaaaacgcgcagctgatgcaaaaattgcggctgaaaagaaagccgaagaagctagagtggcagccgagaaaaaagctgcggaagaaaaacgggttgcagcagaacgttcaaaagctgcagctgcacaaccggacacgagtaacgaacaaggacaaatggtttatatcactgctactggcaaaagatatcattatgatcaaaattgtcgcggcttaaataactctaatggcgaaactgctgtgacagttgctcaagcaaaggcacaaggcttaactttatgtaaatttgaacaataaaaaaaaagcaaaatttcttatcatgagaaattttgcttttctatttgtttttaattgaatttaggctagattcatggtaaatttagatagataatatcggtaaaatatactaatgtaaagcaatccctactttaattatacaacaagaggttctttacagtcaagtattatttttcgaaaaaaattgggggataaatatatgaaaccatatgtactcaagtttcaagaaatacgaccgcattcagaagcacttgtcggtggtaaaggaatgaatttaggtgcttgctcttatatcgaaggagtacatgttcccgcaggtttttgcctgacaacagaagcttacaagcgaaccttagcggaaaacaatgaatttacgcaactgctccaacgcctttcttccctaaaaacaagtgacatggatgctattagagaaatcagcgaaacgattcgaacgcttattcaacatacacaaatcccctctgaaatagcgagttatatggatgctacgcttttagatgtgggtgggtatgagatgcctttcgccgtacgttctagcgccactgccgaagaccttccccacgcttccttcgctgggcaacatgatacgtatttaaatattattggtaaagatgccttattacaacatatcagtatgtgctgggcttctttgtttaccgaacgcgcgattatttatcgcattcaaaatcagttcgatcatcgtaaagtccaacttgccgtcgttattcaacaaatgatttcccccgaagcatccggaatcctatttacggctgatccaattacatcgaatcgcaaatccctctctatcgatgccagtttcgggctaggtgaagcgcttgtttccggtttagtttctgctgactcatacacagtccgagaaaatactattacgaacaaaataatcgctactaaaaaactcgccatttacagtttaaaagaaggtggaacggagactcgcatacttgaaaaatcacaacaaaccaagcaaacattaactgaccaacaaataatacaacttgcgaaacttggtagaaaaatcgaagcctattttgggaaaccacaagatattgaatg

SEQ ID NO: 3422 - DNA, 1486 bp, Listeria monocytogenes 4b
  misc_feature (1)..(end): n can be any nucleotide: a,g,c or t/u
agtatgaccacctttcattacatataattatgtactattttaatttaacataaaaagcagtgaaaagcatgtgttagatagtaggtggtggattattttgacagttcaagggacgaatatgctattattaactaaagattacgtaaggaggtatggaaatggctttagtagaagttgaacacctgacgggcgggtataccaaacgtccagtcttaaaagatatttcgtttgcgattgaagaaaaacaaattgttggcttaattgggctaaacggggcagggaaaagtacgaccattaagcatataactggtctaatgcatcctaaacaaggaacgattaaaatcaataatcaccaattagtggaagatacagaaacatatagaaagcaattctcttatatccctgaaacacctgtattatatgaagaattaaccttaaaagaacatttagaattaacaggtatggcttatggtatatcagaagaagaactgcaagcaagaatgaagcctcttttaaaggagtttcgtttagagaaaaaacttaattggtttccagcccatttttctaaagggatgaaacaaaaagtaatgattatgtcggctttcctaattgaacctaaattatatatcattgatgagccttttgttggtttagatccgcttggtattcagtcattacttaactggatggacgaaatgcgtagtaaaggtgcaagcattttaatgtcaacgcatatacttgcaacggctgagaaatattgcgatacgttcattattattcatcaaggcgagattcgcgcagagggaacgctgaaagacttgcaaacaaacttcgaaatgccgggagcttcacttgatgaaatttacattcagttgacaaaggaagaggaagctgatgaagatgatatttgacagcaaagcgctttggaaagaacgttttagtgcttatacgaccgaagtcatgcgctatcttcgttatatgtttaatgatcatttgctttttgtgcttgtgattggacttggagcggggattttttattacgctggttgggtaaagacacttgaacccacatttcccgttattccgttaatggttattttactcactgcttcaattgccattagtcctgttgccacgttgctgaaaaaaccggatattgtttacttaattgtacaggaaaaagcaatggatagttattttacccaagcaaaaatagcgagcttctttatgcaattatatgtttttgtaattgtacttggggtttgtatgccgatgtatgtggaagtgacaaaggttccgtacagccagtttttcactttgtttattgtcctcagtatgctaaaagcgtggaacatttattttggttgggaaagtatgaaattagaagaagcggatacaacgtggatgtttattcgtgttatccttaatgctattttaatttatattgcgttagncgcgactctcatcttgttgagactggagaaca

SEQ ID NO: 3423 - DNA, 2700 bp, Listeria monocytogenes 4b
  misc_feature (1)..(end): n can be any nucleotide: a,g,c or t/u
gctggaaagataaattggtatttcaagctagtattatcaagaatgggattaaagcagcaactgagaatcctgcatcaaaagttagcattcaacctgtcttttcccacgaagttgctacagataaagtttctaatcaacaacaaagtggaagatgctggatgtttgcagcattaaatacgtttcgccccctactaaacggaacgcttggtttgaaggattttgagttatcacagaattatactaatttttgggacaaacttgagaaagcaaattactttttagagaatataattgaaacagcaagtgaggatgaagatagtcgattagtttcgtggttgcttgatacaccccaacaagatggtgggcagtgggatatgttagtttcaattattgaaaaatatggagtggttccaaagtcagctatgcctgaaacgtttcaaagtagtaagtctgctgatttaaaccatctattaaatgaaagacttcgtacggatgcggttattttgagaaatgctattgctgagaagaaagatactgcagatttgaaagaagaaatgcttgctgaggtctatcaactcttagttatgactctaggcgaaccacctaaagtattcaattttgagtatcgaaataaagacaatgaatttaaacaagaattacaaattacacctaaagatttttatgaacgctatgtagatatggatttgaaagattatattccacttattaatgcaccgaccaaagataaaccttttaatcaagcttttacagtggaatatttaggcaacattgtaaatggtacacctattaagtatttgaatgtagaaatggatgtcttgaaaaaagctgctgctgatcagattaaagatggggaaacagtttggtttggatgtgatgttggacaactttcagaacggaataccggtattatggatacggatattttcttgcttaatcagacttttggctttaaaactgcgatgactaaagctgaacgcctggattataaacacagtatgcttacacatgcgatggtattaactggagtgaacattgctaatggagaagtaaatcgctggaaagtggaaaatagttggggagaaaaaattggtaataatggttattttgttgctagcgatgcttggatggatgagtttacattccaagtagtggtgcataaaaaatatctatctaaggaattaattgaatcctttaaccaaaagccaattgtgttaaaaccttgggatccaatgggttcgctcgcactttaaaatgcgaattcggaaatgatttttattccattcatttgaaaaagagctgctgctacgccggtaccatcttttatttttcctgagaaggtaccgtcgtaaatagcacagctaccacaagatggacttttttccttcatgattatttgcgtaataccgagttcttgcattttaattagagtaagtctcgctccgttcttatattcttctgtcacatctgttcctttgttatcaatgacttttgcatgtcctaaccagacatctttgccatcaccacctattatttctgctggatttcttggtgtaggcagtccgccggtaacttctggacaaaaaggaatcgcttctcctctttctaccatttgttttattttggttatttctttatctttcccgtcatatctacaggcaattccggctaggcaagcacttactgcaatcattttattttcctcctttatattcacatttattttaacataaaaaagctgcccccaacttataggcgacagctctgagattattagatattttggtatgctacggcgatttgcgtaccgattaaagcattgtgttttacaagctcgatatttgcttcgaggctcttaccatctgttagttcttttactttaccaagtaggaatggtgtaacgtctttcccgtgaatgtgattttcttcagcttctttaagcgctgtttggattacatcgttaattactttttcgtccatagcgaattcttctgggattgggttagtaattactgcgccaccttcgatttgaagatcccatttcgctttaagcgattctgcgataacttctggagcatctgcacgcaatgttaattctacatcgcttgaacgcgtgtaaaatgctggtaatacgtcggtttggtaaccaataactggaaccccttttgtttctaagtattccattgttaagtgtaggcctaggattgatttacctgctgcgcagacgacaggctcatggcgtggtgtgctgctccttctgagttagttgcaacgcccattgttgtcgcggtgccgccgtgaacggctgcggtctcttgggcggcgatgattgttgtgttgtgccggtgcgccttcgctcttcgtggtcgttccttcgcttcccgccccgtcgtttccctgttctcgtcgtcccccttcgccgttttccgtcccgctcgcgggcccgcgctctcgcgcccttctgcccgctgtttttgctcgtctcccgtccgcgctgcgctggtgctcttgtgtcgtgcggtcgttttccgtcctcgtgcttcgcgtttcgggcctcggtacgcttggccgctccatccgccgttgcgttttgtgcggctcgccgtcccggcgtggcccgcgcggtttccccgccctttccccgcgcgctctcaacctttttcactaataaaaaacaacaat

SEQ ID NO: 3424 - DNA, 1903 bp, Listeria monocytogenes 4b
  misc_feature (1)..(end): n can be any nucleotide: a,g,c or t/u
actgtaggtactttgagcatgctcgagcgccgacgtgtgctggaaagtttgttcaaataagtagcgatttaattggtcacgaatgtcttgttttaatttcgcccattcaaagccggtttcttgaagatttttttcaacaatttttgtaacaactttggaagattcttcaatcaaatgttctgattctctcacataaataaagccacgtgaaatgatttctggtcctgaagtaatggtttttgatttacgattaagtgttactacaacaatgaaaatcccgtcttctgagagcaatttacggtcgcgtagcacgatgttaccaacatcaccaacacctaaaccatcaattaaagtattaccagagtatacgcgattaccagcagtcattttatcatttttatattctaaaatttcacctttacctacgataaatacttctgattttgccataccaacttcatgagctaatttagcgtgactgattaacatgcgatattctccgtgaactggaacaaaatatcttggttttaataagttaatcattaattttaaatcttcttggcttgcatggccagagatgaatagattgttactcatagtgagcactttcgcgcctgctttatagagcatatccattgttttagccatcattgtttcaagagatggtgatggcgtcgtcgtaatgtaaacagtatcaccaggtttgatgttgaattgtggatgatttcctttagtcattaattgtaatgattgaattggttctcctagattacctgtttcaataatagtaatttcgtcatcgctatattttttaagttcttttaacggaacaattaagtcttcttcaatgacgattttacctaaactgccagcaatttcgaaaacgcgctctaattctttaccaacaatagcgactttacgtttggttgcaacggatgcatcgagtacttgttgtaagcgaattaaattagaagctacacaagcgacgataattctgccgtctgccattcggaacgcatgtctaatttcttcttcaattaaactatcgctagacgttgttccagggtgctcagcctctgaactatctgaaagtaaagctagtacccctttttcgccaaattctgcaatgtggcttaaatcagaagcatagccgtccttcgctgattgatcgaatttgaaatcccctgtataaacaatagatccttcgcttgtttcaagaacaatcccaacagaatcaggaatagtgtgcgttgtacggaaaaaggaaacatcaatttttgaaaaggataaagttgtttcttcgttaacgacatggaaattcttgaagcgtagtttacggtgttctttaagtgctgattttgccagtgctatcgttaattctgtaccataaactggtgctttgattttttgaagcaagtatggcaatgctccaattgcatcttcgtgaccgtgtgttaggaaaacagcttttacacgatctttattttcttctaaatatttgaaatctggaataacaatatcaattcctagtaattcattttctgggaacattaagcccgcatctaatataaagatatcttcgtctatttctactacatataaatttttgccactttcatcgacaccgccgagtggaatgatttttatgtttttcgctttttttattgtcaaagcgtagacctcctttgaactatttagaaagtccttctaatatagcttgtaatttcgttccttgttcagcattcaaatctacaagtggtagtcttacaggcccaacgctaatgccttgttgattgagtaaatattttgtcggtgctgggtttggtacagagaataaaccgttcatgagtggcaataattctcggtggatttgagcagctttttgaacttctccacgctcaaa

SEQ ID NO: 3425 - DNA, 1733 bp, Listeria monocytogenes 4b
  misc_feature (1)..(end): n can be any nucleotide: a,g,c or t/u
attgaactattaagtattttactagcaacgattgctttatatgaagtacttgtaatgacaaaacaacgaattttttcgatgaatggaataattactttactattaatgtggttagttgtcgtgccagatagatatttggactttttagatacactgcatattactgaaatggaagttatttttattttaatggctttattactcgctaatactgtattttcacgaaataaattccattttgatcaagttggtatttgtatggttgccgctttttatacaggatttggtttccattacttggcattaactcgtgaagctgggttaatgtatgtactttttgctttatttattgtttggtcaactgatacaggggcttattttattggaaaagcgattggaaaacacaaattagctccgaatgttagcccaaacaaaacggtggaagggtttatcggcgggattgtatgtgcacttgtcattgctgggggcttttattattttgctgagctaccaggaaatattgcactcgtactagcgcttttagtttttctttctatttttggacagttgggagacttggtcgaatctgctttgaaacgcttttatggtgtaaaagattctgggaaaatcttaccagggcatggtggtattttagaccgctttgatagcttgttgttcgttttacctctgctacatatacttcaaattattgggggggggatngnataatgaaaaaaattattttgctaggtgcaactggttctattggaacacaaacgcttgcaatcattcgcgaaaaccctgaaaaatttcaaattgttgcgcttagttttgggcgtaatatggaacgtggtagggcgattataaaagaatttaaacccaaaatggtcgctgtttggcatacgagagatcgtgtgatattagaagcagaattcccaaacgtgaaattttttaatggtttagaagggcttagagaagtagcgacctatttagatggagatgtgcttttaaatgcagttatggggagcgttggcttacttccgacattagatgcaatcgaagctgggaaggccattgcaattgctaataaagaaacgcttgttacggctggacatttagtcatgcgtgcggcgaaagaaaaaaacatttcactattacctgttgatagcgaacattctgctattttacaagcattaaacggagaaaatacggaaagaatcgaaaaactagttttgacagcgagcggtggaagtttccgagataagacgagggaacaactcagcgaggttacggtgaaagaagcgttaaaacatccgaactggaatatggggaataaattaacaattgattcagcgacgatgtttaacaaaggtttggaagtgatggaggcgcactggctgtttggtgtggactacgatgatatagaagtcgttatccagcgcgaaagtattatccattctatggtgcagtttgtggatggaagtttcatcgcacaacttggaacgccagatatgcggatgccaattcaatatgctttaacctatcccgacagactttatataccgtatgaaaaagaattccggattactgatttttccgcacttcattttgaaaaagtggattatgaaagatttccggcattgaaactcgcgtataatgctggtaaaataggtggaacaatgccgacagttttgaatgcggcaaatgaaattgctgtggctggctttttaaat

SEQ ID NO: 3426 - DNA, 1805 bp, Listeria monocytogenes 4b
  misc_feature (1)..(end): n can be any nucleotide: a,g,c or t/u
tatatgtagaagtaatcaaacaaccaacgttttgaacttcttcaacaatacgttataataaaactactaaaatggttttaggtgaaggagagtggcagatggcgtatcaggctatgtatcgggtttttcggccgcagtcgtttcaggatgttgttggacaggaacatgtgacgaaaacgcttaaaaatgccattgtgcaaaataaaacttcgcacgcttatttattttctggacctcgggggacggggaaaactagtgcggcgaaaatttttgcgaaggcgattaactgtgaacacggccatgacggggagccttgcaatgaatgtgagatttgtaaaggtacgacggacggttctataccagatgttcttgaaatcgatgctgccagtaataacggggttgaagaaattcgagatatccgggaaaaagtaaaatatgcgccaactgtggcgaaatataaagtatatattatcgatgaagtgcatatgttgtcgacgggagcgtttaatgcgctactaaaaacgctggaagaaccgccgaaacatgtcatttttattttggcaacaacagaaccgcataagttaccgctaacgattatttcgcgggtacaacggtttgattttaaacgaatcacgacacaagatattattggtcgtttgaaatttattttggaagaagaaaaaatcctcctcgacgaaaaagcgttgatgattgttgcgcgtgcggctgaaggcgggatgcgtgatgcgcttagcttgctcgatcaagttatttcctacggatcagaagaagttaccgtggatgatgcgctcgaaattactggatctgttgcgcaaaacttgctgacaaaactagtaagtgcagcgtttgacggtgatgcggcggaagctatttcaacgctgacagcactgctagcagaaggaaaagacccagttcgcttagtggaagatttactcgtattctttagagatgtgctgctgtatcaaaaagcgccgaatctggaagaaacactggaacgagctttgattgatgatgattttgttgctttggcaaaacgagcagattcacttaaagtgtatgagttcgtgaaaattttaaatacagctcagcaacaaatgcgtttctcgaatcatccgggtatttatgtggaagtggcgcttattcagttaactcaggcgggtcaatcagttgcaggtggcgggaatgtgccagcagatgcagcttctggaagcgacctctctgacttaaaacgtcaaatggagcaaatgcatcaagagatacaaacgctgaaaaaacaaattgccagcggggctggagcagcgccagccgataaaccaacccaaaatcgcggtggttctaaaaaagcaatcaacaacggcaagcaatttaaagcgcctattggtaaaatcaaccatgtgctaggtgaggctaagaaagagaatttacagttaatccgtggttgttggggcgagttattatcaatgttgatggcatctcaagcagcacttttaaatgacgcagaacctgtggctgcatctcaggacacttttgtgttaaaatttaagcatgagattcactgtcaaatggcgatggataatccgaactttgttgaaaccatcacatcgagtattgcccgactgactcaagtaaattatacttttattggtatcccagaagatcaatgggctgacgtaagagagaatttcctgcatagtcatggtagcgacggcgatgcggaggacggcgcaaatccagaagctaaaaaaccagcggaagatccttctgttgcagaagccgcaaaactc

SEQ ID NO: 3427 - DNA, 2011 bp, Listeria monocytogenes 4b
  misc_feature (1)..(end): n can be any nucleotide: a,g,c or t/u
gcatttcaaggttggggagcacaactattttcaatcgtgatgaatggagctagttgccttggtaccgtccttgtttcaggtatcattatttcgatattattgaagacttcaccaaaattatttttaccaaaataaccaaaaggtctagaagcaattgcttttgggcctttttaagtgtgttataattaaataaatactattttgcagcttattacaatgctcattttcacgattacgagtttagcatcgatgtcacacgtgccacaagtacgaaatcatcttgtttagtaacttccgtttgaatgtaacactgtctttaagctgtttttttgtatttaaaaagtttaaatctatactagttagggaaattagttatcgattgccaatttttttggtattggtaaagaaaaaatggaggtgtgtaagcgtgttaaaattcgaacacgtaacaaagacttataaagggggcaaaaaagcagttaatgatctaacactaaacatcgataaaggagaatttgtttgttttatcggtccaagtggttgtgggaaaacgacaacaatgaagatgattaaccggcttattgaacctacagaaggaaaaatatttattaatgataaagacatcatggcggaagatcccgtcaaactaagacgttctattggttatgttattcagcaaattggcttgatgccacatatgacgattcgtgaaaatatcgtccttgtaccaaaattacttaaatggtccgaagagaaaaaacaagaacgggcaaaagaattaattaaattagtagatttaccagaagagtttttggaccgttacccttacgaattaagtggtggacagcagcaacgtatcggtgttttaagagcgcttgcagcagagcaaaacttaattctgatggatgaaccttttggagcactagatccaattactcgtgattccctacaagaagaattcaaaaatttgcaaaaagaacttggcaagacgattatttttgttacccatgatatggatgaagcgattaaactggcggaccgtatcgtcattatgaaagctggtgaaattgttcaatttgatactccagatgaaattttgcgtaaccctgcgaattcgtttgtagaagatttcatcggtaaagatcgcttaattgaagcgaaaccagatgttacacaagtagcacaaatcatgaacacaaatccagtctctattacagcggacaaatcactccaagctgcgattactgtgatgaaagagaaacgagtagatacattacttgttgtcgatgaaggtaacgtgttgaaaggatttatcgatgtagagcaaattgatttaaatcgtcgtacggcaacttctgtcatggatatcatcgagaaaaatgtcttttatgtgtatgaagataccttgcttcgcgatactgtacaacggattctaaaacgcggctataaatacattcctgtagtggataaagataaacgacttgtcggaattgttactcgtgccagcttagtggatatcgtgtatgactccatttggggtacggtagaagatgcgacagaaaatcaggaggaacaggcggattccaaaacgacagaaccagaaatgaagcaggagggataagctatggacgcaattgttacatttttccaagaaaacggccataacttgcttgttcaaacatggcaacatttatttatctccctatctgctgttattttaggtattgcggttgcagtaccaactgggattttacttacacgctcaccaaaagtagcaaattttgtaattggtgttgttagtgttttgcaaaccgttccttctcttgccattttggcgtttattattccgtttcttggtgttggtactttaccagcgattattgcgttatttatttacgcacttttaccaattttacgaaacacgtttattggtgttcgaggagtcgacaaaaatttaatcgaatctggtcgcggcatggggatgacgaattggcaactaattattaatgtc

SEQ ID NO: 3428 - DNA, 2034 bp, Listeria monocytogenes 4b
  misc_feature (1)..(end): n can be any nucleotide: a,g,c or t/u
catatcaagtactttattgctattgtagaaacggtggaaggaagacgctaaatcatttaagtagcgaacgatacggtgtggcgctctttttgtagcagcttccgcaacaacatccgcgaactcacctaacacttttaataaatcatattctgcttctgtttgcagtaagctcatgtctgcgtcttttgttacctctagaccttgttctttaccagaacgtaaaatgctagaaattctggcgtgcgcatattgtacataataaactggattatcattagatgtagatttcgctaagctcatatcaaagttcatatgtgtatctgaactacgcattgcaaagaaatatcttgttgcatccagtccaacttcttcaattaagtcacgcattgtaactgatttaccagtacgtttactcattttaacttgaacaccgtcttcaaataagtgaactagctgaatgatttctacttctaattgatttggtgagtagccaagcgcttcaattgcagcacgcatacgaggaatatagccgtggtgatcagctccccaaatatcaattaacacatcaaagccacgctctaatttgtttaagtggtacgcgatatctggtaagaaatacgtataactaccatctgatttgattaaaacacggtctttgtcatcttcaaaatcagtcgttcttaaccatgtcgcgccatcttgctcataaatatagccattttcgcgtaaacgttctaacgctggtaatactttattttcttcgtataaagaagtttctgagaaccactcatcaaaggaaacgcggaattcttctaagtcagcgcgtaattttcctgtttcaaacgctaatgcatctacacggaaaacggaacggcgctcttcttcgcttgtgtgcacatatttatcgccgtatttagcagctaaatctttcccaagcgaaataatatccgcaccacggtagccatcctctgggaattcagaatctaaacctagtgcttcaaagtaacgcgcttctgctgaaagaactaaattattaatttgatttccagcatcattaatgtagtattctcttgaaacatcaaatccggccattttcataatatttgctaacgagtcgccaattgctgcgccacgagcatgtcctaaatgcaagtcaccagttgggttcgcggaaacaaattcaatttggaatttttctcctttaccaaaatcagactctccgtattttttatcttcggttaaaatcacaggaactaaatcagttaaataagcattatctaggtagaagttgataaaacccggcccagcgatttctacttctttaattaatttgttgtctttttttagttctggaacgatactttcggcaatttggcgaggggctttcttagctactctagcaagttgcatcgctatattagtcgaataatctccatgctttttatcttttggtacttctagtaaaatttctggtacttccgcttcttctaaaccaaccgcttgaacaactccttgtttgatatgttcaattaatttgatttggttctcttgcatgacattcattctatgtataaaaagttctttgccaaaaaggaggagtatgagactagcgccccacactccttatgttatgtgcttttggaaggtacttcaatagatgcctctttatccgtaataatgaaatcagcttgtctaggattaataacataggcaacattatccggtaagccattcaattctagtggaatactgtaacttcctgctttgcttttactcaaattggcaatcacactcaagtctttcgccgctattccgtctactgttttcttctctccagttatcgtcacagatacttttccattggcaggagttatcatttgtgcatcgaaagtatttttcaatccactcatgtagacttgcatattagaaaatgacttagaaatttttgtatcgttatctcctgaatcatcggcgcttttatccgttgtatctatgtcttggttattactatcctttccagcacacgggtgcccc

SEQ ID NO: 3429 - DNA, 1357 bp, Listeria monocytogenes 4b
  misc_feature (1)..(end): n can be any nucleotide: a,g,c or t/u
gtcaagtagagaaaattggttattttcctgatacgtttggtttatatggccaagtgccacaactcatgcgccaagctggttttgatacggtcgttttcggtcgtggagtcaatccaaccggctttaacaaccaagtttttgatagcgcttttgcctcgaaatattcggagatgttttgggaaagcccggacggttcgaaagtcttagggattttactcgcaaattggtattccaatggcaatgaaattccggtggataaagaagccgcaaaagttttctgggataagaaattagcggatgtggaacggttcgcatcgacggatgaatggttatttatgaacggctgtgatcatcagccagtgcaaactgatttagcggaagcattggaagtggcacgggaactttatcctgaggtggagtttatccatagccattttgaaaaatatcaagaggctgtcaaagctggtcttgctcctgaaaaattacaaacggttcacggagaattaacgagccaacaatcagatggatggtctacactcgccaacacagcatcttcacgtatttacttaaaacaagcaaatgcgaaaatagagcgtttattagagcgtttggctgaaccgatttccgtgatggcgacagaagccggtgtccagtatccacatgaatacttagcttatgcttggaaattacttatggaaaatcaaatccatgatagtatcacgggatgtagtttggatgaggtgcaccgtgaaatggaagctcgttttgaaaaagtcgaacaggcgactatggcaattattcaaaacgccgcgcgtcaaatcacggaacaaattacaacgaatgaagcgggcattcctattacggtatttcatgcaggtggccttgaagcaacgagatccatagaactcgaacttgaaacagatgcaattcatttttctgagatgcattttgaattaataccagacgaattagcgaaacttccagagcaaagttttcgattagaaacaagtactggcgaggaaattccggttgttgttgagtcgcttggcattcgttttaattacgatttaccagaacggaaattccgtgattcttattttgcgagaaagtacaaactaacctttgccgtggaaaatttaccagcggttggttatgaaacaatttacgcgcatccggttgatttggtgaatgaatcagcgaaccaaacacaagatttctttttagaaaatcgctttttaaaagtggaagttgcggcgaatgggacgtatacgattttagataaagaaaaagcgatagaaattgcaggtgttggggcatatgaggatgcgggcgacatcggtaatgaatatatgtttaa

SEQ ID NO: 3430 - DNA, 1534 bp, Listeria monocytogenes 4b
  misc_feature (1)..(end): n can be any nucleotide: a,g,c or t/u
catacatccgccaaaataagcatcggttatttcatcgctataagctaactgtttcccatcacccgcagccacatatttttcaaaggcttttccgttgtcggttagtgatggcgcaaagtaatgaacatccgtcgttacgaccatcgataaattacggtctttctcaattggcgcagtaattttctctgtttttccacttgcggaactacaagcaactaaagagatagataggagtatcggtgtaactattttaaaaaatcgaatcacgttaatcacgctttcatgtttgtattttcacaataagttccaaaatttagaacaaaactcaatatggaaggagcaatgttctaaacggtttagatatctcgatctaaaatatttttcgtcaagtggtacatatcatcacgatatgcgccagctggtagttttttgatttcacgaagcgctttattcgtatacttgttggcaagtttgaatgcctgttcgacacctttatacttagaaataagtgctaaaacttgttcggaagcttcatccgtcatatctagtttttgagaaagaagtggctcgaattcagccaagtgacctttcattgcataaataagtggcagagaataaataccttgtttcatatcatttaaaacgggtttgccaagaccttcatccgtacttgtgtaatccagtacgtcgtcaataatttggaaagccatgccaaggtaatgtccgatgttataacattttgcaactgtcatgcgtgttgctttactgccagttgcgccagagtaacaactaagtgcaaataattgtgctgttttaccagaaatacgcgttaaatattcacgaacagttacattcattttgtagcttgtgcgcatttggtctagttcgcccattaagattttttcgatatttttactattaaattcaatgttctccacggaagaagcatgtgcggataaaattttgaaacagatgcagaataaataatcgcctgtataaacagcataattacgaccatatttagaatgaattgtcgggatcccgcggcgtaacggagaatcatcaacgacatcatcatgaatcaacgtcgccatatgaagtacttcaagcgcagcagcaatcgaaacagcacgttctttatcataatcaggaccagcttgcgcagaaagaagcgcaaaagcagggcgcagtaatttcccgccagcgtgaatcaaatctttcacgttttgctcaacgtgtttatcgcgaatttgaatatttttttcaatcgtttgtaagacttcttgtaaatctttggaaagtgcaggatactcatcccacatagcatgaagttgcatattgaactcctttttttaaagttatttttgtgctgcttgactttgtttagcatcagcgaacatccgcaaagtttggacgtttttcagtaggtaatttgctgcaatcccaaccgcgatcccagaaagaatgccgatgaaagataatactgggcaataaagcataacggaccaagtaccagcaatcccactagcaatta

SEQ ID NO: 3431 - DNA, 1843 bp, Listeria monocytogenes 4b
  misc_feature (1)..(end): n can be any nucleotide: a,g,c or t/u
taagaggtgaatacaatgggcataatgaatagcttattacaacagaaagaaatggtcgtgaaagattggctaacgtattatgtatctgtagatgatccatatatcttcacattaaaaaatgatcatcgtttaatggatgaaacgggctttgttttagaaaatttgtttattggaatgactgaagatttaggaaaaatgaatgctttcgcgcgtgagcttggaaaagcacagtttattacttcactcggaatttctcgtattttattccatattcgcttactggaagagtttttgctcgattatgcatcagaaatcaaaacaaaatctgctaattatcgtgaattatatttatttagcatcaagcttcatcaggtatttagtagtttcacgcaaaacttaatcgaaggctatacccgtgcaaatgaacaaaagattatacaaaaagaaaaccaaattattaaagaatcaaccaaactaatttggattgccgaaaatgtttttctgttacctttaattggaagaattaccgatgagcgagcaaaacaacttactgaaacagcgcttgttgaagtttgtgagcaaccagtgaactatttaattatcgacttatctggcgtgcagttagagtctcctaacatcggcaagtacattgagtatttcttctcgtcgcttaaattagtaggtgtaactccgattattacaggtatgcaaccgcaaactgccaaagtgatggttcaagttaatttaactgaacaacatggtattaaaacatttgcaaccttacgccaagcaacaaaaacacttatgaaagaaaaagaagcaagaaacgcccgtaaataggtgttcttgcttcttttttaatattcttcttgacgtaatgattttaaagctttttcaaaggaactaggaagtggcgcttcaaacatcattcgttctttcgttgtcggatgatcaaaccctaattttgcggcatggagaaattggccattgcctttgattgtatttttaggtccgtattttggatctcctgctaaaggatgaccaatatatttcaaatgaactcggatttggtgcgtacgtccagtgtctaatttgcaattaattaatgtgtaacctggtaaacgctctaatacttcaaaatgcgttctcgcttctttcccatcgcgtacgactgccattttttggcggtcttcttttgcacgaccgattggcgcttcaattgttcctttttggtggacaatgtcaccgtggacaagtgcgatatattctctatccgaagttttgtcttttaattgtttggctagtgattcatgggcatggtcatttttagcaaccattaataagccagatgtatctttatcaattcggtgaacaattcctggacggattttaccgttaattcccgataaatcatcacaatggaatagtaaagcattcacgagcgttccacttgcatgtcccgcagatggatgaacgaccattccttcaggtttatttacaacaagcatatctttatcttcaaaataaatatcgagtggaatatcttctgctaaaacttctagttcttctggttcacgcacttcgtaatgaatttcatcgccaacttgtactttgtaatttggcttcgcaagttctccgttaaccgtaatatcaccgtttttcagcatgagttgaattgctgaacgactttttcccatcatttcggcaatcactttatccacacgttcacgcgcatgactttcttctataatcaatgtttcattctgcattatttaattcctttcgtttttcggtcgtctacaaaaacatacacgagcattagtacgacaccaactgaaagcgc

SEQ ID NO: 3432 - DNA, 2278 bp, Listeria monocytogenes 4b
  misc_feature (1)..(end): n can be any nucleotide: a,g,c or t/u
aagataaagacggaaacacagtatattggaatgaaatcaatgtttcggaaaatccagcagttgatttagaaacagttggtgtttaccaagtgacttatagttatggcggtgtttcgaagacgattaatctgactgttcatccaagaaaaacaagtctagaagtccatgactccacaatgtattcaggagataaatggaaagcagaagacaactttgataatgctacagataaaaaaggtgaccaaattcctttcaaagatgtaactgtaaccggacaagttgattctaaaacagcaggcacgtatgaaataagctatatctatgatggattgaaaaaagtagcacgaattactgtaatcaaaaatcaagcacaaatcactgtaaaagatagcgtcattccatacggaggaaaatgggaagcagaagctaattttataggtgcgacaaaccgagatggtgtagcaattcctttctccaaaattaaagtagatggtacagtagatgtaaataaagctggtacgtacaaagtgatttatacgtatgatccgaatgaaggaacagcggatgcaggtaagaaacaactttctgtcacagctaatattcaagtagaagcagaatttgtaaaacctataaaacctataaaaccagttgacccatcaaaaccaacagatcctaaaaaaacatcaacagaaaaaacaccattgaaagtagttgataacaagcaacatactgtaacatatgaagcagcaaaaccattaccaaaaacaggagaccaaacaaataattgggtaatctggacaggcatttgcttgctaagtatgagcatgcttctatgggtggtaatgagaggaagaaagaaaaactatcagtaagaggaaccaacagataaaggaaagacaataagaaggtaaactaaataccgaccagatttttctggtcggtatttttttatcgagaaatatagaagttaattgatgtttttttgaggtaatgctactgatttgttaattcagtacaaccaccaaatcaccattccaacagtccaaaccatcgcaagcggcactaaaatccggaactttggtttttgggttttatggtgaaatagttgcatcgacatccagctaccaaacgccccaccaagaaaagcggtgaaaagcagtacagattcaggtatccggtaagcgtgtttaattgctttccgtttatcaacagcgaataatagaaaagaaacaagcgttatcgcgattaaatatatcgttaaaatcatttagaaaatcccccttcattgctaaaacaaactttattgattagaataaaagcataccataaaagaaagcagggataaaatggcaaaagaaattattcaaacatcgtcagccccaaaagcacttggaccatactcgcaagctgtaaaagtgaatggacttatttttacatcaggtcaactcggtattaacccggaaaccggcgaattagcagatggcacgacaaaacaagccgagcaagcttttaaaaatatagcagcagtattagcagaagctggttctggactggacaaaattattaaagcaactgtttcttcaaagatttaaatgaatttaaggccgtgaatgaagtgtatgcgacattcttttctagtgattatcccgcgagaagtgctttccaagtagcaaaattaccgcttgatgctgcaattgaaatcgaagttatcgcagaagcataaatattcagaaataaatttgacaaccacaagaaataaacgatataataagaaccaattacatagcaacttatcaagaaaggtggagggttctggccccgtgaagccttggcaaccggaagtttcacggtgccaaatccagcaggtaacactgacagataaggcacgcgaatcaggtaaattactctttcccttaaaagctgtcttttaagggaaagtttttttatactatacataaaaataatgagaattgaggcgaagaaaatgaatcaactagcaccattttatgcagatcatgtgggaagtatattaagaacaaagggaattaaggacgcacgagagaaattccaaagtggtgaaataacagtctcagagttgcgcaaaatcgaaaatacagaaattaaatatatcgttgaaaaacagaaagaagtgggcttaaaatcaatcacagatggcgaatttcgtcgtgcgtggtggcattttgacttcttggaaaatttggacggggtagaagggtacgatgcggctggaggtattcaattcagcaaagtccaaaca

SEQ ID NO: 3433 - DNA, 1898 bp, Listeria monocytogenes 4b
  misc_feature (1)..(end): n can be any nucleotide: a,g,c or t/u
tccgttaaaagcgcatcagatttgattgaattaccatccaaaacttctataacagaaagcaaaggtagttacaaagcaaaaagtgatagtaataaaacattagcacaacttccaaaaggcacagttgtaaaacttgcagaaggaagatatatcattttggataatgcctacctaaaaaacaaacaaggtcttaataagaaactacctaaaaacgtacttgtttccatagacgaaaataaaaaagtgacgttaatgggcgataaaaccatagaagaattaggcggggatgatgcttatattgaaatggagaacaatcactatcactttgacttgaaaaaagaaatgttggtcagtcaaacagctaaagaaacagatattgatattcgctccattaaagtggaaatagatgataatgccgaaaaaagaagtctaaaaacagctaaagaaacagcaaatgaaacaacaaaagattcaactcaaaaagaaccagaaaaacagtcgaatgatacttctggacaaaaaacaacgcaaaataatgagacgtctgaaggtaaagataatcaaacacaaggcgcgtctggcaacaatgcaaatggaaatgcaaataacaatacagcgagaagtaatggaacaggcggaagtgattctggtgcaaacggctctcagcccggtggtacgcagaataaaccaaatgaaggcgatgttaataaagcgaatgaaattattaaaaagctaaacgaagctgaaaacacaaatacgtttcaagtaccaattgtggatgtcaatttgacagttaaaggtcaagtggctacagctaaactaaaactgacagacgcatccaaaaggctaaactccttagaagcaattctttacgatagtaagaacaatattgtaaaaaaagaaaaattgaactcaacaaaagcgaatcaaaacttcacctttaacaatttaaaatatggcgaaacatatcaagtagttgttcagggaagctacaagtcagcaagcaataaaaatcaagatactattttcttccgccaaacggttgaggcaaaaccggttgttttaactccaaaagtgacggagcgcggcgaagattatatgaaagcggaactgactgcaaccgaactttacggtcatattgataagctggttttaaaaatcaaagaaaacaacagcaatgtaaccacttctcaaaaagttactgttgatgcgagtcaattgacaaaagacggtcaagtagaagttaaatttaattcattaagtagtgctaaagaatacattatcgaaatggaagaattgattgttgatggaaaaaacgtgacagatgatagttggtactttatttcctctacattaaaagcgaaaccaacaattgaaggcataaatctttcatacagcacggataaaggcgaatttgttgcgtcaccagttaatctaattgacagagacgaatcaattacaagcattcgatatgtagcgtatttagaagatgactataaagcaaatggttctaatgccaaggaatacgcttattctgtagtagatgccaaccaaaagaaaaccgctgttaaagttggtcgaacagttgatatgaatgatggtagttatatttttgttggttatatttctggcaataatggtcagtctgattatacttttgcaactccagcatagaacagtgtcatcgttggtaaaaaaacgaagccaactgtagagttttctctgaaagaagcagagcaagataaactgacaatcaactatgaaatttttgatgcagataacacacttctttttgataatctaacacatccagccttaaagctttataagtcagacgctcaagggatgtatttccagcacatggtggccgtcgagcatgctgctaaagttactacagc

SEQ ID NO: 3434 - DNA, 1518 bp, Listeria monocytogenes 4b
  misc_feature (1)..(end): n can be any nucleotide: a,g,c or t/u
aattaactaggatttatcttatatgtaggaggaattggcatgtcaaaaaatcaagcagctgcttatatcggtacatataccaaagccgagagccaaggtatctatcgcttagtaatcgacaaaactaccggcgaaatcaaagaaaataaattagctggaaaaatggacaatccaacatatcttaaaatttcagatgatgaaaaattcgtttactctgtagcaaaagatggcgataaaggtggagttgcagctttttctgtggaagaagacggttcgcttactttcattaatcaagatgttcaaacaggtaacccaccatgttacgtagatgcctctcatgacggttctatcgttgtatctgcaaactatcacttaggcacaatcgtaagctatccaacagaaaacggtgcattaaagtcttctgtctctaccattcaacatactggtaaaagtgttcacgaacgccaagaaaaaccacacgcgcactttgcaggattcacaccagaccaaaaatacgttatcacatgtgaccttggaacagacaaagtaacgacttattccgctactgctggcaaacttgaaaaagtaactgagctagacgtaaaacctggaagcggtcctcgtaacctagtcttccatccaaatgctaaatatgtgtacatcatgacagaattaacttccgaagttatttttgctgaatatgatgaagctactggcgcattaaacgtgattcaaacaattgcttctcttccagaaggttttgacaaagaaaataaaggtagcgctatccatatttctccagatggtcgtttcctatatgtgtcaaatcgtggccaagatgccatcgttagttatgcagttgctgaaaacggcacactaacacttgcagcaacaacaccagtagaaggcgtaggtccacgtgacttcgacctgaactacactggtgaaatcttagttgcaacaaacgaaaacagcaataacgttactgtttttggtgttaacaaagaaactggtgcacttacattacttcaaaaagatgtaaaagttcctgaaccagtttgtattaaattcgtaaaataacttaaaaaatccagaatggcctcagtgccattctggattttttatactaaaactaatttacctgcttcaatgtaacttaaatcattcactgtctcaattgtccattcgccattttcaaatccaagtcttgtaacacttgcattagctatgtctggattaattaatgacttatcaaagaaagaaataatcgtattaatagccattccgtgagaaacaactaaaacgttggcattttccacctgattttctgcactaactgtatctaaagcattttttaatctagcaaccatctcatcccaattctcggacataccagtttcatcaattttttctacagtttccgagataatttgataaccatcatcgccaaatttttcaaaagcttcttccatcgactggaaaccaagatgctccatcacttttccaaacataaatctt

SEQ ID NO: 3435 - DNA, 1803 bp, Listeria monocytogenes 4b
  misc_feature (1)..(end): n can be any nucleotide: a,g,c or t/u
ggtttaacatttaattcgcgcgcagagtagtcttctgatacggttccactctttccatcattactcaattgaataatttgtttaggaacccagccttcttttccggttgacttcactttacaaaaaatccagcctggatattctgtatcttcttcaaacacccaaatagactcatttttattcacaaaaaggggatttggatattgactaacatgttcttttttcacgataaatgtttgattcatagttagaaacctacctctttattttttcgccgcttcccaatctgcaagaaatttgtcaatcccactgtcggtcaacggatgttttagcatttgttcgaacactttaaatggcaccgtagcaatgtcagctccggctttggcacattcaataacgtggattgggtgtcgcacacttgctgaaataatttctgttggaatcccgtgaatctcgaaaatatccgcaatgtcacgaattagaactaagccatcgtcgcctatatcatctaatcgacctaaaaacggtgatacgtatgttgcgccagctcgtgctgcaagcaaggcctgtgtggcagaaaacacaagtgttacattggttttaatgccttcttctgtcaacacttttacagctgccaaaccttcgcctgtcatcggtatctttacaaccatattcggatggatttttgcaataactcgaccttccgcaatcatctcatctgcttctaaacttactacttcgccactaatcggtccgtcaacaatggatgtgatttcttgaatgacctcattaaaatcgcgaccttcttttgcaacaagtgatggatttgtcgtgactccggcaatgaatcccattctgttagcctttttaatctcttctacgttcgctgtatcgataaaaaatctcattaaaacatcctccttttctatcaagcgctttcaattacagagccattataacgcaaaaatttaaataatgcttttgaagtgcttttccacaaaaaaaaagaatgccactgagcattccaaaaagtttcacgtgaaacaaaattataatcgagttttgtccatcactaggagaggctttggtctatttctaattatatcctctttaattaaatgcatgactgtatgagccacgtattctcgtgatgtatttgtgtatcttgcaagtacttcttgcgtgatttctcttggtaacaatatcccgttatcagaaaacgttcctaaagtttgagcgcatttgagaatggctttgcggattcgttcttcctttttcaagaagcttagttttgcaaatgtatgggcttcacgtaattcttctgccatcactttaatcataaaaaagttgttctcatcttttttgtcgaaaatagagaacaagaaattgctatctacttccataacttctccgtgacctaagctctgcatcgaaacatgcggactccattcatcgtaaaaaagatgatatagtccaaaactatctcctttttgcaagaaacgaacaatgctttctttatagctttcttcttccatttctgcatcttcctctacaatcatcccgtatatgccgcttagaacaaaatatacttttgttccagccggacttaaactntctagaacctcacctttcttggtgctgataaccgagcagtagtctttgtaacttggatgttcaaagcacaactccattaatttgctaaccgttagattggattcaagctctnttaagaatagcatattctctcctttgctatattatattgaagaaactcttcgtaattatatcataaaggctgtattc

SEQ ID NO: 3436 - DNA, 2347 bp, Listeria monocytogenes 4b
  misc_feature (1)..(end): n can be any nucleotide: a,g,c or t/u
tactcccattcactacacaaaattacaagcaaataattataatcccaacactgtccccgcaaccgaactcaaactacttgaaaaatcaatttgggaagatgggtttacgcaaccaattgtttgttatcccttggaagacagcgataaatatgaaataatagatgggttccaccgttacactatcatgagaacctctaaacgaattcgagaacgagaaaatgaattcttaccagtagtcatcttagaaaaggacaccgtgaatcgaatggcctctacaatacgtcataatcgtgcgcgcggatttcataatgtcgaattaatgtccaacattgttagtgaacttgtagatagcgggatgtccgatagttggattatgaaaaatattggaatggatgctaatgaaatcttacgcttaaaacaagtgagcggacttgctcacctcttcttagataaagaattcagtcacacatctgattaattgatgaaaagaggtttaataatgaaagaaaataaatacgatgacaaacattttttcgaacaatatagccaaatgcctcgctcgaaagaaggattaaaagcagctggtgaatggcatgaacttaaaaaaatgcttcctgattttaaccagaaaacagtccttgatttagggtgtggctttggatggcactgtatctatgcagctgaacatggtgcaaaaaaagtacttggtatcgatttatccgaaagaatgcttactgaggctaaacgaaaaactacatcgccagtggtttgttacgagcaaaaagccatagaagatatagctattgaaccagatgcatacaatgttgttctgagttcccttgcacttcattacattgcttcttttgacgacatttgtaagaaagtctatattaacctaaaatctagtgggtctttcattttctctgtagaacatccggtatttacggcagatggaagacaagattggtatacggatgaaacaggtaacaaattacattggcccgttgaccgatattttaatgaatctatgcgaacaagccattttcttggagaagatgtccaaaagtatcaccgaacagttactacttacatccaaacattactgaaaaatggctttcaaattaatagtgttatcgaaccggaaccagctcctgaattaaaagatttacccgaaatgcaagacgaataccgccgcccaatgatgctactcatttcagcaacgaaacaataataaaaaaccccttctaaatcaatagaaggggtttactttgttaaaatattatttcttagttttctttggtttttctttttcttgctgtttgttcatcgcactcatcatttgattgattttcttttgtgatggtttttgacccatttgtgccatcatcatttgtaacatttgttcgttaattggcggattgttttttaaatagctcatcatgtaacgtcttgcaataaagaatcctcccgcaagaccagctagtaaacaaataatgccgacaagaatgtaaatccacatagtctcttttctcctccttgaaacaaaatcctcttttattgtacttgatttatattaaactgacaatacttttcaagaaaacttatcatctagatcaatttatcaataaaagctgcaaacaacctcgtaattataccattaatggtactacggcgcaatctaaaaaaagcataaaaaaacagaccgctctagaaaaattagcaacggtctgattgtttaattaaagtgattttactgtattaactacgttttcaacagtaaagccgtaattcttaataactgtttcacctggagcagaagcaccaaatttgtcaattccgataactttaccatctaaaccaacataacgttcccatccaaagctagcgcccatctctactgctacacgttttctaacagcattcggtaatacactttctttgtactcagcagattgttgctcgaatagatcaaatgatggcacactgacaactgatacatctgttccttgaacttgaagttctttttgcgcttcaatagctaagttaacttcagaaccactcgctaggatgattgcttctggcacgtcacctttagctggggaaataacataagcaccttttttaacgccttctgcagttaatttagcagaatttggtagtgttggtaggccttgacgagtaagaacaagtacatgcggtgtagatgtagaagtgatagcaagtttccaagcctccacaacttcatttccatcagcaggacgaataacagaaagccctggcattgcgcgtaagcttgcaagttgttcgattggctcatgtgttgggccatcttccccaactgcaatac

SEQ ID NO: 3437 - DNA, 1793 bp, Listeria monocytogenes 4b
  misc_feature (1)..(end): n can be any nucleotide: a,g,c or t/u
taggctgtgggtgacaagcatgtctcgcaacacactattccaagcccagcgatggttcataatcgtggggatatagagtatcagccttatttagatcatgtgtagaagtttgccaaagatttagctgctgcgtatcaagaagcgattcaagcattttatgatgccggttgtcggtacttgcaattagatgaaacgtcgtggagttatttgtgctctgatgatcagcgtgaagtcgttcgccagagaggttttgccccagatgctttacaagaaacatataaaaatcttatcaatgatgctatcaaatataaaccagctgatatggtcattacgatgcacatttgtcgtgggaatttccgctccacttggattgcagagggcggctatggccccgttgcagaaacgttatttggcaaactaaatatcgatggtttctttttggagtatgataatgaacgttctggagattttgcgccactaaaaaatgtcacccgtccagacttgaaaatcgttctaggcttaattacatccaaaacaggtgaattagaggacgaggcagccattaaagcacggattgaagaagcgagtgaaattgtgcctctaagccagttgcgcttaagcccgcaatgcggtttcgcctcgacagaagaaggcaatattttgacggaagaagagcagtgggataaattgcgatatgttgtccggcttgcgaaagatatctggggcgaataataaatgaggagaactagccgaagagtttgtgctagttctttttgtgtctttacaaaaaggatgactagggatagaatagatgttctagaaggagggggagccctttggacgataaattacaaaagaaattgaccttattacctgaatcaccaggttgttatatttatagagatgaaaataatgaaattctttatattggtaaatctaaatgtttgaaaaaccgtgtaaagtcttattttcatagcaaacaaattgggaaaactgcaagacttgttaggcaaattcgagatttagaattaattattacaacctccgaaaaagaagctttactactcgaaatgatcttaattcaaaaataccagccaccttttaatatccagctaaaagaaggaacgagctacccatatatcaaaattacgaacgaaaaaaatccgcatatcgaagttgtgtttgaagtaaagcgagacggcgcgcattattttggtccttatccaggtcgtttttccgcaagacagacggtggacctaattgaaaaattgtttccactttgtcgatgtgacggtaagccaggacgaccatgtttgtactaccatcttggattatgcttaggtccatgccaagccgaaattgatccggcagtttataaaaaacagatccataaaattagtcgttttcttgaaggcgacgtgaaaaatgtgaaggataaactactgggggacatgttaactgcaaccgaaaatcttgaattcgaaagggcggcagaacttcgagataaaatacacgctattaatgagacaatcgaaaagcaacatattatttttcctggcctaaaaaatcgggatatcattggttgctatgaacaagataaccatttaagtgtcttcgttttcttcgttcgaaatggcgcaatcaatggaagtaaatggcacgttttccaaattgaaaaatcccttcaagaagatttagccaaatttctcaatcaattttataaagatcctaacaatattcgaccaaaagagttgttaatcgctgaaaaaatagataagagcttatgaatgagc

SEQ ID NO: 3438 - DNA, 2057 bp, Listeria monocytogenes 4b
  misc_feature (1)..(end): n can be any nucleotide: a,g,c or t/u
gaaggaatgatttcaagaaaggagagaatgaaaatgacagctcacaaaatgttagatgagaaattttatagtaaatcgctaggagaggaacttgatttaattatctgcttaccacctgatttttctccactatacaaatatccacttttcattgtacaagatggtaaagattattttcagtttggcaaacttgcgcgtcactccgaagaattagcgctaaatgagcagattcaaaaagccattttcattggtatcccatacaaaactgttatggatcgtcgcgaaaaatatcatccggacggtaaacaaaacgatgcatatatcagatttttagcatttgaactcgttccttatcttgaagaacgctttccttctttccaaatgcctactagtagattcctgatgggagattcactcggggcatccgtttctttaaaggcagctcttctttttccctttacatttggtaatgtgattttacattccccctatgtggatgacacaatccttacacttgcagaaaaagtagacccttcaaaagtgaaaatcttccatattatcggtgaccgagaaactgcagtcgaaacatccggaaatgaagtgctcgatttcctatcaccaaataaatctttagagcaaattttaaccactcgcggatttgattattatttccatgtatttaacggtgatcatcgctggaaatactggcagccatttatcaaagattctttacaatttatgctaccagtgaatacatttgatttagaaagcatgcgcgcataagaaaggacggaaacaacttgaccgtaaagaaagtaacagatgatattggcaaacaagccgcacttaaaattagaaatgatgtttttgtcgttgagcaacatgttgatccagcattagaatgggatgaattcgatgaaatagattctgttgtaatgtttgttgattatgcagaagatggcacaccgcttgcaaccggtagattccgcgaaaaggatggttatggtaaagtcgaacgcatctgtacccagaaaatagctcgcggcactgggagcggccggagaatcatggaagccattgaatccgaagctaagtctcgtggcttaacaaccttaaaattaggagcccaagtaactgctattcccttctatgaaaaattgggatacgaaacttgctcgggattgttccttgatgctggaattgaacataaagaaatgaaaaaaacattaacataggaaatttaataaaaatagttatttcttttatatagaagaaataactatttttttattagctctatttcgccatttgccttcgcacaaacaattatatccacataatgaagaaataatccatgctccacaatccctggaatttgcgctaatttttcttgccacatttctgcatccctaaaagtttgatttactatatccaaaatatagttcccgttatttgtcacatagatttctcctgaagattgtctccgtaaaattgtttgaacatgctctttttcaagtgttctctcaatttgcttccaaccaaaaggtattacttctataggcaaaggaaacttccctaagtttcttacaagcttctcctcactgacaacccaaatgtttttcagactcgcacttgctaccattttttcacgtaatagtgctcgtcctccaccttttattccttgaaaatccgtatcaatttcatcagcaccatcaatagtaatatctatttccgctacgtcatttagcgatttcaaaggtattcctaaattttgggctagttggcgtgtttcttcagaagttgccacccctgtaatatgcaaaccactatttaccaaatatccaagcttttcaatcgtgtaatagactgtactgcccgttccaaggcccacaaccattccatctttaatccactcacaagccttttctcctgctatcttcttttgattaatcatattccaacctcttttctagcattaccgcattactatatctaatgtttcattagactcgtaccctttccagcacactgtcggcgctcagcatcagaatgactac

SEQ ID NO: 3439 - DNA, 1629 bp, Listeria monocytogenes 4b
  misc_feature (1)..(end): n can be any nucleotide: a,g,c or t/u
gaatagagatgattcttttatgacaactcgaacacggaatttgtacatcttaatgctggcaaaccttttgatgtcagccagtatgacaatgattatgccttttttatctctttacattgaaacatttggtgattatagcaatgcttacgtgcaaaggtgggccggttatatttttggcgtaacatttttaattgcctttatcttttcgccgatttggggacgtattggtgataagcacggttataaagggattttgattctgacttcagttggtttatcgatttgtatctttctgatgggatttgcgcattctgtcacttacttactgattttacgaattttcatgggggttgtgactggctttattggcgttagtaatgcctttattgcacggcaaactcctcgtaatgaagctggaaaaattctcggtactttgcaactcggaggcgtgactgggatgctgtttggtcccttgattggcggcgcgatggcggatttatttggctttaaagatacctttacaattaccggaattgcgatgatggttgcggctttaattgtcgcttttggtgtcaaggaaattcgtacagaagaacaaaaagaagctgccaaagtcgtttattctcgtcgtgcagttttaaaacaaatttttacgctacgagttctattcacggtgatggttattacagcacttatccaaattgcgaactttagtgttcaaccgttgcttgcgctttatgtaggagatatgacgcaatcagacaatattgctttcttgtccgggctggcgttttctgcgacgggattcgggaacttggtgatgacgcgaaaatggggacagcttggagacaaatatgggtatgagaaaatactgaatatcttgttgattatggcggctgtttttgttattccacaggcattcgcgacgaatctttgggtgttcattttcttccgctttttattcggtattgcgattggtggaatggttccttgtacgacagcttatattcggcttgcggcgcctggtgttatgcaaggcgaaatgcttggctataatcaaagtgctcgctttttaggaaatgttatcggaccaatcctcggtgggacgctcgctggtttcacaggaattccgagtgtgttcttatttatgagttttatgttcctcgtggcatttttcattttgctttatgcccttcattccgaccggaaacggcatgtgaacgtggattgaatttgacaaacctaagttttttcttaggtttgtttttttgttcttcctattaaattgttttttaaatttcggtaaattgatttataaagttaagtttcctgcctttttttcagataaaaaagtatgttataataaaaaatataaaaagtacggcgtttatttaggtacttcgtgaatagtaaggttgttgaaatttgatgagttagcacggttttctaaaattttagttataactatgtttcattaaatgtaagtacttgcttaaaaaataatgatttcctgtttttattttcacatttccaggatgagtttccgtataaaaattcttcgaggaggagccgattttgtcatttcttcatctagcaattgttctgccatttattgtggcactgctaatt

SEQ ID NO: 3440 - DNA, 2023 bp, Listeria monocytogenes 4b
  misc_feature (1)..(end): n can be any nucleotide: a,g,c or t/u
atgactatccttattataaagaaggactagcagaaataaaaaagcagcaagattcaacgtattatcaaattcttttgtcgcatatgccggactattttgagctttatgtggagaatggttttgatttaactttaagtggtcacacgcatggagggattgtgcgtattccgtatacgaatattggtgcgattgctccaggaccgcagcgaacacttttgccggattatgtatacggagaacattcaaaagatggaaagacaatgataatttcagctggacttggtgcgggaagccttcatcaaaaagcatttccgaggttaggaaatccatatgaaattgttgcagtgacgataaagccagcgacgaactgaaaaaagagccttcatcaaggctcttttttctatttaaagatatgatccaaatttgtatgttcgtctgactcgcaattacaggctttttcaagttcacagccgccacattttccttgtttactgcgtttgataaatttaataatcgcgtaaatagtgtagccgaaaattgcgccaccaagtaataaattaaccattatactcacgaaaaacatcctctcttaaacgaatagactaccaatttgataaacgagaaatactaacacgtaggctgtaacaagtggataagcgacagcaaatgcggtccatttccaagaactagtttctttacgaatggcggcaactgtcgctaaacatgggatgtaaagcaagatgaacaacataaagcaataagccgaaagtggtgtatagaaagtgctaacgatgctgccaagcgaactttctccaactgcataaataattgccattgtggaaacgactacttcttttgctagaaaaccaggtataagggtggctcccgcttgccatgttccgaaaccaagcggaacgagtagtggggcgagcatgccaccgataattgctaagaaactttcgcccattggtacgtcgagtccagatggaccagcgtagtttagcaaccaaatgataaccgaacctgcgaaaatgaatgttcccgctttacgcaagaatccttttcctttttcccacgtgctgcgccataaagttttaagcgatgggaggcggtagggtggtagttcgacgacgaatacggaattatcttttttaagtaaagtttttgataaaattttagtgacgataagtgccattaaaataccgataacgtaaagtgaaagtactacgagcgcctgatgtttctcgaaaaacacgcctacaaaaagagcataaacaggaagtcgcgcggagcaggacataaatggtgaaacgagaatagttagtgttcgttctttggattcttcaatcgagcgcgccgccataattccagggacattacaaccaaagccgataatcatcggaataaaagctttcccatttaagccgaagatttccattacgcggtccataacaaccgctattctagccatgtatccggaatcttctaagacagaaatgaagaagaaaataaccaatatttgaggaacaaagacaagcacgccaccgacaccagcgatgataccatctgcaaccaaatcagtgataaatccagatgcgccaatggctgttaaaaaggatgttacggagtccgtcagcggcccgccaataaaaccatcgagcaaatcagatagcggtgcgccaacccaagtaaaggttatttggaaaatcaaccacataataccaagaaaaataggaatgccaaaaaacttgtgggtgaaaattttatcgagtttatcggatagtggaatatccgaatggcgcgtatattcgaccgaggttaaacaaatatcatgaatgtaattcacacgaacttggtgaaaatgattttctagtttaccgtcaagcgcaatttcaagttctgtgcggatatgttttaattgctccaaagcagggcatgtcgctaaaaattcttaagtgacttcatttttagaaagaaactttccagcacagtgcggcgctcaggcaggatgtagtggccacag

SEQ ID NO: 3441 - DNA, 1667 bp, Listeria monocytogenes 4b
  misc_feature (1)..(end): n can be any nucleotide: a,g,c or t/u
aaatacatgctgacggtctttcatctaaccccaatctcgcagaaaaaatcaatgaaaattacgacctctatgttatgcctttagctgacgcatttcgagacgactttaggccagtactccgcaattacacccaactcattcgcaaattaaaaatcccagtcatcgtaacaggcgtcgggttaagagcgaattacgaaccacaactagacgaaggtttttcttttgatgaagatgttactaactttgttaaagcagtcctagaaaaatcagctcaaattggggttcgaggacaaattactgcagattatttaaaaaaactaggatttaacgcagaacttgacttccgagtaattggttgtccgtccctttatacattcggacgagaaataaaaataagagattttcacttaacagatcaatccaccatcgctattaatgcatccccaacttcttcagaaatagctatcaatttccttaacaacatgattactacatataaagactatcactttatccctcaacacctagacgaattccatttaatgtatgccggcggtccagatatctctagtgatatcaatggctacccaacaaatatccaacataagtattatcaagaaggtcgagtaaaatatttcactagcatgcctagttggttcgattttgtgaagaaagttgattttagcattggctctcgcctacatggaaacgtcattccaacaatagtcggaacacctaatatttctttcgtacaagatgccagaatgcgtgaactagcttcctaccatgcgcttcctcacgtaaccatcgatgaattagaaaaaaccaacaacctccaagaattactaactaaagtggacctgaaatcagccgaaaaagtccaagcaagaaattttgataattatattgatttcttagatactaatggtctcaatcatatctataaatacgataaaaacagaaaatcagctcccatggatgaacttataaactccattactttcccaacaagtccagaccccatttccatattaaaccctcaagaaatgctaaaccgagtaaaaatctccaccaatttattaaaagaaagacatgattttagcacaagataccgtgtcaatctcgtaaataatcaacttacccaactgaaaaaaacaacttctgaacaaaacaaaaaataccaacaaaaaattactgaaacacaagaaaaaaatcagcaattagaaaaacaactgacagatactaaacaaaaattacagttgacgattaataaaaatcacgaactaactaataaaatcagacattatcaaggaacattaaaccgaaaatctgtaaaaactactttaaaagtagcgaactctctagcaaatttaaaaaagaaagtctccagaagctaagcaataaaaaagcagccatccaaatccggctgcttttttcttatttccttaaaatcttctccatttttttcccttttgcgagttcatccaccaatttatccaaataacgaatttgttgcattagtttatcttcaatttcttctactcggtagccgcaaataactccggtgattaaggaagcattcggattcatttttggtgcttcggcaaagaaggtctcgaaatcaattgcttggtcgattgctcgttgcaaagaatcttgatcatagc

SEQ ID NO: 3442 - DNA, 2678 bp, Listeria monocytogenes 4b
  misc_feature (1)..(end): n can be any nucleotide: a,g,c or t/u
atgacaacgcgtcttcctcgtgaaggcgaacatgacggggtgcgattttattttcgttcacgagaagtgtttgaacaagctatcaaagaccgaaagatgttagaatatgcagagtacgtcggtaattattacggcactccgcttgaatatgtcgaggaaaaatatgccgcaggagtggatatttttctcgaaattgaagtacaaggagcaatgcaagttcgaaaagcgatgccagaaggaattttcattttcttaacgccaccagatttgtctgagcttaaaaaccggattatcggtcgcggtacagaatcgatggaagttgtcgaggaacgcatggaaacagcgaagaaagaaatcgaaatgatggcgtcttatgattatgctgtggtgaatgatgtagttgcaaacgccgtacaaaaaatcaaaggcatcgtcgaaacagaacacttaaaaactgagcgagtaattcatcgctacaaaaaaatgttggagggattacaatgatgttatatccatcaattgataatttattgttaaaaatcgactcaaaatattcgctagttacagtggccgctaaacgcgcacgctacatgcaactggaaaatgataaaggcgtattgccgagctaccagtccgacaaatttgttgggaaagcgttagaagaaattcacgctggaaaattagttttacaaaacgacgataaataagcttaactgctccgctttcctgcggggcttttttgttagccacaagtgcaataaaaataagctgaaatctagtttcttcatggttttgtcctgtcttaatttaaggtataatagaattaatgattttttatattaaaaatgaggtgacttttcaatgcaaggaaaaaatatcttactcgcagtgtccggtggcattgctgtttataaagcagtcgcacttacaagtaaattaacgcaagcaggagcaaacgtcaaagtgatgatgacagaacatgctcaggaatttgttccaccgctttcgtttcaagtattatctaaaaatgatgtatacacagatacatttgacgaaaaaaaatcaagtgttgtcgcacatatcgatttagctgattgggccgatttagtaattgtcgcaccagctaccgcaaatgtgattggcaaaatggcaaatggaatcgctgatgatatggtaacgacaaccattcttgcaacagaggcaccagtttgggtagcgccagcaatgaatgtccacatgattcagcacccagcagttattcggaatattaatcgattatacgcagacggtgttcgttttatcgagccagaagaaggttacttagcttgtggctacgttggtcgcggtcgtcttgaagaaccagaaaaaatcgttcttcgtattgctgaattttttcaagaagataaagatttattgcgcgacaaaaacgtgctagttacagccggcgcaactcgcgaaaaattagatcctgtacgctatttcaccaaccattccacgggcaaaatgggatttagtattgcagaatccgcagctcgtcatggtgcaaaagtgacgctcgttacgacaagcaaagcacttcccgtaccacctggtgtagaagcaatctatgtcgaatcggcagaagaaatgtatcaagctgtggatgaacataaagtgtcacaagatatcttcgtgatgaccgcagcagttgccgattacacgccagcaaaagtatcagaccaaaaaattaaaaaacagccgggcgattttgccattgaaatgaaacgaaccaaagatattttactcgaaattggtcaacacaaaactgcagaccaagtcgtgattggctttgccgctgaaacagaaaatctagaagcaaacgcacgtaaaaaattaacatccaaaaatgccgatatgattgtcgctaacaatattagcgtggcaggagcaggcttttctggtgatacaaatatcgtgacattttaccggaaagatggttctagcaaagcgttaccgatactagataaaaaagaagttgctgaacatatcatcaaagaaactgctaactttttaaggaagtgaacgaatgattaatattgcgaaagtaattgtggacgttccagccatgcaagtggatcgtccatttgactactatattccagaagatttagaagaacttattcgtccaggtatgcgagtaagtgtcccatttggaaatcgtaaaatacaaggatttgtcattgctcttggagaaacagaagaaaacccaaaattaaaaggcgttgacggggtgatggatttagcccccgttttaaatgaagaattgatggaactaggcgattggttagcagaagatacgctgagtttccgggtgtctgcttaccaagccatgttaccagccgcgctacgagcaaaatacgaaaaatattttttgcgcttagatgaggaaaacgaagaattagagcagctatttgaaggctacgaaacactagactggaaagtggcagaagcccgcggtttgctcaaacaaattggcaaatgggtcagagaaggtagtgtggaagtagtctaccaagtcaaaaataaaatcacgagtaaaaaagttcgcgttgttaactgtctcaaatcaccacaccaactagctgaaataatagaagatatgcccgaaaacgccaaagcacagtcacgtgtactcgcat

SEQ ID NO: 3443 - DNA, 1514 bp, Listeria monocytogenes 4b
  misc_feature (1)..(end): n can be any nucleotide: a,g,c or t/u
atcgaagtaattccagtcgttaaagatgacttaacattaatcgggattgttagcagacaggatattctaaaatctatgcaaatgattcaaaaacaaccgcaagtcggtgaaacaattgatgatacgattgcgaatcagctttctgaaaaagcagatactggagaagaggcagattatgaatttaaagttagcccgcaaatgactaattcactcggaacattatcgcatggtgtatttacacaagtggtttgtgacgtcgtacagcaaaaactattttctatgaaaaaacggaatgtatcgattgaaaatgtaacgatgtatttgctaaaacctgttcaaatggacgcgacaattattattaaaccgcgaattccggagatggggcgtaaggccggtgagcttgatgtagagctctacttagaacgaattatgaccggaaaagctattgtcgcttgtgaaatgatggaacggtaaaaagaaatagaggcgatacaatgaaaagtgagattgtacaacaaataaaacaatatgaaacgattattttgcatagacatgtacggcctgacccagatgcatacggatcgcacatggggctcgcggaaattatccagtgtagctttactgacaaaaaagtctattcagttggaaatgatgaaaaggcgctccaatttcttggtatagtggacgaaataacggatgaaatttataaagatgcgcttgtgattgtgtgtgacaccgcgaaccaagaacggatttcagacgggcgttttaaccttggtaaagcacttataaaaattgaccaccatccaaatgatgatgcgtatggtgatttactttgggtggacacgacggcttcttcttgtagtgaaatgattgtcgctttttgggaaatgttttcggatgagttaattttgaatgaaactgctgcaagactcctttatgcgggaattgttggtgatactgggcgcttcttgtatccaagcacaacggaagagactttacgtttatctgcgcatttagtgacatttccatttgatcgtccggcgctttaccgagaattatatgaattaccgaaaaatacggtaaaactttctggatatattttgcaaaactttgtcatggatgaaaatggcgctgcaaccgtttatttaagtgatacgcttttaaacgagtttgaagttgatccgcgcgacgcttccgcacttgtttcgtgtatcgaaaatgtggaaggtatcaaggcatggattatgttcattcaagaaggtcccgtttttagagctcgtttacgttctaaaggtccagttattaatgaattagccaaagagtatggcggcggcggacatccgcttgcttctggtgcgacacttcataatgaagaagaaataaaggaaatgacggcaaaattgcaacgcatttgtgccgataaataattaggaaataaagtcggattaattatctggctttatttttatataaaaacacgaacacactttcttttttttagcttaaccgat

SEQ ID NO: 3444 - DNA, 2797 bp, Listeria monocytogenes 4b
  misc_feature (1)..(end): n can be any nucleotide: a,g,c or t/u
aaatcagtgcatccaatctcaccagaaatcgttaatatcgaaactaacccagcacttctacgtgtcacatcaccgaacgacatgatggcgcttgtcagtgttgatattaaatcagagttttggattagtacaatgcgcattggcgtgccgtttttctcggtggaagagattatgaataagctggaaaacgttgtggaatatacgtttgataaacggcggaactttgatgcggaagtcgagcaagaattgcatcaagttgagaaagaagcgcgcatacgtgtaggtgaaattaaaacaacgtggaaagaactgaataagcttgaagtaggcgacgtgcttctgacagaaactcatatacgtgacacactcaaaggctacgtcactgaaaaatggaaatttgaatgttatatgggaaaaagtggtaaccaaaaagccgttaaatttatgcgtcatacagggcggacagagcaggagaggtagaagtggagcaattactagagaaaaatatgacgcaaatggaactagatgtgataggagaaatcgccaatatttcgtttggctcagcttctacggtcttatctgatttactacaccaacaagtcaccatttcgacgccaaaagttgagattgttgatttatataatacgaaagacattgatattccacatgtcgtgttagaagtgaattttcacaaaggaatcgaaatgcggaatttatttgttctacaatcagaagtggctgcggctatcgcggacttaatgatgatgggtgatggaaacattgatccgaatgaagaactttcagaacttcatctaagcgccgtacaagaagcgatgaaccaaatgatgggacattccgccactgcaatgagcaatatgtttggcgaaatgattgatattacgacaccagacattaaagtaatcgcgctaaaagaacaattagaagatacgaacgaccaaacaatgataaaagtcggctttgacttaattatcggcgacttgatcacatcgaatttaatgcaactcatccctattgataaagggcatgaacttgcaaaaagattacttggcgacgcagttccagagccagaaccagtaaaagaagaaatcagcttaacggccgaagagttagatgtctttttagaagtatgtaatatcggcatcggttcagcttcaaccgttctatccaaattgcttaaccgtaaagtttccttacaaatcccaactgcacgcgtaattgatagcaaagagttcgagtttaatgaacgtccttgcttagtgacgagtgtggaatttgtcgaagggctgcgctcaagcaacacatttatcattagcaaaaatgccgcgctaattatggcagatttaatgatgatgggagacggtttggttcaagaagatgcagaactgacggaacttgaagtcagcgcagtgcaagaattaatgaaccagatgatgggcttctcagcgacagcaatgtcagaaatgctcggaacaaaaatcgatattagcccacctacaatggaattttgtaatttcggcgatacgatgattcaaaaaaacattgaagaaggaaaaactgtcgaagtcatcttcccgctagaagtagaaggactattaaaaacgccaatgtaccaaatttttaatccagcagcagcaaaagaaatggcgcaattgatgcttgggattcaggcgaaagaagtcgcagagaaagaagcgacgactccagcagaaataatcgaaccagaaaaactagctgaaccagtgcaccaagcagttatcgaagaaaaagaaacactttccgaaatggaacaaattttggaagatattcccgtaacgcttgaagtggtattcggaacagcaaaagtaaaactcgaaaaatttatctcttggtgtgaaaaagatgtgattatcctaaaagagagtatgaacgaaccacttgtcttagcgctaaatggcgtgacgattggtaaaggaattttagttcgcgtggatgatcattttggtatacaaatgacggagttagtaaggtgaaaaatgtgcggaaacttggactgatgacaattttattttggctgtttttttcggttcaagcatttgcagcagatcctgaacccccgataatatcgcttgaaggcgaacagcatgtttttacatctggtgaagtgatttcgtttcatattgaaaatgcggctgacttgaaaattattctggtgaatgaacatggacagagaaagcttctagacgaggaaacgtatacggtgacggattgggatttggacgggagttaccaagctgaattttatcaagcagatgtgccgaaaccatttgttactgtggaagatttatttgaagtgaaacagcttgaggacgttgcgaaagatgagacggcgccgagtttgaaaacgatagaaattacgcacgatgaagatgtcttgttaacgagcgtgctacgtgtatcagctgatttagatgacgcggaatctggcgtgaaacaagcgactttagttgttcatagcgaatcgaatgaatcagaaatcgaactcattcgcaacaactatacagggaagtttgctgcagaaatacctttagaaaaattccaactgggtgaaaaaatcacttttcaactgcaactagttgattttgccgagaatgaaatcacagtagacttagaaaacactgtccaactatatcaaccaaaagcaccccttttaagttacgacggtaatgacatcacgaacgtgcagaaaaaaatcggccaagtcggcaagcaaatcgagctatctctctacactatacac

SEQ ID NO: 3445 - DNA, 1358 bp, Listeria monocytogenes 4b
  misc_feature (1)..(end): n can be any nucleotide: a,g,c or t/u
agatgtcgtattagttagcgctgagaaaggccacggttttgatactcttttagagaaaattgaagaattgcgaaatggacaagatgtctatgttgtcggttgtacaaacgttggtaaatcaacgctaatcaatcgtattattaaacaagcatccggggaaaacaatgtcattacaacctctcaattcccaggaacaacgcttgataaaatcgaaatcccattagcagatggcaatgtacttgttgacacaccaggaattattaaccatcaccaaatggcacatttcattgatacaacaacgttaaaagctattacacctaaaaaagaagtaaaaccagctgtcttccaattaaacgaagaacaaaccctatttttaggggcgcttgctcgcttagattatgtttcaggtggtcgcaaatcattagtagtctatgtatctaataatttaccaattcaccggacaaaattagaaaaagcggatgcgttatacgaaaaacaagcaggaatagtgcttcaaccgcctacagaagaagggatggagacacttcctaagctagttccgtattcttttacaataaaagaaaaagcggatattgtcttttccggactcggctgggtgacaattccagaaggcggcgcgaaagttactgcgtgggttcctgaaggcgtgagcgcaactatccggacatcactcgtttaaaacgaaggaggcctgtcatttggaaaaatatgttgttatcggaaatcctattcgtcactcgttatcaccagctatgcaaaatcggattttccaagaacttggaatgaatgcggagtataactctgttttaatagaagaagacgcttttgaaacagaaatcaaaaaattaatggattctggagtgcgtggatttaatattacaacaccatttaaagagcgtattttaccatttttagatgaattagaggatcttgcagcagcttctggcgcagtgaatactgtgctaaaaaaagaggacaaatggtacggatttaatacagatggcaaaggctacttagaaggattagaagaaatccgctcaattacagaagatgattctattttaattaccggtgcgggtggcgcaagcaaggcaatttacctagcgctttccactcacacggatgctaaaataaccgttactaatcgtacaacggaaaaagcgatagaaatgacgaaagataatgaaaatcatcacgccgtcacactagaagaagcagaaaaacaactggctgattttacgattatcattcaaacaacatctactttccagcacagttcgccccgctcaggcaacgtantanggagactaatgtccnntcccaaaaaggttagcaca

SEQ ID NO: 3446 - DNA, 1621 bp, Listeria monocytogenes 4b
  misc_feature (1)..(end): n can be any nucleotide: a,g,c or t/u
tatactttagaaccagcttcattatcgattactaaaaatgaatttaacccattagataacactttctgggccaaatatcaaaggaccgatgttcttaaaatcgataataaaggtctaatggcttataacgcagatgtaaatggtgcgaaccaacttaaaatgtctattcgtgaatcagaaaataattataaagaaattactttatttgattctgttcctgaaattttagcaaattcttctccttatatatttatggaagatcgtggcgatgggaatgtgtttgtggtcatgtcaacccccaccacatggtatatcgcgcttgttaatatcgcgtcagaacaagtagttgagacgaaaaaaatggcgatgaactcctctacaacgctaaacagtgtgatttacagtgaaggaaaaggtctgcttctagggggtagtacacacgcagaagaaagcattttcggcagtgagccattgaataaaaataacggatattatttagcgcttggaaatgatttgaacgtaacggatagccagattttaagaacgaatcaacataattcattgaccactattattaatggcgtcggcaataaagtagatggtttctttagctatgacggattaaataatgatggatatatccaaaatgtagagtacccgaacacctatgatgtgaacccgaatggagcgatgatttttgcagaatttaatttgcaaccagctccagtgcttgatacaggtaatccaattttagcattttatcaaggggaacgtcgtgcagattttgatgaactggaaggggtgaaagcatactctggaattgattcatcagatataacaaaatctatcactaaaaatacgtttgatttatatactgtaggcgtacaacagcaactttatcaaattgaatatttgccaggtagtggaaataaaaccactggtacacgaaatatccaattgcttcacccacttgagaccccaaaactagagaaaagctacgcagatagccatggagcttttaaagttggtgaagtagttcctgcaaatgctattcatgcatttaatggtttagatagtgctaacaatgtgacttatgtagttaccgcagtagatgatgagaaaataactgtagatgcttcaattaagcgaacagaaggaacgaaaacagctgtaattagtaaggaaattacacttatgacttcgacagctgatgaaactgcagtaatcgatgtgacgagtgtggctctagcagctgggaagtatacatccttaacagatgttcgaagtgaagggcattttcatatttatgcagaaaccatggataacgtgtccatcgatcctaaatacgttaaactaacagaagaccctgaaaacccggttgattggaatgcgccaggtgtttattatgtgactgcatcacttgacccggcgagtggatatacagccaaagatgtgaaagtaagagtcgactgggctgatgtaggatgacgataggatgtctcgacagttactttctgtaaacatgaaaccgtacaatccaaacaccgctcttgttcgtgcggaagatgatattaatggcgcccccgtgtataaatcaactggggcattaggacgcgaatgg

SEQ ID NO: 3447 - DNA, 2905 bp, Listeria monocytogenes 4b
  misc_feature (1)..(end): n can be any nucleotide: a,g,c or t/u
tttgcagttttgcaagtcctccgttgccatcctaggcgacatctctttggaagcaacagtaagctctacaaaggttggaaaagtggtttcgcgtccataaataaatggtaggttgtcgaaagcatttttcattccaaattcgtagtaagcttcgtctggaatacaattagggatttcattgacgcagtagctcagccagtgatcatggtttagccagtagtcatcacgaataaaatggtcaaaagattttgccgctgcctccagccatttggaatcacggtcaatttcatataagcgcaacaagccaaacacagcttccccgtcgtaataaataatccggaaaatatcttttacttctaaagaggggtactccaacacatgcgtgaacttcccgttttcttcttgtaaggaaataatcgcattcgcaatcttcctagatagtggcaaataggttttagttccagtgattttcatatatttcgttaaagcaagcaatgtcgccgctgaaccgcctaatttaacttcacgcaaccctggttcaattaaaaaagctaattcgtctttttcataaataaagttttgctctaaataagttaaagtgcttgtagctgcttccaaaattgttttatcgcctgttaattcgtatgcttctaacatcgaataagttgtactcgcgtggcgcaaactattatagtgtttaatttttttatcaaagcaagcaaaccagccgtaattgaattcgcccgtttgatttacttggctcgctaaataatttccagcgtttccaactagttcaaaaactgcatctggagttaattgtttagtacttctacgaccatgctcaagctcgcttggttctaactcatggattttctttccgtcaaaaaaccatcctactgtattaaaagtaacaatagtggaatctacggttaagtttaattgagcttggtttttatttgtttggattaaatatctattcatattttcaacgttgatagctaaaccttcatcacctggtagaaggatagcgttcgcattaatttcctgttccattaaagctattttaaaattttcatttaaggcaatgcctcgtctataataatttttcttcgtttttaaagcttttttattccattctcctaaattttcaagtcgataatccacagcaacatcaattttaaaagaaattgcctcttcggtttggttttttattgcactttttttcatttcattaattaagttggctaggcaaagatagctaaagtttatgacaatagctcgtttatttttatagccgattgttagaaagccatgccatttcccgttgtaagtggcgtgttcttcgtcttctgttaattgatcaataattttattttcaagttcatctaatatacctctccaaggcatacgtaccactcctttttataatatccctgccgctaaattttcttagcgacagggaatcgttgtattgtggctcttatttacggaaaagacgtagtaaaaacgcgccagctagcgagaagagaccaagcccaacccacggaagactactgtttgtatctccagttgaaggaagatcacttgctgagatagaagttgttccatccgcgctataacctgaggaaagcattgttcctgaaccatttgaactcatgttcgtaacggttacgccagttcctccgttagaagttccagtagttcctccattggtagaaggatttgatccaccatccgcatcggcatcagcatcggcatccgcatcagcatcggcatcagcatcggcatccgcatcagcgtcggcatcggcatcggcatcagcgtcggcatcagcgtcggcatcagaatctgctaatggtaggacagttacggctacatcttcactcgttttaacttcattaccatatttagctgttacttgaagatgaataacatctccagctttcaaattataattaggaatattaatagtataggttccatctgcatggattaagacatttccgataacagtaccgtccggaagagtcaaattaatatagaaagttgttccagccggtgcatctgattgcaatgatttcagaagggtatttatattcatatttttataaatggaagtacctgaaattgttttagttccttcgtaaattggatttacagttggtttttcaactaggaaatctctccagtcaatgtctacgtcggcatcggcatccgcatcggcatcggcgtcagcatccgcatcggcgtcggcgtcggcgtcagcatcggcgtcagcatcagcatccgcatcagcgtccgcatccgcatcggcatccgcatccgcatcggcgtcagcgtcagcatccgcatccgcatcggcgtcggcgtcggcgtcagcatccgcatcggcgtcagcatcggcgtcagcatccgcatcagcgtcagcgtcggcatccgcatccgcatcagcgtcagcatccgcatcggcatcagcatccgcatcggcatcagcatccgcatcggcatcagcatccgcatcggcgtcagcatccgcatcggcatcagcatccgcatcggcgtcagcatccgcatcggcgtcggcgtcggcgtcagcatcggcatcggcatcggcatcggcatcggcgtcagcatcagcgtcagcatcggcgtcggcatccgcatcagcgtccgcatccgcatcggcatccgcatccgcatcggcgtcagcatccgcatcggcgtcggcgtcagcatcggcatcggcatcggcgtcagcatcggcgtcagcatcagcgtcagcatcggcgtcggcatcagcgtcagcatccgcatcagcgtcagcatccgcatcggcgtcagcatcggcatcggcgtcagcatcagcgtcggcatccgcatcagcgtcagcatcagcgtcagcgtc

SEQ ID NO: 3448 - DNA, 1773 bp, Listeria monocytogenes 4b
  misc_feature (1)..(end): n can be any nucleotide: a,g,c or t/u
atttattggaataattcgcgtggataagggaatgatttcttttcgctgagctgctacttgatttctattttcttgcataaatccttctaacaattgttgttgaatggatgaaagcgtatcttttatatcaagcataaatttgataatgtcagcatccgtatagaaaacattttctgcttccttccacttcactaagctagtaatgatgtatttttcaacttcactcatatgttgatggatttttctaatatcggttttatcattgaaacgtctcttaccgatactttcaaagtcgcgttccttcacaccagttattacatcaataatcatcccacatgatgcggtactcagcgcacgaatggaggcttcctcttccccgctactaagtcttaatttaaattcatctgtttcactataataattttcataaaacatattcactaactctgaacgacgactaatcaaaaattccttaatttgcataaacttctcctttttcaccgatattatcttgcaaaaattaagatgttatctgcatgtaaattttcaatcattttatccacttgttccgctgttaaatcaaagtcttctaataatctttttaccgatttatcgtctgtttttgagaaccatttagcaaagggaccggcagcatacaaagcaccgtatttgggattgtaagcttgtggaataacaatggctccacttagagattggaggattccagaaataataccgaaagcctcttcatttacaggacgttcgatttcgatattttctttttctgctaaagtttctaagtttttgttatgttttgatttagctagaacagaaatatcttctttttcatatccctcgcttactagtttgttgataatttcctctgctgcctcgacattttgaactgcgaatacttcccactttttcattatttgtcatcccttccattatccaattgtaagatttgttttatttcttctgtgcttaattttcctagcatttgttcgcccggttgaattagttcgtctactagcgcttgttttttcttttgtaaatcaaaaattcgttcttctatcgttcctttagtgatcatccggaacacttggacaacgcgtttttgcccgattcgatgtgcacgtccggtagcttgttcttctacagccggattccaccataaatcgtataaaatcacggtatccgcgccaacaagattgagcccggttccaccagcttttaaggaaatcaagaaaatatcattctccccttcgttaaaagcattaaccatatctagtcttgttttcgatggagttttaccatccatgtagaaaagtgtttgtccatcttcttctagtttttggcgaataattccaagcatacccgtgaattgggaaaataggagaatgcgtttaccgttttctcttgctgtttgtattgtatcaaataactgtagtaatttaccagattcaccttgataattttccacaaaaaggctcggatcacagcaaatttggcgtaaacgggttaatcctgcgagtaatttgattcgttcttcggaagcattaccattgcttgcttctaaatcagcttgaattttttctaaataagctaagtatattgttttttgctcatcggttaattcagaataaaggttggtttcaattttatctggtagttctttgacgacatcttgttttagtcgacgtagtaagaatggacgaatcactttccagcacacggtcggccgctcaagcatgcgaggaggtgccccacagt

SEQ ID NO: 3449 - DNA, 1459 bp, Listeria monocytogenes 4b
  misc_feature (1)..(end): n can be any nucleotide: a,g,c or t/u
cgaccgtgtcgctggaaagagcaaatggaagaaattaaagattatattggtaagccgcagtcaagttaccgtgtcggaagtattggtctgcacccgtctgtttcccaagaaagtggcttttatactgtcgatggctatgtgaattcctatcctcttgcttataaaagggctttccgaaaaattattgctggtgagctagacaagagtcctgttttagaagattattatgataattggggtaatcgttgttatatattttctgccgaattaggtaaaaactacgatttcggcaaggattcgaaaaaacacattaaacagttagattttaattcagaggcatttaaaaaggttggcggcgagtatattctatcagccgttccgattgataatgcttcagaagtcggactccagttcgaaaaagccttcgataataaggaatcttactggaaaatctatttatacaaagcaactaaataaaagcgtgaggcgtgattttttcttaacgaactaatcgcgcctttcgctttttttgtggtatgattaataaaaggagtgatgattatgaagaaaaccattcagtcagttggtgtttggggcgatagtattatgaaaggcgttcttttcaaccctgaaaaaaatcgctatacattgcttaaaaacaactgcattaaacgagcatccgaaaaacttggcctgacttttcaaaatcattccacaatgggtcgtacgataactaaaggccatgaaattctaacaaaagacttagcaaaagatgcaacaaatgatatcgccattatcgaatttggcggaaatgattgtgattttaactggacggaagtttccgaaaatccgacagctgagcacattcctagcaccccacttaacatttttgaaacgcaattacttgaaatgattgcacgactaaaaaaactggatattaaacccattttaatgacattgcctccccttcacgcaaaacgttattttgaattcattacgagaaatggactaaataaagataatattttgcagtttttaggtggcgatgtagagatgatttatcgctggcaggaacgatatagcaatacgatttcgcgcatcgcagccgaaactggtagccatattattgatgtccgtgatagttttctcgctgaatttcattatgaaaatttgctctgtgctgacggtattcatccaaacgaggctggtcatattgccatgtcacgcaaattcattcagtacgcaagttttcataaagcataaggaggaatttttattttacatttacaaactatgactgcttctgatttagaagattttttatctacagccattacagattacgcaaatgaaaaagttgaggccggcacatgggatgaagaagaagccttagctaaatcccaagactctttcaacaaattgctatatgacggaattactacaccaaatgaatatctct

SEQ ID NO: 3450 - DNA, 3584 bp, Listeria monocytogenes 4b
  misc_feature (1)..(end): n can be any nucleotide: a,g,c or t/u
atatgatcaaggcgtatttgaaggggaagtgatgtttttcctattaggattaactaattccattggtggctttgaaaaaatcgccccagatgccaagttagacgacggtaaattttcactcattatcgtgaaaaaagtaaatttagcggaatttatccgtttagtcacactggcgcttcgaggagatcatattaaagaacctaatgttatttatgtaaaatccgaaaaagtgattgttaactcagaagataagatgttaattaaccttgacggggagcttggtggggaaacgccaatggaattccgcaatttaagacaacatatcgaatttttcgcaagtgtagatgacatccccgcaactgatttattcataaaagaaaatagctaaaaactgcccagtttggtagtttttttctttagcctaaacgtcctaattgcaacatagtaaaaaggatgtaattattgttagaaatttgtcttatttgagcaaaacaagtataataggtattctgacaagaaatgaggtgaatgcgatatgacaagtggacatcaatttaaaaggttcacgatgataataatcgttcttatcattgctatcgcagcggctgtttttttcttttggcaagtggatgcagaagaacaggctccaaaagtaagtaaaacagagctaattgaaagtaataaagtatggataaacaaccaaatgcaaattccaatacaagataatattattttatctatccccgcaaccaatacaaatacaacgatagcaacaaatggggatttgattttagaaacaactaacgaagatattttaaaagaattagcttctactgataatcgttataaaggtatcaaagcatatcgacttcgtattgaagcgaagaaagtttctgagtatattactaatacaaaatatcgttacccaacaacaactatccagaaaaaattcgcaaactatgaaattacaagtggtgaacgttctgtacaaacagaaaaaacacctgtaaaaatagaagacacaacaaacaataatattaaagtatctctaaagacaagttattcaagtgatgatgctgaagtcgcagctggtatttttaatagccagattccagaagaaacgactattacagataacacaaaagcgttgactacgaataaaaatgtcactatctatccaaaaacatttgtttatgactttacgctacaaaaaaacaccatgcttgtttttaaagagcaagaagaagcagtaattaaagagccaatcggcatcgaatatattattaagtaaagcaaagagaggggcaagggactttggaagcatcccttttaaaaaagaaccaatccattgaacttactattgaagatttaacgcatgacggcagtggggttggcaaaattgacggatacccacttttcattccaaatacgttacctggcgaaaaagtgacagccaaaataataaaattaaataaaaattatggctttgctcggatggagaatattgaaactgttagtgctgatcgtgtagagcctccttgtgcggtttattccaaatgtggcggttgtagcttgcaacacttaagctacgatggccagcttgaattcaaacgaaatcaagtggaagaaacgatgaaacgtattggcaaactaaacgtagaagttcctgaaacactaggcatggaaaacccgtggcgctaccggaataaatcacaagtaccagtaggatttgttaatggtaagttaacagcaggtttttaccaaaaaagaagccatgccattatcgacatgtccacttgtttaattcataatgagcaaggtgattttgctgttcaaaaaacacgtgaaatcctagctaaaaacggaacagagccttatgatgaacaaacaggaaaaggcgatatccgccatattatgacaagatttgcgcatacaactggacagttaatgattgtccttgtaacaacaaaagaacgtatgccatttaaagaagaaatcgtacgggaattggtcgaacaattggaattaacctcgattgttcaaaatattaatccacataaaacaaatgtgatttttggagatcgtacgaaaacactttggggaaaagatatcattgaggatacgattcatggcattcgatttgcaatttcggctcgttcattttatcaagtaaacccaatccaaacagaagttttgtatcaacaagcaatcgatgcggctgagttaacaggagaagaaacagtgattgacgcctattgcggcattggttctatttctctttgtctcgcgaaaaaagccaagcatgtctacggggtagaaattgtggatcaagcgatacaagatgctcgtgcaaatgcagaactcaatgaattagcgaatactacttttgagacagggaaagcagaagaggttattccggcgtggtacaaagctggaattgtagcagacgtcttagttgtcgatccaccacgaaaaggttgcgatgaaaaattactggaaacaattttagcaatgaaaccgaagaaagtagtgtatgtttcttgtaatccagggacattagcccgtgatatgaaaatcttaacggatggcggctatgtagcgaaaaaagttcagcctgtagatatgtttccaatgacaacacatatagaagctgtgactgttctacatttaaattaagtatacaaaaaccgccataatgggataaatggcggtttttgcttttcgagtgtgtggttgactaataaattaacagacgagattaataaaaaccaagtccagttttatttaaccacganataaataaatggtcaaaagagcaaaaattaacttttatgagaatagaaccaatttaattaactaattttatcttatatagttaattaaaccacaataaaagcgaaaatcatccttaaaattgtcatgaaattgtcacctttttttcttctttcaaaaaggtagatagtctggtaagatgaatgtatgagatttcacatgaatggaggaaatgagaatggcaattactatgtatatcgaccagcctggtgcctcgttaaattatgagacaacacatccacatttcaaggaacattttaaagcgagtttttatttggatggtcaggatagctatggtccatttgggtataaagatggacttgaagtacttcgacgtttagaagaatattttagtgataaaagtgatcaaggactcaatttatcgtcttttccaaaatacatgatggaaacagtgaaaaaagcaaactatgttccagcgaaagacgatggtgtagaacgattgaaacaacttttgggtgagtttggcagtgacgtacgtgcatctgatagaattactgtctcagcagctttagctcaaatcaaaatcacgggctatattttacctgctcttcgtgatgcggcgctggaatcacttcatcgcgaaatagaattgaacaaaatagaaaatattgatgcaggttatgcggacagtatgttttatgacttattaacctttacaaaagactatacatctgtgttaccagatatgtggtgcagacattgtacagaataaaaaaacaacgctaaaatta

SEQ ID NO: 3451 - DNA, 1905 bp, Listeria monocytogenes 4b
  misc_feature (1)..(end): n can be any nucleotide: a,g,c or t/u
tggaacgagctctttcaaataatttaatgcgtagcctccaagtccacctgttgcacctgttactaaataagtcatttaaaccactccttcaaatttttttaatattaaagctgtacatttataatttacacctttataataaacattatgataagataagtcaagaagaaaatttgaaaggattgaaaaaaatgaaatactctatccaatttagtgatgctatccacattttggcttatatagaaatttttaaaaatacgaatttgttatcgagtgaaattattgctggtagcgtaaaaacaaatcccgctaacattagaaaaatcatgagtaatttgaaaaagtccaatttaattactacgcaaactggcaaagcaaatccgattcttgctagaccaccagaagaaatttcactgcttgatgtttataagagtatagaaggcaatacgaatttaattcacgttgatccaaaaaccaatccagactgcattgtcggagccaatatccaacaagttcttgcgagtaaatacgatttgctccaacaaaaaatagaatttgaaatggaaaaaattaaattagatagtattgttcgtgatatttctgtacttgaaagcaaagaccggccgcagaatatggaaattatcgaaaagtatttgtaaaaataagtccaaagaaaaaagaactgatccgttttcagcgaatcagttcttttttcataaatttaaagttgtagcttttttcttccccaatatttagaaatagcttttcgtaggtcatttctgtgcccttaaattagcagctttcgtccaaccaatgaaagtggaactagtccttattcggtaccaaagttgaccttcaacggtggctgttcgatcgacaattaatgtttgatttttatacttggctaaagttccccatttgattgggctatctactaccggaactttatagtatgcttcatttcctttatttgcgctgacgtatcgagttaattggattggtatttccatgctttgtttataaaatgtgttaagtgcacgcgtatcgacccaaccaattactttaccatcaatgctaaattgataccacgtagtaattggtgttttggcttcgcgcaatattcgcatatttttaccttggtagacggaaagcttgttcacgagggttgcgccagctgtattgtatggtttcgtccaaactgcattccctggcgcattttttactcttgcataagcagtaacacctttgtcatattctattttatcgtaacggtctaaggaaagattttcagctttggtccagccaatattttttaacctgtaccataattcaccgccatttcgcgcttctctatcaacagttaaagctttacagcggtgcgaggctagcgttccttgtttaagcgagttatcttctcttggaagtttgtagatccccgcattcccgcgaatatatttaacatagcgtgttaaattcactgctttttcagtcgtttccgctttaaacatcgcgtacaaagtaaaatcgtttccggacatataatccgtactaaaatcccactcatgtccaccatttttttcagtataccagcctttaaaaacatagccttgtttggtcggaggtttaggtgcagttattcgcgtccctgcctctacttttgtttttattaccgttccatcaacatcataacttactgtgtaaacctctttcagtggttgggttactctcccatgaaatcgtgcttttgcttttccaacaagtaactggttgatagaaaataaaacttacttcatttataaattctggtaaatgccatttgacattcggtttttcataatcgccatcatcacttattatttctggagtaacaagcgacccatcaatgttttttactgtgttcggaac

SEQ ID NO: 3452 - DNA, 2277 bp, Listeria monocytogenes 4b
  misc_feature (1)..(end): n can be any nucleotide: a,g,c or t/u
gaaggagacgactcaatctgcctgttaaggggaacgcccaccttgctgaaacaaatcagacagttacgtacatctactcaaaaacgaaaagtgaagtaaataaaggaacggtcggtatttcattctatactcctgatggtagccgccgggaacttaagtcctcattagacttaagttaggggtgcccagatggtgtcccaacagacacagtattctttttgcgatttagcaaaaaatacgacttacaaagatttaagaaatacgcctgatgcgcctactcttttatggaatgatttgttacattacatggtagactacatgaacggcgatatagatgccgctcaatttgaagaggcagttgggctaacaccagcgaattttgatttagattttatttcacgaaatttcgaaggatataaatttgatgaagcaatgtatcaagaaaatctaagtaaattagtcacttttgagcaagatggcgatcaagttgatttgcaagtaccatttaagaaagtagaagttggagcggatattactgtaaaatacgttgacacagcaggaaacgaattagcatctgtagaaacgttgagtggtgatgtggatgataactatacttcagaagcaaaaacaattgatggttggactttaaaggaaacacctaataatgcaacaggagtctttagtaaagaggcacaaacggttacgtatgtttatgaaaaaaatgatgatacagatgtcacaccggctcctgacaattcagcagatacaaatgatgacagtaactcatcagataatactgcgacaacagatgataatagtagtagcgcagtgaaagaaaaggcgcaaacacaagcaagtagtccaaaggcaggaaaagtaaccacacaagagagcacttctaacaaagtaacagcacaatcaaaagaatcacttcctaaaacgggagataacgtgttggaaagtagcttgttagtgggcttgggtatgcttttgttagggggattatttgtattccttcgtaaaactagaaaagtaaaataaaaaaacgcccagtatttgagcgatttcagactgtagacaaagtgagaaatcattttatctacagtctgttttttgaagttatttattaaacttcatcatatgcttctaaggcaacaggtagggcgcttataacagtatttcctacagccggtagaccaacgagaacggcgctaataatctcatcacgcgtcgcaccgtttgtctttgccattttcacatggaaagggagtccgctttctaagcgagtggcagccataacagcaatgtatgctagttcttctgtttttttatcgagtttacttgcggcatctagtttatgtacggtttccatccaggcagagtgtacttcgggagcttctttcgcgaacgcttcaaatgatttacttactttcattgaactcatctcctaacttttattataataaaaaaccgcccaaacagtggacggttttcgtattatctattttctgctttattataagcgccatgccaaacaggaccgatgaattcgtttagtgcaaatccacctttgatagctgcagtgacatagtcttttgcttttgcgactgcttcttcaaccgttaaaccttttgcaagtccagctgtgattgctgctgcgaaagtacagccagcgccgtgattgtggcttggagagattttttctacttcatagatagtaaattctttgccatcatatagtaggtcaattgctttgtcgctttctagggcttttccgcctttgataactacgtatttagcacctaattcgatgatttttttcgctgcttttttcatatcatctaatgtagttaatttgccaagaccggataattgacctgcttcgaataggtttggtgttgtgattgttgcttttggaagcagtaggtcgcggatagcttccgcgttttctggttggattaattcgtcttcccctttacaaaccataactggatcgattacgacattttttaaatcatatttgtcgatggcttcgcgtgtagctttaatgatgtcaattgaaccgagcatacctgttttcattgcgtcaacaggaccaccagaaaggattgttttaagttgctcgcgaacaagttgcgcatcaattggagtaacgccgtgcgcccagttgttatctggatccattgttacgattgttgtgattgcgctaaaaccataagtgccgtattcttcaaacgtttttaagtctgcttgtaaaccagcaccaccacttgaatc

SEQ ID NO: 3453 - DNA, 2426 bp, Listeria monocytogenes 4b
  misc_feature (1)..(end): n can be any nucleotide: a,g,c or t/u
aataccggcactaacggatacacaagcagctgccaaaccaactgctactattaaaagcacaaatttttctcgctcaacccgaacgccgagtccaggctgccacttggtcttcaaaagagagcacatccaacgtctttactttcataaaagcaattgcacctaaaacaataagccatggcaaaagagcataaacatattgccagcttgaagcccaaatatttcctgccatccattcagcatagcgttgataattttgcggatcaagccgaaccgtaagcagtgtgataagtgccgcaatcgccgccgcaacagcaatccccgtaagaagcaatcgattaggcaacaatccttcgcttctactataagaaagtccgtaaacaacaaacgcagttaaaattgccccgactaatccaataacatggcataaataacaccggaacgtccatcgtggaaggaaaaaaggaaatataaagcataaccgcaagtcccgcgccattattaatcccaagaattcccggatcagctaatccgtctccagaaatcccttgtaggattgctcctgaaaccgcaagacctgcaccaaccaatagcgcaataactatccgtggcacacgaaactccgtcacagtaagttgtgttcccgcgtccgccattccaaagaacgacttaatcacttccaaaaatggcaatttcgaataaccagcattgacactatatgtaaatgtacaaaaaattaacacgcttaaaataattaacgtccaaactcgccgcgatttttttcgtttttctgccgttgtcatatacattataagttcctcctttctttacgtgctacatataagaagaaaggaaccccgattaatgcaaaaataacactgattggcgtttcatatggcggattgattgttctcgccacaatatccgccgctaatgtcagaaaggctccaacaaccgccgagcaagggataatccagcgataatctactccaactaaaaatcgtaccaaatgcggtacaatcaagccgataaacccaaccggaccaacaaccgacacagcaagccccgccaaaatcaacaccacaaccatcgaagcaattttaacaaaagtagttttttcacctaaaccaacagcaatatcatcgcctaagcttaaaatggtaatcgatctacttagcaaaatcgccgcaataagcgctccaagtaaccaaggccaaatcgctgcaagctgactccatttcacaccagcaacaccgcccgcgtaccaaaaggccaaatcctgacttaactgaaaataaatcgcgagtccttcactaagcgcagtaagcaatgaactaaccgccgctccagcaagcactagcctcgttggcgacattgcgctccctgcaagagaactaacgccaaatactaaaaatgccccaattgccgccccaacaaaagaaaataaaatgagcgaattataactaagccaaggcataaatgcaaaacaaactgctaccataaacgtcgatccagcattcaacccaagcaagcctgaatcagcaagtggattccgagtgattccttgcataatcgctccagcaaccgcaaaagcagcccctatcgccatatccgcaaccacccgaggaacacgtaaactacgtataatctggtgctgcgtatccgaactattataatgaaaaagtgcatcccaaaccgtacttaaattaatatcggctgcaccaaccgcaatcccgaataacgctaaaatgagaagcaacaaaatcccacccgaaagtatgaatttagcaacagtcggtcttgtattcatttttatctgttttgacttatccatctgcacatgttccttccatctaaattatccgctcattttaagtgataataattatcaatcgcaaagaaaattatatcaatatcattcactaagcgcaatcattagttggacgcaagtaacttctctacaataatatccaactgtccttctaccgctaatggatcataataaaacatcgtgtcaaagtccatttggtaaacattccctgctttaaacgtcggcacatttttccaaattggcgagttcgttaaatcttttaatgttttctcgccgtctttagcactcccagaagaagtgcttgtaacgaacattctatcggccgcaaattcaggtaaaacttccagtgaaatcttttgccaatcttgcccatctaaaacatctttctgtatttttgctggtgcttttagttgtaaagcattataaatcgcttgaccacctcgccccatattttgtcccatcacataaaaatctttatcttgtacttcataaatccctactgtttcattcggatctaacttgccagccaacttcgctctactttctttggctttttgatgaaacttatctagccacgcctctccagcctttttttctc

SEQ ID NO: 3454 - DNA, 1545 bp, Listeria monocytogenes 4b
  misc_feature (1)..(end): n can be any nucleotide: a,g,c or t/u
taatgacaattggtattattggagcaatggaagaagaagtagaacttttaaaaaatagcatgccaagcgtagaagaaattgttattggcggagctaaattttacgttggcgaaattgctggcaaagaagtagtgcttttggagtcaggtattggtaaagtaaatgccgcacttggaacaacacttatggcggaccggtttaaaccagaagtaattattaacactggttctgctggtggtatggcggaaggattagccgttggtgatgttattatttctgaccgattagcttatggcgacgtagatgtaacggaatttggttatacttacggtcaagtcccaagaatgccagctttttatcaaggagacgctgtacttcttaaaaaagcggaaaccatttaccgtgaatattttgctgcaagcgaaaacaaagcagtctatggacttgttgttacgaatgattcatttattatgcgtccagatcagcacgaaacaattcgcacttttttcccagatgtaaaagcagttgagatggaagctgcggcaatcgcacaagttgcttatcaatttgatattcctttcttaattattcgcgctatttcagatttagcgaatcaagaagcgactatttcatttgatgaattcattcacttagcagcgaaacaatccgcaacatgtatcatcgaattactaaaaacaatttaaaaaatgcctggagtttttaagctccaggcatttttttatttgatatattcttctgttaaagtaaggaaatcttctacatctttggcagcaagagcaacagcttcttcccagaagtcagctttacgtaagtcaacgcccagatgtttttctgctagctgttctgttgtcatcgaaccagtgtcttgtagtagtgcaatgtatttatcttcgtaactagcaccttctgcttgagctttatggtaaatgccaagcgagaacaaataaccgaaagtgtacgggaagttataaaacggtacatcagcaatgtagaaatgtagtttagaagcccagaattgtggatgatattcatccaaggcgtccaagtatgcttctcgttgcgcttcttccattagagcgttaagtcgatcaaccgaaacgacaccttgtttacgtgcttcatagaagttacattcaaaaataaagcgagcatgaatattcataaagaaggcgatactacgaccgattttatcttccaacaacgtgattttttcttcttttgtttttgcatctttcacagaagcatctgcaataatcatttctgcaaaagttgaagcggtttctgccacgttcatcgcataatcagtattttcaaagggttcatcgcgaatcacgtgtgaatggaatgcgtgcccaagttcgtgagcaagagtagcgactgttcctggagcgccatcatatgtcatgaaaatgcgactttctttttcgacagggaagtcggtacaaaaaccaccaggacgtttattatcacggtcttccgcttcaatccaacctttttcaaacgctgattgcgcaaagtttgcca

SEQ ID NO: 3455 - DNA, 2291 bp, Listeria monocytogenes 4b
  misc_feature (1)..(end): n can be any nucleotide: a,g,c or t/u
tgaagttttttacagttaattcaattttaaatcgtaattatcaacatgtactactttttcaatttgtgttgtggattcttcactaattaagcctttaaaagatttccctgtcgccactagtgttccaaatagtatcgttaatgcaattagcacagttaaaaatattttatcaaaaagagttagcctgtatttattggcattaggattaggatagatttttttctgaggagctttttgattttccttatgctctttttgatattttttcttataatcatttggttgtttgttaaaccattttacaaactcatcatatttttgagcaacttcttgtgctgtacccatctctcttatttcaccgtgatgcatccaaataattctgtcacacaaactttttacttgtccaagtgagtgactgacaaaaacaatagttttgccacgcgctttaaattcattaatcttatcaacgcatttctcataaaaagtctggtcacccactgataaggcttcatcaataactaaaatatcaggattggtatgcaccgaaattgcaaaacctaaacgagaacgcatcccgcttgaatagtttttaattggttgattaataaaatcacctatatcagcgaattcgataatacttggcatcaacttgttaatttgagaacttttcattccatgcatgagtaatttcaagcgaatattttcataacccgtcagcggaccttttagtcccactgcaatggcaattaaagaagtttctccgttgataatgacttctccttgtgtcggaggaataacacctgacataatactcgatatagttgacttaccagaaccattgatcccaataagtcctactgtttcaccatcatgaatatcaaaagatacgtctcgcaacgcccaaaaggattgcattttttgacttttcggcatgaacaagcctttgatcttatcagatttattttgatagaggtcatattctttcgacacatgtttaaatgatacttttatatttttacccatctgtctaacctcctataaataatccacgaagcgttcgcggaatttcatgtgtagtgtcgcaccaacaaatagtaatgttagcgtgattaaccagaaatacatcgtgtatgatggagattcccagaagcctttattcattaagaatgtctctctaaagccgtttaccacatagtaaatcggatttagtttgagtaaatctactagccattgcggcaacattgtttctaaattccaaacaatccctgttacgtaaaaaagtacacgcatgacagattgcagcataatataatagtctcttactaaaacgctaattgttgcattaaataaagtaacactgaagagaaaagcaatcatggctacaaaataatacaagtactgaccccaatagattgtaataggagttccattaattgcgagcaagcctagcaaaattaccatcatagtaaaataacttgttaaattagagacaatcgtgatattaggtaaaatactcattgggaaattcatttttgaaaccatgcctattttattataaatactattcgcaccttgcaaaataactgcactaataaagaaccaaggaataatccccgctagcatccattcaatataacttgcatccgatccagattttgcattcatcccaaatccaaacacaaaataataaatagcaatttgtattaatggatttaaaatctgccatgctagtcctaaataatggctttggtatgtagccttatcttcatagcgcgcaatgcgaaatatcattggtaaattttttatttgttctttaataacttccataacctgtttcacaaaaacacttcttcccgaaaaataatatggttttaataaccagattcagctcactattcttttataggcaactcctccacttaaaaccacagacaccttgtttgtattatttgtcgtctcggttgccatattcttgctgtttatgcatgatcttctaagtgtatatagctctgcttatttggcaaattattttactaatacggtttagtaaaaaatccaccctatgttaaattaccttaaaagtcattttttgtaaagcttcatctgcaattatcgaagaattagttttcaagaacagcctgaatatctgctgccccttcaagcaatcttggtcctggacgacttaatttattggcatccatttcatagattttatcgtttttaaccgctggaatatctttccatgctgcacgtttttggatagttgctttggcatctaaatagacagacaa

SEQ ID NO: 3456 - DNA, 1683 bp, Listeria monocytogenes 4b
  misc_feature (1)..(end): n can be any nucleotide: a,g,c or t/u
tagatgactattttgaaggctagagagagcattttgatttgccggtgctccttaaaggaaccgattttcaacaaaaggtttggcaagcattgagtgaaattccgtatggggttgttgtgagttataaagacattgcgatttcagcaggtagccctaaagctgtgcaagcagtaggacaagcgaatcgcgctaacccaattccgattattatcccatgtcacagatgcgtgaaaagtaatggagaacttgggggctataacggggcggatgtagataagaaacaatatttacttgcattagaaaaaggcttgagtttaagttaactcaagccttttttattacactgttacttgttctgttatagtaatttctttattttcgttaagggttgcaacaagatgttttgcttctggttgttcaattagactgtcggcaatcgcatcttctaggtgttcttggatagtccggcgtagtggacgtgctccgaatttagggtcataaccaaggtcaatcaaatgttcttttacttctttagaaacatcgattgtcacatcttcttgagcgagcatttcatttaaatcaacgagcattaagtcgatgatttgtactaaatcgtctttttctagggatttaaattcaatgacgctgtctagacggtttaagaattctggtttgaagtatgcgcctaattttgctaagatgtcagaacctttttcaagttttgcttcggttgttgtattaaagccgaccgaagcttctgtgtcagttgcgccagcgttacttgtcataatgatgactgtatctttaaagctcactgtacgtccttgtgaatcagttagtcgaccgtcttctaaaatttgcaggaacatatgttgaacgtctggatgtgctttttcgatttcgtctaacaaaatgatgctatacggattgcgacgaactttttctgttaattgtccagcttcttcgtgaccaacatagccaggaggggaaccgattaatttagagacgctgtgtttttccatgaattcactcatgtctaaacgaatcatcgcttcactagtaccaaacaattcacgagctagcgtgcgtccaagttctgtttttccgacaccagttggtccaacaaataggaaggaaccaattgggcgattttttgatttgaggccaacacggctacgacgaattgctttagctacttttcttacagcatcttcttgaccaatgacttttccagttaagttactttctaagttcttcattttagattgctcgtcttcttgtaagcgtcctactggaatacctgttttttcttcaataattgcttggatgtcggatgcttggatgactggacgctctgagaaggagttatttgttttattttcttctaagcgagtaatttcatcacgaactttggctgccttttcgtagtcttccatttgaagagcttgatttttttcatcttctaaacgggcaacacgttcgctcaccgtattttcgtccagtttttcaatggatagattatatttcgagccaacttcatccattaaatcaattgctttatctggcaaatgacgatcttggatataacgagcgcttaattcaactgctgctgttagtgcttctggtgaataaactacttcatggaaatcttcatattttggttttaaaccatttaaaatagtt

SEQ ID NO: 3457 - DNA, 693 bp, Listeria monocytogenes 4b
  misc_feature (1)..(end): n can be any nucleotide: a,g,c or t/u
cgtgaggggccaccagtgtgctggaaagtggttttttgggcgaaaagttttatatacggcactactaaatcatggtaaaatatgaaagtatccgtcaaaaaaatgaaacttattcgaaaagggaatttttatgataggtttctttattaaaatatagataaaatgagttaataatttactcaaatgaaggagaagttgcagtgaaaaacataattaaaaaaacagggattgtaatcatggcagcatcccttgcagtaagtggcttcttagtaagcccgaaagcagcacaagccgcagaagcaccaaatgtaaatgcaaacgcagcaatcgcaattgaagaaagtactggtaaaattttatattcaaaagacgctgacaagctaatgggcatcgcatccatgacaaaaatgatggacgaatacttactactggaagcaattgacaaaggacaaattaaatgggacgacaaagtaaccatttctgaatatgcttacaaagtttcacaagacacatcactatcgaacgtaccacttagacttggcgaagaatacactgtacaagaattatatgaagcaatggcgatttactctgcaaacggagcagcaattgctatttccgaaaaaattgcaggttctgaaaaagaatttgtcgatgctatgaataaaaaagcggacgaacttaatctaggcgagc

SEQ ID NO: 3458 - DNA, 2320 bp, Listeria monocytogenes 4b
  misc_feature (1)..(end): n can be any nucleotide: a,g,c or t/u
gctacccttcccaactttctggtggacaacaacaacgggtagcgattgcccgagcactcgcaatgaatcctgacgtaatgctattcgatgaaccaacttccgcacttgaccccgaaatggtcggtgaagtattaagcgttatgaagtcgcttgctaaagaaggtatgacgatggttgtcgtaacgcacgaaatgggattcgcaagagaagttgccgaccgcgttgtcttcatggatgctggcgtgattcaagaacaaggcacgcccgaagaagtattcgggaacccgcaaaacgatcgtacaaaagactttttaggaaaagttttagcataaccaaagattacgtctcgcctattttaggtgaggcgtttatctgcacttatagaaaaaaggagctaattatacatgatgaataactcaaaaattgctaaaaaacatcaacaaatgcctgtgaacattcttgctgatattggcacacttgccaaaacaatgcctgatattctcgatttatccattggtgatcctgatttaattacggatgaatcgattattaatgccgcttttgaagacgtacgggcaggccatacaaaatacacagaatctggtggagatgtagaactcatagatgctattcgtggttattttagccgtaattatgatttgtcttttgaacgcagccaaatccgcgctacagttggcgcgcttcatggtatgtacctaaccttgcaaaccattctcgacgacggcgatgaagtcattattcacgaaccctacttctccccgtataaagatcaagtgttaaattccggtggtactcctatcattattccaacctatgagaaagacgattttgcgattaatgtcgatattttagaagctgccattactgataaaacaaaagctttaattttaaattcacctaataatcccaccggtgctgttttttcaccggaaacctttgaaaaaattgctaatctagcgaaaaaatatgacttttttattttgtcggatgaagtatatgatggttttagtttttatgaagacttcgtaccaatggccaaattcgcgccagatcacacgattacatttggtagtatgtctaaaaacttcgcaatgaccggttggcgcttaggatatatgattgctcctacttatttaaacgaagctgcaaagattattaatgaaggaattacttattcagctcctacaccgtcccaaagagctgctatttacgcattaaatcattctgagacactaattcctttagtaacagaaactttccaaaaacgcctagaatacatcgcaaaacgggtggaagaaatcccatatctttctttacatccacttaaaggttcgatttacgcctttattaatatttctaaaacaaatatggattctgtttcatttacagaatatgtcttaaaagaaacacaagtcctcgtcattcctgggctagcttttggtgaatctggtgataattatgttcgcctagctgcaacccaagacattagcgtgctagaagaagcatttaaccgtctagccaaattaaccttttaacaaaaagagcaaactcgcttcataggcaagtttgctcttttttctattttaaattgatttctgcaaaagaagaaacagaccgtcgcctcttttggaaaagtgatgttttttgtagcttcattcggtacgatatacacctttaacccagcctgcattgctgatagcgcaccatttttggaatcttctatagcaattgcttcttctggtttaaccccaagcgcttctactgcttgtaagtaaagtgccggatgtggcttaatttcatccacatggtctgccgtttgtatcgtctcaaaatcagctaaaatgcccagacgatccagcgtaggctcaatccagtcaaatcccgaactcgttgcaagacctattttaaaatcattcgcttttacttgttcaaaaaactctttaaaaccatcacgaaagccaagtgattgttgaccaagatgacaagcttccgccacagtagttaaaaaagcttctttatcaaaagccccgttcgttgcttccatcatatagcgaataattggttcttcacttgtaccgataatttgctgataaatttcatctggtaaatcaatatcgtacgtctctttcaaatagttcattgtctctgtataccataaattttccgtatcaagcatagttccatcaaaatcaaaaacaactgccttcacatgcatcctcctagtataagtgatattttcattgtaacatagatctttccagcacacgacggccgccaagcagctctaagttcccaaagt

SEQ ID NO: 3459 - DNA, 2520 bp, Listeria monocytogenes 4b
  misc_feature (1)..(end): n can be any nucleotide: a,g,c or t/u
catttgcaaactatatttggggttttacgaataatgaccgtattattaatgaatggcaaggcatgggagaggtccctgcaagcacagaactatcagaaaaaatcagtaaagatttaaagaaacgtggttttaagtttgttggccctgtaattgtgtattcttatttacaagctattgggattttggatgaccatttacgttcatgcccatttcatacatttaatagggaggcgacgaaatgattccagcgaaattaaaacaaggggatgaaattcggattattgcaccaagtcgttctatcggtattatggctgacaatcaagtggaaattgccgttaagcgcctaacggacatgggttttaaagtcacttttggcgaacatgtagcagaaatggattgcatgatgagttcaagcattcgttcgcgagttgctgatatccatgaagcctttaatgattcgagtgtcaaagcgattttgacggttattggtggttttaatagcaatcaattgttgccatatttggattatgagttaatttcggaaaatcctaaaattttatgtggtttctccgatatcacggcattagcaaccgctatttatacgcaaacggaacttatcacttattcaggcgctcatttttcaagtttttcaatggagaaagggctggactacgtaatggactcatttagcaagtgtttattgcaaaaagagccgtttgcgcttaaagaaagtgctgcatggagtgacgatgaatggtatttggaccaagagaacagaaattttattccgaatgagggattagttgttatgcaacctggagaggcagaaggaatcatcattggcgggaacttatgcacgcttaatttactccaaggaaccgagtacatgcctaacttagcgggtaccattttatttattgaagatgattttatgactgttccagaaacattcgaccgggatttagaatcgctattaagtcaacccggtgcaggtgagatagaagggctggtaatcggtcgtttccaacagaagacagcgatgacagcggagaaattagcatatattattgaaacaaaaacggcattacaaaaaatcccagttatatctggtgcggattttggtcatacacagccaattgcgacattcccgattggcggaactgcaagaattgatacaaatcagaccgataaaattcaaattattaggcattaaaaaaaggctgtccaatgcggacagcctttttaatatttaacttaaagcgacatctcgttttttgaataagaagaaagtgaagaaaaggataatcgctgtataaacacctagaccggcgattatttgccaatctgctaggccaccagcgattttagaaccgccaactgtgtcatttaggctgagcaagttgaagataatccatttcatccaatcgtatttttcgatagcgagaggtagtaattggcgaataattccaccggagaatagtacaccaacgccgacaccaactgcaagtgcttgtgaacgaacgacagaggagaagaagaaagcaatagttgcgtatacgatcatcagtaagaagttcgtaccaagtagcatccacgcatgttcgaaagcagtcattgcacccgttgaaggggagagcggcataaaaatagattgttttggtaaaataaatgaaaagataaagctagctacaagtaatgtgatagagctaataatgctgtaaacgatacacattacgtatttggaaaatagtatctgacttctagaataaggacgtgtcagtaaaagtttgattgtcccaccagaaaactctgttgcaacgatgatacttgctacaacaacaacaagcattgtcgcaacggctcctgagctacctaatgaagcgaagaaatctgcgcttgaaatacctgctgaattactagcgggtttttcatctgcatcgacataagcttggtaaaaatcaatttgtttttggatagtttctttggcttcttttgttggagccgcttgttcttgtgtttttaagtaagcaacagaatcagttaaagataacgtttcagatttatacgtaggattaccatctttatctgcggagttccaatattcttcttcgctaaccggggcacctttatcgtcatagtaagcagtaataccagcattatttgcgtcgccgccttcgataccactagtatctattttactaacaaaaaacataagaagagcaagagctaaaactgctacaaataagacgatttgcataatccaccttgattttctggaaaataatttggtaaatccattttccactaatgctttcatacttctgcacctccacctttagttaattcgagggatcgttcttcaagggaggcttgaagtggaacccttcctatcaatcaatttccgctcggatcagcgcccgagccattggatcggccttttcgctgaggcctttggctcgccccctgtccttcttttccgccccgcccccgctgggagcgcacccggacccgccaaacaaa

SEQ ID NO: 3460 - DNA, 1851 bp, Listeria monocytogenes 4b
  misc_feature (1)..(end): n can be any nucleotide: a,g,c or t/u
aaagtttttcgcttacacaagtaaaaaagccaagtgtgtaagacaatacacacttggcagattcctttttcttaattttcttccacctggtttgagagcatcatctgtgttaaatatgcgatttctgattgcggtattacgatatcatactcaatttctacgtttttctatcatttgttgtgtaatttgcatttccaccatatgatttttttctaattcatttaattctgggaattcccggtcgacagcgcctaatttcacgcgttcgatgaggaaagctaagtgtagaatcataccaatgtccacacctgactcaagtataacattaagttgcaattgcaattctgaaattacttttcgtaaaaagtaaaccagttgttcagcagagcttactgcttgtaaatttccttctaatgaagcgattaatttttcgtaaggtacttcatcatttaatattctagaaacaatccctaacccaccttctgatagaacttccagtgcgctaaagaatgggatatcgcgatattcaaaggctactgatcccatgatggctagaatattatattcttccatgagttgatcaattcgctcccgaaaagcttctttatgcaagaattgtaatacaataatttcaatttttgtttcatcaataattggtgctacgactttacgcaactgttcggctactccttctccagtaaaacaagtgaagataaccgcatttttcacaggtttagcgcgtaagacatgtgctttatatttattttcaaataattgctcacagctttgataaatatcttctaaaccacgaccaagtgaagctttccgcatcgcttccagtacaactggtgtacttaccatcgtaacggtttttgtacggattcccagttcttcggtcagcatgttgccgaaagaagtgagggaacccatatcagaaaggattagaacgcctttgacaggatttaacttaatgaccgtttgttttaatttttcatacatcgcttttacttcaacagtgagcggcatatcaagagcaatcccgctttcaatgctcagtaattcctgtaccgtctccaccatactcgtagcagttgaacggccatgcatcatcacaataacttcgacttgattttcttgagaaagtgacgtatctactacttcctctgtcaggaacatcgttaaaaacccaatttcgtcaaaaggaatttcaatgcttaattcttgttcaatcagtgcggataaatcaatagctacttggaactcttttggatattttttgcgaatattatttaaatcaggatgaatgatatgcttttgttcccgtactcgttcgatggtactttgtaaatgtaaagaaaaagcaaatttcattttttcgttgtatttgcgatttagtttttcttctgccatggcatatactttttctgttaattcccaaacagcaggcgcaataatttctttggcagtttggtgggttggtaactggaccatgtagttgtggaaatattgatctacatcaacataaagtgcttcttctaactcgctttggtccttcccttctttcattaattgatctgctttttcttggatggcatggtaaacatcatgaacatcttctgtttcaacaaattcatcactcgtatcaacaaatttaaaaatggctttgttcacgtcaatcaaacgatttaatttttctggttcgtcttttaagtggagtaaacctttttgaacgtggataggcaagtcatcttgttcgattaatatataattagccgttttggttttataatgtaaaaatgctttggcacaggctagttttaagtctctttgcaattgaccgacgttcgcact

SEQ ID NO: 3461 - DNA, 2109 bp, Listeria monocytogenes 4b
  misc_feature (1)..(end): n can be any nucleotide: a,g,c or t/u
agaatattatggtcaaaagatgcgccgtctacgatatcagcagctgctttttcgatgtttgctgtctcatctacaatagatggcggattcccggcacctgcgccaataacttttttaccggattgcatggcttgaagaactacaccagggccacctgtaataacaaggagcggtactttcggatgattcatcatttcttgcgcggcttgaatagatggtttttcgactgtaacaactaaattatcaatgccgcaactttcacggacaatcgtattcaacttttcaatcaaccaaagagaaatatttttcgcacctggatgcgggctataaaatactgcattcccagctgcgagcatgccgattgtattgcaaatcaaggtttccgttgggttcgtgcttggtgcaacagctccgattacgccatatggagaaagttcgtaaagcgtcatgccattatcaccagtagcaacttctgtatacaaatcttccacacctggcgttttttcaatcgctaacgtgtttttcaaaattttatctgctacatttcccatacctgtttcagcaactgctcgcgctgcaatggattcaatttctggataaagtgcttcgcgaattgctttcacaacgttgcggcgttcttctaatgatttttctttatagttattttgtgctataactgctgcttgaacggcctcgtcaactgtatcaaaaaccccacttttcgcgcctttgaccgttgtttttactggtgcatctttttgttctgctaatttttctaaaagaactttttttaccagttgttcgagttctaatgattccatacagaattaccccttctctatcattgataatgctttttttgcaatgtggatatcctcttccactgatccgccgctaatccccattccaccaataatagctccatcttttccgtagattggaacaccaccgccaaaggttacaatatcaccatttgtcagtgtttctaattgataaagtggggctcctggctgaactgcttctgttaatttttccgtgcttgttttcatcgctacggcggaataggcttttttcgttgccagttctgcacttactaaaagagcgtgctccatccggtaattaaatctgacattaccgtgcgcatcgacaatagcaagtgtgactggaacgccaatttcttctgaaacgatgcaaacttggtgcattaatttttcacaaaaggaaaaagacaaatcgcatgtaactgacttttcttggcccgtttgctctaagtatttggcaacaatgagcttggttgccttatcgagcatttgtctgaaatcttcttctctagcaagaatatacaagaaatccgataagcgatttacaaattttaataactcttttcggatagctgtttgttctgacaaacgaactaataatcgctcaccacgcctagcaacagtcctggcgctatgaagaaatgctcctgctgtgcttgatccaggaagaacaaaactatcgacttttggcaattttgcagtgtaatcatcaatgactttttcaagttgattgatgtcgttttctgtaataataattttgctagcgagggatgcttcgtgctctgttgcaagttctgcgcaaacgtaaaacaactgccgctccacgtttctaagcaaagtcttattctcagctgaagtcacgaatttttctgctacactaatttctgcattcagctcatcaaacgagccataggtttcgacacggtcatcatattttttcacacgattcccatcaaataatgcagtcgttcccttatcgccggttttggtataaatactcacgagttattcactccttacttatcaaaactatcgacaattgcaataattgccgaatcaatcgcactatttggttccgcaaaaacacttctagctgcattgccacgagcaacaagcacaaactccccaattcctgccccaacagagtcacacgctacttcttctgagcgcacatgctctccatttgcatcaaccggttgacaatcatcaattttttaccagtaagtgagtcttctttttttgtggaaactacacttcctgttatttttgccataaaaataacgtcact

SEQ ID NO: 3462 - DNA, 1762 bp, Listeria monocytogenes 4b
  misc_feature (1)..(end): n can be any nucleotide: a,g,c or t/u
tttcgaagcagtggtagtgtttgggcgaggaatatgccgcccggagatcgtcattcacttgtgtgtattgtcccatacgggcataaaagcaagccaacttatcgaagtgggagtaaatggtttgttttaagagcgtatatttatggttaaaaataaaaatacagactagttctagaagttagaatggattgttttagaaattttttattaattcatctgcaaattccgaacatttaacttctgtcgcaccatccattaatcgagcaaaatcataagttacggttttcgcagcgattgttttttccattgactgattaattaatgcagccgcttcaccccaaccaatatgttcaagaagaagtgtcccagataaaataactgatgaaggattcactttatcaagacctgcatatttcggtgcagtaccatgcgtcgcttcgaaaattgcatggccagttaagtagttaatgtttgctcctggagcaataccgattccgcctacttgagcagcaagtgcatcagaaatgtaatctccattcaagttcattgtagcaactacatcaaattcagccgggcgagttaagatttgttgcaagaaaatatccgcaatcgaatctttgactaaaattttcccagcagcaagcgcttctttttgtttcgcatcagcaacttctgttccttcagcttctttaatgcgatcatactcattccaagtaaatactttatcaccatattcgcgttcacataaatcatagccccaatttttgaaagctccttctgtgaacttcatgatattccctttgtgtacaagcgttaatgatttacgatcttctttaattgcatattcaatcgccgaacgcactaaacgctctgttccctctttggaaattggcttaataccaataccagaagtttccggaaaacgaattttgtcaacgccaaactcagattttaagaagtcgattagtttttttgattcttcgctgccttctttaaattcaatccctgcatatatatcttctgtattctcacggaaaatgaccatatctgtgtcttccggacgtttcaccggtgaaggaacgcctttgaaataacgaactggacgtaaacaaacatataaatctaactcttggcgcagggcaacgtttaacgaacgaatgcctccaccgattggagtagtaagcggtcctttaatagcaatcaaatattcatcaattgtatctaaagtcgcttgtggtaaccattctcctgtttgtttaaatgctttttcaccagctaatacttctttccaagcaatttctttttcgccattgtaagctttttttactgcggcatctaaaacgcgttttgcagctgcccagatgtctggaccagttccgtccccttcaataaaaggaatgactgggttgtttggtgttttgagcacaccgttttctacttgaattttttgactcataaagtttgttcctcctcgattaaattcgttcttctacaggtaaataacttctattttcaggtccaacgtaaattgcacgcggacgaataagacgattatcacggtattgctcgaaaatgtgtgctaaccaaccagatacacgacttacagaaaacacaagcgtaaacaagtcgcggtcaataccaagcgcatgataaacggaggctgaatagaaatcgacattcggttttaagtgtttcaattcccaaacagattcttctttccagcacactgtcggccgtcaaacaggagtagtgtgcccaaggt

SEQ ID NO: 3463 - DNA, 2464 bp, Listeria monocytogenes 4b
  misc_feature (1)..(end): n can be any nucleotide: a,g,c or t/u
ctcgaaggagaagcaattgcctggcacttagccaatagcctagagttagatcaatcagacaaactacgtgtagtatttaacgaaataacgaaggaagcagtaaaagaatctttcaaaacaccacgtaaaattgacatggatttagtcaatgcgcaacaagcacgcagaattttggaccgtttagttggatataatatcagtcctattctatggaaaaaagtgaagaaaggtttgagtgcggggcgtgttcagtctatcgcacttcgaatcattattgatagagaaaaagaaatcaataatttcaaacctgaagaatactggacaattgacggtaacttccttaaagggaagaaaaaattccaagccaatttttatggtgtaaatggtaaaaagaaaaagctttccactgcagatgatgtaaaagaagtaatgtctgcaataaaaggaaaatcatttgacgtaacagatgtaacgaaaaaagaaagacttagaaatccagctgcaccattcactacttcaagtttgcaacaagaagcagctcgaaaactaaattatcgtacaagaaaaacaatgatgcttgcccaacaattgtatgaaggaattacacttggtaaacaagggacagtcggcttaattacgtatatgcgtacagactccactcgtattgccgattccgctatactagaagcaagcaattacattaaagaaacctatggacccgaattttctcgtaatcataaacgttcagataaaaatgctaaaggtgctcaagatgcccatgaagcaatcagacctacaagtgcaatgagaagtcctcaagaagtaaaagaatttttaacacgggaccaacttcgcttatatcgtttgatttgggaaagatttatcgcgagccaaatgacgccagcagttcttgatacaatgcgcgttgacttagacaacaatggcgtgaacttcagagcaaatggctctaaaattaaattccacggcttcatgaaagtctatgtagaaagtaacgatgataatacggaagaaaaagaaaatatcttaccagatttgaaaaaaggagataaggtacagtccgaatcactcgaacaacggcaacatttcacacagccacctccacgttacacagaagctagattagtaaaaacgctcgaagaaattggtattggtcgaccatcaacttattcgccgacactcgacacaattcagcgcagaaattatgtttctttaacgaataaacgctttattccaactgaattaggtgaaatcgttaatgaaatgattgaagaatatttcccagaaattttagatgtcaaattcactgccaacatggaaagtgagctcgatgaagtagagcacggagaagtcgaatgggtgaaagtcattgatgaattttataaacgatttgaaccaaatgttataaaagcagatgcagaaatggaaaaaatcgagattaaagatgaaccagccggaattgactgtgatctttgtggagctccaatggtttacaaaatgggtaaatacggtaagttcctagcttgtagcagatttcctgattgtcgtaatacgaaagcaatcgtgaaagaaatcggcgttacgtgtccgaaatgtgagaaaggacatgtaatagaaagaaaaagtaagaaaaagcgtattttttacggttgtgatcgttatccagattgtgactatgtatcatgggataaaccggtcgaacgggcttgtccgaaatgtgagaaacgagcattagtcgagaagaaattgaaaaaaggtgtacaagtacaatgtacaaattgtgattacaaagaatcaacccaacaataatcggaaaatggcaacacttggatcgttcttgtgttgccattgttgcgcgaggaggcggacaaatggaaaagagtgttaatgtaattggagcaggtttagcaggaagtgaagcagcatggcagttagtaaaacgtggggtaaaggtggatttatacgaaatgagaccggtaaaacaaactccggcacatcatacagataaatttgcagagctagtatgtacgaattccttgcgagctaacggtctaacgaatgctgtaggagttattaaagaagaaatgcggatacttgattctattatcattgaagccgctgacaaagcatctgtaccagctggaggggcacttgcggttgatcgacatgaattttctggttatattacagacaaggtgaaaaatcatccactcgtaacagtgcatacggaagaagtaactactattccagaaggtccaacaattattgcgaccggtccacttacaagtcctgcgcttgctgatgaaattaaacaattaacaggggaagagtatctttacttttatgatgcagcagcaccaataattgaaaaagatagcattgatatggataaagtttatttgaaatcccgctatgataaaggagaagctgcttacttaaactgccc

SEQ ID NO: 3464 - DNA, 2269 bp, Listeria monocytogenes 4b
  misc_feature (1)..(end): n can be any nucleotide: a,g,c or t/u
gattttttccattattagctgcgtattcatagccatctgccactttcattttaccacatcctctactaatgcgattctatgttctaattcacgaattttcgcttggttttctgatgaaactggttggctgttagaaatagtctgaataatattatgccatgtatatgcttcatggcgccacttgcttttgaaaatggcgctcttgttcttttaataagcatggtccgaaaaatatttcttgcttagtccaagtaactggtttttcagacggagctaacaccatgatttcataaactttattatcttcgcgtaaaattgcttcagaagtaataagccaattgttttgttcggaccactctcttaattgccaggctgcaatattaggttgtaaaattagtttggttacaccggctaattttgctgcaccttcctctaaaatagtacgtatcaacgtgccacccatgcctgcaatcacaattgtatcaatcgcatcctttttttcgataacagctaaaccgttcccttttctaacgtcaatttgttctgttaagccagaagaacgaacttgtttttgtgcagattgaaaaggtccatcaactacttcgccagcaatagcgaacgaagccgtttgatttttaactgcaaaacaaggtaaataagcatgatcgcttccgatgtctgcgattcgttcattttttgttatgtaagaagccactttttcgagtcgcttcgataattgctcttcgttcatttggttccctactttcattttcattaaaaaggcaggagaacggtttgtcctcctgcccggttgtgctttattccaggaagtcttttagttgtttgctgcggctcggatgacgtaatttacgtaaagctttggcttcaatttgacgaatccgttcacgagttacaccaaatacacgaccaacttcttctaaagtgcgcgtacgaccatcatctagaccaaaacgtaagcgaagtacattttcttcacggtcagttaatgtatcaagcacatcttctaattgttcttttagtaattcgtatgctgcgtgatcggacggtgaagttgcatcttggtcttcgataaaatcgcctagatgtgaatcgtcttcttcaccaattggtgtttcaagggaaactggctcttgtgcgattttaaggatttcccgaactttttcagttggtaagtccatttcttcaccaatttcttctggtgaaggatcacgacctaagtcttgcaataaggaacgttgtacacggattagtttgttgattgtttcaaccatatgcaccggaatacggatagttcttgcttggtccgcaatcgcacgggttatcgcttgacgaatccaccacgttgcataagtactgaatttaaatcctttattgaagtcgaatttctcaacggctttcattagtcccatgttaccttcttgaattaaatcaaggaataacataccgcgaccaacataacgttttgcaatacttacaacaaggcgcaggttggcttctgcaagacgtcctttggcttcaatgtcgccagcttcgatacgttttgctaaggcaatttcttcatccgctgtaagtaagtctactcgaccaatttctttcagatacatgcgaacagggtcattaatttttacgcctggtggtacactcatatctgttaaatcaaaggattcggtttcttcttttactagttctgtttcatccggatcctcatcatctgcatcgtcagaaacttcaattcctgcttcaccaacatgttctaaatactcatccatttgatcggaatccaaagtgaatggagctaatctggcagcgatttttgcataagttaaaatcccctttttcttaccttcttctatcagggcttcttttacttgctcaacacttagttcagcaactggttttgtgttttttgttttatcactcataactgcctgtattcctccttccaaaatgccgctaaccttattaaaaggcttctcttaggtaataataccatcatttagcggttttaaaacgttattaatccaattggccgctgtttaactgacggttgagttggacgatttcgagcatgacacgaatttcgttatctttgtcattttcacgatttaaagtcgctagctcttgctcaagctcttttttcttttgttctaatttaaaccgctttagacttctaatatagtcttcaactgggttttcccttgttcggcgggactataaccctttcgagctactgataagcgctttcatg

SEQ ID NO: 3465 - DNA, 1363 bp, Listeria monocytogenes 4b
  misc_feature (1)..(end): n can be any nucleotide: a,g,c or t/u
aagctatgcaaaagatgaatacaactaaattgaagtttttttgttataataagacatcaggaattttaaaggagacggaactaaatgaagaagttgctttttttaggtgatagtgtgacagatgcggggcgagattttgaaaatgaccgcgaattaggacatggttatgtgaaaataattgcagaccagcttgagcaagaagatgtaacggttataaatcgtggcgttagtgcgaaccgtgtggcggatttgcatcgtcgtattgaggcggatgcaatttcacttcaaccagatgtagttacgattatgattgggataaatgatacgtggtttagttttagcagatgggaagatacttcggtgacggcgtttaaagaagtgtatcgtgtgattttgaatcggattaaaacagaaacaaatgcggaactcattttgatggagccgtttgtattaccatatccggaagatcggaaagagtggcgtggtgatttggatccaaaaattggagctgtgcgcgaacttgcggcagaatttggtgcaacgcttattccgcttgatgggctaatgaacgccctcgctatcaaacatgggccgacctttttagctgaggacggggtgcacccgaccaaagcaggacatgaagcaattgcctctacttggttagaatttacaaaataacgctttacagaaaaaattatccatgctatagttgggtctatgcgatgagcctacaagcagtgacttaagtatcactgccccattttccgcgttatagctttgtggaaggctgcggaagatgacgctatgaaatgccccttaaagtaatttaaggggcattttctataaaaaaggagtgtttgttttgcagaaagagaaagcaccgataggactttattttttattaattgcagtgatggcgagttggggttttaatgtcacgatgacgaaagtattagttagctattttccgactgttacgatgacatcttttcgaattttcaccgcagctataaccgttattattattttatttatcacaaaaaaattacgtctgcctacaaaacgggaatttggtttaatttttctcgcgagtatttttaatattgttattcatcattttttcttgtcgaacgggttgaagctgacgactgggacgaatgctggccttattcttggttctgcgccgattgtggtggcgattttttctgtggtttttctccgtgaacgaattggagcttggcgtgcgctcggctttttagcagggatttttggcgtgagtttggttgttctttctaatgggacggggataagcgggatttcactgggagatatcgacatctttatcgcgatggcttctcaggca

SEQ ID NO: 3466 - DNA, 1268 bp, Listeria monocytogenes 4b
  misc_feature (1)..(end): n can be any nucleotide: a,g,c or t/u
agtggaaccaccatccgcacaaccagttgtcgtagaagataatgttgttgtaggcgccaatgtggttgttttagaaggtgtacgtattggagaaggcgcagtcgtagcagctggcgcaatcgttacaaaagacgtagctcctggaacagttgtggctgggattcctgcacgtgaacttaaaaaattagacgcaaaaacagcttctaaaactgaaatcatgcaagaacttcgtcaactttaaaaattaaagggaactgtttcgtctgttggcgaagcagtccttttttagaaggagagaatcgctgtgttaaatgaatttattgccattcgacgagagttacaccaaattcctgaaacaggttataaagagcttaaaacccaagcctatttattagactatattagcaaattaccgagtgaacatttagaagtgaaaaaatggcgtacggggattttggttttagtaaaaggaactaatccagaaaaaacaattggttatcgtaccgatattgatgcgttgccaattacagaagaaactgggctgccttttgcatcaaaacatcctggcaatatgcatgcttgtgggcacgatttacatatgagtatcgcgcttggtgtattgacgcattttgcgagtaaaccagccaaagataatttgcttttcgttttccagcctgccgaagaaggtccaggtggtgcaaaacccatcatggaaagcgctgaatttgccgagtggcgaccggatagcatttatgggcttcatatcgcaccagaatacaaagtcggagaaattgcaattaagccaggtttactttttgcgaatacatcggaactttttatttcgtttaaaggaaaaggtggacacgcggcgtatcctcatttggcgaatgatatggttgtcgcagcaagtgcgtttgttgggcaaatgcaaacgattataagtcggaatattgatccaatggatagtgcagttattacgattggccgaattcatggcggagaaattcaaaatgtcattgcggaaactgcttatttagatggaaccattcgaacgctttcccctgaaacaatggagattgtttggactcgtttgaaacagctagcgaaaggctgggaagaagcttaccaatgcgaaggggaatttcatcctggctcggcttattcggtccagcaccctgtcgnccgtgaataggcnaccaggctcggtgccgtnnaccacaaaactannnaaaagnnncagactnnncccccctccttcggggcccgcg

SEQ ID NO: 3467 - DNA, 2917 bp, Listeria monocytogenes 4b
  misc_feature (1)..(end): n can be any nucleotide: a,g,c or t/u
ggacagccagcaaacaatcgggaacacgacgtgacggagggcttgcttaaagcaatgcgtcaatgttcgaaaacctaaggggggtatacgcgatgagtgataaatatgtaagacaagatttaaacatttttggaatgacttgtgcggcctgttccacgagaattgaaaaatcgttaaataaagcagatggtgtagaaaaagcgaatgtcaacttagtaacggaaaatgcagccgtatattatgacccggaagttacatcgacagaagatttgattaaagttgttaaacatgcgggttatgacgcggcggaaaaaatgtctaaagaagaaaaagatgctgtgttagaaaagaatttcaaaaaagaagtgagacgttttattctttcggcggttctttccttaccattacttcttaccatggtgacacatattccgtacattcatgaaatggtgtttgcggaaacgattgtgttactggattaatccaaccatccaattagtactcgcaacgattgttcagttttatattggttggcggttttatgatggggcttataaagcgcttcgaggtaaaagtgcaaatatggatgtattagtcgcacttgggacttctgctgcttatttctatagtgtagtggaatacattcgtcacatgattgatccgagcgtgatgccgcattactactttgaacaagtgctgtgtaatcaccctaatctttgtagggtaaatacttgaatcatacgcacatcgagaacacccgatctattgctggnttacttgatttacagcaaaagaagcgaccgttattcgagaaggaaaagaatggttagtgccagtagattcattgaaaattggcgacattatccttgttcgtccgggtgaaaaagttccgatggatgccgaaattatttctggtgaaacgagtattgatgaagcgatgattactggggaacctgtaccagtagagaagaaaccaggcgattctgttattggcgcaacgattaactttgacggggctttccaagcaaaaattacgaaacgaatggaagaaaccgttttagaatccattattcgtttggtggaagaagcgcaaggtattaaagcgccaattcaacgtttggcagatagaatttccggcatatttgtaccaattgtacttgggattgctgctgtaacctttattatttggtatcttgttactggaacggtggatggttcacttgaagctgcgattgcggtattagttatcgcctgtccctgtgcgcttggtcttgcaacgccaaccgctatcatggctggaactggtaaaggcgccgaaagtgggatattatttaaaggtggcgaacatttagaacgtacttccaaagtggatactatcgtttttgacaaaactggtactttaacagaaggtaaactagaagtgagtgataaaaaagcagccaatgatcactttttcccttatttattcttaatggaacaacaatcagagcatccgattgcgaaagcgattattaagatgttagagccagagaatatagatgcttccgccgtgaaacaagggaaaatccgcgcgaaagctgggcacggcatgaccggtaatctggatgatagtaaagtggaactaggtgcttaccgctatgtttcttcccttacaacgattccaaaagaagatgatgaattaatcgaaagttggatgcatgcaggaaaaacagtcgtagcaatggcaattgatggtgtatacgcaggtgccctcgctttatctgacacaccacgaccagaagcaaaagaagctatccaaaaactaaaagcacaaggtattaaaacagcaatttgttctggggaccaatctgttgtcgtagaaaatatggctaaagatttaggtattgatatgttctttgccgaacaactaccaaatgataagagcgccttagtcgagaaattacagcaagacggtcatatcgttgcattcgttggtgatggcattaatgatgctccagctcttgcggcaagtgatattgggattagtatcggtactggaactgacattgcgattgaaacaggagatgtaacacttgtaagtcatcgtttaacactcattccagaaacaatcgaactttccaaagcaaccatgcgaaacatccgtcaaaactttttctgggcgctagcatataactgtgcgggtattccaattgcggcactaggcttacttgccccttgggtagcaggacttgcgatggcatttagttccgtttctgttgtcacaaacgcacttcgcttaaaaagatataaatttaaatcataggaggaatttaacatggaaaaattaacattaaatgtagaaggtatgacttgttctcactgcgaggctcgcgtaacaaaagctttatcagaagttaatggcgtgaaaagtgcagtagtatcacttgatgaaggaacagctactgttgagtttgaaaaaggacaagtgacagaagatgcgttaattgatgctgtggaagaagcaggttatgaagtagcttaatttaaaagcgaaaagggggattctgtccagaatcctccttttttgtgtagcatgaaaaaaagataccaaaatgaatggaaaactggtaaaataaatgagttaaataaaatgtgctattactagccacattttacatagaaagtggtgaagaaagatggaagaatccccacaaaacgaaccaaataacgtggagaaagacgaagaacaaaaagcaaaacccggcaatggttatataaaaatgaagttattcccatttataatgctactattcgcttttgtttttgtgacggcatttgtgactacaatcgtcatgtcttttggggatgaccagcacgtaaagtgagccttccctatcgagaagatttaccaagctctacgatgtatacgacaaaaaaa

SEQ ID NO: 3468 - DNA, 1923 bp, Listeria monocytogenes 4b
  misc_feature (1)..(end): n can be any nucleotide: a,g,c or t/u
ataacttagctgttctgttaccatttggcggattaatggcgaattttacccacacccgctgtaaataataatgcgtaggaaccgttcattgcggaggcataagcaccgatgtagttgcatatttggccagtaaacatacgaagtgttaatagcgcgcgtgaattaccttctttggctgcaatttcgatatctctgaaatcacttgaaattcccgatacgccaaggacacctgattcactagacatcatatgcatcacttcatccaagctatagcctaattcatccactaaatacgggatgattgtcgcgtcaattgtaccagaacgtgttcccatcatcaagccagcatttggtgtaaagcccatggaagtattcactgatttcccagcttcaatcgcacaaacactcgctccattgcctaaatgacaagaaataatttttaatttttctaaaggtttttcgagaacttctgctgcttttccagccacatatttatgactcgttccatgaaaaccgtattttcgaatatgatgtttttcataaagttcataaggaagcgcatataaaaagttttcttctggaatcgtttgatggaatgcggtatcaaatactgcaacagaaaccgcatttggcagcaattcacgaaaagttttgattccgatgatattcgctggattatgtagcggcgcaaggtttgtcacagcttcaatccctttcaccacttcatctgttacaacacaggacgtaacaaaatcttctccgccatgcgcaacacgatgtccgacccctgtaatttcgctcagatcattgattacttgatgcgccttcagctgctccagtaaaatctcgactgcttccccgtggttattgattgctcgtatttctttgattttttcattttgaaaggacatgttgaaaatggcgtctggtagaccgattctttcaattaagcccttaactaaaacttcttctcctggcatcgtaaaaatttggaatttcagtgaagaactccctgcgtttatcgccataattttgtgcatatagctcagtcctttctcatttttaaaggagtaaacaaagccattcttgtttactccatgcttttttataataaaatgttaaatagtccaatggctaagagaccaccaatgattggtccgacaattggaatccaagcgtaacgccagtctgacccacttttatttggtactggtagtaaaaagtaagcaagtcttggtcctaaatcacgagctgggttaatcgcataacctgtcgttggtccaaaactcattccgatggcaactactagaaagccaaggattaatggatttaaaccatctgtaaaactgttcgctccaatcataagtaaaccaaaaatgaaagcaaatgttgcgataatttcactgattaaattgaaaggtgtatttctaatcgctggtcctgtggaaaaaataccatgtgtatcaatttctgggggagtcgctttaaaatgcggatagtagtgtaaaataacgatggatgctccgacaaatgctccggcgatttgcgcgataatatatggcaccacatctgcccaagggaatgatcctccaactgcaagcgcaatagttacagctggatttaaatgcgccccgctatatgctcctgcgacataaatccctatcattaccgcaaaaccccaaccaaatgtaacaactacccagtttgctccttgagataatgatttatttaatgtcaatcctgctaaaaggccgttcccaaacataattaaaaccatcgttccaataaattccgccaaatatgctgacatagtttatcctcctttttaatgtaaattctaaattatttgttctaaaatttcttttagttcttgatgtgagggtgtcgtaggactagttggtaagcaagcgtctttcagtgcat

SEQ ID NO: 3469 - DNA, 2181 bp, Listeria monocytogenes 4b
  misc_feature (1)..(end): n can be any nucleotide: a,g,c or t/u
ataacaaatgaagtgaagcctagagttggtgtcgttggagaaattctcgtgaaattccatcccggtgctaataacaatattgttgatgttattgaagacgaaggcggagaagcggttgttccagatttaacagatttcattttatattgttgttatgacgatcactttgcagccaatacatttggtcgttccaaagtaaaatcattcgcgaaacaaagcgttgccattccacttattaatcaattccgcaaaccagtaactgatgcgctgaagaaaagtgaacgctttgaagcaccggcgagtatcgaatctatcgctgaaaaagcgagtcaattactatcactcggaaataaaatgggtgagggctggttcttaacaggggaaatgtttgaattactcgatagtaacgtaccaaatatcgcgtgtttacaaccatttgcttgcttgccaaaccatattactggtcgaggcatgattaaagggcttaaaaaaatgtatccagaagctaacatcatgtccattgactacgatgccggctcaagctctgtgaaccaactaaatcgaatcaaattaatgctctccatcgcaagaaaacaactagaaacgacagaagtaatcaccgagaaagaaacaaacacacgattcaacccaagagaaaaaatccttggtaaagcaaaacaagtacgagaaagcgccccagtcgaaatgattggaaacaaagtaaaacaagcgcgggatgcagacccagttggcgcgatagctcagaaagtgaaacatgttgcatcatcaagtagcgagcacgtccaaacggataatgattaatgtaaagccacctataaaataggtggcttttttagataaaattcacaaaaatgacacgaaatagaactatatccgcaataatagtatttttgttaatacattggcttgttgttttgtatattataattattctaaatcaagttgctaaaatacaagatacaaggagtgctatattttttgaaaaaatttgttttaatttttatttgttttctcacgctaacaaccattgtcccttggaatacgctcgaaacgaaggcggcatccacttcttggcttgaacaagaattagatggtaatgaagcctttatcactgaaacagaaagagtcttgtcaaaaaatcgtgaagatattacactcgcagatttagaaacaatacaagaattagatatttatggtgatgcttcatcaatacccgacaaaatttctgattataagaatctcaatactttacttgcccttaatggaacgatttcagaaattccaactagtatcactaaactaacaaaactaacaagaatcaacgtagacaataataattttcaagaatttccgatgattctattacagatgccttctctaagttctattgagataaatagaaataaaattaaagagattccttcagaaataaccacattatcccctcatttaggatcgctggatgtacgctataatgagctaattacgcttccggataatatcttcactactgagtgggaaagtaagctctcattactaactacaggaaatcaattagtttctgacattcctgctgattggttagataattttaatcaagcagataacatgctcgaattttacaacaatccaccaaatgattatcatcaaaaacaagaccagctaacgtatagtggagcaagaattgaagtcccattaaatacagatctaaaaacattaactcctgataaaacaaaactgggcttaaaatcaggcagaacgttatttgaacaacatgaatttatgtattatgatgacgggacctctaataacattctaactaacggtgttgctactgccacaggaaatggctatataacaatcaaaagtactttatcaaccaattccaacccttttgcaaaagtacgagttcctatcacagtaacgcccccagtaaaaggaggagatgttaccgttcaatataaagacacaactggagtagtgttagcagactccattactttatccggaaatgtgggcgaaaattatacgacaacagctaaaacaattgacggctattctttaacaactacaccaaccaatgctaatggaactttttcaacaaacccacaaactgtcacatatacttataaaaaagaccctatagcgcaaccagttact

SEQ ID NO: 3470 - DNA, 1955 bp, Listeria monocytogenes 4b
  misc_feature (1)..(end): n can be any nucleotide: a,g,c or t/u
acgtcatcatcatcttcaagtgcttctaacattttatcaaattgtgtttgattattttctgcaacttcattataaaccgtgggaaacatggataattcagcagtagcaaaagtgtacccggcttcttgcaaagcctctttcacttccggaaaagtagccggatcagtaaaaatttcaaatacatcttcgcttacttccacatcatctgcccctgcttcaatagcctccagcatgaattcctcttcgtccacatctaaaccttcgcgtaaaataacaagataacctttacgatcaaacatatagctcacactaccggtttcaccaagacttccaccgtttttattaaaagctacacgaacattggtgctcgtacgatttttattatctgtaagcgcatggacaagaaccgcaattcctcccggcgcatatccttcataggttacttcatcataattttcgccactcgtattaccagcagctttatcaatagctcgcttaatattatcgttcggcatgttgaccgcttttgctttatccataactaatcggagtgacgggtttaaattcggatcaggaccttttttcgctgcaacaaaaatttctctcgctaatttttggaatactttggaacgcttagaatcttgtgcattttttctaccttgaatattattccattttgaatgtcctgacatatatttcactccttttagatttagtaaagcttttctcctacaaattctaacgtaaaaagggaggaatcgcaataaaaaagttaccgcaaaaaattgcgataactctttatttaagtcgtttgtaagcggtgaacgtgataagttccaagtttatttgccgttccacctaaaagtgttatttcatcaagcgcattagttacgagcgtttctttcccttctgaaagtacatcaatcaagaaaaagtactcgcctaatgaggttttaagcggtcttgattcgattttacttaaatcaatatcccgccaagcaaacgtagataagactttatgtaacgcacctggcatattgttaggcaaaataacagaaatagacgttttttcttcttcttttggtaataaaattgaaacaggtttacgacttaaaacaaaaaatcttgtttgatttaattccaagtcttgcgcattttctttgacgatttcaagcccgtactcattcgccgccatgcgtggtgcaatagctgcgacaagttctgtcggattattactaacccattttgcagcataggcggttgaaggtgtaacttcacgctccactccgtataattccgcctgaagaaatgtatgacactgggcaagtgcttgtgggtgggacattacttttttcactgatttccaagcggatacgtgtgctggatgaaccattaaatgttgcgcaatcgggagaacaatctccgctactacagggacacttgaaaaatgaaataagtagtccagcgtgatattgacgcttccttcaatcgtattttcaattggaacaacagccacatccacgtcttccttttcaattgccataatacaatctggaatcgtactcttagctatcatctcttcttttggaaaagcctttgctgctgccgcgtgtgtaaaagatgctgctgggcctaaataagcaattttcattttcaactctccttttatcgtagctaggaaaaaagcgtgcgccaactaattggcgcagcactttatttaatccataaattcaaattcataatcaagcaggcgaacgatatcgccgtctttagcaccacgttttctaagcgcctcatcgacacccattgcacgaagctgacgagcaaaacgactaatagatgcatcgcgctcgaagtttgtcatcgtgaataagcgttcaatttttgcaccacttagtacaaaagtaccgtctggctctctagagatctcgaagtcaggttcttcagcaacatat

SEQ ID NO: 3471 - DNA, 1659 bp, Listeria monocytogenes 4b
  misc_feature (1)..(end): n can be any nucleotide: a,g,c or t/u
ataataatttcacctcccccatttttccagctatagtaaagacaaatcaaaaggaggtctttacgtgacagatagcaacgaactaacaacagaactggattccatggcgatcatcttacacgccgggaatgcgaaaagttgtgcttttgaggcactgaaagaagtaaaactgcaaaacatcgaagctttcactcagaaaattactgaagcgaaagatgagattaaactggcgcaccgagcgcacgcggaacttttacgaaaactatcttcagagaatcgaatgagagaggtggatttactgcttgttcatgcggaaggtcacttgtcttctacggatattgccgtggaaatgattcgggaactgggagaaatttatcaatggaaatggagtttatctaatgaataacaactttttatggggaggtgcaacggcctcttatcaatgtgaaggtgcttgggatgtggatggcaaggcggaatcgatgtgggactactacttgcacgaagcaggtcttgagaatggcgatgtggcgagcgatcactaccaccgctacgaggaagacattcggatgatgaaagaaggcgggcaaaattcctatcgtttttccttatcttggccgcgaattattaaaaataggcaaggtgacatcaacttaaaagggatcgaattttatcaaaacttgctagatacgtgtaaaaaatatgatattgagccgtttgtgacactttatcattgggatttgccgcaatattgggaagaaactggtggctggttggatcacgacgtttgtgctgcattcgagcattatgccaaggtttgttatgaccactttggcgataaaatcacgaattggactacgtttaacgagccaaaatggtttgttgctaatggatataaaatcggcaactacccgcccggctatcaagatacacaaaaaacgatgattgccgcttataatgtgatgtacgcgagtgctttaggcgtcaaagcttttaaagaaggtggctactcagggcaaattggtattgttcatagctacacgccggtgaacggtgtcgatgaaagtatcgaaactaaaatcgcgatgcgctacgctgataactattgcaacaactggattctcgacacagccgcacttggcgaattcccggtcgacctcattgccgaactagcaaaatcgcacgacatcagctttatgaaaacagacgaactacaaacaattaaacaaaacactgtcgacttcatcggcttaaattactattcgcgcacgctcgttaaaccatacactggcggcgaaacccaactacaattcaaccacagcggtaaaaaaggcgaaagtaaagttctcatcaaaaactggttcgaacaagtgaaagatcccgccaacgaaacaaccgaatgggacacagaaatttatccaaaaggcttacaagatggcttaatcgaggcttacgaacgctatcaattaccactttatgtgacagaaaacggcattggtgttcgcgaagatgtttcagtgtctatagtagatgatgcctacccaatcgcctttatgaacgaccatattaacgccattttcaacgcaatcgatgctggttgtgacgctcgtggctactacgctcggcccccgctcgacctttactctacgaacaatggcg

SEQ ID NO: 3472 - DNA, 994 bp, Listeria monocytogenes 4b
  misc_feature (1)..(end): n can be any nucleotide: a,g,c or t/u
aataggagacattaaaccgataattttcatttgtttcttttgttctggtgaataaccaatcatggaaacaaagtattgtgctaagtagacaagcccggcgataattgccagcaccatatccggtgaacctaagttaaaccataagaatgtgtggctagcaatttcggaagatccgcgaatagcataatagaaagccatcaatattggcatttgaataagtaatggtaaacaacccatttgcattggattgatattatacttggaatagacggccatcatttctttttgaatagtggcttgttcttctttcgatgttgcacgttttagtcgagcttgaatttcatcaatttctggtttggcaacggccattttggattgcattcccatttgagctttagcagtacgcaagtttagtggcataattagtgcacggataagtaacgttgtaataataatcgcaattccgtaattacccccaacaaactttgcaacgaacataataaaactagtaaatggttggattaaataagtgctgaaaaaaccatctgtattttgtgaagggtccatactacaacctgtaagtaatagtaaagcaccaagtaaaacgctaattaaaataatatttttctttttcaatgtttcattttcctcctaaatagtaaaataatcaattcatacgttggaaaatgaaaaactgtcttcatcatcagtaatggcgctacatttcctggttatagccagccaattaataacaaaattaggcgtagttatataaatttgagctcgaagtgaaatttttactagctttaagcagatagcgtcagcgggtagcaccattttcggttttaataatgtaatggccgaccaataactgaaaatcgtcaacattaataaaaacgttactgtgagtgaaatgaattctggttcaagtacaatttgtaaaatggaaatcatgccacgcagtcgctcctttcaaggttttagtactcattaa

SEQ ID NO: 3473 - DNA, 2960 bp, Listeria monocytogenes 4b
  misc_feature (1)..(end): n can be any nucleotide: a,g,c or t/u
tgcaatcttacctatcacgctttcagagtttagatatatgaattgtgaaataagcagggtgattcttccagaactgtatccatttcatcttctttcatatccacctcactaccatgtaagatatatagagattgggagttgtggtaaataatattccacatccaattgcataacatcttttttttaatcacattatttccaggtatgcttcttttattgacgaaatggattccagttctatctagaaagagtactttttttcaatatttactttgtttattcttgatcacaattatgaatagtttgtttttccgtcaacagtttgtggtagttttatcgctgatatgtattttattcttaccatttattctgttttttgtagaatatatatttgttgagagacaatggaaaaagttgcttactatttataaaaaaaataaaattattatccaatctattgtatggtttcctgttttagaagaaataattttccgtttttttatttatcaatactgtgagttatttgatttcagtaatatccagtatatattactagccaccttttcatttgtgattgcacatattttttatcaaggagtgtcttcaattgtcaaaatactattttcttttatattaagtatattatttttattaacactaaatatatttttgacaataataattcactgtattttcaactttttagtttatatagttcgtactagtaaatatgagaaccaccgtaattggtaagctgacagtattatattaatttagctgttaaagtatggaaataccaataaatcaacgtttttcaacttatgaaatgcttggttctcattaaaaatgatatatttccctaccacaaatccctgtcaaaatgatgcttgacagggatttgttctttttgagggcttacattttaatactaatttgtaatataatttatttattaatatgatttttagaaaaactgctctaaaaaggagggggaacgatgaaaacgaagatgcctgaaatgctttctttcatttcagaagaagctgttagtagaaaaatgacaagtgaggaaattgctgctcattttggttatgataaacatcactttagtcgaaaatttaaagaaattaatggattcagtgtggttgaattcctttctagtttaaaagtggaaaaggcgattattgaacttaatgaagaaaagcgtattctcgacctacaagaacattcaggttttgaaagtagtggtagtttcacgaatacttttaaaaaatatacaggtagttctcctagaaaatacaaaacggaaatgaatgatattttttatgatatgaaacgttttgaaaatgataataaggataagtcgatagcgcattttcaagaaaagaatgattctttttgtacggtaactattgatgtacctgatgaatttgagaagggtatcatatttattggacttttccgtactcttataccgaatcatatgcctatatcgggattagctactaaaaatttaataggaaatcaattgaaaaatattccaagtggagactattatttattagcttgtgcgataagccagtctaataacattctatcttattttaacttaagtaatagtttgagagggaaagaagatgaaaagctatcttttcctaaatgttctggcaagcattacgcgattaagctgagagaaccaataccagaagatccgccaatattagctaatgtgggaaaaattttaatctcctgtttgaagaacacaatctagaacaatattgtttgactatgaaatgttaaaataattgcaggctaatgaaaaggagagataagatatggctttaaatgcaaagagtatcactataggactaccagtaagtgatttggagaaatctgctagttggtatgaaaaactattttttgttgatgaaaaattaacaccagttgaaggcgttgttgaatatctattattggttcagtttggattcaactttttgaagaaaaaataaatgtttcagaaaacgttttacgcataggggtagaagatttagatgtggaatttgaacgtttaaaaaaacttggagtaataactgacgaggtaatagaagatgcacctggtattattcgatattttgtcttctctgatccagatggtaataagttgtcattctattggttgtatgatcaggaatagatttgaacaagattataggatggatgtaacgcttaaacgacggatgtatgattcgtcgttttttgatgttagaaataatgcttaagtggggtaagatataacattatggattttaatagaattagcgtatttatatattttgttatgaatggttagttaattcgccatgttgaaaagttgaaatttaatattctagaggcaatatttttagattaaaggataacattttgataacagaaatttgataagagtcaaataatatgggaaatacgaattttaactgtataaaatagtgttaaaattaaactaatatgtacaatacattaattaccttgctgagcgggaatagaaataaataacaataaattgaaatgctctaaattgtactgggttattatctatagcgtttacttttactcagttaaaaatagtagctaagtttatgattcttagtacttttttgattttatcaaaattatgttgtttatttctatattacttgtaataatttgttacttatcatctgaatttacttttaatatgggaaagttaaatgccgaacaaacagacacctttttacaatttacttcattgattgaacgagaaatacaataattgatgagagaaacaacagattaagataacttgtattattgtgttggatgaattaattcattgcgaattttgcatttgtgaaacattgtgtaaaagttagaatggtaaaacgattactgccaaggatctattggaatatctgaagtgtaaa

SEQ ID NO: 3474 - DNA, 2400 bp, Listeria monocytogenes 4b
  misc_feature (1)..(end): n can be any nucleotide: a,g,c or t/u
agagcaagttcatttcgtaatagttatcgcaccagtggataaagagcaacacattgaagcactttaccaaatcgttcatttagccgaaaatcaccaaattttagacgatttgctcgaaaatgtaaccaaagaaaaagtcatgcaaactatcaaccaattagtaattagagaggatgaataaattttggataaacaagctattttagataatattcaccaaacatggcaagaagaagcaaacgcgatttcccgtttgccggaagtaacaagtgaagaggctctcgttaaaacggttgaaaaaatcgccgagtgcactgggaaaattgtcgtagctggttgtggaacatccggcgtcgctgcgaaaaaattagtacactctttcaactgtatcgaacgtccagcagtctttttaaccccatcagatgctgtgcatggaactctcggtgtacttcaaaaagaagatatattaatcctcatttcaaaaggtgggaatacaggcgaattacttaacttaattcctgcttgcaaaacaaaaggaagcacactgattggtgtaacagaaaacccagattccgttatcgccaaagaagcagatatctttttcccagtgagtgtaagcaaagaaccagatccgtttaatatgttagcaacggcaagtacaatggctgttattgcaagttttgatgcagttattgtttgcttaatgacctatatgaattatacaaaagagcagttttccgtcatccatcctggtggtgccgttggaaacaaattattaaataaataaacaagcagccagtcggagggatgcaatttggatgtattagaatattttaaagaagaaatggttcgattttcaaacgaacaagataaagaaaaattacttacagaaatggcggaacagttgtgtgaagtgggcgcagtaaagccaagctataaagatgcagtaattaaacgggaaaaagtttttccaaccggattactaaccgcgcacgccggggttgccattccgcatacagatagcgaacatgttattcggccagtggtggctgtacgaatactcaagaagcccgtttcatttattgaaatggcctctgataacgaagcaatcgatgtcagaattgtctttatgatggcgctaaggagtgccgatgaacaactagatatgctgcaaacacttattcaacttattcaagacgaggaggtgatgacgaccttacttaaagcgcaagagacgggagatgttctttccgcaatagaacatttttctaagaataattaagggaggtcgggaatagatggggagtttttttgcaagttttgtagactggctaataggaagtccaggtagatttgtcgttaacttaattgaagataatatgttaattttcatgttcgtagtaatgatttacgccaccaccattttatacgccaagtggacactcgcatactacttaccgaaaaaaatgaatcagttagcagaaatgaaaacgtgggagctggacgaattatatgcagcgtggcaaacagagaaaaaagctctaccgtggtacattctcgtgccaagccgaaatgaattttgggtaaaatcagcccgaaatgcaccagaatcaactaaattactccattttagtcaacaaaaattaaaactaagtgacaaagaaaagttacaaaaaattatagaaattcaatcttgaggtgataatagtggcaaaaatagttccgtctgtttttggagcagacatcggcagaattaatgaacagttagaggttctagagaaaaatggcattgatttattacatgtggatatgatggatggctcgttcgtcccgaacattgcttttggtccagatcaaatcaaaatgatgaaaaaaggcacgaagcttcaggttgatgttcatatgatggtgtatgaaccagaccgttatattccaagattagtggaagcaggcgcacatatgattacagtccaccaagaagcaacaactcatttgcatcgtacaattcaactaattaaaagttacggagttcgcgcgggagtggtattaaatcctggtacaccaccaagcactttggaatacgtgttagatgatattgactgtattttgcttatgactgtaaatccaggcttaggtggtcaaaaattcttccaatcaagtttagaaaaaatcagaaaaaccaaagcatatattggaaatcgtcctattcaaattgaagtagatggcggagtaaatgctgaactcgcgaaagaatgcacacttgcaggcgcggatttaatcgttgtaggatcttacttatttgaaggagatatcgaagcgaatttggagaagttatcgaaaggagttttaacagaatgaaagctttaaaattatatggaaaaagagatttgcgttatgaaa

SEQ ID NO: 3475 - DNA, 2321 bp, Listeria monocytogenes 4b
  misc_feature (1)..(end): n can be any nucleotide: a,g,c or t/u
gtaactgggaatatggggacggacgttaaaaatagaaaaagccaagtgcgcggactgcgacacttggctttttttagtctccaggattaataattgctaggacttgatgatcttcccaatttccatttatgcggacattttgtactgcgagcccttctaaatggaagccagcttttaaaaggacttgtttggaacgttcatttttcggcattactcctgcctcaattcggtgcaggccaagaatgtcaaaaccaaaatctactatcaactccactgcctcggttgcataaccatttccattatgctctttatccagaaaataaccaataaacgcagattgtaaagattcccgcaaaatactaaataaattaatcgtaccaataagttcatccgtatcatggaggaaaatcccataatagtactccacatcactcgcagcgaaatcttctaatcgtgaaataagcgattgctgttcttctatcgtataaaaacgatcgtctcgctccatagaataaccttcaaaaaaagctttattcgctaaatgaaaagctagtttttgattggcatctgttatttgaaaaggtcttaagtaaatccgttcccccgtaatccgcatccttatccctcccgcatttttctaaattataagattgttctgatgtgattgcaagtatcactgctaagcttaatttttctatatatccattttattaaaaaataaactttccattacgaatacatgtgtgttattatgttgatgttggttgtttttatattatttttctaaaaaatggaggtttttttaatgaatgttaatgcggaaacagaagacgcaactctccttctcgatggtttacttcaaaacgtggcaataattcgttttgatactaataaaaaagtaacttatgctaatgcccttttcgcggaggcaatgggatactcagaagaagaaatgttgactttatcccacccggacttatgctttcctgatcttgtccaaagtgcaagctataaagcaatgtggacaaatttgcttgctgggcaaaaatttcaaaataaaattgaacgaaaaaatgcacgcggtgaacgtgtttggtttgaagcgacttatatcccgattatacgtgaagatacggtcgttggagtagccaaaatcgctacagatattacgagaagagaagaaacggttcatgactttgcatctggtttaaaaagcatggctacaaatttaaaagaacattccagtgttggaaaaacgcgcagtgaagctctccttgaactcgtgaaatcaatcacgaaagaatccaatgaaaataccgatacacttcacgatttgcaaacagaagcccaaaatattcacggcattattaatacaattaacggtattgcttctcagactaatttacttgccttaaatgcagcgattgaggcagcacgtgctggtgacgccggacgtggatttagtgttgtagcggaagaagttcgtaaactttcgagtcgtgtagaagaagcaattaaagaagtggaaaaaagtgtcaacggtatcacgcaagaaattaatactatctcaagtggtacggaacgtgtcgaagcaaaagtcgaggaaagccaagaagtgcttattttatctttagaagactttagccaaattgaatctgcctctactgccttggatcaaaatgccggtgctttcacaaaaatgatttaaccgactgaaaaaaggagcgaagaaaccttgaaacttattggaaaacatccttctggtcgtgccattattatccgtttgaacaaccaagaataccattatgaaaccgcaaatagttttggaagtgcgacttcattaacacgagcaaaaacagaagctagagccgatagttttacatctagtgaaatgaaccaaggtttacatattggtaattggcactggaaagaacttggatgaacgaaaatcccgtctataaaaatagacgggattttttatttacgcattcaatgcttgttctaattggtctttaaaggcggttgccacatcaaacacagtaacaaattggaaatcgctcacgttgtaatggacgacaaacttattatcccggtggcgaaccataatggaagagcggactttatcaccaattgcgtcccctgcttgggtttcgctataaaaaacccagtgagttgcttcgattggatttgctgttttttctgtaaggtcgctttgaatgagttgttttatttcatcacttaattctggcgcgaattcattgtcgatgtagccgtaccaaatagttcggtagtactttgcttcaaattcaatcgtttcatca

SEQ ID NO: 3476 - DNA, 1918 bp, Listeria monocytogenes 4b
  misc_feature (1)..(end): n can be any nucleotide: a,g,c or t/u
tgtggagtgttaaggaagcttgtgaagatgatttctttggaacgttagaaaaagtggcggaaatgggttatgacggtgtggagtttgctggttattacggtaaatccgctagtgaaattaaagcgaaattggctgaactcggactagaagtagcaggatctcatattagtaaagaacagcttgaagcagacttagaaaatgtcattttgttcgaacgcgaattgggaaatgaatatattatttgcccatatgcagattttaaaacgaagcaagaatggcttgaattcggcggcagacttcgtgaaattacaacaactattcaacaagctgggatgcattttggttatcataatcatgctcacgaattagataaattagatgacgaaattattttggacagtttacttaaaaatgtaccagagatggttgcagaattagacacttactggattgagtatgcgggaattggggttattccttttatcgaaaaatatcgtaaccgggtaccactaattcatattaaagataaatcgagagcaaacaaggaaagcactattatcggtgaaggtgttttggatgtgcctggttttgttaaaacggcgcttcaatctggaacaacctggctgattattgaacaagaagcatttacgcaagatcagctaacaagtgtggccaaaggttatacgtatttagcgaatgtattggaggagaactaatatgacacgtgtaacagtatggaatgaatttttacatgaaaaagaagatgatgctgtgttggctatttatccggatggaattcatgggcaaatcgctagctttctagaaaaagcaggcattgaggcaggcacagctactttagaagaaccagaacatggccttactgaagaagtattagcgaatacggatgtactgatttggtggggacacatggggcatgaccgcgtagaagatagaattgtcgatcgtgtgcaaaaacgcgtgttagaaggcatgggacttgtcgtactacattctggtcatatgtcgaaaatctttatgcgcctaatgggaacaagctgtgatttaaaatggcgtgaagcaaatgaaagagagcgcctttgggtagttgacccgacgcatccgattgcaaaagggattggtgaatttatcgagttggacgaggaagaaatgtacggcgagcattttgatatcccgacacctgatgaactaattttcttaggttggtttgaaggcggcgaagttttccgaagcgggattacctacaaacgaggaaatggtcggattttctacttccaaccaggccatgaatcctatccaacctatcaccatccggatattcagcaagtaattattaacggcgtacattggtgcgcggaaggtcggaagaattatccggcatacggaaatcaccaaccacttgaaaaaatagggaggaaataaacatgaaattaggcgtatttacaccattatttgcaaatttatcattggatgaaatgttagataaagtaaaggcggcaggacttgatgctgtcgaaatcgggacgggcgggaaccctggaaatcatcactgtccaaccgatgaacttttagcgagtgaagccgcgcggaaggaatatttagaaaaatttactagtcgaggattaacaattagtgcttttagttgccacgataacccgatttctcctaataaagaggaagcggctgcatctgatgaaattttgcgcaaatcaatcaaactagcctctttaatgaatgttccggttgttaatacattttcgggaacagcgggagatagtgacgatgccaaagcgccgaactggccggttattccttggccaactgtttatagcgatattaaaacttggcaatgggaaacaaaattaatcccttactggaaagaaattggcgaacttgcagc

SEQ ID NO: 3477 - DNA, 2656 bp, Listeria monocytogenes 4b
  misc_feature (1)..(end): n can be any nucleotide: a,g,c or t/u
catcaggattcaagaaattctgtgctaaaatgtctatcaaaacatctgctattcaatacgaaaatgacgatgttatgcgccctaaatggggagatgactatgcaatcgcatgttgtgtatctgcaatgcgcgttggtaaacaaatgcaattctttggtgctcgtgccaaccttgctaaaacacttctttacgcaatcaatggtggtatcgatgaaaaatctaaagcacaagttggacctgcttatcgtccagttgaaggcgacgtattagactacaaagaagtaatggaaaaatatgatgcaatgatggaatggattgcagaactttaccttaatacattaaatgttattcactatatgcatgataaatacgcttacgaacgtatcgaaatggctttacatgatacagaagtattacgtactatggcaactggtatcgctggactttctgttgcagctgactccttatctgctattaaatatgctactgttcgtccaattcgtgacgaagatggcatcgtggttgattatgaaatcgaaggcgactatcctaaatacggaaataatgatgaccgtgtagacgaaattgctgtagaacttctaaaaacattcatgactaaagttagaaaacataaaacttaccgtgatgcagttcacacaacttctgttcttacaatcacttctaacgtggtttatggtaagaaaactggtaacactccagacggacgtcgtgcaggagaaccatttgcaccaggtgcgaacccaatgcatggccgtgatacaaaaggtgctttagcttctttatcttctgttgctaaacttccttacgaatatggtcaagatggtatttctaacacattctctatcgtaccaaaagctttaggtcgcgaagacgaatctcaaatcaataacttagttgcaatgctagatggttattctacaaaaatgggacatcacttaaacatcaacgtattcaatcgtgatacattactagatgcgatggatcatccagaagagtatccgcaattaactatccgtgtatctggatatgcagttaacttcatcaaattaacacgtgaacaacaattagatgttattcaccgtacaatgcacgaatccatgtaataattaggcgagaacgctttggcaaggattgctcaccgtagcaatccttgttatttaggaaaggaagaggagaattatgacagaggttttaggaagagttcattcagtagaaacaatgggaacagtagacggtccaggtatccgctttattgtttttatgcaggggtgtttacttcgttgccaattttgtcataatcccgatacttggaaaattggtactggcacagaacgttctgcccaagatgtatttgacgaagcaattaagtataaagagttttgggatgcatcaggtggcggcgtgacagttagtggcggtgaaccgttgcttcaagtagatttcctaatcgagtttttcacgctatgtaaagcagcaggagtgcacacaactattgattcttgtggtggttgtttcacacgtgatccggagtttattgagaaattggatcgtttgatggaagtaacggatttaattttactggatattaagcaaatcaacccagaaaagcatttaaaactgacaacgaaatctaatgcaccaataatcgattttgctcattatttacgtgacaaagagcaaccaatttggattagacatgtactaattccaaccaagacagatgatccagaagatttaacaaagctccacgaattcattcaaactcttccaaacgtaaaacaagtggatgtgcttccataccatacaatgggtgtttacaaatggaaagaaatgggcattcgttatccgttagaaggaatcgaggcgccagaagaagaagtggtagcacttgccaataaaatcttagaaactagtagttataaatagtaaaaaccggcgaacttagtattcgccggtttttttatagtattttatacatttcctcacaccattttaattcggtatgaatcaaatctaatcgtcttgcatagacttgataagacatgttttttagcttgtcttgtttggtttttaggtcaaataatttagcgaaatgatccagtgtttcttcaattaaacctaattgctcttttaaatagctttctctttcttgaataagccctttggttctggcattgtttagccagtcaagctgtacttttgttgtaaattcatctcgtgtgacagggattttaagtggtgtttcagaccattcaagcagggagtctaagccggtttgtgtgatagtatagacttttttatcaggctttttatcttgggaatgcttatggacaactaaaaaacctgctttttctaacttagataaagaaggataaatttggctatgatgtgtattttgcataattcgaagcctgtttgcgagttcataaccactagatgcttcacgagcaatcatttgtaataacgtatattctaagacatttggtatcatacaatagcacctctaaatttcatatttaatcttattgtaagcgataaacactaataagtaaaatggttatatatgtaatccattatatatgtaaatattgacattagtatttatcaagcgtaatataataattgagttttattt

SEQ ID NO: 3478 - DNA, 3441 bp, Listeria monocytogenes 4b
  misc_feature (1)..(end): n can be any nucleotide: a,g,c or t/u
ttatccaaagagccgatgaaattctattgttaaatagacaaaatcccccatggatgggaagttggaatggtgttggtggcaaaattgagcaaggggaaacacttcttgaatcggtccaacgggaaatcacagaagagaccggaatttcctcaaatgactacgaaattcgtgatatcggtgaaatgaaatggtttgtggatggcgaaaatctgggaggtatgcatttatttctggccaatcttccggataattatgtatatccaacgcctcgtgcaaccgatgaaggaatacttgattttaaaaaaagaaaatggatacttaatccggaaaatacaggtgtagtgaacaatttaccttatataatcaaacatgctccagtgttcccggctagaatagaagtttcaacaaaatatcatgagaacacattattgcatattaatcatcaatctttataaaaaaagcattgcgattattcgcaatgcttccatactatcatgatgtcgtgaaataacttgcttcccagcgacttattaaattttgagcatcattagtggataactttttatgaccgattacttgctctttggcaatttcgagactctcaaaatgatcaattaatcgttgtgaaggattattaatgtagacatcgtttagtagaatagattggttgttctccttttctatacttctaactcctacgatataacccgctgctgtaatgagtaataatttattcatacttcttcactcccttttagttgttcctgtgcaccactagacactttttttctggataaaaacatatagatgaatacgcaaataaatgcgatagcaccggcaataatgtaaataccttggaatgaaagcacatgatgaatttcacccataatataaggcccaataccaagtcctaaatcaagcccgataaagtaggtagataggccaatcccaatacggtgaggttcacatacttttaaacagacagcttggccattcgacataaacgttccataacctaagccgatgagtccgcctgaaataagtagcacgagacttgatgttgctgtactaaggaccactaatccaactgctaaaaagagataacttggatacatcacatatttttcgccttttgcatcgaaaagttttccagacattgggcgagttagagtaataactaatgcatagacaacaaagaagaacgttccagcactcactaaattaatttctctagcataggaagcaaggaatgtaagcacactggaataagaaatccccattaagaaggcaataaatgttattggaataactttatattcaataaaacttttgacggtccaagtttgtaaggccttccggtgttcggttgttaaaacaatatttttcacgggtaaatagaagcaaagtagcgcagttaataagacaataaccgtggagaaaataataatcgtataaaagctcgtttttgctaagtaaaatcattcccgatgaacgggtccaatcgcagcntgcgagaacttngtgctgagggccatataattaatcccttctccgtttctagaattaggaaatatagctgtgancatcgcattggtagcagttgaagttgttccgtatgcgaatccatttaaaaaacgaataataaacataatggcaatcgttggcatgtataagtaagccatcgtcgttactaagaaaaataaaatcccaaatcttaaaacccgcttacgaccaaatagttccagctttttccccatgtaaagtcgtgcgaggagcgtcccgataatataaatcccagacgcaaatccggcttcaccaagagacgcgttcaactcttcttgagcaataacggcaataataaccattagcaaataataaacgagataaacgacaaagttaatcaatgttattaagacaaaacccttgttaaataatttttctttcatagaataaaatcccttcctacctataatttgtaatttatctcagcgacaaggagtattataggggatattcggagaggatactttttaatttggtaattatttatgatatatacaaatttgtataacatatgttgaaaaaatagggaatagtattttgtatgattaatatgctttaactggaatgacaaaaaggaggttaagaacatgaagcaaaatattcttaataattatgtgagcacaaatgattttccagttattacaaggggaaaacgtaaatatttaacttacgaaggacttgaagattcatatgtgtacatacttaaaaaagggattattaaaacgagtattatttcaagggatggcagggaatttaatttaaactacattaataaaatggacattatctcacttttaaaagatgagtattcgcagtttgccaatgcgccgtttaacattcgtgtggagtcagacacagcagaactatatcaagttgaccgggtaaggttttggaaagacgtgaatcgtgatgtggatttgcaaatttatgtgaaagattattaccgtacgaggctgctacaatccataaaaaaaatgcagcaaatgctaatgaatgggaaacttggagcaatttgtacgcaactctatgaactttatacgctttttggagtggaaattgcgcctgatcagtatttgattgattttctagtaagtaatgaagaaattggtcatttttgcgggattaactccgcaagcagtgtgaaccggattttccaacaactcaaaaaagaaggcgtcattacgatgcaaaaccgctatattattattaaaaaattagatgttattcaagaaaacgttattttttaacagtagaaaagcactgcaatcaatatttgcagtgcttttctatcctctttttttaaatgaatatcgaatcctaagtgtgatgagcccgatgatgattaataaactaccaaccatcaaattctctaagtcgctaaaatcccaaaaaatagagattccgatattagatagtcctagaaaaacaaaaaccaagccaacaacaagtaaaaccaaataagccggtttagaaattttcataaggacgcctcatttacattaaaaataatttccacattattgtaacataagttgagagaaacgacatcactcacttgttatttgttttgtaaagccttcccccacaacactttgtacatcattaataataaagaatgctttctcatcatatttgttgacgattttggtgagcggcagtaattgatcacgacttattacgatataaagaatttttttatcttgacgcatatagaaaccttgaccgttgaaaagggtaataccacgctctaaattcgcatcaatttcagttgcaatttcttcataataatccgatataatcgtgacagattttttaggattgtaaccttcaagaatgaaatcaagtactttggttgaaatataaagcgaaacgatggta

SEQ ID NO: 3479 - DNA, 2586 bp, Listeria monocytogenes 4b
  misc_feature (1)..(end): n can be any nucleotide: a,g,c or t/u
tggaaagatacccaaggattattaataacaaatcgacacaaaatttgaaatctagaaaggtcttttgtctccgattctccttgttcttctcgctcttcaaaaatttcagcggcagagttccatcctaattcttctggttcatcatgccccacggagaagcaaataattgcaatgatgatcgcaatgatacccggaacgataaacattccccctgccccgccattaaagaaagtagtcgcaccccaaaaagcaacaattcccgctaaagcaccacctatattatgcgaggcattccaaaagcctaaccatcttcctcttttcaattttggcgtccatcgtgtgatagttgaataggaagccggtccacctggtgattgcacaaatccatttgctccccaaaggataaacaatatacccactgttgcttgctttgtaactaaaagtattccaataataattgatataatagcggaaatccctaataaaaaactcattatttttttagcatttcttccatccacggcataccctaaaatcgtttttccaattccgtacataacagaaaaagctaaaccaatcattcctagttctgtggtgctgaaatggttctgctcaattaacaatgtctgagctgctttaaagttattccttagaagatagaccgttagataacaaataaatacagacataaatgcaacgataaagtgtttgaaccattgttgcctttgaatttctagtggaacaaaatggttctttctttttaaactgaataatgacattataaatttcctttcaagtgtaattttcattccaaatttagaatgcgatgagcattattacgcaaacgtttccatataaagtctatcaatttttctaaagcaatcacctctgctgtccaaatgctttatttccccttttgcgctgctaaaaatataaaacagaaattctatttccgtcattaacacttgttatcatgcagaaaacaaaaaagcaggaattatcttggggttcccaaataattcctgctttccttttagtaaaatatttcctaaaacccgaaagtttttactcgttaaatcgtattaaactgagcatcatataatcgcttataggcaccattatcttgcgctaaaagctcattatgcgtcccagtttctgcgatgcccgtttcatttacaacgataattcgatcggcatgcttaatcgttgcgagtctgtgcgcgataattaaagtcgttcttccttccgctaactcttctagcgaggcttgaatcacttgctctgtttccgtatcaagtgctgacgtcgcttcatctaaaattaaaatcggtgggttcttcaaaaacattcgcgcaatagctaaccgttgtttttgtcccccagaaagtttgactccgcgctcaccaatgatggtgtcaagaccatctggcatttcttctactaccttggaaagatgggcaagtttcacgacatgctcgatttcttcatcgctagcgtctaattttccgtacgcaatattttcgcgaactgtaccggaaaacaaaaagacatcttgttgcacgacaccgatttgtgctcgtaaagacggtaaagtaaatcgtttaatattttcaccgtcaattgtaatctctccagctgacacatcgtaaaaacgtggtaacaaattacaaatcgtcgttttcccagctccacttggcccaacaaaggcaacggtttcgccggctttgatagaaagatttatatgatttagcacatttttcccatcgctatattcaaaagatacatggttgtaagcaatgtcaccgcggaacgccttggctggttttgcgtctttttcgtcttggattgctggttcacgtatccatgaaatctaggaatagcttaaaccctgcaaagccttttggatagctttcgattacgttgttgattttctcgattggtcgaatgaacacgtttgttagcaagataaatccgacaaattccccgtatgatatttcgccattaatcgtaaaataagctccgaataaaagggcaaataaactaatcaatcgcatcagaaaatagttaaacgaaaaactcaagcccatcactttgtagaacattaattttgactgacgatacgcttggttgagcactctaaaacgccctttttcatgtggttcgttggcgaatgcttgcacgacacgcaccccgctaattgcattttccactccagcattaaaattccctaaatctttaaaaatcccggttgttactttggtcattcgtttgttgaagtaaacaattaatacagtcaaaatcggtactagaataaacgtcgaaatcgctaatttcacattgatattcaacattaagaaaaatgcaccgaaaagggacataatcgaaataaaaatatcttctggaccatgatgcgctacttcaccaatttcaaataagtcagtcgtcattcgtgacatcaattttccggttttctgattgtcgtaaaagccaaatggttgtttttgcaaatgactgaataaatctctacgcatatctgtttctatgttaagaccaagcatatggccaaaataagtgacaatgtactgc

SEQ ID NO: 3480 - DNA, 2422 bp, Listeria monocytogenes 4b
  misc_feature (1)..(end): n can be any nucleotide: a,g,c or t/u
tctaaccacttagcaattggtagtgcgtatgcatttaatgttaaaggtggcgaagaaatgtctcgtgaagagttagaagcagctggtgtgaacaatagtttaacacacgttgatttcatgattggttcttctgaaatggacattgatggtgtaaccgaatctggtgaagttgttcctgttttccgtaaaggcgactgggcgttctaatccttttttaaaacttatgccttttgcgtaaaacccttgtagcttttggctttcaagggttttcgtttgtttattttttacaaaagagagcgaggtgcattggatgaaatttagtacatgggacatcaatttaaaagtaaggctttttggggaagcactactcgatatttctttttggatggtcttcccctttctaacgatttacttttcggaaagtattgggcgcgagctgacgagccttttgctgattatttcgcaagttttggcggttttcacagctttgcttggcggttattttgcggataactttggtcgtaaacggatgatgagtatttctgtcattggagaaggttttggttttcttgtttttgcaataggtgcacttcatgttgtggattctccttacttgagttttgctggtttcgcgattgcgagtgtttttatggcgttttatcagccagcaagtcaagcgatgattgccgatgtggttcctcctgagcatcggacgcatatttattcggtgttctatatgatgattaatattgcggtcgttattggccccattcttggttcggttttattttataatttcacgacagaaacactacttgcaattgtttgtgcggatttattattactatttttattgcaaaaatttggtcacgaaacagcccctcttttagttaatcctgatttacaaaaagaagcggttcgaaaaagtattggtgctgttttaatggaacagctaaaaaactataagattatttttaaagacaagattttctttctttatattgttgccgggattattgtttctcagtcgtttatgcaactggatttacttttcccgctctatattaaagaagttatcggcgcctctaacttgttcgcgtttcattttacaggtgagcaattgttcggggttattgtttctattaatggcttctttgttgcagcgcttactgtcgttgtcactcgctggatgagccattttagagaaaaatttgtctttatgaattcttcttttctctatgcgattgcgattttcttatttggtatttcgacaggaccgtggggagcgatttgtgccattattctctttagcttcgcggaactgatgactgttggcttgcaacaaacctttgtttcacagttagctccagaggataaacgggcgatgtacttctctgctgctggacttcgttatacgctgggtaaagtcattgctccacttgcgattacactttcgactttaattggctatactgggacatttactattattggtattttagcgctcattagcgggctcatttattactatatgtattcagaatttgaaaaacagcggcaagtttcctaataaaaaacggctatctactctggatagtcgtttttgtttgattactttttttacgatttatttacgaaacaccgaaaacacctgtcatatcgccattttaaattaccttttcatttcatccatgtttaaataatgcttatatggtgaaaaaagtctatactgttagttgtacacctagaatttactcgctatttttaatagaaagttaggtgtgagaatgtttggaacaacaactattggaattgatttaggtactgcgaatattttagtttacagtaaagaaaaaggcattatactgaatgaaccttctgtggtcgcgctaaatgcgaatgatggaacggtacttgcgattggccaggaagcaaaagagatgattggtaaaacgccgacttcgatttctgctgtaagaccaatgaaggacggtgttattgctgattttgatttaacgagcggacttttgcgcgagattatgcgccggatttcagttagtggtgtgagaaagcccaatgtggtcgtttgtaccccaactggtgcaacgtcagtcgagcgtcgcgctatttcagacgcggtaagatcaactggtgctcgttcagtcgttttaattgaagaacctgttgcagctgcaattggtgctgatttacctgtcgctgagcctgtcgctaacgtaattgtagatattggtggcggcacaagtgagattgcgattatttcatacggcggtgtggtttcaagcacttcgattcgcacaggtggcgatcataaggatgaagaaatcattcaatctttccggcgacacgtgcggccgtncaagcaaagacctagtggctacagttccctcccccaagctaagac

SEQ ID NO: 3481 - DNA, 1555 bp, Listeria monocytogenes 4b
  misc_feature (1)..(end): n can be any nucleotide: a,g,c or t/u
gcgcccagatgattgaaaaaagaaataccattagaatggaacaagcgagagagatattatgtaatcaaataacgcatcttccagtagaaaagaaatgtgtgacagagacgttaaaccaagtattacaagaacctattttcgcgccgtttcctgctccctattttaggcgctctggttatgatggctttgcgatttctgaggaggatgacgagaattatcctatcactttgcacgttgtagcagaagttccgtgtggggaaacatacgataaactgctaaaacctggtgaaaccgtccgaataatgactggagcaaaagtgccagataatgcctcgaaaattattatgctcgaacaatcaagagaagcggataacgagcatgaaatcgtacttataaatacacaaaaatctactaacattacagaaatcggtacggagttcgccaaaggagatttgctgttagatcgtggacacattttaaatgccggttcgataagtttactgtcatcctttggaattcaagaagtacaagtcatcagaaagccaaaagtagctattttatccacaggtagtgaacttgttcctgctggaaatccacttccagatggcaaaatttttaatagtaatcaaccattactggagaatttactaaaagtacatcatgccgagatttgcgcggccgaacaattacctgataattatgaggatacgaaaaagcgattactagaattgactcaaatagcagacttgataatcactacaggtggtgtttctataggggactttgactatatggctgatattgcaaaaaaagaggcagaattactttttaataaaattcaaatgcgaccgggcagtccgacaacagggatgtggttggacaacacgcttatcatcgcactttctggtaatccaggggcatgctttacaggtttttacttattcgtagaaccggtattagctaccttaatggggaaagatacaactgagacgaccaaagtgcgtgcaaaaatggcgagcgattacactaaaaataatggctatgatcgttttttacgaggaacctatcgtttgtctgacgaaggggaatatttggttgagttggtaggaagcgatatgtcaagtgcgttaggaaacctccatttaaccacctgtttatttaaaatccctcgcggtaaagttggaaaattaaaaggagaagaggtctaatcatggctactatcctccaaataatccggctctaaaaatagcgggaagacaactttactaaatgcactaattcaagctactctgaaggaaaactacacaggttctggcgtgatacatgatgggcatgatttttctgttgctcccgcgcgtactcgtctctactagcctcgtgaagcgggcgtcagggtggcgctccgtgcgtcgtcatacccccccccttgtttgctcgtgtccttttctctccgctgcgcgctggggtgccccttctgttagcggatccacagtctcctacgctccgtgccgcttaggtggtggttggatgctggggagccctccattgccctctt

SEQ ID NO: 3482 - DNA, 2730 bp, Listeria monocytogenes 4b
  misc_feature (1)..(end): n can be any nucleotide: a,g,c or t/u
tatcatacaaagactcaatgtaaaagcgaaatgctgtcttagttatcaagcaatttattttctgctatatttcttttacttttgcccagtgcaggattatctttaccaattacgataacagagaacctctatttaccacattttattacggatgaattaatgaaaacgacgacgggaacgtggctgtatgttattgcaattgcgattattttctatattagcgccagacttgtgtttgctttgccctatttcattgaagacgaatcactaaaaataagtggggctatccgaaaaagttggaaatacccgcaaaaaaacttatttttcatgttactaaaatgggttttaataattgttgcgattggctttttagtatcgattatcgcaacgattatgatgttgccgcttctcttaatagaaaaaataactccgggaattgcggtgtttatagcgggtattactttaaccatactacaagtgataggtttctttgccgctggaatttttcaaggaatcattgcgcaattattagtgaagaacgcctttgctatagaaggacaaccagcacttgtgacgcgcaaccagttcccgcataaaaagcgatttattattgtagcgataatcgttttcattatttttagtagttttaatatttatacagtgaatgcgactttatatgaacctaacacgaaaataatcgcccatcgaggtgatacaatgaatgctgttgaaaatacggtggaagccattgaatcagctgctgaggctggggcagattacagcgaaattgatattcaagaaaccaaagatcatcagtttgtcgttttccatgatatgacactgagaagacttgctggcagttctaaacgagtagcagatatgactttaaacgagttgcagcaaactaaagtgaagagtggcgactattcgtctcatatagcttctttcgatgaaattattaagacggcgaaaaggaataagatagatttactcgtggaagtgaagttgcatggcggggaatctagcgatatggtggaacgacttgtcacattgttaaagaaagaaaaagtaaccgataaatatctagtccaatcgttggaccaaccagttatcgaaaaaatagaacaagctgaccctacgcttgaaactggcatcatattagcgcttaatattggaaacttaccaaaaacatctgccgattttattgttttagaagatttttctattaataaacgattacttacacaagccagacaaaataataaaagggtgtttgtttggacggtaaataaagaaaaactaatgcaaatgtatttgcgaaagaatgtagatggaatcattaccaattatcctaaaaaggcgatagagcttagggaatcttttaatgaaaatgattctttgcgaagtcgtattgaaaataggttaggcttttaaataaaaagccgcaaacaagcactgtttgcggctgatttttattttagttcaaatgattttttaacagcgtttttgctgaaactaattaattcttttgcttctacatcgactttattttgtgtatcttgtagtttataaagctcagttacttctaaagttccaccaggttgtacgtctttttcagagccgcccatactagcatcagctgatacggttgtttctaactgagtgccattttgaaaagcttgttgatcaatagctaccataaaagaaatgttttctttgctgttatttgtgaatttagttttaattgcgatggcattgttaccttcaaaatccttaactacttccgaactaagaatttctactttataatctccaagttcatttggatttgctttctttttcgtatcggctttagctgtttctgttttttctgtacttgctttatcctcagtcccaccacatgcagttagtgctagggcaaaagtaacaatccccattaatagtaaaacgcttttcaattttttcattttcttctctccttcattttttatctgtctctattagaccatgtggagagaataaaagtcctatgcagtgggcataggactaggaaaagatttcattataaataccataaatacttacacaaacgataatataaatgacaatacctgcttttcttgtaccaggagaggatgatttaagtaaaggtaatttggaccaaataccacaaagattagtaaaaatgacaaaagcaggaacgataagaaagaaattgttaaaaaagtttactattggcgacattttgacgccctcggttggcggggtgaataaaccaaatagcaagaatatataacctaatacgccgacaatcattttccaaggtgtccctgttctaaaaccgggaatatgtttataccatggaacaaagtccttttcgtaatccgcggatacattttcccagtcagattcagtagaaaaattatctaactcagtaaaatcggataattcagagacgtagcttgggccaagtgagtcgtttttgacggctgtcctgaaatcttgaatggattgataacgctgttcaggatcaaaggcagctgcttgcatcgcaattttttcaagcgaagtggcatgttctttatctggtaaagtattttttcctaataaaagttcgagcataagaacaccgatactgnatatgtccgacctcacgtctgtttgcgatactccgattngtcggtagcaaaataacgcttgtgggtcggacgacgcagcgttatcccgatt

SEQ ID NO: 3483 - DNA, 1460 bp, Listeria monocytogenes 4b
  misc_feature (1)..(end): n can be any nucleotide: a,g,c or t/u
atggagcaggtaaatcaaccttattaaaaggaatgatgggactaattccgcgtgaacaagggcaggtcacattggctgacaaaccacttacatattggagaaagaaaatcgcatacgtaccgcaacggagtgaagtagatttaactttcccaattaccgtttttgatatggtgttgctcggaacgtatccagcgctcggattaattaagcgtcctggaaaaaaagagaaacaactcgcattagatgcgttagaacaagtagaaatgacaggctttatgaaaagacaaataggagagctatctggcggccaactgcaacgtgtttttatcgcacgagcacttgcccaacatgcggaaattttctttttagatgagccatttgcaggtattgatatgacgagtgaagcgctgattatgcgcctgttaaaaaagctaagagataatgggaaaacgattgtcgtggtccatcatgattttcataaagtggctgcttacttcgacgatatcattttacttaataagaagttagtcgcgcacggtccagtggagcaaacatttacagaagagaaaattcaatttgcttacggtgacgcaccggtggcatttgcgacgggggtgtaatagatgttgtttttagaaggattaatgcagtatagttttttacaaaaggcacttattacttctgtgacagttggcattgtttcaggtgttattggtagttttattattttacgaggtatgtcgcttatgggagatgcgatttctcatgcggtgttaccaggagtagcgatttcttatatgatgggtatgaacttctttattggtgcagctacatttggcattgcagcggcacttggaatcggttttgttaatcaaaaaagtcggataaaaaatgatacagcgattggtattgtgtttagcgcttttttcgcactaggtattattttaatatcctttgcgaaaagtagtacggatttgtatcatattttatttggaaatgtgcttgcggtgcggagttcggatatgtggatgacgattattattgccattatcgtgatttcattagtagccctattttacaaagagtttctagttagttcatttgatccagtgatggcagaagcatatggtctcaatgtgaaattcttgcattacttcttgatgttacttttaacacttgtaacggtttccgctttgcaaacggttggaatcattttagttgtggcgatgttaattacgccagctgcaacagcttatctgcttacgaataaattatccaaaatgattgttttagcttctacatttggagcagtgagtgcgattatcggactttactttagttacattttcaacttagcatctggtgcggcgatggttttagttgcgacgattattttctttattgcctttttattcgcaccgaaacaaggtttgctattttctaaaaaaagggaggttatc

SEQ ID NO: 3484 - DNA, 1961 bp, Listeria monocytogenes 4b
  misc_feature (1)..(end): n can be any nucleotide: a,g,c or t/u
tacgttgtttagagttatggcgcatcataatcttttggacaggatgagcataaccaaggaatgtatgtcagcaggataggctatttatttcgccgggtattatagggatattgattgtgataggttgttaggtcggcagtgatgtggcgacttttggacagcggttattttcgtaagtgcctttgttatcggtggttttgagcaagctaaagaaggcattcaagcgactatcaaaacgaaaaagttgaatgtggagctcttaatgattttagcggctaccggtgcatctattattggttattggtttgaaggggccatacttatttttattttctcggttagtggcgctttagaaacgtatacgaccaataaaagtaagcgcgaaatcacgaaattaatggcatttcaaccagaacgcgcctttcgtttgcttcctaatggagatttagaggaagtggctgcaaaggagttacaactggatgatatggtattcgttcggccaggagaaagtgttccaatcgatggagtcattgttcgagggtcaaccacgttaaatgaagcagccattaatggggaatcagtgccagcgacgaaaacagttggtgaggatgtgtttggcgggacggtcaatgtaagcagcgccatcacggtcaaagtaacgcaaacatttgataatacgatttttagtaagattattcgtttagtagaatcggctcaaagtgaaccttcgaaaaccgctcgctttattgaacgatttgaggatgcgtatgtaaaagcagttctattatttgtgttagtaatgatgttcttgcctcattttgctttagggtggtcttggaatgaaacattttatcgtgcgatggttttgctaacggttgcttccccttgtgcgctagtggcttcggtaacgcctgcgactttagcggcaatttcgaacggtgcacgtcacgggattttgtttaaaggcggcgtacacttggaaaatttgcgcggtgtaaaagctgttgcatttgataaaactgggacgctgacaaatggtacaccagaactgacagatcggttatttgctgaaaatgtcgataagcaacaagtaatcaatgtagttggagcgatggagcgacaatctttacatccgttagctgcggcaataacgcaagacctagaggcagaaatcaccgaaaagttaacagaaattgaagtgacggatgtagctggatggggagttcaagcgatttatcaagaggaaaattggcaagttgggaaagctgggtttgttgggaaagaagcagcggcagcattttcaaatggtgcatttgagcgacttgcgggtgaagggaaaacgattgtttatgtagctaaagacggcgtgattcaggctatgtttgcccttaaagatacatgccggcctgaagccattcgtacgattaaggcacttcaagcaaaagggattaaaaccataatggtgacgggagataacgaacaaacaggtgcagcgattcaagccgaactcggaatggactatgttgtttccggttgtttacctgagaaaaaagtggatgtgttaaaagaattgtcggttacttatggcagtgtggcaatggttggtgatggaattaatgatgctccggctcttgcacatgcggctgttggaattgcaatgggcgaggggacggacattgcgatggaaacagcagatgttgttttaatgaaaaatgatttggagaaaatcccatatgcttacaacctttctgaacggcttcactggattacttggcaaaatatttgttttgcgattgcggtgattcttgttttgataacagcgaatgttttccaactaatcaatttgccatttggcgttgtggggcacgagggaagtactattttagttattctaaatgggcttaggctccttcgatctaatcggaaaaagtgataaatttgactgcttgtctattcctagt

SEQ ID NO: 3485 - DNA, 2018 bp, Listeria monocytogenes 4b
  misc_feature (1)..(end): n can be any nucleotide: a,g,c or t/u
ttgcgtgagattgctacctatgtatggtattagcgcaacagaactagcagccactttagcagtaaataagagcgctattacacctaaactgaaaaaattagaagaaaaaggctacattagacgagaacgaaaccaacaagataaacgcgccgtagttttaactatctcagaaaaagggaataacgtttacgaagaatgcgaaaaacaattagagttactcgtgaatgaatggctcgaaatactaggggaaaaggacagcgaacaattttttgaattatttcaaaagattaccaagtcggttgttgagcctagacaataaaaggagagatttggcatgaaatggattatgaaactccgctgggccattttagcattttggcttgcagcagcagtcgtactaatgattattgcaccacccatggcagatcttgtacgcgaaaaaggcgaattaaagctgcctgatggctatccgtcatcactagcaacggaaatgcaaaagaaacataatccagatgacaagggttcagcttacatcgctgtttatactgccgaccataagttaactggaacagaattaaacgatattcaggattcactcaactctatcgaaaaagataaagacgaacttcatgtaacaaacgtgttatctagttttaaccaaccagaacttaaagataagttcttatcaaaagatggtaaaacaatggtagcaagtttaaccgtagatgatacggatgcctcggttaaaagcatacgtaacgcattagataagaaaatggatgtaaaaggtgttgatacgtatttaacaggtaataaactaattcaagaagatgtagttcaaggatctgaagacggtttacataaaacagaaggcatcaccgttgtctttattttagttgtattattccttgtattccgctcagcagtggcaccgtttattccacttgtgacagtgggaattagttacctcgttgcgcaaagcacggtagcattcttaattgatatctttaatttcccagtctctacatacacgcaaatctttatggtttgtattatgttcggaattgggacagactattgtattctcttaatgagtcgatttaaagaagaaatgggtgccggtctcaatccacgagaagctgttcatgcaacgtatcgtacagcaggaaaaacagtcatttatagtggtgtagctgttctcgtagcatttacttcgctatattttgtgcaatttgatttatatcgttccgcagtagcagtcggcgttgggattgtcgttttacttgccgcgctgtacacgctcgtaccattctttatgagcacactcggaacccatttattctggccgttaaataaaaatattagccataaagaaaataaaatttggggcgctgctggtaaattcacttttgcaagaccgtggattgctttattaatcgttgcagctatcacgttgccgccaatcttactgcatacaggaacagaatcatttaactcattagacgaaattagtgacaaatatccttccaaaaaaggttttgaaatcgtatcggacagtttcggagcaggccaagtagcgccgacacaaatttttatcgaaaatgacgataatatgcgaactacagattacatcgcgcaaattgaaaaaatttccgatgatttatctcatttaaaaggcatcgatatggttatgagtgcctcacgtccagccggaaaacgggtagatgacatttacattaaaaaccaagccggacaagtaaatgacggtgttggtcaagcaactgatggcgtaggggaagtgaaaaaaggactagattcagcaagttcagaactcaaaaaatccgagcccgccttggataaagctgttgcaggagtgagcgatttacaaaaaggcactgtcgcaacacaagaaggaattaaccaactacaaacagcactcgcacaaatccaaacaggcattgaaagcggagcaactggtgctggtgatttaaaacaaggcgtagcagaagccaaatcac

SEQ ID NO: 3486 - DNA, 2616 bp, Listeria monocytogenes 4b
  misc_feature (1)..(end): n can be any nucleotide: a,g,c or t/u
ataccttcaggaaaatcaaaatggtatttgtaaagcgagttctctggttggaagggtttatttataattggcccatctgtgattaaatgtgtatatggataatcattatttactttgaatttccacacagtctggttatttggtagagaaagactagcaagttcatcaacagaaatagtagctgtgaatgaatttttatcttgagtaaaagcaatattcaacttttgttcagggtgcttatattctcggatttcgttgtagtatgcttggatactattgatttttccttctgagaagccttgtaatttccatgtgttagaatctgttagctgaatttccttaatataaaatttcatctttaactccttaaaatttttattatcatattgtatattttagcatatattgataaaattccctacaataattaattgaattaaagaggtctccatattatggttaaaggcgataaatcatacttggcaaaagtttctataatttggagggtttttgctattggaaagaggtctatattggctgtatacttgattatttttacatagatagttgataaactgttgtaaataagatatgctgtagatactgaattttatagaatagcatatcaataaggggttgtagtgagagtggaaaagccatttttaacagttgtggtaccttgttataatgaagaagaagttctgagcgagagtgttacacaactaacaaatattatagaaaaattagtgatgagtgaatcaatcagtgacaaaagtcaaattatgtttgtagatgatggaagtaaagatagaacttgggaacttatacagcaatactcagaatcaaatgaacatgtatctggactaaaattaagtcggaattatggacatcaaggagctttacttgctggcttaacagaagcacatgcatattcagattgtgtcgtgtctattgatgctgatttacaagatgatgtgaatgcgattattgagtttatagaaaaatatcatgaaggttacgatgtcgtttatggcgtacgagataaacgtgacactgacacttacttcaaaagaaattcagcgttagctttctatagaattatgagcaaactaggagttaatatggttccaaatcatgcggactatcgactgcttagcaagcgtgcattaacagaattcttacgttataaagaagaaaacatgtttattcgaggcattgtaccattattaggtttcaaatctacgaaagtattttacaatcgaaatgagagatttgcaggagaatcaaaatatccacttaagaaaatggttttatttgctgtggatggaattacatctttcagtgttgcacccattcgattattattagtccttggatctgttatttttatgataggcgtagtaatggggatttatgccattgttcaaaaaatcattggtgctgttgtacctggttggacatctttaattgtttccttgtggttaattggcggaattcaattaattggtattggtgttctaggtgaatacattggaaaaatctttaaacaagtaaaagaacgacctcgttttactattgaagagaatgtttttgaaacaaaatgcaaagaaaataaaatcagcgagagataggtgtaaagagagtgaagaataggttagcttatatttttaatgcgttttttatacttatttttggttacttactttgcataagcatttttaaaccgctagaaattagttttaatcatccgagtatatttatattatttagtgctgcggcgcttttagtacttataggattctatcaattttctactagattgaatacaaaaggagatggtgtaataaccatctttttggttagcttgattatattaactcaaatttatttgcttttctccttgcaaatgaattcatatgcagatgcttttcttatcaagggagaagcattgaatatgctttctaatggagggcatgcaacaacgcagaattattttttaatgtatcctaataatatatttataacaattattcgatactggctatattctgttggagggacgcttggtattactaatacgtatttattagaaagtgccttcctttttgttagtcatacataatagccatctttgtatcgtaatggattgttcgtataggtaatggtattgtatttggggcgatcccattatgaaagctttaattctgtgtgccattacatggtcatacatgggaattatatagagacacaggtgtgcagccatgcctagggctggttgctttgttataatatttatgcggtcgaagtagtgaacggtggcaattcatcatcgttggtcttctgcagcaggtaggctatccgggtaagcggaatatcgtccagttactcctaactatgtaagttcatctatggtttataagttagcggcgtgccattttattgcacatggtcctggtagcaatatgcttttgatggttggaagctctgagttttgcaactatgtcagacagttgagacattaatcaagacccatccaattggatttcttcttaattcattgcatgaaggggcggctggccgatccagccggtcgtcaatacagcaatgaggtgggtt

SEQ ID NO: 3487 - DNA, 2326 bp, Listeria monocytogenes 4b
  misc_feature (1)..(end): n can be any nucleotide: a,g,c or t/u
aattggaatgatttttcaacattttaatttattatggtcccgcactgtggcagaaaatattgcgtttccattagaaattgcaggtgttcgcggtgaaaaaagacgctttcgagtaaatgaactcatccgccttgttggcttggaaggaaaagaaaatgcctatccatctgagctaagcggcggtcaaaagcagcgtgtcggtatcgcaagagcgctggcgaacaacccaaaagtattgctttgtgatgaagcaacttccgcactagatccacaaactaccgatgaagttttagaactcctcctagatattaacaaacgcctccatttaactatcatcgttatcacccatgaaatgcacgttatccggaaaatatgtaatcgcgtcgcagtaatggaaaacggaaaagttgttgaactcggcgatgttttagatgttttccgtcacccacaagaaaaagtaacgcagcgcttcgtccgccaagttaccgattcagacgaaacagaagaattaatccatctattactcgataattatgcagaaggaaaaattgttaaattactctttatgagcgaaaatgcaactcaaccagtcatttctcaagtagcaaaagaaaatgatgttatgctaaatgttctccacgggaacttaacgcaaacgcaaaatggcgcatacggaacgctttatgtacaagttttaggtacagaagatgcgataaatgcgagtctaacacagctacgtcaacttaaagtagaaacggaagtgttagaacgatgacgaaattacaagaattattttcaaatggtgattttcgaatgatgtgggtcgcaacacaagatacattatacatgacgcttgtttcattatttgcgggtcttttactcgggattgtgttaggattattactatttttaactaacaatagaaaacatgccggagcgcgcattctttactggattacagccattttagtcaatgtgttgcgctcgattgcttttattattttaattgtattactattaccgatgacaaaatcgcttgtcagaactgtaattgggccgaaagcgggacttccagctttgattatctctggtgctccgttttatggtcggatggtagaaattgcctttcgtgaagtggacaaaggagttattgaagcagccaaatctatgggcgcgaacatgtttaccattattggtaaagtgctcatcccagaagccttaccagcgattatttccggtatcacagtgacagcaatttcgctcgttggttttaccgcgatggctggtgtcattggcgcaggcggtcttgggaatactgcctatcttgaagggttccaacgtggacaacctgatgtaacagtacttgcgacaattattatcttaattatcgtctttattttccagtttatcggcgacttcttaacaaaacgaaccgacaaacgctaaccaatgtatatgaagaaatttatataaaaaaacgcggaatccccgcaaaaaaggagagaatttcatgaaaaaggttcttggtttcattttcacattaagtttagttttagtacttacagcttgcggtggctcctcagataaagcttcatctagtaaagacgataaccaattggtagtgggtgcgtccaatacaccacatgcccaaatcttagaacaagcaaaaccaatcttgaaagataaagggattgacttgaaaattgttaaatatacagattacgttatgcctaataaagcgctagaagaaggcgatttagatgctaactacttccaacataaaccatatcttgaactagaagaaaaagaaaaaggctacaaatttgctgatgttggcgcgattcacatcgaaccaatgggtatctactctaaaaaagttaaagacattaaagatctaaaagacggcgcgcaagttttactttctaactcaaaatctgattggccgcgtgttattggtatttttgtggataacggactattaacgctgaaagatggcgtgaaaccacaagatgcaacttttgatgatattaaagacaatccgaaaaacttgaaattcaaatacgattttgatccagcttacttgatgactgcctacaataacgaagaaggcgacgttgtagcgattaactctaactttgttgtagatcaaggcttaaacccttctaaagacgctattgcaatcgaaagtaaagactctccttatgcgaatatcgttgtaacaacagaaaagaaaaaagatgataaaaacattaaagagctagtaaaagtacttcattcaaaagaaattcaagattacattacgaaagaatggggccggggctgttgt

SEQ ID NO: 3488 - DNA, 2491 bp, Listeria monocytogenes 4b
  misc_feature (1)..(end): n can be any nucleotide: a,g,c or t/u
ggaaataaagcaattgattttcaaacaaactatagacaactaaattatacgggatttcttgtttttcaagtaatcctaaaaatgtcgctaaataccactttttatctggataatcttctaatagttccagtaattgttttgttttttgcacattgctggaagcgagaatttgatttaatttttttatcggaaattgttccgcgaaatcggtaggaaagggactaaagtacaattcctctataaatgtagcaaatgtttcagcaacaataagtgtttgtaacgtttcaaaatcaacataaataatactgggttcggacgtattatctatataagaaaaaccaatatagcgcgattcatcccggtggaaataaacttgcttccctgcgagatcaacatccttttgttccggaatatccgttaaaatttcatccaaactagccagataatagatttcaccaaaatctaggccataagaagtcggttccgtcgtcttaaaatgatttttgcgaatcaatccaccattttgctctgataaaagctgtttgtattcaaatggtaaagtgacacctaacgctatttctttttcacgaattacttgttcagttgcgccattcttttcgtttttaacccaaatcgtcatcctcttcaactcctccctgtattatcctaaaaaaagcaaaatagcgcaaacaaaagaacatagctagaaataattcctaactatgttccaaaattttacttcaaaagatcttgataataactatttccattccgcgcatcaaacttccccgttaaagcttccgtcatttctaccaaatcagcttctttttctcggtcgaaaagagggtaggctgcttgtaagaaaataagtcggtctaaaccaccctcagctttaagaacagtttctaagttggtatcaatcacttctcgcgctttttccgtttgcttggtaaggactaaatatttaagtaattgcccaagtggtggtagtaaggagatttgtttctccacaaggggataacctttatcaaagcattcttgcgccattttttcatctccaagcgctaaatatgcaagcgccatatttccatacgttaaatgaggaacttccgcacagcgttgttttccttcaataatcggttttgctgttttcttagctgtttcatagtctttaatgaagcaataataatgtacttgatcatttctttcgcaagcaggacagtcatttaaaaagtctgctttcgtatcactccattttttaaatagctctttggctttttcaacatcgcccatacgcatggctgcaagcgtgcacactttataataaggtcttagcgaataattttcttgttcgaatttcaccttcatatcattcaaaagtccgtcaatttgcgctttcgatacttcatcaaaagtcgggacatgttcactaatccatttatatttccaaaaaagatcttccgtgtcaatgtaagcatcactatctttgtcttcccattttttgattaaccagctaaaagcctgtaattgctttttcggaaacccagctgttaagcatgtgtcaatcaacagatcacgtgcttcaatgccatcatctatattgttatacaaatctgcaccagcaataattcgttctaatacttttattttttcaggcgtgtcatccattccccaaactgattctaaatcattcaaataatccatttttcttcctcctatagcatctctaagattcgtaacatattttgattcattaataccatttctttccgtttaagcggataatgccctaatagtaaggcttggatataaagtacattcacaattacggacaattctttcactgtttttccagaagtgaaaagtcttttaatcagctcgttatccaaatttaaatacaagtgagcaagcggtgcaggttcttgttctttttggatgctctctaaaatatcactaaaaacagaatttgtttcttcgacagcacgttctagttcgcgtaattcttgtgttgctgtagagtggatgaaaataatcggtaaatctttcggttcaaaatgtttaattaatacatctgtatcaaattcagccatcatactattcatttctgtcaaaataggttggtaagcctgttcttcgctcactgtcataggccgtaatttattagtcatttcttccggttcgattaaaacaaattctgtcccctcaacaaagtaacttaattgcgctaagattggcgaatcataggaatagccgccgttaataagcgtcataccgcttgatctagcaatatccttaatttgtctaaagtcatcgaccgagtaggtgtaatagatgacatcatttttagcgataatatcacctaatttttcctcgccattcaaagtccgaactggaagataaggatagattaattttaaaaatggtgcatcttcactcgcaagtgctttaaaaccaagataatgtgtagctaataatttcatcaatgcttctt

SEQ ID NO: 3489 - DNA, 1878 bp, Listeria monocytogenes 4b
  misc_feature (1)..(end): n can be any nucleotide: a,g,c or t/u
ggtcgctccatgcgtcatattatgcgtagtcctgatacgattattacagttgccattattccaattatgattatgttgatgtttgtgtatgtgcttggaggcgcaattcaaacggggacagacaattacgtagattatttgttgccgggaattattttgatggcaatttcaagtgggattgcttatacggcggtacgattatttacagatgtacaaaaaggattatttcaacgatttcattctatgccaattagtcgttcttcggtattatggggtcatgttttaacttctttagtttctaatgttatctctattgtgctcattattttagttgctcttcttattggttttcgttcatcggcaggaatagtggaatggctttctgtagccggtattttgctattattcacattagcgctcacatgggttgctgtgattcctggtttaactgccaaatcagtagatggagcaagcgcattttcttatccgctcatatttttaccattcattagttcagcttttgttccaacagatacgatgccaactgcagttcgtgtttttgcagaaaatcagcccgtgacctcaattgttaatacgatacgtggattgctgtattcagaaccaatcgggaatgatatttggattgcgcttgcttggtgtgtcggaattaccgttgttgcgtatgtttttgcgataactatttataaaaaaatggtataaaataaaaagtttggctccgcggagccaaactttttatttttcaccggaaatatgttttttcggtaagataaaatgaataaaataactaacgatacagcaagcaaacataacccagaaaaccatatgaagcccgctatataaaatatctcgaagcggatcaacaaggtctgcactaacgttgccagaagtttgtgggctaattagttggtttagattactacgatttacttcactgccagctgcagcgcggaattcgcttgtaagaactgagttgaagatagttccaaagacagcgaccccgattgtttgaccaactgttctaaacagtgtgttagaagctgtagcaataccagtttggaatcgcggtactgcatcttgaacggtaacagttgttgttgtaaagattatcccaaaaccaaatcccataaatgcactatttaaatagaagaagatatcatttgtggaagcggggaataaggctaaaattaatccacttgcagcagtaattaaaacgccaatgccaaccgtatgccgatttccaagcgtcattaaaagtttgccgccgataaatgaaccaattatccatgtaactgaaagcggtgcaagcataaatccagcaatcgtagccccgtgcccaagcattccttgtgcccacattggaatatacacgttaattccaattaggaaggcactaatcaagaaaccaattaagttcccaattaacaccactgggtttttaaataatacaaatggcataatcggatcttttgcacgtttttcgacaaaataaaaagcaataaataacacaatcgaaacggcaaaaagaataacgacgagcggttctgtccagttgagtgattccccggctcgctgtaacgcaaataataatccaagcagagccaccgtaaagaacgaggcacctaaatagtcaattggtagtttgacatgttccactttttcgcgtaaataaagcaaaataagtaggattgttaaaataccgattgggacattgatgaagaaaatccaatgccatgaaagttggtctactaaaaatcctccaacaagtggtccaaatacgccagcgataccccaagcggaacccatgaagccaagtacttttgctcgtttttcaaatggatacacgtctgcgataatcgt

SEQ ID NO: 3490 - DNA, 1983 bp, Listeria monocytogenes 4b
  misc_feature (1)..(end): n can be any nucleotide: a,g,c or t/u
gctgcaacttgaggtaagtgactaatgcatagtacttgcgagccaactgaaacagcataaattttttctgcaatcgcttgaccaacgcgaccacttacaccagtatctacttcatcgaaaataatcgaggtgataccttggtgcctagaaaaaatggtttttaatgctaacatcattctagataactctccaccagaagcgatttttgctaatggttttaaaggttcacccgggtttgttgacatatagaaaacgacgctatcttgccctgaatctgttagttccattttgtttgcttcgaagcgtacactaaaaatggctttctccatatataagtgatttaattcttgtttgatttgtttttctaatgtaacagccgcttttttacggatttccgttagtgtatttgcttgttttgttagttctgctttaagtgttgctaatttggtctctaaatgcccgacatgtgattcactatctgtcagtttttccatttcgctgcttatttcttgttcgtattgaatgatatcttcaattgttttaccatatttgcgttttaattggtttaaatcattcaaacgtgattcaatttgattcagttcttctggttggaattcgagctgatctagtgattgcctaatttggctcatgctatcttctaacatatagtaactagaagaaatggcctcactaaccgctttataatccgtatgaatactcgccgctgcctccatttgacgcattgcttctccaacaaattccagcccaccaggctcaccttgaatcgcggcataagctccttgtaaattttcgttaagtttttcaaaattggctaagatatttttttgttctaacaagcgatcttcttcaccagcttgcaaattggcattttcaatttcctgttgttgaaaacggagcatatccagacgttgcgctaattcccgctcatttttcgtccaattttgccactctttctcgattgtttgatattctttgaaattagtttggtacttggttagtgctggcttgattttgtcagaagcgaaacgatcaagtaatgacaaatgaaactcctcattcatcaattcctgatgttcatgctgactatggatatctattaatttcgagccaatttggcgcaagagaacggtagttacaagtttgccattaattcggcaactatttttccccgagcgaaacaggctgcgttctagtacaaccatatcatccgaagcatctatcccattttcaattaacgcatttcggcaagcaaggttatcctctgctagcgcaaaaagcccttgaagttctaaacgttcttctccatgacggataaaatcagctgacccgcgtccgccaacaagaagaccaagcgcatcaataataattgatttaccagcgccggtctcccccgtaagtaccgtcatcccttcttgaaaagttaaagaaagcgattcgatgatagcaaagtttttaattgtcatttcttgaagcaaaatctttcacctccaacaaattttaaagcatatctataaaacgatctgttaatgttttcgcattttcttccgagcgacaaataattaaacaagtgtcatctccacaaatagttccggctttttccggccagtccaagttatcgattaatgcaccaaccgagtttccatttcctggcattacttttaaaataatcataaattgcacgttatcaatgccaataaagcaatcaatcaaagcacgttttaatttttgatgtgggttaaaactattatcggcaggtagactgtatttgtaaccacctgtttgtgttggaactttgacaagatgaagttctttaatatcacgggaaacagttgcctgggtgactttaacatcgcgttctaacagaagttctactaaatcttcttgcgtgtcaatctcattggatgtaatcaattctcgaataataatatgacgatgacactttccagcacacggtggacattc

SEQ ID NO: 3491 - DNA, 1555 bp, Listeria monocytogenes 4b
  misc_feature (1)..(end): n can be any nucleotide: a,g,c or t/u
ccttttgggcaacctcccccatgcttgagcggccgcccttgtgctggaaagacggtaatacttgtaatgttttatatccatcatttaccaagacaccaagagacgctgctggcgctggaagaccaagcccaataaagcttaagaaggcttcaaagaaaatcgcactaggaatactaaacatgatgttaatgataataatcccagaaatatttggtattaaatgttttataagaattttaggagtagattcccctaaagtcatggaagccataacaaattcttggtttttaagttttaaaacttgtcccctgactacccgggccatcgttatccaactcgtcattgcgattgctatgataatagatacaatacctggttcgagtattaacatcattaaaataaccacaactaagtttggaattgcaccaataacttctaaaacacgttgcatgaaattatctacacggcctccaacataaccagaaatcaaaccgtaagcaaccccaattataaggtcacaaagcgctgctacaacagcaataataagagatacacgtgtaccagcccaaatacgagcaaattggtcacgtccaagcgtatcactacctaaccagtagtaagtaccctctttaatattattttgtttataaatatcaacatcttctccaccaatagattgatgaccattccagaaaggcatattttcaaagccttgaacttttggaggaagactcgcattttcagtgatttgtcggttaatatcatgttttggtcctagattttgtgataaataaggcccaacaattgccatgataataacaagtgctaatacaattagagaaactaaagccgctttatttttacgaatacgaagccaagaatcttgcaagaaagttaaacttggacgattaattttctctgcttctgcatccagaatgtgtgctggctgaaatctttcttttgcaattttatgttctgccattattttctacctccagacacacggattcgaggatcaatcaatccgtaaagaatatccactaccaagataacaaataccaacatgacagcaaataaaattgtagttcccataataactggatagtcatttgtttgaatagaagaaacgaattggctaccgataccaggaatactataaatattttcaataacaagggaaccagtcatcagtgcaactgataatggtcctaaaactgtaattaaaggaataagtgcattacgaatcgcatgtttaactgctacttccgttctactattccctttcgctttggcaagtagaacataatcagatgcaaatacatcaattaactctgttctcatgaaacgagctgctgttgcaagcgggaacatcgcaagtgcgaatgctggcagaatagtatctgcaaacgtaccccaacctgctactgggaaaatttgaagttttgctccaagccagtattgtagaacagtcgcaaatccgaaagatggaactgacttacctaatattgctataaatgtactcgtataatccggccacctattttgatacatggcc

SEQ ID NO: 3492 - DNA, 1699 bp, Listeria monocytogenes 4b
  misc_feature (1)..(end): n can be any nucleotide: a,g,c or t/u
tgattataatccaatggaacatttgaagtcacgtgtgaagtcactaaaaagtatcggagcaaaattagaaaagaaaaaggtggatatcacgccagaaaatgcactaaaatatgtacacgatattgcgggcattcggattacttgttcttttgtttcagatatttttagaattcacgaaatgcttgcagggcaaagtgatatcactatcaaacgagtaaaggactatgtaacgaatccaaaacctaatggctatcggagtttacatttactttgcgaagtacctgtattcctgacaaatcgttccgagaaaatgaccgtggaaatccaaattcggacagttgccatggatttttgggcgagtttggagcataaaatttattataaatatcaacaagaagcaccaattgagttagtaaaagaattacaagacgccgcacgaattatcacccatttagatgaaaaaatgaaaaacttaaacgatcaaattgatcaatataaaaaagaaaaagaaaaataatctaatagggagctttatttctttgcaagcgggatggatgcatagaaataaagctgttttatatttgcgagttaggttattttgcttcataataatataggagaaaaaacgaaaggggacgatacatattggagatatttttatatgttttagcattacttgtggccatctttatttctaatttactcaaccggtttgttccctttgtttcggtaccactaatccaaattggccttggtgtattaattgccattatgccgattacgtttgatttgcaattaaatccagaactttttctagtgatgtttattgcgccattgctatttaatgacggaagacagacggacaaagcagctctttggggtatgcgaatgccgattttagtattagcgctcggacttgtatttgcaacggttgtcgtgattggatattttgtccactggatgattccgacgattccactagcagcagcttttgccttagcagcggctcttgcgccaacggatgctgtagcagttagttctctttctgggcggattaatttaccgaaacgaattatgaatttgctcgaaggtgaggcattaatcaacgacgcgtcaggactcgtggcattccagttcgcgattgcagcgatggtgaccggcgttttcagttttatggatgcaagtattagcttttttgtcattgcgattggtggtattttagttgggctcattttgagttggttaaaattccgattgttaaaatgggttcgcggccttggcatggaagatgttacgtttcatatgcttatccaaattttaacaccatttattatttacttagcggcagaagaaatccatgtttctgggattttggcagttgttgcagccggaattatgcactcgatggaacaaaagaaaatggatcctcagtcggtgaaattaaatgtcgtttcgcaaagtacttggtcggtgatcatttttgttttaaatggtttagtatttttacttttaggcacacaacttcctgcgattacagaagtagtttggaatgattcaggaagtagtaatttacaagtgatggcttacattttgtctatcacagctgccttaattttactgcgctntttatgggtatacatatcgtggagcatcggcgcanacanagacagaaacanantaaaaaaacacagctacctaa

SEQ ID NO: 3493 - DNA, 2773 bp, Listeria monocytogenes 4b
  misc_feature (1)..(end): n can be any nucleotide: a,g,c or t/u
gcatgtcacatcggtgtgctggaaagtttcacattcacttcccttctgcttgcactaacaaacaggttcaaagggtcagaaagcattaccttcctatctcagccagaatcggcccccctagtttttcttattaagttgcgttcatcataacatagagttttaccgctgtaaatccccaaatgtaataagctcaaacccattttcaagaagccaatcccgcacccgcacatcacaaatcgtcgcaagctcgcggcaccgcatcaacgtataagaagaattatccagcacaaattgatccaaaaaaccgacatcaaaatgcatctcagcgatttcgtttggcgccaattttaataatccgaaatcatcgttaaggaaattttcaactgagacaccaccatttgtgtatgggagtgcgccagactccaacagtttagtaattggtaaataaccttcctgatctggccatttcttatcaccgctgtattttaaagtggtgtgaatcccgaactcacgcgcaatatcaaagaaagcttggtcaaccgtttcatcaccgattgagtggcagtcaatgtgttctgggtagtgacccgttagcgctttgaaccgttccatttgagcgatagtttccgtgcgcacatcttcgtattggaatttcagttctgggttagcacggtaatatttggaacgatggaattccccgttttcgtcgacaagtgacgggatttccgccgggtccgcgcatggttttccgagtaagaaatttgtgtgttgcccgatgaataggtctgtgtggtcttttgctagagtgattgcgtgctcggcagtttctaggttcggcatgagtaaagtggatgttgtgatgccggttttgtagctttcgatgatgccgtggttgatggctttggatagaccgaaatcgtctgcgtcgatgattagttttggcatggtaaatccacctctaattgtttaaacacaacatccaaaatctccaccggtatttccgcaaacgcatccccaaccgaaacctcaaacgcacaaacatccgccgatttctcctgcaaataccccgaaatcccaaccccagtttcatcctgaatcttcgtcaaaatcgccccaatctcatcagccgacttctcaaaataaacatgaaacatattagaaaccggcacttccggcacagtcttcacgcccgaacacgaattaaatcgctcagccaatcctttcgccgcttcaaaatattccgccattttcccaatccgtttttcaaaatagtaatccgcggacaaaatatacggatacagactaatcaaatctccgccataccgtcgtttccagattttcgcctcttgcacaaaatcatcattcccagccagaatcgccccagcaatcccgccaattcctttgtaaaacgacacatacacactatcaaacagcgcacaaatttcttccgcagacttctgataaaacggcgtgatttcccataaccgtgccccgtcaagatgcaacgaaataccctgttcatggcaatactccgaaatttcctcaagctcttcaaaagcaggcagctgcccaccaatttctcgttgtggaagttcgataagcacactagaaactggctcgcgaaggcttttaatatcgtcaattgtcaaaagtcgattcgctgttccaagtaatatgggcgtgatttgttgcaattcttttaacccatgtagctcgtgaatctccaaatgagagagcggatgatatgccacgcaccgattctctttccggtcagcccaaatccttaacgcgatttgctgagccatcgtcccacttggaaaaaataccgcaggattgtttcccgagaattttcgcgatttttgtttcaaagttttcaataactgcgccatttccgtaaatatcgctttctaggttatcatctatattttgaagtgcttctgtcagaacacctacattgcgcggaccgttcccgcctagtttatatggtgttttttggtagctggtttttagtgtgtttatcattttggttcactccttttacgatataatttctaaatttatctatattatacctagaactcaagcctattgtaaatttaactacggtaacaaaaaaactatcctcccgagaaccctcgaaagaatagtcttcacaaataaattttaaaaaataggtggttacaacggacttccgcttctcgcttctaataatttaatttttcttgtaggtttccttaatcaaaactttctctttagtatcgacttttttgaaaattaattttccactttgcatttctaaagagaatacgaaatctttttcatctgctttgacatctatgtgatattcatcccctttttgttcatttttggttattttgacattatccttggatttaagaaattttagcattgtttctacattctgttcatcactttcaggttgataactgtctacttttttgctactcaatgcaccatcatatggatattcatcccccccttccccctttaacttaccccatttccggttaccccctgcctgatcaacttacatataccttaacccctcactgcttgtttccgtgctccccctcccgtttcgtccccccccccttttccttccctcccctctcgtgctctcccccccccgtcgtttgctattctactctttcagcccccctcacccctccctcttcttttttcttctctctcactccgtcgttttcttcgccgccccccctctgttaccactacttatcattccacaccacct

SEQ ID NO: 3494 - DNA, 2525 bp, Listeria monocytogenes 4b
  misc_feature (1)..(end): n can be any nucleotide: a,g,c or t/u
tagagcaagatagaacgagcacggatttaatcaaagaagcattaaaagaagctgttatttcgcaaaaattaaatttccgatatattgataggattctgcttaactggtcgaaacaaggagttaagacaatagaagatgccaagcgtgtagcggaagaatttcatcaaaatgggcgcacaagccaagcaattaaccaaacggaagtgaaaaaaagcgcaggttcgattcctctatacgactggcttgaaaaaagaaaagggtgaggtacacaaattgttatcgaataaacaaaccgtattatgcatagaagaaatggcaaaaatgtttccagcagcacactgtgagctagttcataaaaatacgtttgaattactggtggctgttgtcttatccgctcaatgtacagatgtgttagtaaatcgcgtgactgcctcgctgtttgaaaaatatcactcaccagaagattatttggctgttccactggaagaattgatggaagatattcgctctattggcttatatcgtaataaagcaaaaaatattcaaggattatccgagaaaattctaatcgaatttaatggggaagtaccaaagacgcatgcggaacttgagagccttccaggtgtaggtagaaaaacggccaatgttgttttatcagttggctttggtattccagcaatcgcagtagatacacatgtcgaacgaattagtaaacgcttagggatttgtagatggaaagattctgttgtagaagtggaagaaacgttaaaaagaaagctaccaaaagaactctggtctgatgcacatcattatatgattttctttggaagatatcattgtaaagcaagaaacccagaatgcccgacctgtcccttactctatttatgcagagaaggaaaaaaacaagcgaaagtgaggggattcgatggctgaatttaaatatgcagtagaattaacacatcctgatttcccagcaccggatgttattttagaagaatatgatccagaatccatttatgttagtggtctacctttttggcaagaacaacagtcttcagcctaaggtggtggagttattcgttgtaccaatgaaacatagcgcgcatgtagcaaattggcgaaacatatgactaatttggctgaaagtatggaagctgatttgaaagtgcataaaaagccatttcctgtaacggttagagatgcgctcggtatttttttatctattttattttggagtaatcaccggccagtacagctagataatttgatggaccaaattaaaacgttggagacaaaaccactcaatttagacgagcggttagaatatgtattaaagcgaggtaatacgtatttaggttttcggcaattaaatgaattaatgttagaacagcgtaaattaattgcgaaaagatcataaaaaagagcggaaggtgtttaaacatcttccgctctttttgtattaactatctggaattttaactgtagtagaggaggcagggcttcgattaccgtctttaacagcgacgacgttaatggaaacagtgtctccaggattacctccgcttactgaaacggaagtagaagatactgttgtagtagaaccattgactgttacttcataggttgcaccatctaccgcagaccaagaaacattgatttgcttagagccggcattataacttgctcttaagccggcaggggcagtaagatttttggcttcttcttcagcctttttcttagcttcctcttctgctttcttcttagcctcttcttcttttttcttctcttcatctgttttctttttatcttcttccgcttttttcttcttcgcagcttcttctgcttttttcttctcgtcttctggagtagaagcagttttggttggagcggttccggataagaataattcgtaacttactttatcacttgcagtgcctgcagcagcgcgtgcaattgggttgcttccttttagaattgggacggaaacaacattgctaggcattttgaaatctgcagtagttttaccggcagatgcatgagccattaatttactaaacatccgctgcgcaattttttgttcacttgctgaaacatattttttcttgtcatcatagccggtccatacagcaatcgaataattggttgtatatccagcgaaccatgagtcacgggcagcaccactagggtagtagtacttcgaagtgaattcaggtggaatattcgttgtacctgttttaccagcagcaggtacgcctggtacggctgctgacgcacctgttccgatagaaagaacatcttttagaacatctgaaaccatataagcagttgattctttcatagcaacagtactttgtggttctgtgtcaatttctgtttgtccatctgataaaacgatttttgtaacagtgtgtggcttgttatagactcctttgttaccgaatacagcataggcaccagccattctttccagcacaggtgcggcgctcgagcagctgtangggcctaacgccnnnnaaagttaacca

SEQ ID NO: 3495 - DNA, 1722 bp, Listeria monocytogenes 4b
  misc_feature (1)..(end): n can be any nucleotide: a,g,c or t/u
acatgaggcacctaagctctcgagggccaccatgtgctggaaagtaatggcacaaacaggtaatattttctaagcatagaaaggaaaacaatgacagataagaagagcgataatcagacggaaaagacagaagccaaggaaaacaaaggaatgactcggcgtgaaatgctaaaactttctgctgtagctgggaccggtattgccgttggggcaactgggcttggcacgattttaaatgtggtagatcatgtggataaggcgctcactccgaaagaaaaagcggaaacaggtgtaccgttttatgcgacaaatcaagcgggaattattacagcgcaacaaacctattgttacatcgccagttttgatattcaaaccgattcacgtcaaattttgaaagatttattaggaaaatggacaaaatttgcggatttaacggcaagtggcggggttctgcgtgatgtggataatgacatgttaccgccgaacgataccggggaagcagatgggttaggaatttctaacttcacagtgacactaggttatggtccgactttttttgaaaaagatggcaaagaccgatttggtgtaagggcgaaaaagccgaagtatctagaaaaaattccgcatatggcgcatgatagtttggatgaagcttattctgatggtgatctttgtatccaagtgtgcgctgatgatcagcaagtcgctttccacggaattcgtaatttcatccgtttagcgagcggtgtcgccgtagttcgctggattgaagaaggtttcctgagtgcaccaaaaaacgagacgccacgcaatctatttggctttaaagatggaacagcaaacgttgaccatgactcaaacaaaggctacaaagacgtcgtttgggcagaaaatgatgaaccagaatggatgcgaaacggcagctaccttggctaccgcaaaatccaaatgcttatcgaaatctgggatcgttcatccttgcttgaccaagaagacacattcggtcggaaaaaagcatctggagcaccgtatcataaaaaacatgaacacgataaagtcgacccaagcaaactgccagctgattctcacgtgcgcctagccaaagacacgaagcaacaaatgcaccgtcgcgcttattcgtacacaaacggtattgataaaagcacgggaacgattgatgctggattactatttatctgcttcacccaaaatccgtccaaacaatttctgccaatgctaagtatcatgggaaaaatggataaattaaacgaatatactgtcccaattggaagcgcgatgtttgcttgccaaggcggacttgctccgggagaaatttttggagaaaaactactgtagtctaaggttcgcgagccttagactttttttgtataatgaaggtaagtcaatgattagaaggagccgattttagtggaagaatgggatttgctaaatgagaatcgtgaattaactgggaaaacacatatccgcggtgaaaaactagcgcccggagaacttcatttggttggtcacgtatgtatttttaacgaaaaagggcaacttttaatccaaaagcgccaaaaagataaagaaggttgggcgaattattgggatctttctgcggcgggttctgcgctaaaaggcgaaacaaggccgcaagctgctgaacgagaagggcaagaagacctagggattacaattgatttagtaacacccggggcaaat

SEQ ID NO: 3496 - DNA, 1273 bp, Listeria monocytogenes 4b
  misc_feature (1)..(end): n can be any nucleotide: a,g,c or t/u
acaaacgtaaggtttttaattttgtagagaagaaggaagattatgcggctgacgaattagtcgattatttaattagggaagcagaagctcgtactgatattcatattcctgaatgggaacatttcgcagcacgcctttatttaaataaattatataaaaaagcaagtaaaaatcgtttctataatgatgatgataaatatggttcgtacgttggactacaagagagtctaggcgaacgtggtatttattctggcaatattctaaaaaattattctaaagaagatttgattgcagcagggaaattaattgaccctgaaaaagataaattattcacttataatggtttgtatttacttgcgactcgttacttagcgactgactctgaacgtaatgtgtatgagttgccacaagaacgttggttaactatcgcactttatttaatgcaaaatgaaccaaaagaaaaacggatgaaactagtagaagaagcttactgggctttaagtaatttatatatgactgttgcaacaccgacacttgcaaatgctggaaaagttggcggtcaattgtctagttgtttcattgatactgtagatgatagcttgcaaggtatttatgacagtaatacagacgtcgctagagtttctaagcacggtggtggtgttggcgcatatcttgggtatgttcgttcaacaggagctgctatccgcggcgtcaaaggcgcaagtggtggcgttattccttggattaaacaattaaacaatactgcggttagcgtagatcaattaggtcaacgtaaaggcgcgattgcagtttatttagatgttttccataaagatatcgaatctttccttgatttgcgattaaacaatggtgaccaacgtttacgcgcacatgatgtattcactgcagtttgtatccctgatattttcatggaagctgtagaacgtcgtggcgagtggtatttgtttgatccacatgaagtaaaagcgaaaaaaggctggtacctacaagatttctacgatgaatcaaaaggtgaaggtactttccgtgaaaaatatgaagaactagtagcagatgaaacaattagcaaaaaaattgttaaagctattgatatcatgaaacgtattatgatgagtcaattagaaacagggaatccattcatgttttaccgtgatgaagtaaacagaatgaaccctaataaacatgaaggcatggtgtattctagtaacttatgtacagaaatcatgcaaaatatgagcccaacaaaaatgat

SEQ ID NO: 3497 - DNA, 60 bp, Listeria monocytogenes 4b
  misc_feature (1)..(end): n can be any nucleotide: a,g,c or t/u
atcctattgtcaactggcagcatgcttgagcggccgcccctgtgatggatatctgcagaa

SEQ ID NO: 3498 - DNA, 2500 bp, Listeria monocytogenes 4b
  misc_feature (1)..(end): n can be any nucleotide: a,g,c or t/u
gaagatatatgaccgagaagatggtaataagtttaaaagaggaaacagggcgtatatttgataggaatgatttacaacggaaattttgccatccgcagagggtcaaacggtgaagaaggtaatctgatgagtcatagcaaaaaactcctaaaatgaagaatagggtagataaatttcttcatgaaacgctaacagaaccattaatttcatccgtgctatttagccatagtcatcttttcataaaatcacaccacgattattcaagtcaaacgtgctaccttcataatcatatgtagtatatacatttccttcttccgcacttgttgttatgacaactggaattcccgcatctaatgctctgataatagctggcatcatttttggcgccacttgccctcgtccaacaccttctaaaacgattcctgatacgccactatctatcgctgcatcaataaacaaaccatctgcaccaatataacatttaatcacaaccacttctggtaaatcaaggcgaatatcaaaacactcatgctccagtggtttttgatacagaaaaacttggtcattatcaataatacccagatagccaaacccaaaagcactaaaaccttgtatgttggatgcatgaactttttttacatatctcgctgcaaaaattcgttcattgaaaacaacgactgtcccagcttgacgtaaatttatttcacacgctgtataaattgcatgacgaatattaacataggcatctgtccctggctcctcaggtgctcgctgagatccagttactacgattggtcgcgcatcggttactgcaagatcaagaaaataggctgtttcttctaatgaatctgttccgtgcgtcactactattccatcatatgtttcatccatgaagatagattcgataagttgcttcagactgattaaatcaggtagcgtaatgtgcatagatggtaattggaaagtagaatagatatcaatttgaatttctgttggtaattggcataatgcagctaattcttctccagataattctcctgatgcaagttttcctgatgctgttttcttacttgcaattgtaccgcctgttgtaattagtgctacttttgccatggttattcccccctacattttccttttaaacaaacaaatgagtctcggaagcgtttcccagacccattcagtgttgtttattactgtggaattgttagaactgtaccaactggaacattgtcacttcctagtccattggcttgtttaattttttctactccagcagctgcccccgcttgtccatatgttgaacgtgcaatactataaagggtgtccccagctttaacagtatgagatcctccagctttttgctgtgaggcttcattcgctttttgctgctcagctttttcagcagcagctttctcggcagcagctttgtcagccgcagctttttcttcggcagcttcttgttctttttttgcatttgcagctttcactgcatcttcttcttgttttttcttatctgccgcagctttttcttcggcagcttttttctcttcagctgccttttcagccgctgctttttcttcggcagcttttttcgctttttctttttcttctttagattgcgtgttgtcagatacatttacggttgattctgtttctgttttcacttcatttgatgaacccatattttgtactgttacaaatacaatcacgataacgattggtattaatagaaaaaaaacaatcaataaattaagtaatgggtatctaaaaatggttttcttttttcctcttctgctatcagaacgggataacattggcggttcattgttgaattcatcttgaccttcagaactcatatcataatcagccggttcttcgtattcccgtttttcttttcttgtttttaccactcaaagttcctcctttagtgctttctaaacttatcctatgcactattattggcacagagaagtgttacatatgatgttaataaatgaaatacctttgaaataattatacccataaacgcaacatacaacaacacttaaaccacttttttagaaaaaaaagcaagaattattataatttagtacttctggcatagaatttatgttgattttatatagattactgaacaaaataataacaatttttttacttttaaacaagtctttttttcacaaaaaatatgaaactatatagtttttgtcaaatttcgtaacagcaaaactattgcaataaataagctaaataagcttcccatgttggaatttctttttgctgtgttattggtcttttttcaaaatcgattatttctgctccatccaaatcacaacagttttctggggtgacttctaacggcgtttcttcaaagtatcgtagaatataattacggcgacaatccgttgtatgcagatacccaataaattgttgtaaattagcccgctttcattttttttcgataatccatttttgtcggttaattctttcgtactta

SEQ ID NO: 3499 - DNA, 2099 bp, Listeria monocytogenes 4b
  misc_feature (1)..(end): n can be any nucleotide: a,g,c or t/u
gtggaaagtttctcccagctcttactttcaaattgttctaataaatcatcttctaaagaaatcataaacttactgaaaccagggtcaccccgtcgtccagaacgtcccattagctgtagatctatccgacggctctcatggcgctccgttccaattacagctagtccgccgagcttatgtacatctggatccagcttgatatctgtcccccgaccagccatgttcgttgctaaagttaccattccgcgtttcccagctttggcaattatttccgcttcttgggcatggtttttcgcatttaatacttggtggggaattccagcagcgtctaataagccactgatccattcgttacttttaatagaagaagttcctattaaagttggctgtcctttttcatagcgccatgatacttcatacacaatcgcacgacctttttcctttttcgtatagaaaatatcatcttgcatatcttcccgatttacacgtaaattggtggggattactacgacatccatgttataaatttgacggaattcttcttcttcggttttagccgttcctgtcattccagaaattttcttatacatccggaagtagttttgaattgtaattgttgctagcgtacgtgattcttctttaacttccacgccctcttttgcttcgattgcctgatggagtccgtcattaaagcgccgccctggaagtgcacgaccagtatgtggatcgataattaatacttcatcatcaagcaccacataatctttatctttatgcatcaagaaatgagctcgcattaaaagcatcgtaattctaagttctgactgcgcctctgcggaataaagtgattcgacaccccaaaacttctgggctttctcaattccagcatcattcaaccaaacaaagcgtttatgttcttccatctcataatcatctttcatcatcttcttcacaagcttattcgctgtatgataaagggacaaatcttcttctttacggtcagaaatcagtaggggcgttctcgcttcatctattaaaattgaatctgcttcatctattaaaacaaaatcaagtccactttgtactttatcttctttttggcgtaccatattgtcgcgtaagtaatcaaaaccaaattcagaagccgttccataaataacatctgctgtataaatggcctttttttgggctatgtctaaaccagattcatttaacgcaacggaaacaccaagatattccagcacttgtccaattgcttcccggtcacgtgtagctaaatactcattggcaggcacaaggtgtacacgatcaccacgcattacttctataaccataacacataccgacatcaatgttttaccctcgccggttttcatttctgccactttgccatcgccgagaacgagcgctcctattaattgcactacaaccgcatccaaaccaataattcggctagctgcttctctcgccaaagcaaaaatattaattttatctcgatcagtcatcggttttgtcttaaacttctcgcgccaaaaattagtttgttcacaaagttcagcctgatccatatttttatataagccctctttttttacaatttgacgggctatttctcgatactgtttcactatttttcgatcatcataattttgtctcattatataacatcctccataccttctattatagaataccataaactcatctggcaattcatttcgagtcacgaagaacggaaaaactgccgatttttatattacaaatgtattaagtttttctattaacaaaaaacaataggtttcccatagcgaaagttgttgattaacgttcacatcccacttacactataaaggtttacccagcagtacatctcaagccctaagaatacacgttcgcttttcaactgttacaaaattattacaaatagttggtatagtcctctatagcctttggagctattatctcatcatttgttttttaggtgaaaactgggtaaacttagtattaatcaatataaaattaattctcaaatacttaattacgtactgggattttctgaaaaaagagaggagttttatgaatatgaaaaaagcaactat

SEQ ID NO: 3500 - DNA, 2784 bp, Listeria monocytogenes 4b
  misc_feature (1)..(end): n can be any nucleotide: a,g,c or t/u
ggatacttggtgacatactcgctgctgagcggccgaactgtgctggaaagaagatatcgagcatcgcatgtattatccttttgacgagaaatggcagatttttgtgcaacacgatacgttcttagataaagagttacgttccacggatacattaaaaccagaagatatgccgattaaccaaaattggtcttgggataaaattttacgttcttgtttcattaaacaagcagatgtccttcaaggtttatatttattctatgatgactttgattttgatacaaaacaacgtaactttgaattctatgagccattaacagtacacgaatctagcttatcgccagctgttcacgcagtgttagcttcagaacttggtaaatatgataaagcagtagaactatacaaacgtacagcaagactagatcttgataacattaacaacgatacagaagatggactgcacattacctctatggcaggaagctggttatccatcgttcaaggctttgctggtatgcgagtaactgatggcgaattaagctttgcaccattcttacctgatggctgggaatacccgtcaatcactcaatcgtttcanaatcaacttccgagatcgtttgttagaagtgaaagtagaaagaaatagtgtggaaataacactacttgcaggaaaagcttttgaaattaacttatatggagaaccacaggagcttcattcaactgtaaatgtaactaaatgaaaaatgaaaaactcgtatcagatagcctgatgcgagttttttgatgatactttttcgatactttttgaaagttaatttgtcttatacttagtttatcagctgataataaatcaaaaggggatcggataatggcaaatttgaaagtaatagaaaatgaagcaactattctagcttctatacctaaacataatgttgattacaatgctagagtaatgcaatctgtttctgttgactacgagcgagatatgatttactggacgcaacagtacagcggaaaaaaaatgactgatgctggagctggggagtcatataacattacgaggacagatttgaaaggaaattacattgatcaaatgtggtgtttaaacggtgggcatggaacaaatattgcacttgattataatttagaaagtaaaaaaatgcatatttggtcggcatataaaattaacaataaatgggaagtggtttgttacccttatgaaagtaataaaatcctaaagggaaccgagtccagtattttcatttcaaaagtagagagtggcagctataaccgaatttcaggagatttgaaaaacgatatgttggtttttcattcaggtggagatcctaaaacgtttaatattagaatcgtgcgtgcttcctctgtaagagagggaaagcttgaagtactttataaagtaaaggcaactgaagcaaatgatgcatatgtttaccaagggtgtgcgttagattttccatatttatatacagcttctggtactggtggcgttgaagaaccaaaacaattaacttgcgtggatatagtaactggaaaacgtgtgtatcaaacaacatttaagttcaatacaaaagcaatgcaaaccacagaaagcaattttgcagaaccagaaaatgtttgtgtatattataaaaataaccaaaagcatattgtagtaggatatgctttgggaggagcagggaatcgtatgaatagagcatttgatcttgtagaaaataatagtgaaaacatagaaacagaaattgaaagtttaagaaaccttattataagtagaaaacgtacagaagttatttttgatcaaagtactaaaggggatatgacaacaaattttaaattacgtgaaacgttaaataattttgatattatccaagttgtccttgaatctggtggggggtatacaactgcatctcgactcgtatcgccaaaactattcgaggcatctaaatcatttatttttgcttcgagtaatattggtgatgctagtggaaataatgtagatatgtacgaatacgctgctaattttaatgatgacttaacatcttttaagaatgatcgtgcagtcaaaatcgaagtttcaaataacggaacagtacggggtaatattacgaatatgggtattaaaaaaatctatggtattgttttgtaataaattaaaattaaagagcgctgaatgatttctttaacaaatctttccaatttttggcgggacgattgctttttccacctgcactcttatgctataataaagaatgtgaaccatgtgatcataaatggttttcaagaggcacggaggtgaagtgatggatttttccaatatgtcgatattgcattatctagcaaatattgtagatattcttgtcgtatggtttgtaatttataaagtgatcatgttaatccgaggtacaaaagcagtacaattattaaaaggcatttttattatcattgcagtcaaactattaagcggattttttggtctccaaacagtagaatggattacggatcagatgcttacttggggattccttgcaattataattatcttccaaccggaattacgccgtgctttagaaacgcttggacgaggcaatatttttactcgttatggatcaagaatagagcgtgaacagcatcatttaatcgagtctatcgaaaagtctacccagtatatggcaaaacgtcgaattggggcgctgatttcagtggcgcgcgatacaggcatggacgattatattgaaacagggattccgttaaatgcaaaaatttcttctc

SEQ ID NO: 3501 - DNA, 1931 bp, Listeria monocytogenes 4b
  misc_feature (1)..(end): n can be any nucleotide: a,g,c or t/u
aacacctggttattaatcaggtgtttaagtttactcatttatatttccctgcgacttgctctttaattaattgataattttttacttcctcagtattttctgagataaaatcaaatttttgcacttctccaagaatgttgaaatctgctagaacagcttggtcctcttttaaacttccaccaaatttaccataacccatactactaagaggatatgtatctttatctttttctccaagaaaaatggtatattcttgtcccttatctaatgcaatatagttttcaacagcgacatatttaccatcgcttaaataccacggttctgaaatatctactttactccctttttctaggtttcctttgtaactagtcaaaatttctatctcgctaatagtactaccatccttgcctatcgttttattttgaagaaatttcactttaacaatattagcactattatcctcaagttctttaatatcttttggaattttgtaatctgctcttattgtgatagtcttggatattttagtgtctttggttattttttcattcggcgaggaacagcttgctaagattgttgctaacaataatatgggcactagaatctttttcaatagtagagtcctccttatatgtattattcagcttaccttcccttaaattttagcataggtagattatgttttatagtacaatccatagtgaaaaaacggctttttattgcgtttattgccaaattgttaacagattgctcgtttgactataattattcacaaaaaaacaaaaccaattaatgagggttttgtttttaggaatttatttgcaaggaataattataacggaaatagataatcataagcataataggttttcatttatatttcatcttaagcaattaaaatgaaagtcattacttttggttattttgctacttctgcatttacaattcacaatgagtaagtaaacaatactacacgctattgttgttttccaaaggaaccaaatttatatttcacattaagtaactaaaactttcaaaggtaatcccttcatcatgactgaggagtccatttacatttcaaaataagtagctaaaacccgctaacttttcttcttactcccatcttacctcaaagagctatttctgacgattcccggtgtttttcacgctactcaaggtcgacagataacaaaaaacagcaactctactaagttactgttttttgcttattctttaaaacaacggatgcaacgagcggttttcttgtacgccttcgattgcgcggcctaagattcgtccgatggagatggttgttagtttgtcgaattgtttatcttctggaagatcgatggagtccgatgtgatgacttctttgattttggaattttgtaagcgttcggttgcatttcctgccatgacggagtgggttgcgcaagcgataacttctacggcacctttttcaagtaaaatatcagctgaagtagtggcacggacgccggtatcgataatatcatcgacaacgattgcgactttgcctttcacatcgccaatgacactcataatttcgtcttcatgtggtcttggtttacggtttaaaatggcgattggcgcgtttagtcggtccgcgattctgcgtgcgcgaactacgccactgtgatccggcgcgacaactaccacgtctttttcaccgtaattttctatcaaataatcaccaattagcggaattgctgaaagatgatcgattggaatgttgaaaaagccttgaatttgagctgcgtgtaaatctactgtgattaaacggtcggctccagctctttgaattagatttgccattaatttggcggtaattggttctcttgagcgagcttttctgtcctgacctttccagcacagtggcggccgtaagagcagcaggctaggtggcccaaaag

SEQ ID NO: 3502 - DNA, 2498 bp, Listeria monocytogenes 4b
  misc_feature (1)..(end): n can be any nucleotide: a,g,c or t/u
aaagaatagattgacaataaatgccgcaagtaaacctaacataactgtcccaaaacgaataagtgcgatatctaaaaagtcattaccaggagaatccattacaataatgagtgtcacgactgcaaggccaatcgtattctccaagcggaattgcattaataaagcaacacagataatcgaagcgacaccaattaaaataaaatcattaccaatataaagtccaaaaataattgcaatgatggctccaattacgttcccttgcgcccgttctaaaatagttcgataggacctataaatagaaggttggatagcaaaaacggcggaaatgcctgccagagatggagaaggtgaattgcaaagttgagcgataaaaagcgccaatgtgattgcaataccagttttcaaaattctagctccgaatttcatggaaggttattcctttctatagactatttgagcgggatttttaagttttcccgctcattcttcttctattataacgtttctcaccagtttataaagtaatattacctagttatcttgaaccatttttccaaaaacagtatcaactgcttggattgtttctaaaatatcagcttccgagtgtgcggaagtgatgaaccatgcttcatatttagaaggcgccaaattaatgccttcctctagcattcctttaaagaaacgaccgaataactcgccatttgtagcgccagcctcagcataattagtcacaggatcttccgtaaagtaaacagttagagcaccgacaatttggttaaccgtaacagcaatgccgtgttttagcgcggctttttcaatgccatctttcagcatcgagccatatttttcaaagcgctcatacagtccttcttcttgtaaaacttcgagacaagcaattcctgaaagaatagatgccggattccccgcatgcgtcccagcctgataagccggtccgagtggtgctactttttccatgatatcaatccgaccaccgtaagcaccaatcggaagcccgccaccaataattttacccatagcagtcaaatctggaataacacctaaatagttctgcgcgccgccgtacataaaacggaaagccgtaataacttcatcataaattactaaagaaccattggcatgtgcgagttcattaacagcttctaaaaaaccatcttctggcgcaaccattccaaaattcccaacaataggttctactaaaacagcagcaacttgatcgctccaaacagctaatgcctctttaaacgatgcaaggtcattaaaaggtacagtaataacttcttctgcggttgatttcgttaccccagcggagtctggaatgccaagcgtagaaggtccagaaccagcttccacgagtactaaatcaaagtggccgtggtaacacccagcgaatttaatgattttatctctgcctgtataagcgcgagcgacacgaatcgttgtcataacagcttccgtcccggaatttgtaaaacggaccttctcaagtgaaggaatggcctcttttaacattttcgcaaaagtgatttcgtgtttagtaggtgttccgtacaaaacaccattttgcgcagcttttgtaattgcttctgtaatatgaggatgtgcatgtccagtaatgattggtccaaacgcagctaagtagtcaatatacttattcccatccacatcataaaaataagcgccgctagcccgttccattgttacaggaattccgccgccaacccctttatttgacctagatgggctattaaccccgccaactatatgtaaaagtgcttcatcatgcaatttttttgacatagaatgatccatttcgtcatctcctcaaaattttaatacctcttatattctatgcgaaaaaataagatgccgcaatcgaaaaaacaatttaattgccgttaaatgaaaaaaagcataaaattagtatatagctaaagagaggaagtgtggcgcaaaatgaacattttatttacattagatgtcccagaacatttacagactttgcaagcagagaaatttccagaggatactttttattatgagagcaatgatcattttgccaatttagcggagatagatatcatcgtcacatacggatctaacattactgaagccaaaattaaacaagcaagcaatttaaaatttatcatggttttttctgcgggagtagatagtttgccgagggaaataattcaagaaagaaaaattaaagttgctaatgtacgtggaatccacgctgtgccaatgggggaatacgcgctatctttcatgttatcacacgtaaaaaaagccactttcttctatcgaatgcaaaaagaaagaaattgggcaagcgaagaaccaattacagaattagctggaaaaactttggtagtagctggaactggagccattggagcaaagtgccgagtcctaccattgattgaatatagtgtatcactgacatctggagcttataacatcatgcattcagtattacg

SEQ ID NO: 3503 - DNA, 2330 bp, Listeria monocytogenes 4b
  misc_feature (1)..(end): n can be any nucleotide: a,g,c or t/u
aatgcgtataaaaaaggagtttttatcatgaaagttgaaggattacttggctttttaggggcggcactgggtattggatttagtttgatggttctagttattcctgatatttcacaggcattagaagaggagtcatttttcttctatatgttaacgattggttcacttgtgctttctggagtgggacttgcgggatcgtttattgtttcgcataagccgcgtcttggtggggcaatgatggtggcagctgcaattggctgtacaatgtcaatttcgattatgttcttactgccaatcgtactacttgctgttggcggattaattgcattaattaactatgaagaagctgcttccgtagaagaataaatgaaaaaaagctgtccgcgtgggcagctttttttattaacgattaagatattttttcaaaaagtagtaaattccatcggcatcatttgcagtagtaacaaaatcagcactttttttcactagttcacttgcattttccatcgcaacccctgcgccagcaacttcaagcatcccaatatcattttcaccatcaccaaaagtaattacattttctggcttgatatttaaatgtgcagcgagatttttcacggcgtattttttatccatatcttttggtaagatctcgatattattggcatgggaagaaaggatagaaacatcggatagtttttctagctcacttcgaagggctgcgagtttgtcgaaatcttcttcctcgattacaatcccattaatgaactggtccgcatgctcaaggaagctttcttttgttttgataggaacgagttttgtagcatttacgcggcctttatcttcttcatccgtaaaataatatgggggatttttagtgtagtaaacagtatctgttgaaaagaaaaacacaggtaaatcatgattttggcacaataaaaatgtctcgagtaacgcagattgtttcattttttcttgtaggataatttcgcctgatactgcaactacaccgccgtttgaagcaatgacatctgcttttggatgaacgaggttggcgaagtctgttgcggaattatacattcgaccggtagaaacggcaaaatgatgaccttcttctattaattgttgcaataaatttaacgtttttggtgagatagtttggtttttaagtagtaatgtcccgtctaaatcagaacaaattaagtatttttccaagtggaccttcctttcgttatagcttagagccgcaagattcgcggataattagttctggattatggttgataatcattggctcgacttgaccgttaattgcgctaattagttgtaaaatagccattttaccaagatattcattgtgttgatccatggaagttaaacgcggagtttggtaatcgccattcataaattgatcgcagctgacaatagcgatgtcttcagggcaagaaagtttggcatcattaatcgctcgaattgccccgatagccacattgtcattgatagctacaagtgctgtcggcaaagtagcgctattttctaaaagttgagtcattgctgcgtagccatcagccgtataataatcagacagaaccacccagtcgtcatttaccggatgttgatagctagtcattgcttctttaaaagattctagacggtaggtggtgatttttacaccagcttctccgccaataaaaccaatatttttgtgtccaagtgcagttagatgactaactaaggttgttacccctttttttaaattacgttcaataaataaacagttgagctcaggaattttcgacccgataacaacaactggaatttcattatttaactgatttagagcagttatatactcttttggaacgatttctttatcgatttctccacctaaaataagtaaaccatccacttgcttttctaaaatgatttttaggtaatcttcttccgttaggggatgttgattattcttattatttggctccgcaagcattgtattgaacaaaatcgtcgaaaacatataatctagcgcgaatttttgaatttgcgttataagtgaaatgaaatagggattggaaatatctggtaaaataacgcctatattcttcgtctgcttattgaccatcccacgagcaaacacgctaggtgtgtaattatgttcatcaatgattgcttggatttttttgcgtttcgcagctgacacagaaggactgttattaagaacccgcgaaacagttgaaacggagacaccgctaagtttagctatttcttgtatggttatttttttcattcgaaatgttcacctcgtaagcatttttaactattttaagtgtagc

SEQ ID NO: 3504 - DNA, 3440 bp, Listeria monocytogenes 4b
  misc_feature (1)..(end): n can be any nucleotide: a,g,c or t/u
tgtcgattggttatggcttattggaacggttttagttgttttagttggtaaagcgatacttaccaaattagcggagaaacaaatttaccaagcatcggcggaattgcgtttatcaatgaggcgcgctgtgatggaaaaagcttttcggttaggcaacaacgaaggacagctaccggcatcaactttaacgcagctcgcggtagatgggattgaacaattagaaatttattattcacgttttttaccgcaattattttattgtctcatcgcttctttgatgatttttggaagtttagttggatttgcttggcagccggcgattgtgctattaatttgtatgccgatgattccgatagttattatggcagtgatgaaaattgctaaacggattttgagtggttattggtcggattatacgaatttaggaaccaaatttcatgaaaatttaagtggcttgagtattttgaaggcttataaccaagataaatataagcaagaggaaattgtttctgatgcggaacgtttccgtaaagctacgatgagtttgttatcgatgcaactgaattcgattacgattatggatattatttcgtatagtggggcggcacttggtattggtatgtcgttaattatgttcacaaatgggaatataagcatgactggtatgttgatgttcttactactaagcgccgaattctttattccaatgcgtcaactcggatctttattccatgtggcgatgaatggaattagtgcttgcagtaaattgttcgcttatttagagttaaaagagcaagtttatggctcagaagaactagctaaaccgttagaaaaaatggaagttcgtcatttgacatatacatatgaagaaggtaaagctaaagcactgcaagatatatcagtaaatttcaataaaggaagtttttcagcacttgtcggaaagtctggttcaggaaaaagtacatttgtccgagtattattaaatcaattacctggttatcaaggggaaattgtttggaatgatataccgttagctagtttgagcggggaaactattcgtaaacaagctgtattagtagataatcatggttatctttatgcaaatagtattcgggaaaatttattaattgggaatccagctgctaatgatagcgatttatggaatgttttggagcaagttagtttggctgattttgttcggaagttacccgagcaattaaatgagaatttagaagagaatggaagtaatttatctggtgggcaaagacagcgattgttactggcgagagcattgctatgtcaagcggaagtctatgttttcgatgaaattacgtctggtgtggatttggaaagtgaaaaaattattcttttggtgttgcagaaattagctaaagaaaaaatcgtgctctttatttcgcatcgcttatataatgttttggatgcggatcaggtactcgtttttgacgcggggaaattgctggaagtggcgagcccagaacgattacagcaagaatccaattacttcaaaaactactttttagaagaagaagcgttgctgaaagggggagcatgacatgtcagaatggacaattattggctggttgttaaagtttgttaagccgttacgaggaaagatggttttggcgattttacttggtattattagtaatttatcggttatcatgatttctttaatcggtacgtatggcattatcgcggtaattttacagcagcatctaaatccttataaatggctctttgtaatggttgcttgtggggtggttcgcggtttggcacgatatttggaacagtatttaaatcatgatattgcctttcgtttgcttgcaattattcgtgaacgtatttttgcgacgttgcgaaaattaggacctgctcatttatctggaaagaaaagtggggatttagttgccgcgattacaacggacgtcgaggctttggaagtgtttttcgcacatacaatctcaccggtttttattgcacttggtacgacgatagcaacagttggctttttggcgacttatgatgttcgtgtagcgctcatacttttgttaggacaaatcttggttggtgtcgttttgccagtgattagttataaacgaaataaaaaaatcggaacggcttatcaacaagaattcgttgggctcaatcaaatggtaatggaaagcattgcaagtttacaagatatattccagtttaaattgggcgaagagcgtttgagtaaattagaaacacaaggtgaaaagctcaataagcagtataaaaaaagaataaaacaaggaagcgaactccaaatatttggtgaatgggtgctaattggtacggcgactttaattttagtgctaggtagtctttggcaattaccgcttgaaacagtattaattggaactgtgcttagtctgagctcttttggatcggtattggcattaaatgctttaggaacagcgctgttaactacttttgctagtggtaagcgattatatacattaacagaagaaaaacctgtggtattatttaacggtcagcttgaactatcggattttgaaagtgcggagttagataaagtgagttttagccatgatggaaaacaaccacttttaaacgaaatttcgctagcgcttcctaagggaaaatggcttggcatcggcggggaaagtggcagcgggaaaagtaccttagtaaaactactgatgcgttactgggatccaaaaggccagattaaattaaatgataacgaactccctgaaattacagagtcttcgcttcataggatagaaggtgtaatggagcaaagtacgtttttatttgaagacacgcttggtaataatattcgcttagggaaaaaaaatgctactttggaagaagttaaagaggcggcccgaaaagctgctatcgatacatggattgagactttgccagaaggttatgacacgatcattggcgggcaatcacgaaatttatcagacggcgaacgccagcggattggcttagctagactatttctccatgatgctcccttatttttattagatgaaccaacaagtaatttggattacattaatgaacaagcgattttaaacacgctccgttcagaaattcaagataaaacggtgctggtaatttctcaccgggccacaacattagacttggctgaagaacaattatttatagaaaatggtgcattgaaacgtgcagcaaaataataaaaacagcttgtataaattacaagctgtttttatttataaatttaccttctctgagctttcgaaaaattcaaccgtgtcaagttccgctgcaaaaaattctttcgtatagttctgttcgtgatggtaataaaaggcttcctgattctgccaaatttcccacaaagcaaatctgccgagtacactttctaaaggaataatctcgaataaaacacaacc

SEQ ID NO: 3505 - DNA, 1250 bp, Listeria monocytogenes 4b; identical to SEQ ID NO: 1660
  misc_feature (1)..(end): n can be any nucleotide: a,g,c or t/u

SEQ ID NO: 3506 - DNA, 2893 bp, Listeria monocytogenes 4b
  misc_feature (1)..(end): n can be any nucleotide: a,g,c or t/u
tgatatcttcaagtacaggttccccttcatcatttttcatcgttaaaagacctgtcacattttcaaaaaggaatactttaggctgtaagaaggaaagcattcttctgtattccttatacatcgtagccttttcatcatattgcctcctaccaactgtactgaaggattggcagggagggccacctattactaaatcaatattagaatactcaatctcatgattatctaaataatcctcggttagttccgttatactacaatttaacattggaatttgtgggaaatttagagagaaggcttcagatgcgtgtttatccacttcattagcaaataaaatattataatcagacataggtaaaaaggtgttatttataattctattctgaaatcctaatgtcaaaccccctgcaccagaaaataaatctacaactctaatcataattatgtcctcctaaatcttctcatacgatacattttatcaaaaacccacaaaaattgatataaattattgatcttagtatatctcattttttcatcttgcgatttctcataaatgaaaaaaattttaactaacttttaatttttcattattaaaaagtgatattctttttatcaataaacaaaagattacagacatttgagatataggcatgatattttgagtttacctctcgttgataaagactttacttccccttaatttattgtctcttaataggttaatacctctaaaccctgacctacaaccatcttttagaaaactggatttagtgatacctttgcttacaacaaacattctaaccatctggataattttgatagcctttgtttattttacatttctatatctttatagtttatattataccaattgagaaaaaatcaaagtctattaatataactaatctaacgacgaaaatgaccaaaaagtgaaaaaatttaaaacttctctgtccaggatatagtcaaaatagcagttattcccagttattctccttaaccaatcatccgaaaatcgtttcgattcccagtcatatcaaccatcaattcaaatagcattttgctattatctggcttattctgaacgattacttgcataaaataatcatgcaccataaatgtatagccatgctctttcgacgtaatcgcgtagccttctaaatcattttctgagacaaacagccagcgccactcatacttttcacgcactgcctctccgtacaaagagcctaaaatataaccaagctcttctgctaaatcagggtctggcgaggtttgttttaagtactcagcaattttctcgatgcgttcttctggagttccgtctgtttggagcatcacttcgccttcttcttttaaacggataatttcagcttcttccgctttcgttagttctcgtgcaataatcgacattagaaacaccctttccccactcattataactcaaaagctcaatctttcgcatccgatatgttcgtcatgtataatgaaagaagtacagcaatttttatatttagggggctatttttttcatggaacaaaataaagaaaaactcacaaaaccgacatcagaaaaaaactatttttggccgataatgattatttcatttgtcgcggttgtggttattttactactcttcttctcaccaatcgggtatcaaggagcagtacatttcgacattactatcttcccgcgaatgaacgccatctttaatagttttacctttgtatttttagttattgcactttgggcgattataaaaaagaaaaacattaaaatgcaccgtggcttcattttagcagcatttacatctacattattcttcttagtaacttacttaacattccattatctttcagcagaaacttctacatttggtggaactggaattatccgtcctatctacttcttcattttaattacacatagtttcttagcagcaatcgttgttccactagcgctatttgcacttgtttggggctggacgatgcaaattgagaaacacaaaaaaatcgttcgctggacgatgccgatttggctatatgtcagcttaactggcgtactcgtttacttatttatggcaccgtattattaaacaaaaaagcatcgaatgagcgcttcaaaagagcccattcgatgcttatttttttacagaaaaacttttcgtgatgactttttcttccacgacaaccccgtgaagttctccgccaaaaaccgcgccaccatctatatcgagcctcgttttatcttccgaaacccaaataccagaactttcatcaatatgtaaattttgtaccggggtatgcccgaaaataaagactttcccggttttattctgtccaaataagaaaggttcgcgaatccagaaaaaatcacgctcctcggtatcgtgccaatcttttttcgtcaaatctacgcctgcatgtacaaatacatatttgccttcttcataatagagtggcaagttccggatgaaatcaatgagttcagcagcttcttcttttacccgttcggcaagtccctccggcgtcatttttttgtcaagcgagtccgcgattaaggattgaattgtttccataccgccttgacttaaataataatgcattttcccagaagggttttcgagaaaatctagtaacatttgttcgtgatttccttttaagacaatcgctcccgtttggtcggctaatgctttcactcttctaagtactgcagctgggttttcgccgcggtcaatcaaatcccctacaaacaaaagccgttcttgctctttatcccagttttcgagtaattcatctaaaagcgtaatctctccgtgacatctcaacagcaaaaattggcttcactttccagcgcacgtcggcgctcgagcatgcattaagtgcccatagt

SEQ ID NO: 3507 - DNA, 2691 bp, Listeria monocytogenes 4b
  misc_feature (1)..(end): n can be any nucleotide: a,g,c or t/u
tgggccacctagcatgcatgcctgagcggccgccactgtgctggaaagtttacccaagtagaaacgtaatcaagggctgttcctagttctgctggatttttaccgccagcttgtgccatatcaggacgtccaccaccattaccgccgcaacgtgttgccacttcttttaataatttacctgcatggtaacctgctttgattgcttcttcagagactgcggagattaagtttactttatcgccttgaacagcgcctaaaacaagaatgcctccaatttttttatctttccagttatccacgaattgacgtaattggttcatatcttttgcatttacttgttttgcaatcactttttacgccgccgatttcttctggtgattcaaaaatatccgcgcttgctgcactcgctaatttacttaatagtgattcattctcgcgtttcacttcacgtaagtcagcttgtaattgttctactttttgcggtgtttctttggttgttgtttttagtagactcgctgcctgttttaatgtgttttcttgttctgttacaaagcgataggcttctttgccagtaacagcttcgatacgtcttgttcccgctccgatacctgtttcggatacgattttgaatagaccaatatcagctgtattacgcacatggacaccgccacatagttcaatgctgtatttgcctacttgtacaactcgtacgatatcgccgtatttttcgccaaatagtgccatagcgccaagttcttttgcttctgctattggcatttcttcaatcacaacattgatttgttcccagattttttcattcacgatttcttccattttcgttaattcttcttctgtaatttgaccaaaatgagagaagtcaaaacgtaaacgatccggtgaaacaagagatccagcttggttaacatgctcgcctaatgtgtctttgagtgcgcggtgtaaaaggtgtgttgctgtatgatttttgattgtttcgcgacgttttactttatcaacagcaagtttcactgtgtcgcctgtttttaatacgccttctttgacagaaatacggtgtaaattttgtttgtttggcgctttttgtacatcttctacataagcaagaccagtttcgctctcgatggttcctttgtcagcaacttgtccgccgctttctgcataaaatggtgtttctttgaagatgacttgtgcttcacttccagctgcaacttcctccacaagcgtgtcatcttggattaaatacaagatttctgaaacatgctctgttgaattatagccaacaaatgcacttttttctgttaaattagcaagtagttcgccttggacttgcatcgattttacatcagcacgagccgagcgagcacgatcccgttgttctttcatttctgcttcgaagccagcgtgatccacttttaagccatggtcttctgcatattcttctgttaattctacagggaagccgaatgtatcatataatttaaaaatgtctgcgcctttaataatttgttcatttgtttctttcgcagtttttaggattgtttccaaaattgctagaccttcgtttaatgtttcgtggaaacgttcttcttctgtacgaatgactttttggataaagtctgtttggttttctacttccggatagaaactattcatgattttcccaactactggtactaatttgtacatgaatggttcgttgattgttaggacttttgcataacgaaccgcacggcgaagtaaacgacgtaaaatatatccgcgtccttcgttggatggtaaagcgccgtcaccgattgcaaatgctacagtacgaatatggtcagcaatcactttaaatgccacatcattttcttgagaatggccatatttcacgccagcgatttgttcaacttcacgaataataggcatgaataaatctgtttcaaagttagttggtgcgtcttggatgatggaaaccattcgttcaagtcccatccctgtatcaatgttttgttttggtagcggagtgtaagttccatctggattgtggttgaactgagaaaatactaagttccaaatttctaaataacgctcattttctccgcctggatataattctggatcacttgcatcgtcaccgaaagcaggtccacggtcatagaaaatttcgctgtctgggccacttggtccaataccgatatcccagaaattatcttcaatttcgacgatatgatcatcacttaaaccaattttttcgcgccataacgttttcgcttcttcatcttctggatacacagtcacatacaatttatctggatcaaaaccaatccatttagggctcgttaggaattcccaagcaaaaacaatcgccccttctttaaaataatcaccgatagaaaagtttcctagcatttcaaagaatgtatgatgacgcgctgttttaccaacgttttcaatgtcatttgtacggattgatttttgagcgttcgccattcttggattatctggaataacggaaccatcaaagtattttttcatggttgctacaccactgttaatccaaagaattgttggatcattatttggtacaagtggtgcactaggttcgatagtatgccctcgttccagcacactggcggccggatctagcgatccaggctcggnncaagagactgcagtcttncaaaaaggtcagcc

SEQ ID NO: 3508 - DNA, 1913 bp, Listeria monocytogenes 4b
  misc_feature (1)..(end): n can be any nucleotide: a,g,c or t/u
agtgattattccagcgtctatttccttaaatgaagctactgaattgaaggtagaagggattaatcgtggaagtaaaactttgtccgtgggattaaaccgaacagcaacgtctgtttctgagagcaacaagctaactttggccaatacagcagacacaacaatccaatgtttggcaccactaagttgggacggttccgaaaacaatccaaaaaatgccattttaaccctagcaccaggttcggaaataacagaaggcgatgcagtcatggctattgaagcaccagagaatatccaggcaggaacgtatacagggaatctggtattttcgattaattatgaataactttgctaagcaagccatagaattttaagaagttaaaattttatggccggaaaagcttttcgactcctctataattaagttgcagctagaaagttcggcatctagaaattaactacgaaagaaggaggggagctgatgaagaagttttccatgcgagtggtccttattatttctgtgctttttattacttttgggagcgctaatgtttctaccgcacaagaaagggacacagcaaataagcttccagaggtggaactaggttctctggatacctctaatatcattgcagaagaagttacgcaagagaaaccagcagaagtggagcaactagaagaaatcccaactacggatgaattgatgcaaaatccaaatgttcttgagaagtctgttgccgattcggatgatccggatttaacagtggtaagctcaggtgcttactggacgatttattataattctgcgaacggcgaatatagcttgcgtatgtttggcaacgtaccaagcagtaaaccaaccgcttggaatagttatttgagtaacattaaacatatagagattgaagaagctacgctgacaggaagttttgaagcttattttagagataatgttttcacggtacttgaaagtgtgaggattgaacagtgtaatttgtctggagtgacgtcttttagatccgcatttgaaggtcaattagcgcttgaaaaagtgatcatcagagataattattatccgacaacgccaactttacgcactacggaaaatatgtttctgggatgttacaaccttagggagtttgatgtgagtggccttgatactagagcagtaactaatatgagggccatgtttcaaaattgtactagccttgaagagttagatgtaagtaattttgatacaagttcagttacaactatgcagaatatgtttcaaaattgtactagccttgaagagctagatgtaagtaactttgacacccgttcagtaacttctatggcttacatgttttataggagtgccggtcttaaagaattagatgtaagtaattttaatactagttcagtaactgcaatacagggcatgttttatgattgttctagccttgaagagctagatgtaagtaattttgatacccgttcagtgacttctatgaccttcatgtttttgaattgtgctaatcttgaagaattagatgtaagtaattttaatacccgttcagtaacttctatgacttacatgtttggaggttgtaccagtcttaaagaattagatctaagtaattttaatacgagttcagttacagctatgtataatatgtttcaaaatagtactagccttgaagagcttgatttaagtaattttaatacgagttcagtaactaatatgtcttacatgtttcaaaattgtacagcgttaaaatctttatatctagataatttcactactccaaagactatgacagatatgtttattggaaccacctccttaacctacttgtttgtcagtcacaattttaaggattttaatggggtagaaaatacaaactggtttgacgaaaagaatggggtacagtttt

SEQ ID NO: 3509 - DNA, 2755 bp, Listeria monocytogenes 4b
  misc_feature (1)..(end): n can be any nucleotide: a,g,c or t/u
attaaattcgatgtcataactataagaactatgtaaatccgtaatttttaatctagttaatctcaatttaattcctcctaaataaatttttaatactaaaataattatatcatgctttaagaatatccttttatataattatatcttttttcaaacaaatataggtggaaacaaaattaagttcgtttttccatctgtatttagtacatatttttattatcctaacagctatagcagaccattttaaatataagatttaataaaaaataagtattaaaaaatgtttgagtttgttacaattagtaactaagaggtgggatgatgaacagttttgagccaagaaatgaaatagaaagtattattatagagcataatattgattgaaaaatattttttgaagttgataaaatttcttataaaaaaaaatagaaaataaaataatctctaaatttatcaatctggaagatggttttgattttaatttgcatcgagcgtatttgagatataatcataaattaagatgtattggaattagttatcaaaaaaatgattggtgggaatggtttaaattagttccaagcattgtaggacaaacagcacctgtatatgttgtttttactggtgataattatacatggatctatacaggttatttagaggcgttaatgaaaattttatattatggcagtcctataggtgaaggtgattgttatatagtttccaaaaatttgattggcttattggttattctgatgatggcgattatgttacttgcgtagataatggactgttcttttctatagataaaatggtccttctagataatgatataaacgtacatctattgccagtacaggctcactaattagttatccatcatttagtagaaagaaaatttaatgataataagtagtaactcgttttgtaaattttactaccatatttatactcaaccaaaaaagaaggaaaaaacatgttatccgatatcacaattacaattcctaacaaaacagctcaaacaaaatacgataatctagcaaaaaacatgtcttttaaatcaaaagaggatttggagtcattgcttgatttgatcaagattttgtatataaacaattattatgaagaggcgcttttgtgttgccgactaacgaacgacgtagaatttgataatgattttgatgtttggacatttattcataggatttggatgtttgaaatgcaaatacttgtgcattttggggaaaaagaagaggccgaagaaattgccactaaaatagaggcgcattttaaaattccaatgaaaatatggaatactcctgaaaaaagatacgcgcagtataaaaagaatcgttctcggattgttcttaaggatcttagctatgaagaaaaaatcaatagcacacctagaggagaatctggaacatttgattggaaatttgtcgcattatcaagtcttatcaaaccaattactttgaacaatatgactggtgtttcggtagaagaagcagaagaaatatttagacaatattcagcagagttacaacaaacgaaaaagtatggagtttcgttataattgcagatatctcatgtatttgtaaaagtctttgtagtaaactagtaacagaagctaccaaaacggctttttatttcacaaataataatgtactatgaaaacatgggagattcaaatgcgaaaggagaaaagaaaatcaatcatacacaaaagggtaaaattgatttcactttctttgtgtttatgcttttaacctttaacaattaaaaaacatcatgggatttttgtatttaggacaacaacgtatagacaatagtgtaatccagcacaataattttaaaggagcgtaactttatgaacgaatttccagttgtatatgaaccagagtatatgaccatttatttacttgttatcatcggtgtcttttctacaacattggctttatcgcttgaaaaatataagttcactttagcgggaaaagcgttgattgggatgtgttttatttctctagctgtgttatttatatatgttttagagttagcatatctttcagatatagctgatttgttatttcatacaatcggtgtttgggaagtagtgcttttcacacatccatatattttcttaatacttgcaatcttgctcggcggggaaaagaaaccgccacatgtacccaaacttaaaaaataaacttgcttaaatgacagcatgaaaaggagatcatcaaatgagtattacagaagaagaatttgaagaacaggtttcggagttgtttattaattatttagaaaaatgtacgcctgaagagattcatcaagtggttgtagaatggaattttgataatccgaagaaaccgattcattggattgctaattcgacgaaaacggataaaggaacggctttaatgttgtggagccggactttgcttatcaatttgaaacgagagaagagatggttgaaaaaagcagttggtatgcggaagattttgatattgttgctagtttggaagaaaagtacttagctggattctatcaaaatcaagtctatggttacgtaactccagtcgagtttcaagaggaggaaatgaaaagagcgattccaagcgaaatgtttgttcctttgaaaggcttagaagtttctgagttggcggattgggcagatggttttcctcctgaattgcaagaacggtataatgagctagctgaatcagtggaagagtaagcttgattcggtattattcaa

SEQ ID NO: 3510 - DNA, 2003 bp, Listeria monocytogenes 4b
  misc_feature (1)..(end): n can be any nucleotide: a,g,c or t/u
atctttttcgaaggacatgatgttactaatgtccgccccgcgccaaccataaatagattgatccgagtcacctacgacgcataagtttttgaaacgagaagcaagctgtttcacgagtaaatactgcgcgtggttggtatcttggtactcatccacgtgaatatactgaaatttacgttgataatattctaaaacatcgggcacacgttcaaataattgaatggtgaccataattaaatcatcaaaatcgagtgcttgatttttcttaagtttcttctcgtatttttcgtagacttcgccgaccattttgtcatagaaaccacttgcttctttaatatattcgcttgcagttatcagttcatttttggcattgctaatagaagccaaaatcccccgtggctcaaacttcttagggtcgacattcttttctttcaaaatgcctttaataaccgataattggtcactgccatctaaaatagtaaaattacgttcatagccaatccggtcaatatcgcgacgtaaaattcgtacgcacatcgagtgaaaagtagatatccaaatagattctgcttctccgcccattaaattgccaatccgtgacttcatctcgcgagccgctttgttcgtaaacgtaatcgctaaaatattataaggatttacaccacgttctctcactaaataagctatccgatgggtcaaaactcgtgttttcccacttccggcaccagccataattaataaaggtccttctgtactttctactgctcttcgttgttccggattcaatccgtccactaattcttttgcattcaattgcattctcctatacaccaccatacaaacatttgttcttattttatcatactacactttataatcaaaccgttttcttcctaaaaatagttgcggtttctagtgctttttctaaatcttcataaataatattgccaacaataatcgtatccgcatattttaccatttcagcagcttgttcttttgaacgtattccgcccccataccaaaattttgtattacttaatgcggcgcttgcttttcttacaacctctggatctccgtacatgccgctatattcgacataaaaaatgggcagatgaaatatattctctgctaaccgcgcataggcaacgatgtcttcgtccgttaaatcggtcttcgcttctgttaaatgagccacttttgcatctttatttaaaataacgtagccttctgctgtgactcgtttccaaggaataaatgctcccatttctttgattaactcctggtgtaaaccgtgtgtccatttactattttctgtattcaacactactggaattaaaaaatggtctgcttcaggtaaaatcatggattcgttgcttatttcaaggaaaatcggcaagtccgtttcacctaataattcgtagagcttttggactgcttcgatttgtacattatccgtcccaccaataataaatccattggttccagaatggacgagcttcgttagatcattcattggtaaattctttgctgggtctaacttgaataaatgcttcatttgctcctccaagtctctataatgggatatcttattatagcattagttacatttcatcgcacccttacgaccaaaaattttaactttttttaagctttttttaccagttgctgttgggatagcttttattttatggtatgatgaggaaaatttgattttattaagacttctgagtatttacatagaaaaaaggaaatggggatattatgcaagaaaacagagaagaatggggctcaaaagtcgggtttatattagcatccgctgggtccgcaataggaattggtgcgatttggaaactgccttatgtggctgcaactgcaggaggtggcgcatttttcttattgtttttagttttaactttactagttgtgatgccacttttaattgcagaatttgtgattggacgaggctctggcggagatgctgttcaagcttataaaacactcgc

SEQ ID NO: 3511 - DNA, 2372 bp, Listeria monocytogenes 4b
  misc_feature (1)..(end): n can be any nucleotide: a,g,c or t/u
gaaaacttcctgtatactattgctatatgtaaaaaaagggaggaagaaaatggttctacttggtgcgctagtgaatgggcttgggattttgattggctctgttattggcatgaaattacataatatccctgaacgtatgaaagacacggtcatgaaagggatgggtttatccgttatcgtccttggcattcaaatggcatttaaaacgagcaactcgcttattgtcattttaagtatttgttttggagccgttattggggaatggcttaatatagattatcatctgaatcagctcgggcactggattgaacgtaaagtcggtgccaagggaaaaagtaatgtttcaaaaggctttgtgacagctacacttatttttgtgattggtgcgatggggattattggtgcgcttgatagcggcattcgcggcaatcatgatgtactttatacgaaatcggtgatggatggatttatcgccctacttcttagtacgacacttggttggggcgttatgctttctgcgattccagtgtttctctttgaaggcattatcgcgttattcgcaacccagattaatcaattcgttccggcagacctgatggcactaattataaaggaattaacggctacaggcgggattatgattttggcaattggtctaaacttgcttggtttaaccaagattcgggtcgcgaatcttgttccggggattttagtcgttgcgctgattattaccgggctttattatttttaaaagaaaaaacagagaatcgctcatctctgtttttttaatttcgtttaaatggcgcttctacatctaaacttattaaatctgtatatgtttgcggttttcggtaggcatttccccacgtttcattttcccggtaagttcgaatctcgtctaaattaaattcagcaataaaaataccttctgaaacgtcctctgtttcaataatcgtattatcgcggtaatccccattttcatcaaaaacaatcggggaaaaagcagtggatctgccccatttttcgccaggatagtttgccatcgctacgccaaccatgttttcaaaagcacgagaatttagttgattaagtctggctggatttatatcacaagcatttggaacgaggataatttctgccccttttaacatgagaactctggcgctttctggaaactcgcgatcatagcaaatcatgacccccagcttaataccatcaaactcacaaactttaaattcctcgccactttgtagtaatatttctaaagaaaaatcacacgtatggactttggcatagtctaaaattatttctccttttcggtcaataataatagcagtattttgtggtttttgttccgttttagacaaatacgtagcgcaaatgccaatcttcaactctttggcaagttctttcagtgtcaaaacatacgcactgtcttctgtgatagcttcatttaaccacttggttctttcattatcaaaatcagtagctaggggatgattaaaagcatcttcaaaagggggcgcataaccatttgaccacatctcagggaaaagtactaaatctgcccctttttcatgcgcttcttttatatatttaatggctaatttcaaattggcttccttattatttggtactgctttttgttggattaatgcgatttttatagtagtcatatagcgcctcccattagtaaatcttcatgttattataacatttattcttggaaacaaaaaaacaccaacaacccgaaagttattggtgttttgccatataaaaacttacatgccgcccataaagaatgctgttgttaattcttgcatgaatgccatgtcattttccattttccacaaagaatcgtcatctggatctgcttttaatttaagtgtaactgttttagcctcagatactgcatctgcattttgaacagctttcgtatagatttccattgttttttcagccattttttgatcatctgttgcaagagatggatcagctgttgctgcttttgttaattcttcaactaattctgtttgaacgcctttcatatcaagccctttaacagcgaattgaatttctggactttctttgtcgtcatttgttactttagtagtatacgaagttttttcgtctacttgtttgcgaagtgcatcataaaactcatccactagtttgtctaagtttacatcactacaaaagcttgctgtaaatgtactgataaatctatccttaaacttataactagctttcaaataacttcttacgacatttagaaccattcttcaccatgatacatctctttactttatcacgtatcttctctcgtaaactagcggcattaacctgagatttctcctgctttttttggctct

SEQ ID NO: 3512 - DNA, 2497 bp, Listeria monocytogenes 4b
  misc_feature (1)..(end): n can be any nucleotide: a,g,c or t/u
ttagcgcccacgcggaccgtataacgagtgggtggggtaagcaaggtgtgggtaggcgttcccaaggggtgtgtttaaggggggggtgatggacgccaccaggatcggtgaccagcgggactgtaagatgtggggggctgaaatggtcgggacttgtgatatggtgggaactggaaccacaagcacgtagtatgacgccagaagcaattatcattgatagtgctacagccaatgtacgctttttcaccttaaaacccctccctagagatataatgttagtcagagctttctgtcaaaacaaacattcaggcgcgtattaaaaaattatgtatggtccctttttcggaaaacgcacaagaacatttaacgtcttctctacctgttcttaatataacatggaaaataaaataaataaatagccgacttcataaatttttaatgcaaatgaattcagaaaatttaattctgtcggaatcattcgtttttttgtcaatccttaggcacaagcgcattaacgtgaaaaagtaaacaatcaagtttagttgcaatcctcttttattcccttcataataaaatgaataatgaaaggcgggatggaaatggcaaaaataggttttattggttttggaagtatggcatcgttaattgcgactaaaataattgaaactgaggttgcaactcccgaagaactcatcctttattccaattcaaaaaacgaacatttcaaccaattttataataaatatccaactgctaagctagctgataacgaagccgaaattttcacaaaagcagatcatagcttcgtttgtaagttacctctcgcagttttaccacttatgaaagattgtgctgcggtattgacacctgatcgtcatgtgatttctattgcagctggtgtgagtacttcagatattattgaaatcactccgggtttacaggtaagtaaattaatcccttctctcacaactgctgttaatgttggaactactttgattgcgcacgctgacacagtgaatcaagctaacacttcttggttagaaacgacatttgagcattttggacatgtaatgactatccgagaggaaaatatggatatcgctagcgatttaactagctcttctcctggaataattgctgctattttcgagcaatttgtagaagctgctcttagaagatcttcattatcagatgcggaagtatttcaaatgattaattttgctttagctgggacttctaaattattagtagaagaagattacacgtttagtggcttaattgaacgcgttgctacaaagggcgggatcactgctgaaggcattgaactcagtgaggagcagttaccccaattttttgacgaactccttgaccgaactcaaacaaaatatgcttctagtaaaaaagaaattcaagcacaaaagcaagatttacttttataaaaaagggttgcgactacaaatcgcaacctttttttattcatgctctggattaatttccacatttactcttcttggtttacttccttcgtgaggtccaactacacctctttgttccatttcatcaatcaacctagctgcacgattatagccaatacggaattttctttgtaacatcgaaacggaagctgtctgcatttctacaacaagctccactgcttcgtgatacaattcatccgttacttctccttcgacttctggaatatcatcaggaatcatttcttcgctatattgtgctttttgttgcgaaataacgtaattaactacatcttctacttctgcatccgataaaaaagcgccttgaattcgggtaggtttactagagccaactggaagtaacagcatatcgcctcgtccaagtaacttctctgctccgcccatatcaagaatcgttcttgaatcaatggaacttgaaacggcaaaagcaattcgagacgggatattcgctttaattacgccggttataacatctactgatggacgctgtgttgcgataattaaatgtattcccgcagcacgtgccatttgagcaaggcgagtaatcgcatcttctacgtcattggaagctaccatcatcaagtcagctaactcatctacaattacaacaataaaaggcaattcaggttgtttttcttcgttcagctcattatgtttttttacataatcattgtagccttgcatattacgagtacctgtatgcgaaaataaatcatagcgccgttccatttccgcaacgactttttgcaatgcttgggctgcttttttaggattggtaacaactggtgcgagcaagtgtggaatgccattatagacatttagctcaaccatttttggatcaatcataatcattttgacttcatgtggtttggcacggagtaaaatgcccccctcaccccattaaaaacncagatttctttccagaacntggcggccggtatnccgtnaangtggggccgtgctgcagccttnnaaagnnaaccanactacctcannnncgctcc

SEQ ID NO: 3513 - DNA, 2380 bp, Listeria monocytogenes 4b
  misc_feature (1)..(end): n can be any nucleotide: a,g,c or t/u
actgcacttgcttcgctgaaaaagaaaccttctttgaatttattaatcagactagctgttgggattattgggaatttcggtaagtggaacatggcttttagttgatacgaaagttcggcgtccatcgatgtatagccgcaatcagcgataatactttttacttgttttggtagtttttcgccgctggtcataaggacagtggagctacccatggaaacgccatgtagtgtgatttgagtgtccgtaccatttttgtcgattacttggtcaatccactgcacataatctttgcgttcaggccaaccaaatccaatattttcaccttcgcttttgccgtgcgctctagcatcaggcattaaaacgttgtaaccaaatttttcatgatacattcgagcaagacctgccatttcgactttaccgcttttaccgcgataaccgtgggctaaaatgatggttgtgttagatggtttatctgctgctaaataagtagcaacaagtttcagatcgtctgctgaggtttctgtccattgcgtgagattttgcttttccatccaagccacattttcttcccggtttttctttgctagtttggctgtggcagtggtttcgtctgttgttgcagtgtcattcatgctggaattgtcacgagctaaagcataactatacaagtaaaaacttgcgcaaatagtaataatgacaagtaaaccaacgataatcgaactagaaataattaaaatctttttcattgtttgctcctttttttatgcagattacatggattccagttcttcgcttatttgttcccattcttccattaatttctctccgtcagcttttacggcgtctagctcttgagtgatttcaagggctttttcatggtcttggaaaacttctgggttcgttaattgaagttcaagctcggcaatctttttgtccgttgcttccatggatttttctacttcttctagtttgcgttttctttggcgaagaagtttttgttgttctttttcttcttgatagtttaattttcgaacagaggaggtcgcttccacttgttcgccttttttgcgtcgatcctcggcatcaagtcgtgccagttctttttcttctgctaatttttcttgataataatcgtaatctcctaggaaaacggtcgctttttcgggcgctagttcgacgattttagaagcaattcggttaataaaatagcggtcatgggaaacgaagagaatcgtgccttcaaaatcaattaaagctgcttctaaaacttctttactttcaatatctaaatggttggtcggttcatcgagaataaggacattggcttcaagtaaagtgagcttagcaagggcaagtcgcgctttttcgccaccacttaaagactggacattttttaatacatcatcatctgaaaaaaggaaattaccaagtgttgtacgaacgtttacttcattcaactctggataatcatcccatagctccattaaaacagttttgttggatgtcagtttggcttgttcttgatcgtagtagccaattttcacgccagcaccgaagtggaattcgccacttaaagctgggatatcacgaataagcgttttaagtagagttgatttgccgattccgtttggaccaacgagcgcgagactatcttggcgtttcatttcgaacgttaggttggaagcaatgcgcttatcttttgcgtaaccaatgctcagctgatctaccattaaaacatctttacctgtttgtttttcaaattggaaaccaaaatgcgctgctttttcatcaccttgcgggcgaccaagcacatccattttttctaattgttttcttctactctgagctcgttttgttgtcgatgcgcggacaatatttctagcaacaaaatcttctagtttggcaatctgtttttgttgtttatcgaactctttccacatttgttctagtttcgcttgtttttgattaacgaatgaactgtaatttcctttgtagtgatcaattttggttcggctgatttcgtatacttgattcacgactttatcaaggaagtagcggtcatgggatacgatgagtaacgaaccatgataattttgtaaataggtctcgagccacgctagtgtttcgatatctaaatggttggtgggctcatcaagaacaagaatatcttgtttagcaagcagtaatttggctaaagcaagccgcgttttttggccaccacttagagaagcgatttctacttcataatcttctggataaaaacgcaatccatttaaaacagaacggatttctgcttcgtaagtatagccgccactttctttaaaagtatgttgtaacgtatcataatccgtcatcagtgcttggtatttttctggatcat

SEQ ID NO: 3514 - DNA, 2891 bp, Listeria monocytogenes 4b
  misc_feature (1)..(end): n can be any nucleotide: a,g,c or t/u
acgaggatggcgtgatatttctgaattacgcgatttataccataaacaccgtgtgaaaatggtttttgttaatccaacctttcaaaatccaactggacttgtaatgagtttggaacggcgcaaagaactcgtgaaaatttgcgctcatttgcaaataccgatagttgaagatgatccattttcagaactagccgcactagacagccaaattccggcaccactgaaacaactggacacggataatgtgttatacattggctcgctctcaaaaattatgggatccactacacgaatcggttggcttattggtccgacagcagtaattgaacggctcgcgctcgccaggcaagagatggattttggtttaagtatttttccacaagtattggcaaatagtgttttgaatacgcccggttacaaggtgcatttacagcaattgcaccacgtattaaaacagcgccgaggtgatttaatcgaagctttcgaagccattttaccgaatgatgtagtatttattaagccaaaaggtggttttcatttatgggtgaaattaccagtcgaaattcgctcgattcgtgattttgatatatttttagcgaatgatttacttgttatgccaggatttttatttggggtaaaagaagcggttatccgtgtaacttatgcgcggcttgagaagacggaagcgagacgtatagctgaaataataaagcaaatattaatagaaaaaaagtgcgaggaagcttgatttaaagctatcttgcacttttttcatattccccaaaaaatccttctaatctataatagaaagtaacccgcgattttaactcatcacaataaatctttctgccaaaagcgaagttgtgatgaatcaccatttttatgtaagggttatcatttactattaatataagggaggggaaagtagatggaacagaattgtaaggaattaattacttatctgctcttgaatcggcaagtgaatcttagaaatgtttccaagaattttaaagtatccaaagaagcaattggcgcacagattacacaaataaaccatctactaaagtcagaaccaattttaattgaccatgacatgatttttgttacagatgtatgtagggaagcttgttaccggcttttaactgcggaagaacaacagctgttttcgttttatgaggtaaatattcgtcgcaaacttatcatgattaaattactacttcataatcattatatgtcactcggagcgcttgcggactacgtttatgtaagtaaaaacaccatgcttacagatgttaaaagtatcaaagagagtctgcatgagtttgaaattcagcttgattattcgaggagagatggctacgctgtttctggttcagaatttctgattcgtaatttactagcagaacttattcgcgaagtcgttcagaccccatacgggaaatttgtccttgatgaaaagaagctgattactgtgagcgaagtgtttttactaaaaaaacggctcgaaaaggttgaaagtaagcttcaaattacctttacagatgagcagatggaagaattgccctatattctccacggcatcatcaaaagatccaaagtaacaaacaagaaatggacatttaaaattgaaatgtatgacatcaaaaatacccgtgagttcccgataatgaaagaaatgttttgggggtatgattttttaagtgaaaacgatttactttacttatcgttacaagtcctcgcttcgaacttagtcgagtcggcgcttcatttctcagacagtgaagaaatcgcctacgcagtcgacgagttcattcgtttactagaaatgtattttgcgacggaaatcatgaagaaaaatgaatttaaagaaaaagtgattttacatgttaggccagcaatttaccgaacaattttaggatttcaaatcaataatccacttaaaaagcagtttattaaagagtacaccccgacatttaacattgtagaaaaagcctccaaaccttttgaaaaattggttggtcacaagtggtcagaagaggagattgtgtatctttctatgatagttcttgggtggatgtatcaaattgaagaaacagaacagccgattttccgcgcagttgtcctttgtaaaagtggtacatccatctctaaactactgttagaaaacttgaaaatgatgtttccgaatattgattttcaaggagcttatgcggtgcggcaattaagtacggtggcacgcgatattgattttatttttacgactgtgcccgttcaaagcgatgccaccatttttgtaatcccgtccattttaagtaaagacagccgccaaatccttagggaacaagtggataaagcaatcgaaatggacagtcataaaaaaaccaaagaactgcttgctatgctaaaagatgaaattcccgaagaaaatattcgattagtgcaagccaaaatggaatcctttttcaacaaaaaagagcaacctatggagaagaaagaaccagaacaaatgcaaattacggaagagcaggttcacttcttagaaacgccacttgagtgggagcaactagtttcggtggcatttgcaccaatgttagaacgaggaacggtggatgctagttacattcatacttgtgaagaaatattctatcaaaattatgagcagatgatgattgggccgaatatttatttaccacatgccaaacccgcaaacggggtaattgagcaagatattcagttgatgataatgaaagcggacacaaaaacccctgaaaatgaagcagtcaaaatcatgattgccttagcaccatctgaacaaaacaaacatataccattattactaaaattgaacgaaattttcttgaagcctgagaaattagcgggaattctcgctt

SEQ ID NO: 3515 - DNA, 3719 bp, Listeria monocytogenes 4b
  misc_feature (1)..(end): n can be any nucleotide: a,g,c or t/u
tagcctactcagctcacttagcagctctgaccggtatacggccgccatgtgctggaaaggaggctgcgaattatccgtttgcgacgattgacccgaacgtaggaattgttgaagttcctgaccacagattaaacaaactaacggaacttgtaaaaccgaaaaagaccgttccaacaacttttgaatttacagatatcgccggaattgtaaaaggtgctagtaaaggggaaggacttggaaacaaattcttatcccatattcgtcaagtggatgcaatatgccatgtaactcgttgttttgatgacgaaaatatcacccacgtagaaggccgagtagacccgctagacgatatttctacaatcaacttagaacttatcttagcggacttagaaacagtagagaagcgcattggacgcgttgagaagctatctaaacaaaaagataaagatgctgtggctgaatataacgttttagttaaactacgtgaggctttcgaaaatgacaaaccagctcgtgcgattgaatttaacgaagaagaagagaaaatcgttcgcaaccttttcttacttacaagaaaaccagttttatatgtagcaaatgtaagtgaagaagatgtttctagtccggacgataacaaatatgtacagcaagtacgcgaattcgctgcgagcgagaactctgaagttatcgtagtatgtgctcgcgctgaggaagaaattgctgaacttgaagacgaagataagctagagtttttagaagcgcttggaattgaagaatctggtttagaccaattgattcgttctgcgtatacattgcttggcttagcgacttacttcacagcaggcgttcaagaagttcgcgcttggaccttcatcaaaggaatgaaagctccacaatgtgccggaatcattcatactgatttcgaacgtggattcattcgcgctgaagttgttgcatatgacgctttacttgaatacggctcagagcaagcagccaaagaagcggggaaagtacgcttggaaggtaaagaatacgaaatgaaagatggagatgttgttcatttccgctttaacgtttaatatgtttcacgtgaaacaatcttttgacaagtaagtatgtcaaaagattgttttttaggttagttcataaattctgcgttactgatatacttcaaaagagtattaagctaatttttgaacagatttatacttttaatatagaaagtgaaaataataataaatatgtttcacgtgaaacaaacaatcaattaagcgattttgtcaatatagataagggaatgtttaatttatttgcactaattaattcacaaaatatacaatttgcagagagcggaatgatgctataattaactataaattttattataggagtgttttttttgatacagttaatggttatagcattttttgttattcttctagtaattatgccaaagaataacaaagaagaaagaaaagcagcgcatttactaattgataaatatggtattcaagttgcaaagaagaataatccggttcgtcaaatggcattgctggaagtagcgctaggtatttctacttatagaggtagccgtaagaaaacctttatttttattggtagtttttttgtaatcgcatttattttaggttatctaacgtacttttttggaataaaccgaaatatcacagctacaatcattgtaggtattattttaactttatttttaattgccggaacaataataatgtttgtaatagcgattcgccaagcatcttcattacgtacagacgcatgggctaaaatcttaaccacaatcgaccctgagtttcccgttgaattcctaaatgagaagaaatggcaaaaagccttccttgctcaaatggaaagtatgaacgaacaattagcataatcagagaagtattagacttttagaggtttaatactttttttattccccgggaaataaatagtattttatattgtgataacatttaaaataaaactggcaccgtttcaagatagaaacggtgccagttttttgctaagggttatttctagcagctatttttatacagagcaaggcaattagaagtaatactaggcagaatgcgggaaatacaagtattgatcctgaatgcaaaacgccaatgaagaaagtacaaagactgacaattacataatatcctaagcttaaaaaggcgccagctgtaccggcaacttcttgaaatttcactagtgctagacttaaacaatttggtaaagacatgccaattcctactaagataatagaaatgaagaagatgtagaatataacttggatagtaagcgggaacagcgcaaccatgctaagaaatagagtgccaataagagctagcaaaattccttctttaatgattttatgaggtgaattctgctttaagcgccagttcgatagccaagctcctaaaatagttgccgtagccactgcgcaccccatgaagccatactgactctgattaaaatgaaacctctcaataaaaatagtaggagcttcagagtagtaactaaacaatattccattaaaaataccaattagcactccaaaagcaattgtatagcggtcaaaaatcatttttttaccaattactaccattttctgcacactgaatggggtggcgttcgctgtttttgtttctggtagtcgttttaaactccagaacagcaatatcattcccataactactaaaaataaaaaaaccacgcgaaagccgtaatattgtccgataaatccaccaattaatggcccaattgccggtgaaaatgccaaagcggctgagatttttgcaaataaatggtggcgatcattaccgtggtagttgtcacgcaaaatggtctgtgttgtaacagaccccgtacttgcgccaaatgcttgaacaaagcgtccgataaaaagcattgtaatattatttgaaaaaaggcagacgaagcaaccaataatatagataaatatcccaaagttcattgcttttcgtcgacctaaaaaatcggaactaacgccccaaaagaagacaccaactgcaaaagcaagaaagtagatgcttaaagtcatttgagccaaatttaatgagacgccgtagctcgtagcaatctccgttaaagaaggcgtataaatagtttcgctaatttgtggaaaccccacaaggcacacaagtaatgctaaatttattttctttgtttcgatgtttttttccataaaattctctcctgaataagttatttatctgggaaaaaaacatctttcacagggaaatggtgggaccatgattttaatacgctcgtaaaaaagcatgcagtcacccctttctattttaaacggagaaggttccgttttttcgttaaagtttattgtagtataaatgggtggaaagataaagtgttggtggacgattgaataaatatacactgatatttacttgaattcagcatttaagtgaacaagttcaaatatatgtggttaagttaagctggtatatgaaacttttgtgactatcaagcttgaggctgaatagaaacatgtataatgagctggctagcgcttttttattctgaaaatggagtttttgaacacgatatgtgtagaaaatgcactaagaactataactttagcttttaggatagaatggagtcgttattacattttggtttacattactttttaggtacattggatagtggatata

SEQ ID NO: 3516 - DNA, 1993 bp, Listeria monocytogenes 4b
  misc_feature (1)..(end): n can be any nucleotide: a,g,c or t/u
tttaatatagaacaagtccagtggcgccagaaattaatttttggctgctatttccttttttctccatcagataatatgggattaaaaaggccacgactaacccaaacatgccaaacgaaaaattacttatcatcgaanaatcaggcatgcccggaaataaatttttaagtagtgaaacgatggtgactaaagaaccgacaaaaacgagcggaagcgcagacataattgcatcttgaattgctgatacccaaggatttttaacaactttatttacttttggagcaaatttatttgtcataaaatccatcactttgttgttcatcgtgttatccctccatagttaaaatgagatcgagtgctttttcaccgttaagtgtgccataagttgcttgcggaataattgatactaaaacatttttatcggctactttttgttttaagtcatccagcatataagctaagtgcggcccgattaataagtaatcaatttcattaattctttcatctatttgtgactcactggctgctttcaccgtcacttgttctccacgtttttttgctgcttttctgattgctgctgccatgaatccacttgaagctcctgacccacaaatgagtaaaatgtttttcattttgtatcctccctttccttaacttacttttattatataaacagctgaatccgcttacaaatatgtttttttcctactggtaggaaactgcataaaaaagaaacccctttgcttgaagcaaaggagtttcttaatagcttgtgttagtcacgatattttaagttaatgaatttcacttggatgtattcttccattccgtagtggccattttcgcgaccgaaaccagaatgtttaacgccgccaaatggagtttccggattagagatggcaatttcatttgctccgaccattccgtattctagtgctgctcccactttttctacgcgtgctaaatctttagtgtagaagtaagaagcaagaccgaattcactgtcattcgccatttcgattgcttcgtcttccgtttcaaatgtgataagcgggattactggaccaaatgtttcctcataaaaaatgtccatttcacgggtaacgttatctaagacagttggtttgtagaagttgcctttgtcatagtcagaacctgttaaacgaccgccgccagttaggactttggcacctttatctgtggcatttttaagttgtttgtcgattttgtcaatcgcatcttcacggataagtggaccaacattcacatcatctaaaccgttacctacttttagttgttttactttagcaactagcgccttagtgaatttttctttaatttctttggcaacaaaaattcggtttggcgatacacatacttgaccgttattgcggaattttgcggcaactaaatcatttacagcagcatccaggtttgcatcatcaaatacgataaatggcgcatgtccaccaagttcgagcgagatttttttcagtgtttcggctgattgtttgaatagtgtttgaccgactttcgtggagccggtgaaagttagtttacgaacatcatcactgtcagttaatgtttcgccgatttctttggagctacccataacgatattggcaacaccttttggcaagccggcttcttcaaaaatttcaaagatagctagggccgaaagcggcgtatctccggaaggttttaatacgattgtatttccggttgcaagcgctggagcaagttttcgtgtcaccataccacctgggaaattccacggagtaatggccgcaactacaccaattggttgttttttgacgataaacgcgtgattgtttggcgctgggatagtttccccatataatcttcttgcttcttctgcagcgaatcggaagttttctgcgccagttaggccttctccttttgattcttaaggcggtttaccttgttcaactttccaggacatgtcggccctcgacaaaganagttccacagt

SEQ ID NO: 3517 - DNA, 3327 bp, Listeria monocytogenes 4b
  misc_feature (1)..(end): n can be any nucleotide: a,g,c or t/u
tttaggccgctacttgtcataatcttatcacgaaaaagcaggaaagaaaagagtcaaccacccgtttagccgatattcagtctttcgtcgtagtatgttacaatagaactttgaaaggatgatgccttatcgcaaatacagttatcttagtcgatcaaccaacacttgaaaaaatgaaacaaacatatctcccattttctaatccaaagctaccaccaggagctgttttcgctgcaaaaaaaaccggtgtttccatcactggctacaagtcgcgcaaagtgatgttccaaggagtaaacggagaagtagaagcaaaaaaatgggtggcgactcttccagaatcaaaaacaaaagcaccttccgtctctaaaggaattcttccggcaaacttcgcatcaaaaaatgtcattggttcagatgaagttggcaccggtgatttttttggaccgattacggtttgtgccgcatatgtggacgccgaaatgatgcccctgttaaaagagctaggtgtaaaggactcgaaagcaatgaaagatccagaaatttgtcgtattgctgagaaaatcatgccacttgttccgcacagtgtgctgctttgccctaatcctaaatacaacgaactccaaaaaagaggcatgaaccaaggacaaatgaaagctttactacataaccgcgcgattgaaaacgtcttgaaaaagctcgcacctgtcaaaccagaagcgattttaattgatcaatttgctgaaaaaaatacgtattatcgctatttagcaaaagaaccaagcattattcgagaagatgtgttttttgcgacaaaagcagaaggattacatctctccgtcgctgctgcttcgattattgctcgttataaatttgtgcaagcttttgatgcgatgtcaaaagaagttggcatcccacttccaaaaggcgcaggacctcatgtggatgctgttgcagcggaaatcatcgaacgatttggtctggaaacattagcgaaatatacaaaacagcatttcgctaatacagagaaagcattaaaaatggttaaaaagtaaaaaaacatctcgtcaataaatggcgagatgtttttatttatatagaaggaatttgccaatcaattggttttacaccattttgttctaaaaattgattcgtcttagaaaaatgtttgcatcccataaaaccgcgcgatgctgagagtggactgggatgtacggatgtaaacgcagtatgtttcggatttgttaacaattgcaacttttctttcgcattgtttccccatagtaaaaagactacgggctcttctttttggttaatgatttcaataatgcggtttgttagtatttcccagccttgtcctcggtgtgagttggcttgaccggcgcgaacagttagaaccgtatttaatagtagcactccttgatctgcccaccgtatcaaataaccattgtttggaatctcacaattcaagtcgttatgtaattccaaataaatattctgcagtgatggtggaatctgcactccttgttgaacggaaaatgagagcccgtgtgcttgacctggtccatgatatgggtcttgaccgagtattaccactttgacatccttacaagcggtatattttaacgcattgaaaatgtcgtacatatccggaaatacttttttcgtttggtattctttttttaggaactggcgaagggttaaataatacggttggttaaactcatcttttagtaactcatcccagtcatttccgagttttatcatgattttttcctccttcattcatctaactatatcttagcaaaatagtctttggaagcaaactaaaaaccgcatccccttttttaaaggaatgcggtttattatgttattttttcggtggtacgttttcttgatggtcgccttttcttgtaataaatggccaccagttgccacgtccgaatagtttaaccattactggaacgaagagtggtaaaataacgacggcatagagtactaagccgattaaaacgaccgtcgcaatttcgagtaaggaaagcacgccagctggcatcattgcggcgaatgttccaccgaggataatgaccgctgagaagataacgccacccatatttttcatggcttttatcattctatcgcgtacagaaagtccgttgtattcgttaaatcttgacatcaagaagatcgaataatcgataccgagcgcgacgagtactacaaatccgaagaacggtgttgcccacgttagaccactgtatccaagaattcgcatgaagataatttctgcgaacccaagtgcagcaaagtacgttaatacgagtgatgcaatcagataaattggcattactagagaacgcaagacgataacaagtgtcacgaaaacactcgctagaacgattacaagaaccaaatgatagtcagctgttgacatatctctcgtatcgtaattggcactcgtcattccacctataccaattttcgcattttccagttttgttcctttcatgctagctgagagttgttcattaatgtcatcaattgaatccatcgcttcattggaatatggatttttcgtcaaaatcacattaatcgttgccagttttccatcagaagagatgtattgatctaatactttttggaaatcagcattttttagtagagcatccggtacataaattccggaacttgcgtaaggaacttttgaccaatcatcaataagtccgttcgctgtgtttagaccactttctactttgcctaggccgtctgcgccagaagttaagccatctgttaattgacccatttgaccgctaatgcctgcaaagccatcttttagggcaccttgtccagcagcgatttgcgttagtgcattagagatttccggcattttggaaacaacttgtccttgaccatctgcggcttgattgagacctttttctaattgatcaagtcctgtttcgatttgaccaagtcctgtactaaaagcgctaagtccatcagagatttgtttggactgctcgtttaattgattcatcgctgttgcgagttgttgaataccttgatttagttctttcatttttgcttgaagtgctgccatttgttgtccagcagaggttttcagttcgttaccagctgtttctaagccttgaatatctgcggctagtttttggaaacgagggtcatttctcacttctggatgcgctgctgcgaacgcttggaaagaagcaccaatttttttgaattgctcttcaagtttggaagtatcaattgcttctttccagcacacgtggcggccgtncaagcatgcgagctaggttgcccacaagt

SEQ ID NO: 3518 - DNA, 1901 bp, Listeria monocytogenes 4b
  misc_feature (1)..(end): n can be any nucleotide: a,g,c or t/u
aagaaaaaccgcaatcagggaaaattgttgcagtcggttcaggtcgtgtgctagataatggcacaaaagaaccacttgaagttgcagaaggtgacacggttatcttcgcaaaatactctggaacagaagtgacgtatgaaggaactgactatctgattttacgtgaaagtgacattttagcaattactaaataattaaaaaaagaaataatcggagggaaatataaaatggcaaaagatattaaatttagtgaagatgctcgtcgtgccatgttacgtggtgtcgaccaattagcaaacgcagtaaaagtaacacttggcccaaaaggtcgtaatgttgttttagaaaaaaaattcggttctccgttaattacaaatgatggggtaacgattgcaaaagaaatcgaattagaagacccatttgaaaatatgggagcaaaacttgtatctgaagttgcttctaaaaccaatgatgttgctggggacggaactacaacagctaccgttttagcgcaagcaatgattcaagaaggcttgaaaaacgtaacagctggagcaaatccagtaggcgttcgccgcggtatcgaaaaagccgtagcaacagctatcgaagaattaaaagctatctctaaaccaattgaaagcaaagagtctatcgctcaagttgctgctatttcttctggtgatgaagaagttggtaaattaatcgcagaagcaatggaacgtgttggtaacgacggcgttatcactattgaagaatccaaaggctttgcaacagaattagatgtagtagaaggtatgcaatttgaccgtggctacactagcccatacatggtaactgattccgacaaaatggaagcagttcttgaaaaaccatatattttaattacagacaaaaaaatcaacaacatccaagaaatcttaccagttttagaacaagttgttcaacaaggtcgtccaatgttaatcattgcggaagatgttgaaggggaagctcaagcaactcttgtactaaacaaacttcgcggaacattcaacgtagtagccgtgaaagctcctggttttggtgatcgtcgtaaagcaatgctagaagatattgctattttaacaggcggacaagtcatcacagaagacctaggcttagaactaaaaacagcaacagttgatcaacttggaacagcgaacaaagtagttgtaacaaaagatgatacaacaatcgtagaaggagcaggcgattccacacaaattagtgctcgcgtaaaccaaatccgtgcgcaaatggaagaaactacttctgaatttgatagagaaaaattacaagaacgtttagcaaaacttgcaggtggggtagctgttgtcaaagtcggcgctgcaactgaaacagagctaaaagaacgtaaattacgtattgaagatgcgcttaactctactcgcgcagctgtagaagaaggtatcgtagctggtggtggtactgctcttgtaagtatttacaataaagtagcagcactagaagcagaaggtgacgtagaaactggtatcaacatcgtgcttcgttccctagaagaaccagttcgccaaatcgcgcataacgctggacttgaaggttcggttatcgttgaacgcttgaaacacgaagcagttggcgttggtttcaacgcagctaatggcgaatgggtaaacatgattgacgctggtattgtggatccaacaaaagtaacacgttccgcacttcaaaacgcatcatctgttgctgcacttctattaactacagaagcagtcgtagcagacaaaccagacgaaaacggcccagcagctgttcctgatatgggaatgggtggcatgggcggcatgatgtaaggttaacatcagctgacatttttaaaagatctcaggattttccag

SEQ ID NO: 3519 - DNA, 2301 bp, Listeria monocytogenes 4b
  misc_feature (1)..(end): n can be any nucleotide: a,g,c or t/u
tatgttggagatgaaattgtacttaaaggcaaatttgaaatgtatcacgcaacgcaaaaatgaaaataaaggactgacgtataatgaaaattgctgtagatgcgatgggtggagatcatgcaccaaaagaaattgttttaggtgtgatgaaagctgtggcccaatataaagatgttgaaattcttctttttggagacgaaacaaaaataaatgaatatttaactgataaaacccgcgtaaaaattatacataccgatgaaaaaattgaaagtgatgacgaaccagttcgcgctgtaaaacggaagaaaaaagcttctatggtacttgctgcccaagcggtaaaagacggagaagcagatgcttgtatttcagctggaaacacaggggctttaatgtctactggattgtttgttattggtcgtatcaaaggaatcgaccgtccagcactagcacctacactaccaaccgtgacaggaaaaggctttgttatgcttgatttaggagcaaatgcggaagcaaaaccagaacatttattacaatttggtttaatgggctcggtttacgcagaaaaagtgcgtaaaattgatcgtcctcgcgtagcgcttttaaacattggaacagaagaaacaaaaggaaatgatttaacaaaaaaatcattcgaacttatgaaaaatcaagacgcttacgaatttatcggcaacatcgaagcgcgtgatttattaatggatgtagcagatgttgttgtaaccgacggatttactggtaatatggtacttaagtccatcgaaggaacaggcgccgctttcctaagtatgctaaaaatgagtttgcttaatggctttaaaaataaagtcgcagcaagcttcttgaaaaaagatttaatggctttaaaagcaaaaatggattatagcgaatatggcggtgcttgtttgttcggtgttcaagctccagttgtaaaagcccacggttcatccaatgcgaatggtattttcaccacaatccgtcaagtacgtgaaatggttgaaaaacaagtggtcgaaacaattaaagcagaagtagacaaagtaaaagtaggaggaacagaatctaatgactaaaattgcatttgtatttcccggtcaaggagcacaaaaaattggcatgggacaagatgtagcagcagaatatcctgaagcaaaaaaaatctatgatgatgctgacgaaagactcgggttttcaatcacagaaattattacagaaggtccaattgaattattaacgaaatccgaaaacgcacaaccagctttagtttccacaagtgttgctattttacgcgctttagaaacatatggtgtgaaagctgattacgtagcgggacatagccttggtgaatatagtgcgcttgttgctggcggatttttagaagcaagtgatgcgatttaccttgtacgtaagcgcggtgaattaatggaagcagctgtaccaaatggtgctggcgcaatggctgcagttcttggtgtagaccgggaaacattaaaaacaatcaccgaagaagtaactaaagaaggcgatgcagtacaacttgctaaccttaactgcccaggacaaatcgttatttctggaacaacagctggcgttgaaaaagcaggcgaaaaagcaaaagaaagtggcgcaaaacgcgtattaccacttgctgttagcggacctttccactctagcttaatggaaccagccgcacttgctttccgtgatgttttagcagaggttaaaatttctgatggtcagattccagtggttaataacgtggacgctaaagaaactacggataaatccgaaattagcgataaactaatcaagcaaatctattctccagtattatgggaagatatcgtcgaagaattaattaaaaacggcgtagatacgtttgtcgaaattggttctggaaaagtcttagcaggtttaattaaaaaaattaatcgtgatgtaactgtactgtcagcaggtgacgctgaatcagtgaaaagcgttgcagcgacattgaaaggagaataattaatgactttacaaggcaaagtagcagtagtaacaggtggatcacgcggaattggtcgtgacatcgccatcaaattagccaaagaaggcgcaaatattttcttcaattacaatggtagtccagaagctgcagaagaaacagcaaaactcgttgctgaacatggtgtagaagtagaagcaatgaaagcaaatgtagccattgctgaagatgtagatgcctttttcaaacaagcaatcgaacgctttggtcgtgtggacattcttgtgaat

SEQ ID NO: 3520 - DNA, 3069 bp, Listeria monocytogenes 4b
  misc_feature (1)..(end): n can be any nucleotide: a,g,c or t/u
gagggtataatccccttcaacagaatattccactactgtatttccttctttatctgccgcgtaggctgtccctccgctaaaaaacaccatacccattgctgctacacttaacgtacttaatactaatttattcataaaaaatttcctcctttgtctagacgacaactaattttaaatttatttcagacccgtttaaaggtgactgatcgtttaaagaaaaacattcatattttaatactgcattttcatattcgcctaccgctaacgttttttctaattcaatggaatacataccttttcccggttcaatcaaatcggatatccatagaaccgaaccatccggatgaataagcgatattttgaagtaacaatcattaatttccggattatggaaattgactgcttgtgttgtttcatttgcatacaacgttactttttcaaaacccggaatggcgattgtattttcttctccacttgtatccttctgttttttcccgttccaatcaacggcagaatggtctacatccaacagatttattttatccttgaatagaaaataactactgattccaatgacacttactaacaatagtagtaaggatatgatcactactcttttcttcttcataggtaacctccaatttattcataaccaaatgaccttgacatgatcactagtctggctaatttacatcagtcatacttaatcgaaaatacaacgttccctgtatattttcctgcctggatattttctggggattttatttccataactgcatcgccttctgttatttccgaacctggagcgagagttaaaatggcattttctggattgttttcggacccatcccaacttagtggtaccaaacattggactgttgcgtctgccgtattggacaaggttagcttgttgctttcagaaatagacgttgctgttcggtttaatcccacggacaaatttttatctcctcgattaatcccttctactttcaattcagaagtttcatttaaagaaatggaagccggaataatcactgtatagttttctatccattttgcgtagatagttgtagatacagcagctggcaatgaaaagtcaaacttattagtgaaattttgatcaagataccacccgtcaaagtaatgtccttcttttactggaatcacttcttcccagtactccccagaaattttactttgtactttttgttcctccgcgtcttcaaattctccacccatcgcatccatcgttaaggaaaggaactcaccttttctgtagcctgtaggttcactttgtttccggtgatatgtctgtagttgcgagagattagaaaactgtacccaattcttttcgtcataccagcttgtattttctaggccagtaaaagtacttaaattgtgactgacaaacaagtaggttagggaggtggttccagtaaacatatctgtcatggtctttgcggtagtaaaattatccagatataaagattttaacgctgcacaatttataaacatccggtccatatccgttactaaactcgtattaaaattgcctatatctagctctttaagtgacttgcaattttgaaacattctattcatagtagtaaccagactagtatcaaaattacttgcatctaattttccgacttcatatagccctgaaaacatggcatacattttagttactgaactggtatcaaaattacttatattcaatttctccagtgcataacagttttgaaacatggcagtcatatcagttactgaactggtatcaaaattacttacatccaaaatctctagtgagttacattcagcaaacgcactcatcatagtagtaacggaactagtatcccagttgcttacatccaatttatcaagtaattcacagtactgaaacatgcccctcatagtagtaacggaactagtatcaaaatgacttacatccagttcctcaagtgctctacagtactgaaacatgttctgcatattagttacagcactcgtatcaagaccactcacatcaagctccgtaagtttgttagcataaccaaacatagattgcgtagtgagtaaagatggtgctgtcggataatcattatccctaataataactttttcaattcctgaactataaaatgcagaagcaaaagacgtcactccagacaaattacactgttcaatcctcacgctttccagtgctggaaaagcgctattgtcaaaatacgatgcaaaatttcctgtcaaagtagcttcttcaatctctatatgtttaatgcttttcaaatagctattccaagcggttggtctactgcttggcacgttgccaaacatatgcaagctatattcaccgttcacagtattgcgataaatcgtccagtaagcacctgagcttaccactgttaaatccggatcatctgaatcagcaacaggctgttccagaacatctggattttgcatcaactcatccgtagttggaatttcttctagttgctccacctctgctggtttgtcttgcgcgacttcttctgtaatgagattagaggtataaagagaacccagctcctcttctggaagcttattcgttgtatccatctcttgtgcgatagaaacattagcgctcccaaaagcaataaaaagcacagaaataataaggaccactcgcatggaaaacttcttcatcagctcccctccttctttcgtagttaatttctagatgccgaactttctagctgcaacttaattatagaggagtcgaaaagcttttccggccataaaattttaacttcttaaaattctatggcttgcttagcaaagttattcataattaatcgaaaataccagattccctgtatacgttcctgcctggatattctctggtgcttcaatagccaggactgcctcgccttctgttatttccgaacctggtgctagggttaaaatggcattttttggattgttttcggaaccgtcccaacttagtggtgccaaacattggattgttgtgtctgctgtattggccaaagttagcttgttgctctcagaaacagacgttgctgttcggtt

SEQ ID NO: 3521 - DNA, 2464 bp, Listeria monocytogenes 4b
  misc_feature (1)..(end): n can be any nucleotide: a,g,c or t/u
actaataggtcactctccatccatgctcgagcggccgacgtgtgctggaaagcatcgtcaaaagggagtagttgttcatccggatggcgtagctaaggcagatgagctattttttgctaaattacaaacgaagctaaaaccacttatcgcggaatcggttgtgcgcggtgttaccgaagagaagtggctcgaagtaagtaaggctatttttgacgaaatgcatggacggattagtggagtagaaatggaaatcatcatttatatttttgttagtattgctatcatttcactgcaagcaataaccccttttgtaataagaaaatcagaatgtttcggagtaaatgtaggcgaacgcgctaaccgaaatgcggaattaacgcggctaaaaaaacaatatgtcgggcaagtggttttgtggacctctttcgttgctattatcggaatcgcattaattcaaggctttcattcgagtgagaacatgcaagcgggtatttttattgcttcgatgtttggacaattaatcgtttcttttattatttattatcgctttcaccacacaactttacagtggaaaagagataaaatagaggcgggagaaatttcgactaattctatcatcatggtagatactagttttcatcgcagaaaaatggttatctcgtatacatggtttgtcgtgccactgcttatcttcattattacacttgcgattacggtcgttttttatccagtagctcctgctgactttccaatccattttgatatgagtggggcagtgacggatacggttgccaaatcacctagagtcgtattgctattaccgatgatgcagctaggaatgattgcgttatttatctttattaactttgttattgctaggagcaaacagtccgtagagaacgaaaaccctactgattcattaaaaaggggactcctatttagacagatttctagtaaagcaatgttaattatgtgtacgattatggtaattgattttctcatcatgcaagtagtcacattacttgcacttccagctgaatggatgatgattacaatgataatttccgttgttttgattctgtttggaaccgtccttcttgctgtaaaagtagggcaaggcggaagcagacttaaatttgctgaccaacctgatggtgtcaataagccaattcgggatgatgattctttttggaaagcaggggttatttattttaatcgaaatgatccagctttatttgtagaaaaacgctttgggattggttggacgattaacacagctcgccctgttgcttggttatcttttatcattattatcgctgttattattctcattagcatcttgttttaacttgctctcagacgggtatttaccatatggtatacggataaattagcttgtgtgagatgcttttgtgaaggagtagataatcatggcgattagattaaagcgactggaggaatgggaaggattcactggtattgcgctcgttcgagaaggtcttaaaacagaagcacttcatacagaaataaaaacagccttcaaagaaatgcttcaacttgcgcgagaactagatgatttttccaaacaaaaaacgttttatggtatttctgtccataatatagaagatggaattactcattattcggtaattccagtggaacaaaaatatcctcatttacaagaaccgcttgagtggattgaagttccggctcatacgtattttgtggctgagcatattcaggatacagacataagtgaaagttatgaagagattgccagagccattcaagaaaaaaattacaaaccatatattacagcgaacaaccccgtttttgacccattaccattcaaattggaagtgtatacgaaacaaggaagcgacggagctaatattgaaataaggattcctgttgtaaaagaattgcatacgtaagaagaagcctgggacttttgttctgggcttttttatactagcaagctgtttttgagtgtgctataataaaaacgctattttgtgattattttaacaagaaggaagggattcatgtgggatattatagcccgcaggaagtaacagagattacgattgaaaaagggacccaaaaagcaaattcaagtacgttaacgcttgtgttgttaggctttttaggtggggcctttatatctcttggttacttattatacatacgtgcagtaggaacaatgcctcacgaatggggaagctttgcaacgcttatcggcgccagtctttttccggttggcctattattgacttctgtacgtggaggagaatctgtctccactgacttgatagctgtacatattgcttggtaccacaaaaagatttccttccaacaattacttacaaactgggccattgtgtctgtcatgaacttagcgggtgcatctctcgccgctcacttcttcccccatttcgccccaatcccacacccccacctctta

SEQ ID NO: 3522 - DNA, 2298 bp, Listeria monocytogenes 4b
  misc_feature (1)..(end): n can be any nucleotide: a,g,c or t/u
tttacaaacccctctactttttctactacatttaaaagacatacctggatccgtcaccataaccaatatgcgaaaaacaataattaagaattcaatctgaacggatgattagactatgacacatgtaacattacctattctagaagactgggaaggcctttcactaactactattttgcaagaaaaatttcatctcggtaaaaaagcgcgacatgaaattcgcatgtctcaaaatgttttgctaaacaataagccactggatgattggaatacgccacttttcgttggagcgagtctttctttaccagttttcttacatgacaaaatccctgtctatgagtacgacttagaaattatttatgaagatgattttttactagtagtgaataaaccagttgatatgaaaactcacccaaatgatagttatgaaacagatacttgcgcgaatgccgtgcaatattacttagaaaaaacaggccaagatgcgaacgccctagcagttcaccgtcttgatcaaactacttccggtttagtactgtttgctaaaaacaaattagctatcgccggcttatcttggcaaatggaaaatagagcgattcaccggacttatctcgctgcagttgatggtacttggggactcgtgatgcaaacaatcaacaaaccaattggcgaagatcgtcaccacggttccagacgccaaatcagcccatacggtcaaccagcagtaacgcatgttaaagtattagaaaatgataacgaaaaaaacacctctcttgtagaatgccaaatcgaaactggtcggacgcaccaaattcgcgttcatttaagcggaattggccatccaattattggcgatacgctttatggtggttcccctcgtgctaatcgcatcatgctacatgccgaaaaattacatttaaatcatcctttcaaaggtaaagaaatgaatttttctgctcctgctggagatgattgggtattttaaaaagccacaacattacgttgtgacttctgtacaaatttctacttttattccatttggatcttcaaaaaatacagcataatgattttcaccgccagcaaaaggatatctttcttcatatagaagtttggttccttttgcttttaatttggctcgaaaatcatccacccgttcttttgtgccaccatgaaatgccaaatgattgagcccaactcgtttgcgatgataaccttccgcgacaaacggttcctctgtttgcacaaatactaaatacgtatcggcgaatttataactaaagccttcattccaagtctggtataactcataagaaagttcttctaacagccctgaccaaaacaagcgactttcttctaaatcagctacatatatttccacatgatgtaacatatcacgcctccccgatgtgtttaagtgcttctcttcggcttaacggcgcaagcgagtgactatttacaaactgacgaactgccccgatatcgacttttgcatattgtctgagcgcccatccaatcgctttttgaataaagaattctttggaatccagccatttttcgcaattggaaaaaagtaaagctacatcggtttcttctttgtacttcaattgaaataaaattgccgttcgagcgagccaaatgttatctccatttatccacgcttcattataggtaggaatcaactcaggatatagtttaaaatgattacttactaccgttcccgctaggccatccacagtatcccaccaagatttcgttacaattaattgctcatatacttttatcgcctcactaggctgttttttaccgtaacggcttaataaatcaatcgccacatactgaaattcacgctcttcttcagcaaataaggctatcgtaaatccaagtaaatcttgcggcgccccattttctttcaaatattccgctaccaatttttttcgttcaccggctctaattcccaaaaaagtaaattgatttttcatgtaagcttccattggcggagcatctattaaagaacgattcgcgcggaataccatttgaatatctgtcattccgcattctcacctgataaataagcgcgttcccgttcaatactacttaaaaagtattctaaatcatctggatctggtccaacacgtttccccgtttctaagcgatcaattttttccatatcaatggcatctagttggaaataggacaaacgtgaattctcctcaatccgactagaagtaattggcttccgaaaaataatcgtattgcggttcaaatgccattggaaaatcacttgatctacaaatactt

SEQ ID NO: 3523 - DNA, 1927 bp, Listeria monocytogenes 4b
  misc_feature (1)..(end): n can be any nucleotide: a,g,c or t/u
agccaatgtattaattcatgttaaagcaagaggaatcgtcgttaatgaacctgcagttgtcgctattaacaataaaactggacaagttttagccgttgggactgaagcaagagatatggttggtagaactccaggagacattacggcaattaaacctatgaaagatggggttattgctgactttgatattgtgcaagaaatgttgcgtttcttcatacaaaagttaaatttaaaaacttttttttcacggccacgtattttaatttgttgtccaacaaatataacttctgtcgagcaaaaagcaattcgcgaagttgctgaaaaaagtggtggaaaacaagtgttcttagaagaagaacctaaagttgctgctattggagcgggtatggagatttttgagccttccggtaatatgattattgatattggtggaggtactgcggatgttgctgtattgtctatgggtgatattgtaactagtcaatcagtaaaagtcgctggaaacaaatgggacgcagatattttaaattatgttaaacgtaaatataacttacttattggtgaaagaacggctgaaaatattaaagtaacaatcggtactgcatgtcaaggagccaaagaagagaaaatggaaatttgtggtagagatttagtgagtggcttaccgaaaacaatttctattacaagttctgaagtggaggaagcgattcacgattcattacacctaatggtcctagctgctaaacaagtgttggaacaaacacctccagagctttcagcggatattattgatagaggaatcatcatgactggtggtggatctttattacatggtttagatgaattaatgtccgaacagctaaaggtcccagttttaattactgagaatcctttagatgtagtggcacttggtaccggcattttacttgactcacttacaaataaaaagcgtaatagattctaaatgtgaattttgggggatgtatatgttagatattaagaaaatcaaagagattttgcctcatcgttatccatttttgttagtagatagagttatttctgttgaagaaggcaaaaaagttaccgctattaagaatgtaacagcaaatgaagaattttttaacgggcactttcctgagtatcctgtaatgccaggagttttaatagtggaagctctagcgcaaactagtggaattgcaatgatgcagagtgaagcaaataaaggtaaaattggtttatttgctggaattgatggttgccgatttaaacgtcaagttgttccgggggaccaactcttgcttgaggctgaaataactcggatgaggggcgcgattgcaaaagcaaaagtcaaagcaactgtagaaggcgatttggtttgtgaagctgaaattatgtttgccttatcagacctacctaaataaaaagattagcactgaggtccaaatgggttttagtgcttttttcatgttctcagaataacattggttaaaaattttttcaaagtactaaaatgatgctttggatgtcattaactacataaaatgatgtttttcttttagaggaaataatcttttggaaggtttctacctagtgaaaatacagttttagctattttacaataaactttttatctaatacaatcgctttacatcaaaagaaagaggcgattatatgattaatcaagtaactttagtaggcagattaactaaggaaccagaattgaaatggaccgcggaagacagggctgttttgaatttaaccttggctttaaatcggtttggtaaaaataaaagagttgataatgatgctgactttattcaatgtgttatttggggtaaaagagcagaggccactgcagagttctgtgctaaaggacaattagtaggagtagttggcgaactacaatctcggaattatttaaataaag

SEQ ID NO: 3524 - DNA, 1573 bp, Listeria monocytogenes 4b
  misc_feature (1)..(end): n can be any nucleotide: a,g,c or t/u
gggctacttgaaaaagcgcattggcatagcgacctgcaacttccaaatctttactcatttgtcatcccctagcctttcgatataatcttggataaggttagattgttctttttcatccagatttttttcgatgactttcgatgcaataagaacagataaggaaccgacttgttcgcgaagagcagaaatagcatcttctttttcacgtgcaatatcggattttgcttcttcttttatacgttctgattcacgtctagcagttttgacaatttcttcgcgttctttttcaccaagctgttttgcattctcaatcattgtttgagattccacacgagcttgttgtaaaacacttttttgttcagcaagtaattgttctgcttgagcacggctttcttccgccgcatcaatttcagaaccaatatgctcttcacgctctttcataactcccataagaggtttccaagcataaattcggattaaaactagcaaaatcgcgaaagcaaaaagtgtgaagaatgcatcaccaaacgtaaatgcggaaccaattactaaatgtggttgtaacacgccagtttcactcctttctatacattcgcttgaattattcgttcaaaacgaaagagatgaggttttatttcctcaacttccttcaaattatttattaagaaccatgaacgcaataactacagcgatgataggaagggcctcaacaagaccgataccaatgaacatgattgtttgtagcatagaacgcgcttctggttgacgcgcaacaccctcgacagtttttgatacgataagaccgttaccaatacccgcacctaatgcacctaatccaacagcgatagcagctgcaataacacctaaagacatataattatcctcctaatttttctaaatattattttttattacttttataaatgacttatttgaaagttagtttaatgttcgtcacttaccttatgcgacatataaaccatggtcagcatagtgaaaatgtacgcttgaattgccccaatgaaaattgagaatccttgccatagtaacgcaggaattattgctagcacacctacaaatatgttcatatgagcaagttgtgttgcaatgatggttaacaaaacttcgccggcaaaaatattaccgtaaagacgtaaaccaagcgttaaagtattagcaaattcttctactaatttaagtgggaataaaaatttcattggactaaagtaagtgccaacaaaatagtgcttgaaaccacgcattttaataccatagtaatgcgttaagccaagaaccattatcgcaagtgttaatgtgacaattggatccgctgtaggtgaacgccaccatacttcatcgttaatcgcgatttgaaatggcagtcctagcatattagctacgaaaataaacattagtagcgtaataccaagtacatggaatctcccaccggttttccaatccatattactattaataatacctctgacaaaatccataacccattcaatgaagttctgctttccggtaggtcggcgttgcagatttctggtacagataatggctattagaagaa

SEQ ID NO: 3525 - DNA, 2149 bp, Listeria monocytogenes 4b
  misc_feature (1)..(end): n can be any nucleotide: a,g,c or t/u
tactttttcaccattcttaattacattattcgccccttttagatattcatttatattcgaatatgcacctttaaactcccctccatgttttgtaaaatggttttccaatttttctatatcgtcaaatttaagtccactggatttcttaggtattatcgctttatttctagctgctgcaatcccaaaccctaaacctaatgccatatctgtcaacccagcatcatctgtccaatctttcaaactagccacataagcggatgaccgcagtgtggctccagaaaatccagatactttttgaccatttaaatagttgataccctctttccaagaatcattcacttttcgttcgagttcttctccagaaaggttggtataaagaagtgggtctaattcctgaccatgtttttctaagaaatcttgtaattccttgttttctactcgttttccatctttttcaagtaaccacatcgtcacggtttcgccttgatcattgacataagtataagctaacacggtgtaatcttcaaaagctttcggaaaggggtcttggtcattttctgttcgtgcgttatccagcgcttttttcataagcaacaagctgtttaccgcacttttcggcacggaataagtccctgttttatcgttaaaagtcacatgttgtaacaattcttgcaccgcacgtccggtcgcttgaatgagttcgtctaacgcactaaagaactggccatgactttgttcaaaagctaaatatctttctaggatgttctctttttcgattgccttcaataattgtgtatgaacacttcttgatttcactgcatagacttgttgcatatccggcttcgtattgggcgccgtcaattgtcgatgcaagtcttcttcttttcgctgtaactggctaaccttggccatcgcttcttgtaagatttctgcatcaattctggcagaaggcgaactatccacttggctcccgaactcgcgaatatattgcgctagtcgctcttcgctttcatccagtgcctcaatgatgctctggcaaatacttgtataggtactagaaaaataccgtttggaggtactaactgcttccccttttaaacgattgtcctgggcgtaatccatcgctgcttctttaatttttctaatcatcgctttggcttccgcattactacttcgcaaaccgtggagaaagtcattcaattccgcaatatctatccggctcacttgctccactccttttgtaaggtggcttgtttggtttctaacgtgtggagcctggccttattttcttgtaattccgtgtctaaatcgcttcttttatcctggagatcacgcctccaagcctgagattcttcgtgttgctgctcttctaaaaaacgatgaaaaccactggcttcttcaccttgccagccactgcgtaaaaagtctaataacaccagtttttcttgtgttaattggtggctgtcctcttctaaccaatcttgttcattttgttttcttctcgtttgatcgacatccgtttctgccattattttcgcttttttaatttgttggagttgttgttctagttggcggtgtgcgctatccaattaacgcacctccaactgattgattttttgtcccatgacctggtcttgcttggcataggcaatacccattttctttaatcggcccgcatcttgcttggtcacgtgttgaaaatcctccactacgcctaccaaatcaatcaatgccgaccgcaattgatcaattgaattggctctggaataagccatgttcccgtttttcagtggcaaataacttcccgtactttcacttgccaatttggttgcgtgttgttggaaggttacttcgctaacttttatttctctcatctgcatgcttcctctctatgtaaatccttccccctcattatagcaccggtagcacacctcttttgtgagcattctgtgaaacaattcattgaaaaacagcttaaaatcagctttttaagtgaaaaaattaacatttcatcttctaactaagtcaataccaaaaagcctctctttaaagacaggcttttgggctattttcttttggttgtcagctacactctatctctttccagcacagtggcggccgctcangcagcatctagatggcccatgag

SEQ ID NO: 3526 - DNA, 2391 bp, Listeria monocytogenes 4b
  misc_feature (1)..(end): n can be any nucleotide: a,g,c or t/u
tcacgtcgttaccgtatagaattttgcgtaatgtcatggagtttgttactttttggccgtttagttcaacaataacatcgtattgtttcaagcctgctttgtctgctgcagaaccggatactacttgttgtaccattgcgccgtaatctacgctatcaggtaatttcaagatatttttttgttgtgtttctggaattgtatcaacatcacgtaaggatacgcctagagatggacgttctacttcgccttttgtttctagttgttcgatgattggttctactgtgttacttggaattgcaaagctaataccttctacattttccatcgaaattttcattgagttaataccaattacttggccttcaatattaattaaagctccaccactgttaccagggttaattgctgcatctgtttggataacatctgcttcccagtcttctgttccgtcgccatttgtatcaactggtactgcacggtttagaccagaaataataccttgtgttacagaaccggaaaattctgttcctagtgggctaccaattgcaattgctggttcaccaagttttaatgaatctgaatcgccgaatgcagcgactgtagtaacatttttatcatcaatttcaagaacagctaaatcgttccattcgtctgtccctagtaattttgcttcggattttttaccgtttgtaaaagttacttctaatttatttgcatcagcaacaacgtgattatttgttacgatgtaggcttttccatttgcctttttataaataacaccagatcctgaggaagcttcttgttcagaagtcgttgttccatcaagggatgaagatgattggtaatttagaacactcactaccgcatcttgtactttgtctactgcttttgttacatctgatgttgtatctactgaaactttttctactttggtagctttattatttgagtttgaagttgtatctgcattgtcaccattatcccaagcgacaaagaaaataataagtcctccgataataacaccaataagtgctgttaaaaagtaaccgataaagtgtttgccgcgtttcggtggttcaccattcccgttaccacttccgccattattcactctattaggtggaactgccccgccaccagttgtaccagcgcgtcttggccctggagccggtctagcaggttctggttctttattacttgcttcttcaaaaaatgcatttgtagaactcgcctcggctgcatcttctgtcgctccggcaaatttctccccttctggggtcacgccttctacaataggagtttcttggactggttgcgcgctctccggtgtatgtaaagtatcctcgacctctctttttggcgtgctttcattctcgctgttttcatttaaattcttttctttctcgtccatgtcttccttcctctctgcaaatttcgcatttatatacttccataataaaccccaaatatgaaaaaacgatgaaaaagctttaaaaaaacggtgaaacttaaatagtaaagatagatgtagcattatcagggtctgtgtcaaaaatttctagtttacccccaacatcaataccttctgccataagtgtttgtgttacgctcattctcgcaagttctttcatattgttgtctttactaaggtgtcccaaataaattcgttttgtttgatcggtaatgacttcgctcattgctattgcagcgtcctcattgctcacgtgtccctcgtcaccaagaattctgcgttttacattccacggatagcgtcccattcgaagcatttctacatcatgattactttcaaaaagataagcatcagcccccgcaatatgacctttcattcggtcgcttacataaccagtgtccgttatcattacaaattttttattccctttatgaaatatgtaaaacatcggctcaattgcatcatgagagactccaaaggattccacttgcatgctaccaaaggtttttactgtttccatatcaaattggaatttttgatctgaagacacttcgccaatcatattatccattgctttccacgttttcgcgttagcataaatagggagtttgtatttccgagcaagcacaccaagacctttaatatgatctgaatgttcatgagtaattagaatcgcgtctaaatcgttcatatcacgaccaacttgcgcgaataatccttccattttctttccactcaaaccacaatcgatcagaattttttggtctcctgtttcgacaagtgtggcattccctgagcttccactggctaatatactaaatcggatttgatccgtatctttttccgtctttccagcacagtggcggccgtncaggcagcgtcccagtggcccacagttcnnnncnaaaaggntcagctct

SEQ ID NO: 3527 - DNA, 1409 bp, Listeria monocytogenes 4b
  misc_feature (1)..(end): n can be any nucleotide: a,g,c or t/u
tggtgaatacgttcccgggccttgtacactccgcccgtcacagcacgagagtatgtacgacacgccagtagtcggtatggcaacctttatggcgccagccgccgaaggtgggacagataattggggtgaagtcgtaacaaggtagccgtatcggaaggtgcggctggatcacctcctttctaaggaaaaggaaacctgtgagttttcgttcttctctatttgttcagttttgagaggttactctcttttatgtcagataaagtatgcaaggcactatgcttgaagcatcgcgccactacatttttgacgggcctatagctcagctggttagagcgcacgcctgataagcgtgaggtcgatggttcgagtccatttaggcccactttttctttctgacataagaaatacaaataatcatacccttttacggggccttagctcagctgggagagcgcctgctttgcacgcaggaggtcagcggttcgatcccgctaggctccaccaaaattgttctttgaaaactagataagaaagttagtaaagttagcatagataatttattatttatgacacaagtaaccgagaatcatctgaaagtgaatctttcatctgattggaagtatcatcgctgatacggaaaatcagaaaaacaacctttacttcgtagaagtaaattggttaagttagaaagggcgcacggtggatgccttggcactaggagccgaagaaggacgggactaacaccgatatgctttggggagctgtacgtaagcgttgatccagagatttccgaatgggggaacccactatctttagtcggatagtatccttacgtgaatacatagcgtgaggaaggcagacccagggaactgaaacatctaagtacctggaggaagagaaagaaaaatcgatttcctgagtagcggcgagcgaaacggaaagagcccaaaccaagaagcaagcttcttggggttgtaggacactctatacggagttacaaaagaaagttataaatgaagcggtctggaaaggcccgccaaagacggtaacagcccggtagttgaaatggctttccctccagagtggatcctgagtacggcggaacacgtgaaattccgtcggaatccgggaggaccatctcccaaggctaaatactccctagtgaccgatagtgaaccagtaccgtgagggaaaggtgaaaagcaccccggaaggggagtgaaacagttcctgaaaccgtgtgcctacaagtagttagagcccgttaatgggtgatagcgtgccttttgtagaatgaaccggcgagttacgatttgttgcaaggttaagcggaaaaagcggagccgtagcgaaagcgagtctgaatagggcgcataagtaacaggtcgtagacccgaaccaggtgatct

SEQ ID NO: 3528 - DNA, 2146 bp, Listeria monocytogenes 4b
  misc_feature (1)..(end): n can be any nucleotide: a,g,c or t/u
aagtactatgttcagaaattggtataaatcttttagaacacctgatgtattagcgagtacagatgatgaagattcttatgcatatacaaaaagttactctgttgtaaatggaatgaatcaagtagatgaaagaggaactaatatcttttcacctaagaatgtctcgactaccctttattatccagaaggtatggaatatgtcggggtagtaaatgaaaaatatgcacttttaaatgagaatgctaatactacgattactcattatccggaagagaataaagtggtgttcgattttaaacaacagaactttaaaggagtaacagatacggtatatgcgataaaatataaaataccaaaaggaacgccagcaggaacatataccgctcctaaagtgccacatgcagtcatcacgacatatgacgataaagtatttgaatctgatgcattaacaaacaattctacagatttaacaactaagacaacgttagatgcttgccgagttgtagattcgaccgaaaataaaatggcactaatcgtgggaaacaaaaatattaatccagataatgaaacttgggcagggaatgttcgaattaataataaagatactgccgggacaaaaactaatcaagtcttccaaattgaatttgattcaaactgggaagcttcaattgttaacatcccatttgatgggaatagaaaagataatgatatcactaatattcaatacaaaactaattttgatgatacttatcaaacatacaatgggaatcttcctaagaatagtatgaaaaatattgctatcttagaagctgatgcagtcggacttcaaccaggagaatactttactgaggtgaaagcgaatgtaggcgatttttctacaggatatacaagctactcagaatctggtggttttggtgaggaatcaacaaactcctatggtattgtcaaaccaggcatttcttctgttcaatttaaagtatccatttgggatgaggcagatgaagtaaatacgaaagtctcgggtacttctgtttatagtgttgccgataatattacgacagcggcgaacggaacagctaatttttataatgaacaaggacaagtaatcaaaactgctggagctggagataaatttactacaaaagctacattggtattatttaactatccatacgggacacgtacagtccttaatgatcctgaagtgtatcttcgtcaattggatggtactaaaattcttccgtcttctattaagttaacggatcaagatggagaagagatcgagttctctattaaaatagaaaccgccaagaatggagagaaagtgtatgttttaaaaacaaaagatgcaacagttggtaggtatgttggttatccttctaaacataaatttttaaatataagttatgatactacgattgatgtaacattagataaaagtcttcatactgacatccaacaacttcttgcttggggaggcccaaatgtaaaagctgctacagctgcgaatactttcatggatacaggtcttgatgtcaatcaaaatggaatagaaaatgaacgtctgctttctgcgaatagcagtactttaagtgttccaaagcaagatgcagtcacagtagaaacattcttaaatttggctggagaaggagcaaaagcatcttatgtagaaggtgacgatagtacagtttcctattttacaccaggaacggaagcggattatacagtccgtgttacaaatacatctactggtatagcaagtgcttttgaactctatattccaattccaaagaccggacaaaattttggttctaaattccaaacggagacatttaagtgggatatgaaactaaatgatgctgtgcaattaacagatgaacaaaaagcacaatttgatattagttatgcaacagaagcaaataaaaataactatgaatcagaaagtgtctatagcgctgttccctctgattatgggaaagtcaacatggttcgtatcaaagtgaagacaaagattgatcccggtgaaacacaaacaatcaaagttccactaaaagtagatgaaacttttaattctgctacagagggaaataaaataagtgaacgcgatgtatataacccttactatcgtgtaactacgaatgcttat

SEQ ID NO: 3529 - DNA, 2714 bp, Listeria monocytogenes 4b
  misc_feature (1)..(end): n can be any nucleotide: a,g,c or t/u
ttagatgcgattgtcattgattttccagtgcggtataaaagatgatttgcatccaaacatatgtaagatatgattcaatcttttaaattaattggcttagtaccaatactgtctggtatgcgtccgagtttcgctcaacgcacaatccaagtaggttctaacatttcaaaactcgaatcatttggctcgctagaacaagcattaaccaatttaggtttataaaatacagatgaatggcactccgttgtcattcattttttgctataagaaaaagttatcgaattatagcggattctctttgtttacttatcgcccgtttttaagtacaatagatgagagagaccaatcgtttcaagaattgaaggaggaaacgtggatgactaattggaaagaaaaagcaaaagcatcatttcaactaaacgacaaaacgtatcattattacaaacttaaaaccttagaagaggacaagcttacaaacatcgagaaattaccttattctgtacgtgttttacttgaatccgttttaagacaagcagatggcaaagtaattaaggactcacatgtagaagatttagcccattggtctaaagatggaaacgaaggcgaagtaccattcaaaccagcccgtgttattttacaagatttcacaggcgttccagcagtcgttgatttagcttctttacgtaaagcaatggcggaccttggcggcgatccagaaaaaatcaatccggaaatcccagttgacttagtagtcgatcactcggtacaagtagacagctatgcgaatccagaagcactgaaaatcaatatggaactcgaattcaagcgcaacatggaacgttaccagtttttaaattgggcgcaaaaagcatttgataactatcgcgcagtaccacctgcaacaggtatcgttcaccaagttaacttagagtatttagcaaacgtcggtttgcgaatgaagtagcaatacggcgaatttgtagcgtttccagattcccttgtcggaacaaatagccatgcgtctatgattaacggtattggtgtattaggttggggcgtgggcggtattgaagcagaagccggcatgctcggtcaaccatcttacttcccaattccagatgttatcggtgtgaaattgctaggtgctttaccaaacggcgcaacagcaactgattttgctttaaaagtaacccaagtcttacgggaacaaaaagtagtaggtaaatttgttgaattttatggtccgggtgttgcgacacttccgcttgctgaccgtgcaaccgttgcgaatatggcctccagaatacggtgcaacttgtgggttcttcccagtagataaagaagcccttaattatttaaaactaactggccgtgacaaagaacaaatcgaattagtagaagcttatttagaagcaaacgatttattcttcacacctgaaaaagtagaaccaaactacacgcaaatcgtggaaatcgatctttccgcgattgaaccaaacttggcggggccaaaacgtccccaagatttgatccctctttcgaaaatgaaagaaacattccgggaatcgattactgccaaagcaggcaaccaaggtttcggactagataaatcagccttagacaaagaagtaaccgttacttttggcaatggcgatcaatccactatgaaaactggttcggttgcaatcgcggcgattacaagttgtacgaacacttctaacccatatgttatgttaagcgctggtttagttgctaaaaaagcagtcgaaaaaggcttagaagtaccaaaattcgtaaaaacatccttggcgccaggctctaaagttgtaacaggttacttggaaaaagccggcttacttccatatttagaaaaacttgggtttgaccttgttggctatggttgtacgacgtgaaacggtaattctggtccattaaaagaagaaattgaagaagcaatacaagacagtgatttgcttgtttctgcggtattaagtggtaaccgtaactttgaagggcgtattcatgcacttgtgaaagcaaacttcctagcttcaccaccactagtcgttgcctatgcgctcgctgggacaacaaatgtcgacatgctaacagaaccaattggacgcggtaataatggcgaagaagtcttcttagacgatatttggccaagttcagaagaagtgaaggcattagtagaagaaacggtaacaccagaacttttccgtgaacaatatgctcatgtatttgatgaaaacgaagcttggaatgcgattgaaacaacagaagatgccctatacaaatgggatgaaaactctacgtatattgcgaacccaccattctttgataatttagcgaaagaagctggcaaagtagaaagcttatctggcctccgcgttattggtaaatttggtgattctgttacaaccgatcatatttcaccagccggagcaatcggcaaagataccccagctgggaaattccttcaagaagaaggcgtggcaattcgtgatttcaactcatacggttctcgtcgtggtcatcatgatgtgatgatgcgcgggacatttgcgaatattcgtattaaaaatcaaatcgcaccaggtacagaaggtggctatacgacttactggccaactggcgaagtgatgtcaatttatgatgcttctagaaaatatatcgaaaataatactggtttagtcattcttgctggtgac

SEQ ID NO: 3530 - DNA, 2759 bp, Listeria monocytogenes 4b
  misc_feature (1)..(end): n can be any nucleotide: a,g,c or t/u
atcacggatattaattcgattttgcgattacttttctcgcgtgtcggcaagcctagtatcgggacagcaaatttattttcttttaacgaccctgctggtatgtgccctgattgccatggtgttggacaaaaagtttcggttgatttagtcaaattacttgatccaaataaatcgctcaaagaaggcgccatcttatttccgacgttttcggtagattcatggtactggaattcctatgcttattccggcttttttgatgtgaataaaaaaataaaagattatactgacgaagaatacgatatgttgttacatgggaaagatattaaagttttcctagaaacacccatgggaagcatgaacgctacatatgaagggttgattccaaaattcaatcgtttgtatattcaaaaagaaggcgaaatgtccgcctctactaaaaaacgtgtcgataaattcacccatattgcgccttgtacaacttgcgaaggcacgagactctccgcgcaagcattatcttgtacaataaatggtgcaaatatcgccgacttcacagcgatgcaattagatgaattaaaagcaacgattgcgagtattgatgaccctatcgctgctccaatggtcaaaagtgtcacagagcgattgcaacatttgattgatattggtcttggttatatgacacttgaccgccaaactgcttctctttctggtggtgaatcacaacgcgtcaaaatgattcgtcatttgaatagtagcttaactgacttgctttatattttcgatgaaccaagtatcggtcttcatccacgagatgttcatcgactcaatgaattactcgtgaaattgcgcgacaaaggaaatacgattctcgtggtggaacatgacccagatgtgatcaaaattgccgaccatattgtcgatgtcggtccgcacgcaggaaaacatggcggtgagattcagtttgtcggaagttacaccgatttgctgaaatcagacacactaactggcaagttcctcaatcgccatttaccaattaatagcaaaccgagacaaccaaaaggctttttaacaactgaaaaaagtagtcgctttaacctaaaagatattcaggccaacattccaaaagaaattcttactgtagtaactggcgtggctggttcgggtaagagtaccttgattcattctgttttcctaaaagaatatccagatgcgatagtgatcgaccaatcagccgctcatgccaatattcgctctaatcctgccacctatactgggataatggacccgattcgaaaagcatttggaaaagaaaatgatgtcagtccatcactctttagttacaattccaaaggcgcctgcgaaaactgtaaaggacttggtttcacaactatggatttagcttttatggattcgattcgcacaccttgcgaagtatgtcacggcaagcgattccaagattctgttttgcaatataagctaaatggtaaatccattagcgatgtgttagaactaactgtctcagaagcactcgatttctttacggataaaaaaatcttgaagaaaattgaggcaatggaagaggttggaattggttatgtcacgcttggccaagcacttagcaccttatcaggcggtgagtgccaacgtttaaaactcgccaatgagcttcataaaaaagggtcgatttatattatggatgaaccaacaactggtctacacatgtcagacatcgaacatattttgacgattatccactcacttgtaaataaaggaaataccgttattgtaattgaacataatgtcgatattattcgtaacgcagactggattatcgaccttggcccagaaggcggaagtgctggcggacaaattatcttcgaaggcgctccccttgatttacttgaaaataaacaatcattaactgccaaatatctttaatgaaaaaagccgttttgtctatagcagacaaaatggctttttttattgtagtttttctaaataatccacagcatcttggaaagttttaactggaacgattttcattttggagtcaatgtcttttgctgttttaactgctgtatcgtaattactttcgatacttgggtcgctttttttcatttcatcggtaattggatcattgggagcaaagaaaaccttcgcaccgcttttatctgcggcaacgaccttttgatcaattccgccgattctaccaacagttccgtcagggtcaatcgtaccagttccggcgatttttttgccatctgtaagatcatttttttggaaacggctgtaaatttctaaactgaacattaaaccggcagaaggtccaccgattttttctgagtcgattttcacagttggatctgcggtgattttttcatcatccacaagcgtgataccgattcctggagtgccttttttatcaattgctgttaatttgatgttggcttgctcatttttgtcgccgtgtttgtagtttattttgactgtgtctcccacttttttactgtgaatataatcaataaattcttggcttgatttaaacgcattcccatcaatttctgtgattaggtcgccagcgtgaaggacatcggctgctggaacgtcatcttttacgcttaatacgtatacgccatcataagtgactttgacttcttgaccggctgctttataagccacttgaatggcattatttttggattcgttcatcatttgcatttggcgaacgttatattcttcgtcgctttcattctcgtatttga

SEQ ID NO: 3531 - DNA, 1955 bp, Listeria monocytogenes 4b
  misc_feature (1)..(end): n can be any nucleotide: a,g,c or t/u
aaaatgttgcgggagataatgcttccattgaaatgttgattgatgcggggacagaaccgcatgattacgagccaagcgcaaaggatattgccaaaatcgaagcggctgatgttttcgtttataacagtgaagacatggaaacttgggtgccgagcgtacttaaaagcttagattcgaaaaaattaaccgtgattgacgcgagtaaaggaatcgagctagtagaaggaaccgaagaagaagaccatgatcatgagcacgaagaaggacaccaccatgaacatgatcctcacgtatggctaagcccagtccttgccgaacaagaagtgactaatatccagaacggtcttacaaaagcagataaaacaaatgcagatacatacaaaaagaacgcagaaacatataaagagaaattaaaaacactcgacaacaaatttaaaacagcttttgaaggagcaaaacaacgcgatttcgtaacccaacatgcagccttccaatatttagcaaaagagtatgacttgcatcaagtggcaatcgccggcctttcacctgaccaagaaccaagcccagcacgattagcggaattacaaaaatacgtgaaagaaaataatatcagcaccatttattttgaagaagtagcttcaccaaaagttgcagaaacacttgcaaacgaaacgggagcaaaactagaagtactaagccctatcgaaggaattacggataaagaacagaaaaaaggcatggattatattgcttatatggaacaaaacttacaagccttgcaaaaaacaataaaataaggaagcgatcaaatgaaatacatcgatatagccaatattggttttaaatacgaatccgaaccagtgcttgaaaacatttcttttcaagtgagtgcgggagaatttattatactaacaggagaaaacggagcagctaaatcaacactgctccgtattattttgggcattttacaacccgataaaggttccgttactttcgccaaaaagaacgcagatggcgggcgacttttgacaggttatgtaccacaacaaatagcatcatttaatgcgggttttccaagtacagttctcgaactagtacggtcaggtcgttttccaaatggtaaatggttcaaacggctgactacaaaagatcatgcgcatgttgaaaaagcattgaaatctgtagaaatgtgggattatcggcataaacgtatcggtgagctatcaggtggtcaaaaacaacggatttgcctggcccgaatgtttgcaaccgacccagatatattaattttggatgaaccgcaaacggcaatggataaacaaagtaaaatccgtttttatgatttattaaggcatgaagcacaagtacatggtaaagcgattttaatggtaacgcacgattgtgaagaaatggtttattttgtcgcttagcctattcgccttattagaaaggaggatgtgtcatggaaatgtttctctctggctttctgctcagagcctccccccgcctccctgatcccccgctgtgttcgttcctcttttcgcgagcccttttgcttttccccccatcgtgccccctcgcggctcccctttccctccccccccccttccccccctccctcttccccgcccccttcctcctccctccctcccctcctcttcccctcccctcctcgcttccccccctttttttttcttccccccccccccccctctcccccccccccctcctcccctccccctcccccccccccgcgccttgtgtcttcctccccccccctccttcttttcgccgcccctcccgtctccgcccttccctcttcccccctctctcttcccctttttgtgctctttttcctcccccctcctcgccttttcctcctcccttgcgttccccccccctcccccccccccctcccccccgcccctctgtctcctaaccaaaaacaaaaaaaa

SEQ ID NO: 3532 - DNA, 3159 bp, Listeria monocytogenes 4b
  misc_feature (1)..(end): n can be any nucleotide: a,g,c or t/u
aatggatcttgtggcgctaaaacagtcgtattttcaaccaattgatatttgtccgtctctattttttcaaaaaagcgtactgccgaaaactcgctatcacgcgactccactcgacctgcaatatattctttcccaagccaatgaaatggtgccgtaatattgtatacatctttgtcgccagcaccatttaacgtgatacgtgtcccaaacgcagcactattttcccggtaaacttgcaacaaattttcgattgtattcattctattcctccactctaagcgcaattccagtatgcgcacccattctaatgccatttcctaccatcactgcttctccaaaaacaagctgatagttcccctgaagcggataagttacctcttcctcaccaaaatgaagtaaaaagataaattcgcctcgctgataactgagtacttctccatccaacttcaaaaaagtatattccatctctttaaaatcattttctttacgaaatgcgagtaatccttgataaaatcgccacatcgttcgtgcttctttttccggcaaagtcgccattttaatccatgattcacctagagtaaatggctttccatctgggaaaatcatcggcccacgtgctttgtcacgcgttttttcaatagcaatttcgagtgcttgtttttcatctgaaccagtttgtaaagcttgatagtacgcggctgtcccttgaatatcgcgcatctcttttacggaagaaaacgttaaatcaggcatacccacctcttctccgtagtatataaacggcacgcctttcgcagttaacattaaaaatgcgagcaactgggtctttactatgtctccagatgcgaggcgacttgtgggcctgctcatatcatgacttccaaagagaagcgtcggccactgcccttcatttaatgccgtttccatctcattcaatgtcgtaaatacagattttgcatctagctgatcaacactgccaaaattaaaattaaatgtgacatctagcatttttttcgagctatatctagcaatttcagctaattggtccgagctaatttcgcctactagaaacacgtcgcgctcttttcgacaaaaggaagcgatatcctctaacgcttgttctaagccactctgattacggtcatacacatgctccatttcaccagatgtgactggattatccgtaaattcaagtacgagcgttaaattattgataacatctaacctgaatcccgccactccctcattcaaccaaaacactaaaacttgctccatttctgcgcgaacagcttcattcgcccagtttaagtcagcctgttcttttgcaaaactatgatagtaatactcgccagtaagttcatccatttcccaagcagaaccaccaaaaaacgattcccaattatttggtttttctcgccaaatataataatctcgtttaggattcgtcttactactacgcgactccttaaaccaagcatgctctgttgacgaatgatttaatactaagtcgataataacttttattcctcgagcatctgccgctttcataaacgctcgaaaatcagtcatatcgccgtaatccgggttaatatcgcagtaatcagacacatcataaccattatccacttgcggtgaaggataaaatggagtcaaccaaataccatcaattcccaaatccactagataatctaatctgctcgttaaacctttaaaatcacctaaaccatcgccattactatcttgaaatgatttcatataaatttcataaaacacactacgacgccaaaattccaagttcagtcgctccttttatttcaaagtaaattgcattccttcttggaatttcttcgagaagaataagaacaagataataagtggaagtgttagtaacacagatgccgcatacattggcccaggataggttgcatatggtccaaacatttgcgagattagcacattcaatgtgaccgttccatcactcttcgttacaagcatatcccaaagtaaattcgtccatctgtctgtgaaaaggaataagaaaataacggtcgtaattgatttagacattggcagcacaacccgaaacaaaatcttcaaatcactcgccccgtccagtttggcagcttcaattaatgtatctggaatcgctttgaaaaagttggtatacataaatacagcccataagctaagcatagtcgggataatcattcccgcataggtatccaataaaccaaagtccgtaatcattaaaaactgcggaatcagcaagatgattgccggaaaaaacatttgaaataaaatcgcattattaacaattttcttgcccttaaaatccacttttgctagtgcgtagcctaccattaggccgaaaagcaacatcaagcctgtcgcaatggtggaaacaataattgtattaataaacgcatgaatccacggcgccggtgccgcaacaactgaattaccaaataaccaatcccacgaacgagtagtgaattctgtaggaatcaactttttatctacctgatcccaagcagcaaatgagtttaatactaaataaataaaaggataaatcatgactagcataagtaatgttgtcagtatatagcgaacaattttacccgctttactattatgtccaaccatttctttgaccccatttctcaagcattttcttaataacaccaatcgatgcaaatgttacagtagcagccattagagaaatcgctgaagcataaccagaattcaagttaacgaatgcttggttaaaaatttccatttgccatgtatttgttgcaaagttcggtccaccaccagtcaattggtaaacttcggtaaaaatacaatcgccaatcccatacaaaccaatcgcagaagcaagcaaaatcgccaaagtccgcgaagttttaacaacgctctgataaatcgccggcaaagcgagcacaaagaacaccccagacaccaccgaccaaaccaaaaacgctccccgcaccggactagccacattcccaaacacactcttataacccgcgtcatttgatttaattctgggtaaaaaatcccaagtatgtaaggcgttagaaaatcactcaaaacgccgagtaataaaaagtaaaaaccgtatttttttagaaatttcatttggatcctncttttatgaaa

SEQ ID NO: 3533 - DNA, 1768 bp, Listeria monocytogenes 4b
  misc_feature (1)..(end): n can be any nucleotide: a,g,c or t/u
aaccgcgatagccatttcttcattaacacaagctaaaccgaaaccactaaaagcaacagtatcgccatcttttaataattttgctgcttcactagcttttattacttttgacaaattcctcactcctcattgttcaattattcacatatatttgtaatgacatgctgttctttataaagcaacttccgtgccaacatcaaaaatagctctataaagcactttataaattcaaatattatttattgtcgcaaaaaagagacgtcaaaatgatggtttttacaaacagaagtcgcgaaaacgcaacaaaaaaggcctaatcgcaaaatccgattaggccttctatttaatgaagtgtttttagttttcgatataaaacagaacgatgaattccaagtgtactagcagcttttgtcacgtttccattactttcttcgagcactcgcaatataaaatgtttttccacgtcttgcaaataatctttcaaataaagtgagtctttttttgtttgttctttaaaatgtaagtctagtgcgaaatcatctatttctgcaacagtcacttctttatttccagacataacaactaatcgctcaatctggtttctaagttcacgaacatttcctggccaattatgagaaagtaattctttcgttttatcgccacttaactgaaaatctttttggtatttttgattgaatttttgtatgaactgacgtgcaagaccaataatatcttgcggtcgctctctgagtgctggaatgtgaaccggcacaacattaatacgataatataaatcacgcctaaatgttcctttttcaaccatttccccaaggtttcgattggtcgctgaaatcagtctaaagcggcgtttcgtttcggttgttgaaccaagccttcttacctctccagtttcaagcactcggagcattttcgcttgtagctctagtggcatttcagaaatttcatctaaaaataatgtgccaccatcagctagttcaagcatcccgggtttttcaatatccgcaccggtaaatgaacctttttcatgtccaaaaagctcagattcaaataatgcttttgggattgccgcacagttaatcgagataaaaggtccagcagcttgttcacttttttcatgaatatagcgcgacaagacttctttaccagtaccggactccccgtataataagactttactgtcaaacggagcgatctggttgcacacacgaactatctgcttcatcgcgacgctctctgctactatcacagtgccatcattttctttataatcctcaagaagaagcgactctttattccccgaaattgcctcaccacgccatgttttaaaactatctggttgcgtttcatctgacatagtaacaactaaatgcaccgtgccatcaggataaagtattggcgtagaagtcgagcggatgctaaaacctttcttcgtattgatcacttttgttttcttttgttttgtgcggattgcttctagtgtgacagaatcattgtatacaccgtcttccactaggtctcttacattacaacgaagcaattcttcgagcgacattccaactgtgagcgcagtgaatttattagaaattaaaatattaccatctgcatccgtgacaaaaagtgtcgttggcatgtccttatttaattcaccaaatgactgtactcccagcaagttatccattaagtcaaacattaaaagctcatccttttggactagtgtcctcagttatttgctcatcagtacacaata

SEQ ID NO: 3534 - DNA, 2267 bp, Listeria monocytogenes 4b
  misc_feature (1)..(end): n can be any nucleotide: a,g,c or t/u
gcgtgtaaggcaacctagactgatgccttgagcggcgcgaacgtgtcgccggaaagtttagtatgattactaaaaattcacaaaaacagataaggggaatacagcaaaaaaaacaaagggggaagactttatttttttgctgtatttactataatagtgtaatttagtttttacatgcatttttgtttacaaattagcaactctttcctttataaaattaagtctagatacttcaacattttgaactaaatgccatctaaattcatcatagctgaaacctttagttatttttaacagatgacggtacaaactacaaatcaaatgtttaccacaaatcaaatcaaacacattaggatttatattgtgaatttttgctttcatttcttgctctactaaatctatgtttactgtacaattacttatttgctttttcaaatcctcatatctcgtcatattgatagatccatcgatcatattaattactttatattcagaatcccctacattaggaatccctaattccttttcttgaattatacaatataaaataaaaatgttttctatattgtataatgtattagaaagccattcagaataagctattttagtccttacatcattcttcagcattttcatttttccttgcataaaagttactaccgattcttcattcaaaaaataattttcaatattatatgattgcaaataaataatatgtggatgtgattccattactatattatccaaatattgatcaaaatcaccatctaaaagatatatgttttttatattattattgctagaaacatgttctttacagtctctaaatgcggataaaacttgtggtttaccccccagtgcatatatcgtctgtatatgatattcatcagcaaaaactttagacaatatttcctcatattcatattcttttcctttatcttcaacaaaaatatttatttcatttatttctttaaaaaagagatacctattttttaaagcatcttcagagtattgtaattgattcatattattgagtttctcctatctatctatctatctatctatctatctatctatctatctatctatctatctatctatctatctatctatctatctatctatctatctatctatctatctatctatctatctttttctttaactcgaatgttttattataatatttacctattatttctggcgaatgagtagcaaatataaattgtatatttttatttaattctatagttttttcaataaataatttttgccaagataagtgtaacgatagttcaggttcatcaacaataaatatacctcttttattttcatttactccaaaaattaagtttgcataaaaaattacaatttgcttttccccagaagaaagtttatatatacttaattgttttttttcaattacattttgtaaatatatacctccgttttcatcaattaatatttcttttttttctgtaccatcggttgatatgaaactgttaatagtttcacaaaataaattaacagattcaactacttttgcttttttagtttccatatcctcggctagttttactatattttttatttttgctatttcattatattttaaaatcaactgaattgaaactgaattatcctcaatattttcattctctttaatttctcttatataattatcaaaaaaattaacataatttttttcttcaatttgggttatttgattcaaatttttcaatatgtttatataagatgttttgatatctttgatttcttctacttttaagtttttaacctcattaaatatttcttctatactaaaagtaagcttgtgtatatctatagaggatcttagtatttgatttctgaagttatcatttagtctgttgattctagtattattcctcattacttttgtctttattaaatattgaaccttcttcatcgacttatctctttccatatagtaatcattttcatcctcctcaactccatgcatcattgcatttattgttctttcacgatgtaatctattatcatataacatattattatctaatgaaatatgtctatttagtggaaggtacacatagttaaacatatctgctatttcttttaaaaatttattttcaccaaaaaagtctttttctagatttctgtttatagattgacgataattactcaaagattcattaaatttttctaaaatatatctctgaccattgaatgtaacttcaatacataggggtgtagttctaagtatt

SEQ ID NO: 3535 - DNA, 1556 bp, Listeria monocytogenes 4b
  misc_feature (1)..(end): n can be any nucleotide: a,g,c or t/u
gttatttcacgcgaaaaacatgcactgaatgaaacagataatgcgcttgataatttacaagaacgtcttttagttgaaacggaaaaactggaacaactagaaggagagcgaaatctccaattagaacgtaaaaagcacagtagcgaaaatgaacaagtttacgcagaaacactggcggcaattacggaaaaaattactgccttggaagagcaaaaagaagttctaagtagctcaaaactcgaaaaagaaacagcacttgaaattgcggtcaaagcgaaaaaagagctagaagtaacacttgccaaatacgatgatttatccgaagaagcaatcgaaaaccgcaaaagtgattatattgatctgcgccacacgcaaacgacaattaataatgatttaggttatattgagcgccaaatcggtcagatcacgagtcgaattgacaagttagatttagaaaatagccatcatatcgatgatagaaaagatatgctcgctcaaatagaaacaaccaaaacacatttaacaaaaatccaaagtgagcttacggaacaaatggaaatttaccgtgaagtacagcaaactttagcgaaacaagaagctgtttttggaacgcaagaacgtgcgctttataaacattatgaaacagtgcaacaaatgaaatcgcggaaggaaacattagaggagttggcggatgattatgctggctttttccaaggtgtccgggaagtcttaaaagcgaaaaaagaaattccagggattttaggtgcgttagtagaactcgtagaaatacccgcgaagtaccaacaagccatggaaacagcgcttggggcaagtgcgcagaacgttgtcgtagaagatgaccgcgttgctcgtgaagccatcagtttcttgaagaaaacgaaaagtggccgcgcaactttcttaccactttcgactattcaacctcgcgaacttccagctgcaacgaaaaacgctttaagcaaccaacctgcttttatcgcacttgcaagtgaagtcatttcttttgatgaaaaagtttctccggttattttgaatgctctagggacaacgattttggcgaaagatttaaaaggggcgaatacgctcgctcgcttagtcaactttaggtatcgcattgtgacactagaaggtgacgtcgtgaatgccggtggttcgatgactggtggagcaaccaaaggcggaaaatcgtctattttaacgagaaaacatgagttaggccaattagcagagaaaattaccgagttaaacgaagccactcgtgaaatggaatctgcggttcaactagctaaagatagcatggcgaaaaaacgtgaagaactcgaagaaacacgaggaatcggtgaaaatttacgtttacaagaaaaagaattacttggaaaactagaccgagaaactgagaatctagagcgcttcaataaacaactacaactatacgatattgaaaaagcagacggtagcgaagaattaaacaaactactggagcgaaaagaaactttactacatgaacaagtcgaaatcgcaaaacaaatcgaagc

SEQ ID NO: 3536 - DNA, 2610 bp, Listeria monocytogenes 4b
  misc_feature (1)..(end): n can be any nucleotide: a,g,c or t/u
aatatgtcccttcagatgaggatgctccgcgagaagatgattttattttggaaacaatgccgtcctatgaaccagaatctcaagcggagcaagaagagcatacgaaagaacgtattcctaaaatgtatccaattggtcaaatgcatgcaacttatatttttgcgcaaaatgaaaatggcttatatatcattgatcaacatgcagcacaggaacggattaaatacgaattttatcgtgagaaaattggagaagttagtcgcgagttgcaagaattacttgttcctattgtgcttgaatttccagcggatgagtatgttcgtttagaagaacaaaaagctaaattagaagaggtcggcgttttcctagagaacttcgggcaaaatagttttatcattcgtgcgcatccaacttggttcccgaaagaccaagaagaggagatgcttcgggaaattattgatgaagcgttatccgctccaagcataagtattcataaattaagggaagacacagctattatgatgagttgtaaaaaatcaattaaagcaaatcactatttaacaacgcaagacatggaagcattactcgatacactgagagaagcaagcgatccattcacttgtcctcatggacgtccggtgattatccaatactcaacatatgaactagaaaaaatgtttaaacgtgtgatgtaaaagaggaggaaataatttggagttaccattttccaatcaatcaatcatcccagctgcacataatcaaaaagatatggaaaaaattttagagcttgatttgacatatatggtgatgctggaaacacatgtggctcaattaaaagcattagtcaaatacgcacaagccggcgggaaaaaagttttattacatgccgatttagtcaatggactgaaaaatgacgactacgcaatagactttttatgtacagaaatttgtcctgatggtattatttcgactagaggaaatgccattatgaaagctaaacagcacaaaatgctagccatacaacgtcttttcatgattgattcaagcgcctataacaaaggtgtagcattgatacaaaaagtccaacctgattgtattgaacttttaccaggtattattcctgagcaagtacaaaagatgactcaaaagcttcatatccctgtaattgcaggaggattaattgaaactagtgaacaagtcaatcaagtaatagctagcggggccatcgcagttacaacatccaataaacatttatggtaaataaacagctaagtcgtgtagcaataacgacttagctgttcttatgaaaaacaatgaaaacgctatatttacccgtggaacattgctagacaacgttttaagcggtttctaactgttctatataaaatagccacctttaaactgtaccataacaggtaaggggagttggagtggtacagcaaaaattaataattaaaataaaagcaaaattagaatcataataaattagggaaatggctatttaaaggtaattttaagctttttaagtttaaaagacacaaaaaagtcataaaaaagtttgaaaaatattgcacaacacagctgtaacattttccagagaatatgttatgataacagtgtagattatttataaattagtttgctcaaaaaagcacgctcgagaatgaacaataaatggaggttatatgatgactgaacaatggtatgaattcgcaggtggtaactggcaacaagaagtagatgtacgtgactttatcttaaaaaactatcgcttatatgacggtgacgacacattcttagttggcccaaccgaagcaactacaaaactttgggatcaagtaatggacttaactaaaaaagaacgtgaaaacggtggcgtactggatatggataccaaaatcgtttcaaccatcacttcacatgacccaggttacttaaacaaagacttagaaaaagttgtcggtgttcaaactgacgtacctttcaaacgcgctttgcaaccattcggtggaatccgtatggcagaagttgcagctgaatcttatggctttaaagtagacgaagaaattagtcatattttttctgaataccgtaaaacgcataaccaaggtgtatttgatgcttatactgctgaaatgcgcgcagctcgtaaatcaggcgtaattactggtcttccagatgcttatggccgtggccgtattatcggtgactaccgtcgtgtagcactttacggagtagacttcttaattaaacaaaagaaacaagatttaaacaatacaggtttacgtacaatgagcgatgacgttatccgtcaacgtgaagaacttaacgaacaaattcgtgctcttggcgaattaaaagtactaggcgaaaaacatggtttcgatcttggtcgcccagctaaaactgcacaagaagctttccaatggttataccttggttacttagcagcaattaaagaacaaaatggtgctgcaatgagcttaggacgtacatctacattccttgatatttatgtagaacgtgatcttcgtaacggcttaattactgaagaagatngcgcaganatcgttgaccacttcatcatgaaattacgccttgtaaaatttgctc

SEQ ID NO: 3537 - DNA, 1622 bp, Listeria monocytogenes 4b
  misc_feature (1)..(end): n can be any nucleotide: a,g,c or t/u
gaaagaatgaagcaactgctgaaaatttttgtgccagtcattgttgtcgcactcctaatgatgctacttgcaacaacgatgaaccgctctgagggctatgctgggagcaatacgctgactatttataactggggcgattacattgatccatcgctcattactaaatttgaaaaagaaacaggcatcaaggtcatttaccaaacatttgattctaatgaagcgatgatgacgaaaattgagcaaggtggaacgacctttgatattgcggtgccaagtgattacgcgattagcaaaatgaaagaagaaaatttgttgatcccacttgatcattccaaattaccaaatgaaaaataccttgatccgcgttttatggatttatcgtttgatgatgataataaatattcgatgccttatttctggggaacgcttggcattatttataataaagaaatgttcccggataaaaatttcgatacgtggaatgcgctatttgatcccgaattgaaaaaccaaattttgctgattgatggggcgcgtgaagtgatggggcttgggctgaatagtctcggttactcactgaacgatacgaataaagctcacctacaagctgccagagacaagctagaaacgatgacaccgaatgttaaagcaattgttggcgatgagattaaacttctcatggcggacaatgaggcgggtgtcgcggttactttctccggagaagcggcggaaatgttaagtgaaaatgaagatttagaatacgtaattccaaaagacggctccaatttatggttcgacaacatggtcatcccaaaaacggcgaaaaatgtcgatggcgcgcataaatttattaacttcatgctaaaaccagagaatgcggcaattaacgctgaatatgttggctatgcaacaccaaatgcaaaagctgtcgaattgttaccaaaagaaatttcgagtgatgaacgtttttatccggatatggatgaactgaataatttagaagtatatgataacctcggtaaacgaatgctgtcgtattataatgaattatttttggagtttaagatgtaccggaaataaagccaccagtatcttcacgtgagttcacaccaaagtcaaaacacgaacattaagcatataacttgtggaatagatcagctatccgctaaaataatgttacgcaatttttttcgaaaaggagaaatggttatgactaaggagaaagtgttatggggttacgatgaaaagactgggccagaaatgtgggggcatatctgctctgactttgaaatcgcacatactggaaaggcacaatcgccagtagatattgaacaagctgacgttgtgaaattaaaaccatcaacaatgaaattttactataaagaaacagactatacgattagaagaattgaacaatcggtgcatgtttttccgcatgacaaagaacaagggttacgctttaacggcgagtattatccgcttgtatcattccatgcacatattccggcggagcatttgcttgacggttatatatatccgattgaatggcattttgttcatgaaaaaccagacggcacaacgcttgtaatgagtgcttggatggaaattgataatacaaataa

SEQ ID NO: 3538 - DNA, 2693 bp, Listeria monocytogenes 4b
  misc_feature (1)..(end): n can be any nucleotide: a,g,c or t/u
tagtctaaataaaaaagaacttttggaagttagaagaaaaagcatgagtatggtcttccaaaactttggtttatttccgaatagaacgattaatcgtaacgtagaatacggccttgaaattcaaggaatggacaaagaagagcgcgagaaaaatgcagcagaatcgcttgcacttgttggtttagctggttacggcgaacaatatccttcgcaactttctggtgggatgcagcaacgtgtagggcttgcgagagcacttgctaacaatccagatattttactcatggatgaagctttctctgcacttgacccacttaacagaaaagatatgcaagatcaattactagatttacaagataaaatgaagaaaacaatcatctttattacccatgatttggatgaggcactacgtattggtgaccacattatgattatgcgtgatggctctgtcgttcaaacaggttccccggaagaaattctggcacatccagcaaatgaatacgttgaaaaattcattgaagatgtggaccgttccaaagtttatacagcgagcaacgtaatgatacgtccagaaatcgttaattttgaaaaagatggtcctcgtgttgcgcttaaacggatgcgtgaggctggaacttccagtgtattcgttgttaaacgtaatcgtgagctggttggtattgtccatgcagcggaagtttctaaactagtaaaagaaaatattacttcactagaaacagctttacatcgtgatgtacctacaactggcctagatacgccacttgcagaaatcatggatactatctcgacaacaacgattccgattgctgtaaccgaagatggaaaattaaaaggaattatcattcgcggatccgttctggccgcactttctggaaacgaggtgaacgttaatgcctaatattccaacgattccattagctagttggattgacaaattagtggatggcttaacgcaatttcgaaggattttttaatgtaattacaaatatcattggcgggattgttgatgcattccaatgggtgttcgatttagttccaccgtggttatttattattttacttgtatttggcacattttgggtaaaccgtaaaggcaaaaaatggggtttaattatctttgaagttgtcggtttactgttaatttggaacttagatttctggcgtgatatgacacaaacattaacgctcgttctgacaagtagtttaattgcgcttgttattggggttccacttggtatttggatggcgaaaagcaatattgttgaaagtatcttcaaaccggtactcgattttatgcaaactatgccagccttcgtttacttaattcctgccgtagcatttttcggaattggaatggttccaggggttgtggcttctgttattttcgcaatgcctccaactgttcgtatgactaatctaggtattcgccaagtttcaacagagcttgtagaagcagccgattcgttcggttcaacaccttggcaaaaactttggaaagtacagctaccaatggcgaaatcaaccatgatggcgggtattaaccaaagtatcatgttagcactttccatggtcgtaattgcttcaatgatcggtgcaatgggacttggaacacgtgtttacttcgcagtaggacgtaacgacgctggtggcggatttgtagctgggattgcgattgttatcgtagcaatcatcctagaccgtctgacacaagctttcaataaaaaagcgaaatcagaatgaggaggagagtagattgctaaaaaaattaatcaccaccgcagttttggctatgcttattttcactttagcagcctgcggaacaacccttgctccttatgacgcgaaaaaagatttaggcgaacaaatcaattatacaatcacaggaattgatgctggagcaggaattatgcttgcaacacaaaatgcgattaaagattaccatttagatgatgataattggcaattacaaacaagttctaccgcggcgatgacaagtacacttcaaaaagcgatgaaagataagcgcccgattgttgtgactggttggaccccgcactggatgtttacaaaatttgatttgaaatttttggatgatcccaaaaatgtttatggtaatgcagaaaacatccacaccattgtacgtaaaggcttaaaagaagataaaccttccgcttaccaagtgctagataatttcttctggactgcggaagatatgtctgaagtaatgcttgaagttaatgacggtgtagatccagaagaagccgctaaaaaatggattaaaaataatccagaaaaagtagcaaaatggacggatggcgtggaaaaagtagatggcgatgaaatcaagttaacttatgtagcttgggattctgaaattgcctctacaaacgttgtcgcagaagcattaaaacaagttggctacaaaccaacgattcaagcaatggaaattcaaccgatgtgggcgtccgttgctacggatgcagctgatggtatggttgctgaatggcttccaaatacttccgggatctactacaaagattataaaggaaaatttgaagatttaggaccaaacttaaaaggtgctaaaatcggtctagcagttccaaaatacatgacaaacattaattccattgaagatttaaaaacaagcaaataaacgtttaaaaaggcat

SEQ ID NO: 3539 - DNA, 2436 bp, Listeria monocytogenes 4b
  misc_feature (1)..(end): n can be any nucleotide: a,g,c or t/u
gaagagaaatgagaatggtggatattatttccaagaaaagggacggcaaagctttatcaacagaagaaattcagtttttcattgatggctatacaaatggggaaattccagattatcaagcaagtgctctagccatggcaatctttttccaagatatgaatgatcaagaacgcgcagatttaacaatggcaatggttggctctggcgatacgattgacctatccgcaattgaaggaatcaaagtcgataaacatagtactggcggtgttggtgatacgacgacacttgttcttgctccgctcgtagcagcagttggcgtaccggttgcaaagatgtctggccgtggcttaggtcatacaggaggaaccattgataaactagaatctatcgaaggcttccatatcgaactagataagaaagatttcattgacctagtaaatcgcgacaaagtagcagttattggtcaatcaggtaatcttacaccagcagataaaaaaatgtacgcgcttcgtgatgtaacaggaaccgtaaactcaataccactaattgcaagctctattatgagtaaaaaaatcgcagcgggcgcagatgcaatcgtacttgatgtaaaaacaggtgctggtgcatttatgaaaaccgacgaggatgccgaaaacctagcacatgcaatggttcgcatcggtaataacgttggtagaaatacgatggcagtcatttctgatatgtcccaaccacttggcgaagcaatcggaaatgctttagaagtaaaagaagccatcgatacattaaaaggccaaggaccagaagatttaacagaattagttcttgtacttggtagtcaaatggtcgtactagccaaacaagcggaaacactcgacgaagcccgcgctaaattaattgaagtaatcgaaaacggtgcagcacttgagaaattcaaaacattcctttccaatcaaggtggcgatgcaagcattgttgatcacccagaaaaacttccgcaagcaaaataccaaatcgaagtacccgctaaatcatctggcttcgtaagtcaaatcgttgccgatgaaattggcattgctgcaatgatcctaggcgccggtcgcgcaacgaaggaagacgaaatcaatctagcagtaggtttaatgctacgcaaaaaagtgggcgatgctgttaaggaaggcgaatcactcgtaacgattttcgctgaccaagaagatgtcgaaaacgtaaaagcaaaaatctacgaaaacattcaaatttccgaccacgcaacagcaccaacccttgttcataaagttattacagaataaaagaaagctcccaatttaatttgggagctttctttatcaattttccgcggcttcaatctgttccaacatatccggcgtacttaaatcacttcttaagaattccgtcgtttgaggtaattgtagttcaaattctgtttgttgcgcaacttctacggtaccttccagcatttcataatcaaatacatgaccgccgattttacgcatatcgtcaataaaatgcacatgatagccagaaacgccaataccgctaatataagcgggcgtccaaaaaccaacaattgtacccgtaatatattcaaaatggtacgttggttgttcttttaccgcttcaatgagtggcggataaggcctttgttgttttggtacaacgcgcgtatccacataacggaaattcccggtcattttcactgcataaaaaacatttggtccttgtactaattctgcgattttttcttccaccgcttgttttgatgtcggttcggaaacggaaaaagaagtatcagcatcaaaaaaagtggtgctcgcataaggtgtcgtatcttctggctttactttataagcttgcccgtctgatcgtatttgaaaagcttctccgtctaaaataattaattcaccatcaaattggtcaagtgttcctataccgaggtcaccgtgttgtaataattctttgaaactcgttgttccgctaaaaagcccaccaacaagtgctgccattgtagaatgctgaaataatcgattttttctaactgtgtccattattgccactccttgcattgttatatatgaaaagttattttttaataatacagtttaatttctatatgttcattatactactttatatccttaaacaaaagattttaaaccaaattttaaaataaactgttactataacaggatagtaaactgtaatataaaaagagttctcgcatcatacgagaactctttttatacaagtaatgtgtatagggtttgattatcattaatcggaatatagctcgggtcaaagcagcaccccgctcaagcaatgcttcataatccattttatcttgcaacaaaacaccgattattacaggcccattacctcgattcacttttttcgattttcaacttggtgatatcgcaa

SEQ ID NO: 3540 - DNA, 1828 bp, Listeria monocytogenes 4b
  misc_feature (1)..(end): n can be any nucleotide: a,g,c or t/u
aaataagattaccacttggagaggcactctcttcttgcagggaaagtaatcaaacaggtgggtgcgtatattgttggcctctggggtgcttctgtatataatccaaccggcggttggtgtaagtaatgaaatcttaaaacaagtatccgaagtataccgtaaaatccgtaacacaatgcgtttcttactaggaaatattaatgactttaatccaactactaacgccgtttcttatgaaaacttacgtgaagttgacaaatatatgctaattaaattaaatgatttagtgaaaaatgtgaaggataactatgaagctttcgaattctctactatttaccaccaaatcaataatttctgtacagtagaattaagccaattttatatggactttgccaaagatgttgtttacatcgaagcggctgatagtcatgatcgtcgtgctatgcaaactgtcttttatgaagcggttgttacgttaaccaaattacttgctccaattttaccgcatacaacagaagaagtttggaatagcttgattggtgaaggcgtggaaagtattcacttgcaagacttaccagaggttaaagtattagcggatagcgaagaaattacagcgaaatgggacgcattcatgcaaatccgtgataacgtccaaaaagcgttagaattcgctcgtaacgaaaaattaatcggtaaatcaatgcttgctaaagtaactttatatgtagacggcgaagcgaaaacactatttgattctttagaaggcgattttgcacaactgtttatcgtttctgactttgaacttgtggaaggtttagaaaatgcaccagaatctgcattcaaatcaaatcaagtagctgttcaaattaccgtagcagaaggcgaaacttgtgaacgttgccgtgtagtgaaaaaagatgtaggcgtaaatccaaaacatccaacactgtgtggccgctgtgcggatattgttgtaaaacactacgaagcttaatgctcgcttggggaaaatcctactcatttcaaaaggaggttccccaagcttttttaatttaagatgtggtattatagacgtaattccaaatagaggaggttgcttgacgtaatggaaacaattcactttacaaaagtacatggttcgcaaaacgattttttcttagttgatgaagaggaaaatcacatcacagaatggtcggatgaaaaacgtgctaattttgcgataaagctttgcgatagaaagcactcgcttggcggggcagacggaattttatatgtcacaaaaagcagtgaagttggaccaattggccaaatgcgtgtcgttaattcagatggctcaattgcttcgatgtgcgggaatggcttaagaacggtagctcgctatttacttgagaaacatgctttgacagatgcaaaagtagaaactatgaaagcgatacttgatgtcaaaaaagcaacttcgcttggttttgatattccaacctatcaagtggaaatttctcctgttaaatttgcagcagaaacattaccgatgcatgtaggcgtggaaaaattatttaatcaagttatcccagaacttgatgcagaactcgctttttctgctgtttctgttcctaatccgcatttgattacatttgtggaccaagctgtgctagattccaataaacaagaaaaattagcaagttatttaaatagcgaaaatccgtatttcccagatggcgtgaatgtaagctttgtgccacgtctaagcgatgaagctatttatgtgcgtacttttgctttccagcacagtgtgcggcgctncaggcatggggctaagtggccaaaacgt

SEQ ID NO: 3541 - DNA, 2937 bp, Listeria monocytogenes 4b
  misc_feature (1)..(end): n can be any nucleotide: a,g,c or t/u
tagcatcacgtctagtgctgtgctactataatattcagtggttcatagccgtgatctgtacttattactcacttttggtacttattctactacttctgctaaatctttttctagttgtttaatggcattagcacggtgactgatttcattctttttctccgctgcaatttctgccattgttagaccgaattctggtaagaaaaatagtggatcatagccaaagccatttgtgccgcatagttgttctgcgataacgccctttacttcaccggtataaaaagatgttttctcacaaggtgtggttacagcaagtgtacagtgcaaacgagccgttcttttgtccggttcaacaccttctaagtttttaagtagttcttcgccatccccggcatcatcgtgagcaacacaagcataacgcgcgaaatacacgccaggagctccgtcaagcgcgtctacgattaaaccagaatcatcagcaatgacggtttgatttaacacgctagcgaccgtttctgctttaacagcggcattttcggcaaaggttgttccagtttcttctatttcaccaatttctggaaaatcagcaagggttgctacttcgatattaaatttcgcaaagattttttcgaattcttttgcttttcctttgtttgcggtagcgataataattttactcattttttattctcctttaatccgcgctgtgactttgtctccgagtgtttctttttggatttcgattaattcgctaattccttttttacctaaggcaattagttcagccagttctgtttccgagaatgtagcttcttcgccagttccttggagttctacaaaggcgccgctaccagtcatgataatattcatatctacttgcgctgcgctgtcttctacgtagttaaggtcaagtactgttccaccctcttctaaaacacctacgctagttgctgctagaaaatctttgacaggaaatttagcaaatggtacagcttcgtctagtttggcgattgccatgaccatcgcgatgaatgcgccggtgatagaagctgtacgagtacctccatctgcttggataacgtcacaatcgagccaaattgttctttcaccaagggcatctaaatcaacaactgcacggagcgcacgtccgattaaacgttgaatttccattgttctgccagtaactttaccttttgaagattcacggatatttcgggtgtttgttgctcgtggtaacatcgagtattctgcagaaatccagccgcggccttctcctcgcataaatggcggcacttgtgtgtctacactcgcagaacagataacntttgtattgcctgatgcaattagcacagaaccttctggatgcattaaataatctggcgttacttcaatatctcgtaatgcatcactgtctcttncatgaactctcattatcggcacctcttattttgctatctaatatgttctacagtcatatctcgcatatataaccagtctcttgcaatatctgtgagaatttgtgtcgagcctgtagtgaaaagacggtgctcaatttcttcgtctgcagcatctgataaattatggtaatccagtaacgcgctaccttcactagcagtttcttctccggagttaataacagcaacgccgtctcccataaaattctcaataattggttttaaaagtgggtaatgcgtacaacccaaaatcaccgtatcaatcttggtactcttcagtggtaagagtgattcggctactcactttttttgcaatggcgcttttatactcgccagattctacaacggatacaaatttcggacatgccagtgaatctacttctactcggcggtttagtcctttgagcgctgttgggtaagccatgctttcgactgcaccaagtgttcctaatacgccaattttgatgtttcttgttgctttgagagctgctcttgaacctggttggattacaccaatcacaggaatatccaatttttcacgcaatatcgatatacatgcatgcttgctcgttgcgtgatattcacaatgctacatcaactgagctattcttgatcgccagctggtcatactagtaagaattgcgtcgatttaccacaacgtagaacgttacgctcacttacttctcttagtccgcagtgagtccatgaacgggcacaccgtgcgtgtatcacctaaactaatatacttgttcatggggtagctgttttagcacttctcgcactactgtcaaaccgcctactcccgaatcaataaagccaatagcttgtttcacagtctcgcctcaatttctttattaatttccaatttttttatctataccttccattttcttattttttgagctttttcgcaagtcttttttgagaaaaaagcttttttgtggaaatttatttattgtgctttccattttagggtgattttggttataatggtgtatgaaagtggggtatccgaaatgacagaaaatgaacagaataaaaacgaggaaaaagctctcgttccaagttttggtttagatttactacgcgattatttaattcctgaactacttggagatgaagcacctcacattatgtactgggcggggaaagacttggcacgtaaattcccactagcgtctctagaagaagtagcagaattttttgaagaagcctcttggggtaattttagcattgtgaaagaaaagaaagatgaaatgcgtttacttttagaaggtgaaacagtcgctgctcgttttcgttcacaagatgagcctacatcgaaactacaagctggcttgattgtataacacttgttattgcataacaagctgcctgcacaaagctacgatgaaatggatgaacgctataaacacggcaccatgtttttctaatgggcatcttaagaaactatcgatctcgaacaacgctctcgaaaccctgaggc

SEQ ID NO: 3542 - DNA, 2525 bp, Listeria monocytogenes 4b
  misc_feature (1)..(end): n can be any nucleotide: a,g,c or t/u
aatgaagtcgtggatgttagcttgttttgcagcgttgattacttcgtcgtcgcttgcttccggcttaccgaaaacaatgttatcacgaatggttcctgtgaatagcacggaatcttgtagcacgataccgacttgtttacgaagggaatctaggcgaatatcgcggatgtcgatatcatcaaagagaatcgcgccaccatcgacattatagaagcgattaagaaggttcataacagttgttttaccagagccagttggaccgacaagagcaaccattttacctttacttacatcaatcgaaacgtcttttagaactggttttgcagggtcataagcaaaatctacgtgatctagtttgacacctttattaataccatcaattgtttgtaagttttcgcgttctacttcttcttcctctgcaaatacttcactaacacggcgcgcaccagtgattgctagttgtagcaagctgtactgggacgaaatttgtgtaagtggcatatagaattgttgtgaatattgaacgaacataacgattaaaccaagagcggctgtgcgttcaaggtcgccgtttagagctaaccatccaccgaagaagataacgatagctgtatttaatagggaaataccttgcatcattgggaaaagtaaaccggagtaaacttgacctttgtaagtggcgtttttaacgatattgttttgttaacaaagccgtcaattgactcttattataagccatttgtgataataattgcttgaccagagattctctcgtcaatgtagccgctaagtacgcctagctcatcttgttgaatatcagggaatgtgcgggcttttcgaataatcactgtcgcaataataatcgcaaatggagcagatattagagtaccgaaggctagttccacgttttgttggaacatcatgatgataacaccaatcattagcgcgacgttggatagtacttggatcaatgcttggtttagtgtgttggaaatattatctaagtcactagtgaaacgactaagcatttcgccatcattgcggctatcgaagaaacggattgatagtttttccatcttgcggaaaagtcctatacgcattctgttcgtcgatttaccagctacccctgtcataatgatactttggataaaagtggcagcagcgaggagtacgtagcagagaatcagcatccaaatgatatggatgaagtcactcttgtcatcaacacccgtttgcattaaattaacaacgtaatctccaagttcttgaacggcgttaccaatatattgtggtgcttttacttgaaggtatgtcgcaaaaactacagcaattaaaatgacaaaaagttgaggcttataaccccgcagatagtgccagaaaaagcgactaatttgtttgaactctttcattatgcggttacctccttgcctttttgagtgtcgtaaatttcacggtaagtttcattttcttttagaagttctttatgggaaccgacgccaacgagtttacctttatctaacacgagaattttatctgcttgaataacagaagagattttttgtgcaatgatgaaagtcgttgtgtcgtctagctctttattcagcgcttctttcactaatttctcggattttgcatcaagcgcgcttgtgctgtcatcgaggattaggactttcggggaaccgataacgccacgtgtaatcgaaaggcgttgtttttgtccaccggagaagttgtttccacgttcggaaacaggagcttcataaagttttgcttgtttgtcgataaactctttcgcttgtgctattttacttgcgtgttccatttcttctgcagttgcgtcttttttaccatgacgtaaattgtctgcaattgttccggaaaaaagaatcgcgcgttggagcacgaaggaaacagtgctgcgaagcgtttttttgttgatatcttttaggttcgttccgcctgataataacttcaccttccgttgggtcgtaaagtcgggggattagttgggcaagagtggatttaccagaacctgttgcaccaacaataccgaccatctcaccaacacttgctttgaatgaaatatcttccagagcaggcgtatcgtcaccgtcgtatttgaaactaacattacggaactcaactgtaccttctaaatcttgttctggtgcgttttcattgtaggtaatatctggttctgtttccaaaacttcggtaatacgtttcaaggaaataagcgcacgagaagccatcatcatcagcataccaccgataataattgccatcataatttgcattaagtagttcatgaatgatgcgatagctccgataacttcagggttttcagcagccatgtcgcctacaaagaaaatagaaacaacaattgctaagttagaaacgagcataaatgcaggaatcattacagagaaaagcgttccaacgatgattgtgtggcgagttaatttgtcactgacagttgtaaagcgactgatttcattatcttctagcacgaaagatttaactac

SEQ ID NO: 3543 - DNA, 2474 bp, Listeria monocytogenes 4b
  misc_feature (1)..(end): n can be any nucleotide: a,g,c or t/u
gtgttagagaaagaaaagcggatgataatatccgtagaactgacacaggaaatgatacaagaactcgacgtagttgtagaaaaagaaaaaatggggcggagtgaagttataatggaagcaacgcaacagtttttacaagagaaaagggctcgcgaattaagagacgagatggagcgcggctatgcagaaatggcgacaattaatttcgctatcgcatgcgagtgtacccatgtcgaagcagaagcagaagacaggaatattagtattttaggaggttaatggctgatggtgaagcgtggtgacgtatactacgcggacctttcccccgtggtcggaagcgagcaagggggaatacggcctgttctcatcattcaaaatgatattggtaatagattcagtccaactgtgattgtggcagcaataactgcaaaaattcaaaaagcaaaattgccaacacacgtggaagctactcgtaaagatggctttgagagagattctgtcattcttttagaacaaattagaacgattgacaaacagcgcctgacagacaaaattacacatttggacgaagatttaatggccaaggtaaacaaggcacttgaagtcagtctaggagtagtagaattttaatccatcctaaaaaataacatacaatgatgaatgcaggacaaaagggtctgacgtaaaataataagtttaatacataatgaaataattaactgctgtgaagaaacagtaaggacatgagaaacctacaaacaacgcgtatcaacatactcgctaaatttgtttctaatgtcttttttaaaaggcagttaagcaaaccgcacaataagagagaaaattttgttaatagtggagaaaggttggaaaataactgatgtataaagattttgcaaacttcatccgtacaaataaagcagacttactaaacaactggatgaatgaaatggaaaaacaatcagatcagctaatcaacgacattgcaaaagaagcaatgtacgaagaaactagcaaagaatttgtggatttaattgtttcgaatgttaccgaaaacggctctaaattcaacgaaaaactagatgattttgcagagaaagtggtccacctaggttggccgattcattttgttaccactggcctacgtgtttttgggcttttagtatatacagcaatgagagatgaagatttatttttaaagagagaagaaaaacctgaagatgatgcctattatcgctttgaaacatggctttcctccatgtataacaaagtggtcacagcctacgcggatacgtgggaaaagacagtttctatccaaaaaagtgcactacaggaattatcggcaccacttttgccaatatttgaaaaaatttctgtaatgccgttaattgggacgattgacacggaaagagccaagttaatcatagaaaatttattaataggtgttgtaaaaaatcggtcagaagtggttttgattgatattacgggagttcctgttgttgatacaatggttgcgcaccatattattcaagcgtccgaagcggttagacttgtcggctgtcaggcgatgcttgtaggtattagaccagaaatcgcgcaaacaatcgttaacttaggaattgaattagatcaaattatcacgaccaacacaatgaaaaaaggcatggagcgtgcgctagccttgacgaacagagagatagtagaaaaagaggggtgaatactgtggggataccaatcttaaagttaggtgaatgtttattaatttctatccagagtgaattagatgatcatactgcggtagaattccaggaagatttgcttgcaaaaatccatgaaacgtcggccagaggagtagtcattgatataacttccatcgattttattgattcatttattgcaaaaattcttggagatgtagtaagtatgtctaaactaatgggtgcaaaagtggttgtaactgggatacagccagcagttgcgattacactaattgaactcggaattacgtttagcggagtactttcggcgatggaccttgaaagtggtctggaaaaacttaaacaggaattgggggaatgaacatgacattccaatcctgtgtaaagataattaatgaatgggacattgtagctgctaggcaactaggtagaaaaatatccaaagaaattggctttggaaccgttgaccaagcaagaattacaactgccatcagtgaattagctagaaatattttcctttatgctggacgaggagaaatctgtatcgaaaaagtaaatgaatctggtaaacaagggatgattattgttgccaaagacaaaggtccaggtattgtagacataagaaaagtaatgcaagatggttatacaacatcgggcggacttggagcagggcttccaggagtcaaacgtttaatggacagttttgatattgaatccagtattgaaggcgattctaaaggaacggtaattacaaca

SEQ ID NO: 3544 - DNA, 2225 bp, Listeria monocytogenes 4b
  misc_feature (1)..(end): n can be any nucleotide: a,g,c or t/u
agcggccagcagtgtgctggaaagtgctagtggtaaaatcatcgcccaaatgctatttcgtaagtgcaaaaattgcgtcatcacgatataggcaggcaccatcccgccactaaataacatggtaaaaaaggcaataaatgtaaattgacgacgatacttaaattgtggtcttgatatcgcgtaagagtaaagagcaatcattgcaacactacataccgtaccaattactgtaactaaaatggtaataccgtatgattgtaatagttgtcctttcatcttccataagtactcatacgcttccatgctccactctttgggtattagttgaaagccatttgctgccagagatgattcactagaaaaagaaataacaataatgtacaaaaatggaaaaatacaaatgagcgctaggaaagcgagcataatattcatcgctacgttcatctttttcccaaaaccaataatgtctttagctggtttattttttgctggtttttccatttcgcctcggacttgttctatttcactcactgcttcaagctgttctgccaaagcacctcgcctccttttctaaaataagccatattctggatttatttttttcacgatgtagtttgtgagtagcactagaataaagccgacgatggactgatagaaaccagctgccgcactcatactcatatctccaagtgacgttaaacctcggtatacatatgtatcaataacatccgtcacaggataaagtggtcctgaatttcgcggtagttgataaaacaaaccaaaatcagagttaaaaatcttcccgacattcaaaatcgttaaaataaccatcagtggcgttagtgccggaattgttacatgcctaatttgttgccatttgccagcgccatcaatcattgccgcctcgtagtaggtccggtcaattccggcaattgctgccaggtagacaatacttccataacccaagcctttccaaacattcatcatgataaggataaacggccagtatttcggatcgttataccaggaaatcgggtcctgtccgaatgcaagtaaaatattattcatcagcccactgtcttcgctcaaaaaactgaacaagaaatagctgacaactacccatgataaaaaatgggggaaaagcattcccgtttgataaatttttgctcctcgcttatttagtaagctgttgaaaataatagcaagtgctacaccaagaaacagcccaacaataataaatactaaattataaagaacggtgtttcgggtaataataaaagcgtcgtttgtttggaataggaatttaaaattttcaagtcccacccagtcgctactcataatactggataaaaatcctttcccatcaattttgtaatctttgaatgcaatcactgtaccaaacattggtaagtatgagaaaaccaggaaccaaaggacgcctggaagtaccattaaaagccaaatccgattagctcgaatttgtgataaaacttttttcaatccattcacccctcttttttgtaagtgctttcaacatctttagtttatcgtttttacgtggggttaaatagttgcggatgtttagatttatagacaaatattagaaataattttattgatggatttttcggtagcgatttggtgtttcgcctgtgtgctttttgaactggcgataaaaataagccatatcggtataaccagatttcccagcgataatggttaagttatcttttgtttgcagtaattcttcttttgcatagttcacccggtagcgatttagataatccgtaaagtgttcgcccatttctttttgaaaaagttgaccgagataaacagcattaatatgaaagtcgttaccgagtgtttttaaagacattccttctgcaaaatgttccgtgatataggaaagcacattttgaataatggggctttttgattcatctgtttgttttttgcggttatagtaacgaatagcgtaggctagcgtcgcctcttccaatccctcaatactcgtttcttcggcaattctccccatggattcgcttaactctttcggatccgattccgccatcatcacaagcagctcattcaaaatatggagcatttgatgcgggtcgctttccagcttgtggtcattccattctttaaaaaagtgctggatccacgctttaatttctttttcgttattcatcactaggagcttcgcaagttgatgttgctttctt

SEQ ID NO: 3545 - DNA, 2233 bp, Listeria monocytogenes 4b
  misc_feature (1)..(end): n can be any nucleotide: a,g,c or t/u
gtaaaagtcttcgaataaaacgattatcatcatcggtatccacatatactttaatatccatcaaatccctaaggcgtttatcttctaaaattaaaattccttctaaaataataacttctctaggttcttggatttctacttctttttttcgcgtatatttggcataatcataaatcggcttttctatggtttcatagcgacgcagtgcggcaatatgtgaaatgagtaagtccgtatcaaaagctagtggatgatcataatttacttttaatctatcttcaaaactaatattggcttgatcgtgataatagacatcttgagcaatcatcaaaatcgagtgtccgctaaaatgatcacaaatggctttcgttacactagttttaccagaacctgaaccgccagttacgccgactacgattggtttttttgtcatgatacgcctccagttttctttcttttggaaatagataggccgtcccctagtggaatggtcgttgtttcaaaatcaggatgcgtcactaaaaaatcgttaaaatggcgcattttcctagcaacacgtaatttgcgttgtttttctggtgtcatatctagcgctaaccctttaaaaagaacattatcactataaataacgccattttcagctaaagaatcggtataaatatggaaaaatttctcatattgcgctttggctgcatcaataaatattgcgtcaaatggaccgtgagccaaaatttcttcagctccttcaatagcatctgttaataaaactttcactctgtcattagccccgtagcgctgaatattatgtattgcttgctcatatcgttcttcgtcgcgctcaaccgtgataatctctgcatcaggaagtttatctgccatttttaaagcggagtacccaatggccgtcccaagctccaatatgcgctttggtttttggatatctaaaatctgtaataagcagtacaaagaatctggttccataatcggtacttcattttccttcgcatacgcctctaattcttcaaaaaaaggactgctcttaggaatgttttttaataaataatcatgaataatatcattcactgctaggatcccctatcttaacaaacaaagcacctgccaaaaacatgctaaacatgcttctgacaagtggttgttttaattatttttcgtaatatgctcttcttttagtttattgtgctcttctaaagttttagagaagtatactttaccagtttttgtatttgctaagaagtataggtaatcacttttttctggataaagtgctgcttccatcgaagagtctccactatttgaaattggacctggtggtagtccattgtttttgtatgtgttgtatggtgaatcgacttctaaatctttgtaagtcgttttacttttgtgttcaccaagcgcataaagaacagttgggtctgtctgcaatcgcatatcttttgctaaacgattataaaatacgctggcaatcattttgcgatctacgttttcagttgcttctttttcgataatggaagacatcgttaagaatttgtgtacagacattttttgtttcgctagttcatcgcggtacttagcaatgttcacatccgttgccttgaccatctctgtaataatttgttctgcagatacatccgttcctttgaaggtgtaagtagctggatataaataaccttctaatggatgtttaatagatttgtttaatacgtcgtttgttactgtatctggatatgctttaatcatggaagcaacaaattcaggatcgtccattgttttaagtacatctgctttttttaattttggttgataagcaacaattctatcagcaatttggtctaacgtgtaaccttctggaatgaccagtttagcaggtgctaccgtttttccttcttgcatttttttgacgatttgatctgtgttcatcgacggactgaattcatagttccctgcttttaaattcgtatcattattatattttacataaaacgagaaaatagaagcattattaattacttttttatcttctagaatagtagaaatgtctgaaatactagagcctgctgggatttctacggtgattttctctttacttgcttcatcttttggttctagttgcgattttacataataataacctgaacaagttgcaatcactaaaattaacataataacagacattataattgtaattttcttaccttttgtattcttcatttta

SEQ ID NO: 3546 - DNA, 1605 bp, Listeria monocytogenes 4b
  misc_feature (1)..(end): n can be any nucleotide: a,g,c or t/u
ttgatcaccaattgttgcaaatacttcgccccatgaaccacagggattaaagccataagcatgtatttttagcaagccatcttttgttggaaaaaagagagcttcgtatttacctggtttagtcatatccggtggccccttccgcattgaagtaatcatttctaactgaaaatgattatcattattaaaactatcttatagtattctacataaaagtgcaaggttttttaggtatattttcagacattttgcttttcttcctttttaagctataatggaatgaaatcacgaagcttactcccacctgattttcacgggattttcttataaagaaaggtgacgaaaatgacaaaatctattcgaccagaattacgcgatattcaagtaagtggtatcagaacttttaatacacgagtgacgggtattcctgatatgatccgtttaacacttggcgaacctgactttccaacgcctgagcatgtcaaacaagcggccatttcagcaatagaagaaaatttcaccaactatacacccaatgccgggatgccagaattactcgaagcagcttccacttattttcatgaaaaatatgacttgtcctataataataaagaaattatcgttacggtcggcgctacagaggctatctccgttgccttgcaaacgattttggagcctggggatgaagttatcttaccagaccctatttatccaggttacgagcctctaattacgttaaatagagcgcacccggttaaagttgatacgaccgaaactaatttcaaattaacacctgaacaattacgagcacatatcacgccaaaaactaaagcacttatcattccttatccatccaatccgaccggtgttacactctctaaaaaagaacttttcgcattagcagaagtactaaaagaaacaggtatttttgtcattgctgatgagatttacagtgaattaacttatcacgaggagcacgtgagcattgcgcctttactaagagagcagacaatcgttatcaacggtttatcaaaatctcacgcaatgattggttggcgaattggctttttacttgcaccagaagcccttacacaagaaatgttgaaaatccatcaatattcggttacttgcgcaagttccatttcccaaaaagcagcactagaagctcttactaacggcaaagacgatgcttttcaaatgcgaactgaatacaaaacacgcgctaatttcactcaagatcgactagaaaaaatgggctttactgtcatcccgccagatggtgcattttacttcttcgtcaaacttcccgatgaaataaccgaaaatgctttcgattgggctgtaaaacttgctgaagaagccaaggttgcagttgttcctggaaatgctttttccgaaaaaggcgatcgttacttccgtctttcttatgctacttcctttaataatcttgctgaagcattagatcgaatggctcagtttatagcaaaataaaaaaacatccactaacttaaattagtggatgtttttttaacgataatatttaatgagcgcttgcgtcccttcttcactcaaaccttgttcagctagcgtttgatacattttttc

SEQ ID NO: 3547 - DNA, 2157 bp, Listeria monocytogenes 4b
  misc_feature (1)..(end): n can be any nucleotide: a,g,c or t/u
tgtgcaggtatgtactgggttggaattgccgctactttacttaccttaatcggattaggattctttaggatcgtttccaatcaattccttttcaaccaactgcaataattatccacccgccaaccaagaaattctaggtaagggcacgggcaagatccaacaaaacaaacaacaaaatggtttcgttcctcaagggaaaaagaacttatcggagaaagtctttttattcgcgtgaatattgttgtaaaaacaaagaataagaacgatgaatacgaactatttcactttatacaaactcttcccaatgtaaccgttgaaaaaatggaataaagaattgctttctactgtttgcaactcggttttgttcacagaatatccatttacttcctacttctcattttgctataattcacccgtcactactaatagaatatagagagaagggaagagatgaaaaactttgtaacttcagaacgcgcggtttttaagatggataaatcggcggaacctgcaattacagtgaaagatggctctgtagtaaagataaaaacaaaagactacttcaatggccaaattcaaaacaaacagcttcaatacggggacctagactggaaacaattttcaccaactactggaccaatctatatcgaagaagctagaagtggagatttattagcggtaacgattgaaaaaattgaactcctagggacggaggtatttttactaaacggaccaaatgttggtataacagatgatttattaacaagcaactatactcgttgctacaaagtcagagagaatcgaattatgtattcagatgaaattcatattccgataactaaaactatcggattgctacgaacagaaggcttacttacctccaaatcaccagctaacaacgacggcctactcgactcatccgagattacagaaggtgcaacgatctttttaccagttgaaaaacagggtgcatcgctttatatcggcaatgttcgagctacagctggcttcgggaaaactactaccacgagtgcagaggcgccagcagaaatcactttacgacttcaaatccttaaaaatcgaacagctcccacacccacaatcattcatgacaaccatttaatttgcttagcatcagatctcactattgagaaagcggcaaaaaaagcgatgcaaaatatgataactttacttactgaatcagacaaaatgacaactgaagatgcgatgttccttctatcactgcaggctgagtttcaagtatgcaacatgggtaaatcaaatatcactaccagtatcaaattacctttggattattttccagaaatgccatttttataagaaaagaacccccgttctgacgggggttcttttaaatttgttcaaaaatgctgccttggtagtttttaaggaggaattcagctagttttatcgcttctttttctactaatttttgtccttttttagttagttttttactaagatagaattgaaaaactattttatcccccgatattttatatctccacgttccaaaaaactgagcatttattattaagacagcttcaatttgcccagcggtgcgccagattagactcgtttctttttcgctcgcaagccaattctttttcgcgtaacttacgaaaagcggatcaaacttccctaatagaagcggcgaccccatctccacattttcctgcgtttttgctttgctataatagttcttgccatcttcaccgatatagcatatatagttttcaagtaacttttctaacgtttctatataatcactatttcgcaaaccactccaatgcttgaaatcttgtatagtcgctggcccaaatgcactaaaataacgatcaatcattgtttcaagacctgtcttgctgcgcttgttagttatccaagcatcttctctttctgaatcaatttggtttctatgactataaaattttgttttaggactttctggcacacaaaacaacttgccatcgagtgacccttgaataaaaaccccgccccatgtcatcagctcttttgcttcattacctagtaaagccgcaaaggactctttagacactttatcttcgcgcaggagtaattcttccatttgtactaaaatctcatccaaatcacgtcctagagagtctgcgtgct

SEQ ID NO: 3548 - DNA, 2653 bp, Listeria monocytogenes 4b
  misc_feature (1)..(end): n can be any nucleotide: a,g,c or t/u
gccgcgttcgttctatggatgaagcttatttcaataaagtagccgcaatcgaatttgccgtagagaatgacgacgggcgtaatccaagaggtattttacaagcggattatgttttaatcggtatttcaagaacttcaaaaactcctttatcgcaatatttggcgcttaaaggattaaaaatcgtcaatattccaatcgttccagaagcacaaatcccagatgaactttttgaaattgaccctaaaaaaataattggtctaaaaattagtaaacaaaaattaacgaagattagacaagagcgtttaatatcgattggtttacctggtgccggtacttatgcaagtaatcaacgaattgatgaagaattagcgatttttaataaactagccagtaaattaaattgtttcgtgttagacgtgactaataaagccattgaagagactgcaaacgagattttaatccatattggtgaaattgttgatgaaaatttagaattataagaaggacttttactttttatggcgaatatatatattatacggggaaaactgcttgtaaaaattagttacttcccgtataatctaaattcgcgtgtgaaaaagccaaatctacgaataatattaaaaaaacgggttaaaaactcgttttttaacttgccttcatagattttaagagaggatggaatatgtgccaaaaattttagttgatgccgatgcttgcccggtaaaagcagaaataaaacaagtcgccgaacattttcagttagacgttatttttgtggcttcttttaaccattactctgtaaatacaaacggagaaaattggatttttgtggatactggaaaagaatcagcggatatgcgaatgatgaatttagccaaaaaaggcgatattatcgtaacacaagatattggcctagctagtattctacttgcaaagggcacatttgtcttttctaatcgcggcgaactttaccgagaagaagaaatgtcattaatgttagatattcgctatagacatgccaaggacaggcaacaaggtaaatatagcaaaggtccaaaagcaatgagcgatcaagatcgttctcttttcaaagaccgattgacgacatttttgcaaaataagtaaataggagttgactgtcaaaatggcgcggattcctgaagaagtaattgatcaagtccggaatcaagcggatatagtcgatattatcggtaattatgttcagttaaaaaaacaaggacgtaattattctggcttatgtcctttccacggtgaaaaaacgccatccttttctgtctcaccagaaaaacagatgttccattgttttggttgtggtaagggagggaatgttttttcttttctaatggagcatgacggactcacttttgttgaatcggtaaaaaaagtggcagacatgagtcatttagatgtggctatcgagctccctgaagaacgagatacaagtaatttgccaaaagaaacttctgaaacagcaaaaatggtggaaatgcaccagcttactgccaaactttaccattatattttaatggaaactgaagaaggtacagcagcattaacttatttaaaagagcgtggtatgtctgaacagatgatgaccactttccaaattggttttgcccctaatcaccatgcaacaattactgcttttctagaaaaacgtggcatggatttacaattagctggcagggctggacttttgtccgaacgtgatgatgggcaaatggtggatcgttttcgtaatcggattatgtttccaattacgaatgatcgtggacaaattattgccttttctggccgcttatttgatcgtgatgatggtcctaagtatttaaatagccctgaaacacctgttttcaataaaagacgaatattgtttcatttttcagaagcaagacaagctattagaaaacaagaagaaattacgctcatggaaggatttatggatgttatttccgcagaagaagcaggtgttcaaaatgcggtagcttcgatggggacaagcttaacggaagaacatgcagatttaattaaacggcttactaaccgggcgattatttgttatgacggtgacagagccggaattgaagcagcctataaggcgggcacacttctagttgaacggaatcgtttagatgtttttgttttgcaacttccagctggaaaagatcccgatgactttattcgagcaagtggtccagaaaaattcaaagaagtttataagcaacaacgaatgacttggacagcttttaaaattcattatttacgtagagaacgtaatttacagaatgagacagatcaaattggttatattgatgattgtttacgcgaaattgcgaaactagatcaagccgtcgaacgcgaattatacttaaaacaactagcagatgaatttgaattaacgatagaaacattaaaacaacaactacagcaatcactaaaaaatagtcagaaatcacgacaaatggctagttataatgaaccaccaatagatgattcttttatgggaatgatgcctcaagaagaaacagaaatgctattttctttcgagcaaccaacccaaaaactatctgcccatacaacctcagagcaacaactcatgaaagcaatgatggagagccgagataatttt

SEQ ID NO: 3549 - DNA, 2019 bp, Listeria monocytogenes 4b
  misc_feature (1)..(end): n can be any nucleotide: a,g,c or t/u
tggctagaatctgattatgtcaaaattaatgataatctggcgaaaatagcgagaaaaaaatttatcgctaataaaaaagattagggaaacacttgttggaatggatatggaaaatgtttaaatggaaaaccaaggtcttgtccgagtaatgatcgttactcggatttttttatttctatttttcatttgtacaatactaatggaaaaagtaaacacaccaactaagccgtaaaattttaagaagttaaaattttatggccagaaatgcttctcgactcctctataattaagttgcagctagaaagtttgcatctagaaattaactacgaaagaaggaggggagctgatgaagaagttttccatgcgagtggtgcttattatttctgtgctttttattgcactggggaacgctaatgtttctatcgcacaagaaagggacacaacgaataagcttccagaagaggagctgggttctctggatacctctaatcttattgcagaagaagttgcgcaagagaaaccagccgaggtcgagaatctagaagaaatcccaactacggatgagttgatgcaaaatccagaggttctggagaagtctgttgccgactcggatgatccggatttaacagtggtaaactcgggtgcttactggacgctttattataattctgcgaacggtgaatatagcttgcgtatgtttggcaacgtaccaagtagtataccaagcgcttggaagagttatttgggtaacattaaacatatagagattgaagaagctactttgacaggaagttttgaagcttattttaaaagtaaaatagatggtttcagagtgcttgagagcgtgagaattgaacgttctaatttgtctggagtaacatcttttagagaagcattttttagtgcaggaattgaaaaagttatcattagagataatgattatccgacagcaccatctttactcactacggaaagtatgtttgaaaattgttacaaccttacggagtttgatgtgagtggtcttgatactagcgcagtaactaatatgaagaaaatgttttataactgtagaacacttgaggaattggatttaagcaacttggatacgagttccgttaatagtatgaatagcatgtttggatactgtgaatcacttgagaaattgaatgtaagtaattttgatacgagttctgtgaatgatatgtatcatatgtttagggattgtaaagcacttgaaaaattggatgtaagtaattttgatacgagttccgttactaatatgggaggcatgtttgttaatagtaccagtcttaaagaattagatgtaagtaattttgatacgagttccgttactaatatgtcagccttgtttagttcctgtagagcacttgagaaattggatgtaagcaattttgatacgagttccgttactactatgttggccatgtttgttgcttgtaatagccttgaagagttagatgtaagtaattttgatactagttcagtaactactatgcagtccatgttttttgagtgcagctcacttgaagagttagatgtaagtaattttgatacgagttcagtaactactatgcagtccatgtttgaaaaatgtactagccttgaagagctggatttaagtacctttgatacgagttcagtgactaatatgcagtccatgtttataaattgtgcagtgttaaaatctttatatctggataattttactaccgcaaagaccatgacagatatgtttactggaacaacctccctagcctacttgtttgtcagtcacaatttacaatctttttatgggttggcaaatacaaactggtatgatgaaaagaattgggtacagttttctaatctctctcaactacagacctatcatcgaaatcaaagtgaacctactggctatagaaaaggtaccttcctttccctaacaatggatgcgatgggtgggcagtttgatgatgcggaggaacaaaaagtacaaagtaaaatttctggggaatactg

SEQ ID NO: 3550 - DNA, 2571 bp, Listeria monocytogenes 4b
  misc_feature (1)..(end): n can be any nucleotide: a,g,c or t/u
aaacatattcttcttttaattggttgatggtattcgagcgtacgtaacgataatatgccgcacacccttggaaagtcagcgttataactggtaaaatcgcatgctccgccatatcccaaaaagagtcaaccccaatcgttcgcatccctagacttggaagccaacctagctgaatcgaaaatacatctattaaaatcatcccaaaccaaaaaatcggaatcgaaatcccaatatatgaaatcccgtttaatactttatcaatccacgtattttcgtaattcgccgcaactaaaccaagtggaatcgataataatagcgtcagaacaagcgaagttcccaccaaaccaagtgtcgccggaattctctctaaaatttgttgcaaaactggctggctattcacaatcgaataaccaagatttccttgcaacaagtttccaagccaaataaagtactgcacataaattggttgatcaagtcctaaactttgtctaattcgttccacatcgtcaggattcatatcaggcgtaacaaaagaattcacgggatccccgggcgctaattttataagtgcaaacgaaataatcgagataataaatagcatcggaataatttgcaatacgcgttttatgattgtttttagcataatttatctcctatctaaaacactaaaaatgacaagtaaaaacctgaacctgccaaaaacaagcatggcaggccagattttttacgaatgatttttaattattattccgttaaatatagtttagaaagatcacggaacatggttactggttgtggtgtggcagctttttgaccaccgtaacggctatcaagagctagcactgcattatcataagaaattggataaattacagcgtcatcagcaatggtgttttggattttttcatagatttcttgacgttctttatcgtctgcagttacagcacctttttcccaaagtgcatctagatctttgttgtggtagttcgaatagttatatggcgcatcgcttaggtatagggatttatacgcatcaggatcgttccccatgatataaccatttagtgcgatagagtagtctgcgtttttgcggtcaagtgtgatgttgcttagtgcatttggatctgttggtttcaagtcaagtgtcacgccgatttctttgtattgttgttgcaagtaaagcgcgatactttcttgtgatttactgttgtttaaatagtaaacagttagtttttgacttgtatcaaaaccactttcttttactaattttttcgctttggcaatgtcttggtcgtatgtttctactttatccgtgaaatattttgtgttttctgttaggaacgaggaagctggttttgcgtattcatctgaaccgtatgcagcatcaatgatttcttcacgatcaagcgcataagaaagggcttggcgaagttcttttgatttaagtgctggttggttttcgttgaatgttgcatagcttaagcgattttccgggtaagtgataatgtttaccgcgctcgctttttctactttgtttctatcagaaggttgaatggattttaggttgatttcgccattttgcagtgctaaattagcagcgttttggtcttttgtgattcggaaagtaactttatccaattttggtttgccgtcaaaatagtcgttgaatcgttctagggaaacatattcgcctgttttgtattcaacaaatttgtacggacctgagccgattggatttttgtttttatcacttttctcgatgttttctaccccttcaaaaatgtgttttggaattgggaagaaagttttaattgtattttcaaaggctggagcaacagttggtaaagtgaatttcaccgttgtgtcgtctactgcttctacttttacaggtttatcgtcaaaaacaaagttgccgcggttcgggctgttttgttttgtatctaaaatagaatttacagtaaatactacatcgtctgcagttaagggtttgccgtcgtgccaagttaaaccatcttttagtttcacagtgtaagttaagttgtcatctgaaatatctaagctttttgcaagtgccggtttcccgtcaacttcccaaaatagcggtgcgtaaacagcttgttgaatcgttaatgttacacggtcagaagcgtagttcggattgataacttctggatccccagtaacgccgataattagagagccgccgtctttcgctttgcctgaaccatttgctttgtctgaactagcgccagagcctccgcaagccgttaacaccaaggcaaaaaccgagataaccgctactaataaaaatttcttcatctaacaaaaactcccctctttaagcgctaaaaaataacacttcctctgttttttggtcagaatcgaagcgcctcattaaaagctactacttatctgccagaatattacttctgatcggaattagcatagaacttgcgctccgctgctgggcttcactgggccgattccctccacctctcttgataagaaaacgtaatactattattcctataagtttactgtgaattaaagatacactgaaacaaagcagat

SEQ ID NO: 3551 - DNA, 3166 bp, Listeria monocytogenes 4b
  misc_feature (1)..(end): n can be any nucleotide: a,g,c or t/u
tatacaatcaaagaaaaaattctcagtggaaagcttcatgtaggtcaacatatttcagaagctggtattgcaaaagaattatctattagtcgaacgccagtcagaaaagcaattgcggttttagtatccgaagagttaatcgaatacgagctgaaccggggggcaattgtgattgaaagcagcatgagtgcaggacgttttattgaattattagaaatggccgaaatccttgtcgtacaaacgattgaaaaatgtaaaaataaaaatttaacctataaaccagagcaaggtaatgcgctattagaggaaatgcgcgaaattcaaaaagaagaagatgtggaggcttatctgtcgttacttagcaaatggttgttgcaatttgttgcgcagttagctaatagttatgctgaagatattgttaggaaaatgaagcgagatttctttaataaagcgcaaaaagatattaaaatgattcctgtgctcttggaagaagaaacaatggaaacgttagaacagttaacttactacatggtagaaaagaaacacgatttagcaaaagaggtaatacaaaaattagtgaatttgtatattatccgtacatttagatagtatttctaaaggtaaattgcttaaaaacaggaggtgcttttgatgcggaaagtatacgaaatatttattttagactggcgccgtctctttaaagcgcctttagctttattattagtaattgcattaattattttgccatcattatatgcttggtttaatattgaagcactttgggatccgtattccaacacttcggggatcaaagtggcagtttcgattgatgatgaaggcgcggaaatagacgtacctgggaaaaagccgcaacaagtgaacgtcggggaccagctcaagaaaacgttagaaaaaaataaaaaactcggttggacttttgtaagtgaggatgaagcgaaaaaaggcgtgaaaagtgggaaatactacgcgtctattcatattccaaaagatttttcagaagatatggtttcggtcgtaaatgataatgttaccaaaccgacaatcgattattccgtcaatgaaaaaatcaatgctatcgcgccaaaaatgaccgagagtggcgcaacgacgattgtaaatcaaattagttctgagtttgtcggcacagttagtaaagccgttttggaagagtttaataaagcggggattgatcttgaaaatgaattgccaacaattcgtcgcctaaaaaccaaggtattccaagtgcaggatgctttaccagaactgaaaaaaatgggagcagaagcggtcaaaatagaagccaaactacccgaactaaaagccaaagcaaaccaagttgtcgagctaaatgaaaaaattcctgaactaaataaagcaacagaaaacgtcttattagtggaacaacaactaccaaaaattgaccaactcgggcaagatattttagtgctccaaaagaaaatcccggaaatcaaacaaatcgccgaatcggtaaaagaagtagatgaaaacttcggaacgattaagaaaacggtcaatgacgcagtgaatgaatcgggcaaagcgcttgatgtgattgatacagcaatggcggcaattccaacggtagaaaaaattgctcaaaatggcagcggctatgtggataaagtatctgattttgcggatgaaatcaataagtcctttgatacgttagcgcctgctattaaacaaaacttaacgctaatgaagcaaatggcggacaacatctatcaagtgacagaagcaatcaaaaatggctcaatcacgccagaacaagctattacggaattgaaaaaaatggagcaagatattgattccttacaacaaatgattaccaaacaaaccgcgacattagaaagtttaaatgaaacattgccgaataagccatttactgatttaattgcgaatttaaaaacgattaatagccagttaggcgcgcaaaaagaaacgattacaaaagtacgcacagaacttgaaaatggcgcgcaaccttccgaggaacttttaaatcaactgaatgaacaagcgaaaaaagttagcgcgaagttagaccaaattttagcgaactatgattctgaaatcgttccagcaattaaagtcggcttaaaccaaattcaaggagatttgaaagacagccagaaactattagaaaccctacaagcgaaaatcccagaaattacgcaggttttaaaagattcgagggaaacactacaaaccggtcaaacatacttaaaagaattccaagaacgcttaccagaaattcaaaaaacgttagatgaagcgacaaaagtaatcaacaccaagctcgacacgattatcgcaggcattaacgaagcagccaacttttaccaaaacgattatccgaatgtaaaagcgaacataaaaaaagcggccaacttcattcgtgatgatttaccagggcttgaaaaagaaataaatcaagcctccaatctcatccaagaaaaaatgccggaattcgaaaaagcgattaaaattgcggccgatctttcgagggaagaattgccggaattcgaaaaagccattaataatgcagcgaataaaattaccgatttcgataaaaattacgatttgcaaagcattattaagatgctcagaaatgacgcagataaagatagttcatttattgccaatccagttaagttaaaagaaacaagctactatccaattccaaattatggttcggcaagttcgccattttatacagctctttgtttatgggtcggtgcgctcttgttgatttcgttattacgtgtggatgtagaagtgccggcaggaattttcagccattatcaccgatattttggccgattgctgaccttcctatctatcggattaatgcaggcgcttatcgtgacgctcgggaatattttcttgctcggggtatccatcgcagaaccattactacatgtactattcagcatgtttatcagcgtggtgttcatgacaattgtctacacgctcgtatcgctatttaataatgttggaaaagggattgcgattatcttgttagttntacaaatttcaggagcaggcgggaactttccaattcaagtttcgccaccatttttccaagctatttatcctttcttgccattcacttatgccgtta

SEQ ID NO: 3552 - DNA, 3259 bp, Listeria monocytogenes 4b
  misc_feature (1)..(end): n can be any nucleotide: a,g,c or t/u
tgaataccttgttcgacaattttatgagaagaaatctttttaatatttgctacgaagccaattccacaagcatcgtgctcattttctgggttgtataggccgtgtttttttggtaaattagtttgtttcatcctagttcctcctcttcaaaaaccgaatccttctaagtctttctggtaattatttaaattaactgataattaaccagcgattcagcttaccttacatttcttgtagtatctattttattccttttcatttatcgaaacaatatatataatagaataaaacaatctcatttcgagaacaattggaggtaagaaatggaactacgacaattaaagtattttatggaagtagcccgtgtcgagcatatgaccaaagctagtgagaatttacacgtagcccaatctgccgttagtagacagataacgaaactcgaagaagaactcggcgtacatttatttgaccgtgttggaagaaatatgcaactcaccagcgttggtcaagatttcttaaaacaagcagcaatcgccttaaacgagctacaaaaagccgaagcactcgtgaccgaatataccgatcccgcaaaaggaactgttcgcgtcggcttaccgaactccctgtctaccaaagtgttgccatccgttatttcgacctttcgggaaaaatatccgcaaattacctaccagtttatggaaggcaccaatgaagaacttaccgagatgctcttaagcggcgtccttgatatgacttttttatcgcccgtcccagaatctagcgaacaaattgaagccattcgtttttttgatgaaaaattgaagctaattgtccctaaaacccatccacttgctgaaaacttcaccgtttcactaaaagagctcgcttccgaaaagttcgtactttatccagaagactttgatttatataaaatcgtaacaaaagctgccaataaaaaaggatttgagccacaaatagcatttcaaagtagagatttttatacaattcaaggacttgtcggagcaggtcttggtattagcattttgccagaaatgattttagatggagcgatttttaaggaaacgaaaagtatcgctttgcgtgataaagaattgcggcgttcggtcgggattattacgacaaaaaaacggaacctatccccttccgagaatttgttccgttcgtttattatttcgttcttttcgaattaattattttcagaaaatgcagctggataatggatagttccagctaaattttctaaactaccatcatataattctaataacataaagtattcagcaggcacatcaaatggcgcaggaatagcaaactgctcagaaggaataaagccaaatcgcggataataatcagcatgtccaagcacagcaatggccggatatgctttttcgcgtgataaacggattccttcttccattaatctcgagccaactcgcgtcccttgatacgcaggtaaaacagcaagtggcgcaagtgctaaaataaatctgcttcgtccggctgcttcaagcgaaatctcactaaacataatgtacccaacaataagtccatcctccgcttctgcgacaagggataaacctggttgataataatcggatgtccggatactttcaatcaagtctgcttccacagtacccttaaaagcttcctcattcacacgacgaatggcctcgtaatcttgtggttgttctttccgaataatcatttttacttagccactcgtttcattgccatactatcttctaactgtttcatcgcatttaatactacatcagctgtcatttcaccgggcatcatatggattgtttcatgtggctccgttgcacgtttagatacggccacaagcgtttcttccgcaagtgtcgcaagtcccatatcatataaactcatcggaagaccaagctcagaataaaatggcaacaaacgctcgatttcatcccatctattttctattactaattgaactaaaataccataagctactttattaccatgcaataagtgatgtgtttctggaaccatcgttagcgcgtcatgaatcgaatgcgctcctgcacaacgtccataatcatcgccaaaaccaccgaccattccaccaactaaaatattcgtctcaataattttaacaaacgcttcattcaatacttgtttgtccatggcagcaagtgcttcttcgctatattgcaacaagttatcacggcacattttggcagcaaaatgcgcgatttcaatttcgactgatttagttgataaggaattaataatcacgtctgcctcgtaccatttggctagcgtatcgccaattccagcaactagtaactctttcggtgagtctaaaatcatttccggatcaattaataacagcgcattactactcgcaaacacatcgtaacgaatcatagcgccctcttcgtcgtacatcacactaagtggcgtataagcggcacaagttgatgcaagtgtcggtaagataatgactggtaaacgtagaactgctgctgtcgctttacatacgtcagctatttttccgccacctactgcgataatcgcatccatcttatttgtttccatgattgccaccagacgatcgcgctcctcgtaggtagaaccaccattatatacttcaaaagtagatgtaacagttgataaaacagggaatttctttttagcgacttcccaagaagcatttccacgaactactaatacatttttcaaaccgcggcgttctaggtgagtaggtaatgtatcccacgcgcctacttggcataaatattcttgcggagctccgcgaacaatcaattctttattcaacaaaaatcatcccttctgtctggcacggtcggatattcggctgcgacatttataattcaaattgtataggaacttaaacctactgtcaatcgcactattgcttagcgatttcgtcatcaccgaaccattttttactaatttcttgcatttttccttctttgtataatttttcaaaagcttcattgatttttgtttgcagttctttatcacttttgcgcattcctacagcaaaatctgtggcatcaaaaccgcctgttataatgttgtaatcgtctttatttttttgtttatcaatgtaataacgcgcgtacacttcatcaatgattaaaccatcgattcgtttgttattcanatcaataaaagctgtatcaacgtatcgatattctggtcgtattatagtgcttgttctccacctgcgttaacactc

SEQ ID NO: 3553 - DNA, 2656 bp, Listeria monocytogenes 4b
  misc_feature (1)..(end): n can be any nucleotide: a,g,c or t/u
aattgatgaggaagtagttgttgttgcagctgatttaacgccttccgataccgcacaacttaaccgtaactttgttaaaggtttcgtaacggatattggtggacgtacttctcactccgctattatggcacgttctcttgaaattccagcagtagttggaacaaaagaagttactgctagcgtagcgaaaaacgatattgttattattgatggtttggaaggtaatgttatcatccacccaacagaagaacaaatcgctcactatgaaaaaattaaatctgattttgctttacaacaagcagaatgggataaacttaaaaatgaaaaaaccgtttctaaagacggcgttcacgtggagcttgcagcaaacatcggaactccgaatgatttagaaggtgttatttctaacggtggggaagcagttggactttatcgtacagaattcttgtacatgggtcgcgacgatttcccaacagaagaagagcaattcgaagcttataaagcagtagtttccggaatggacggaaaatctgtggttgttcgtacattagatatcggtggcgataaaacattaccatacctagaacttcctgaagaaatgaacccattcttaggattccgtgcaatccgtctttgttttgcgaatgaagaattattccgtacacaacttcgcgccttacttcgcgcaagtgtatatggtaacttaaaaattatgttcccgatgattgcaacagtaaatgaattccgtcaagcgcgtgatattttactagatgagaaagcaaaactaaaagctgctggaacagaagtatctgattccatcgaacttggaattatgattgaaattcctgctgctgctgttcttgctgatcaatttgcgaaagaagttgatttcttctctatcggaacaaatgacttaattcagtatacaatggctgcagaccgtatgaatgaacgcgtttcttacctttaccaaccatacaatccatccattttacgtttagtcaaaatggttatcgatgcttctcataaagagggcaaatggactggtatgtgtggagaaatggctggagatcaaacggctgtaccacttcttttaggcctaggcttagatgaattttcaatgagtgcttcaagcattcttaaatctcgttcgttaatcaaacgtttagatcaatctgaaatggtgaaattagcggaagaagctttaaataaatctacagcagaagaagttgtagaattagttgaaaaatatactgcagaataatatctgaataaagacctagacaattttgttgtctaggtctttttatgttgtgaaatagcctccgcccaagtataattggaaatacagttagttttaaaagggggcaacaagattggttatctatctattagcaggtttttttctgcttctgttcattgtcttgtcgtttatagatagacgacgtattagcaatgggattattttgacaatggcactatttttttctgtgctttcggtggtttatgctactttttcaaaagggaatgaactactcgtctcggttatggggacggtgttacttttattagttttacttattccattttttgttgtagggatagcaacgatgctcattgtaaatggacgattaatgttgaaacgtgaagggcgtaaattagccaatatgcttcctttaattattggtttaggcattttagcacttattattacatggttcggtagtattttaaaaacaggtagtccgattcttgggattgtggtagtttttattgtggcattagttggttatttttcctttttatttttatcgtttcttttatcgacttttctctatcaatttaatttcccaagatataatcaagattttctgattgtactaggaagtggtctgataggcggtgatagagtgcctccattgcttgctagtcggttgaatcgcgctattaagttctacgacaagcaatacgccaaaaaaggcaaacgagctacttttatcgtatctggtggacaaggtgctaatgaaactatttcagaagcagaagcgatgcgaggttatttaatagaaaaaggcattgatgaaaattttattattatggaagatcaatccgttaatacactgcaaaatatgaaattttcaaaggcaaaaatggatgcaattatgtcaaactataatagtttattttcaacgaataattttcatttatttagagcaggtatttatgcaagaaaagcgggcttgaagagtcaagggattggtgcaaaaacagctttatactatatgcctaatgcgttaattcgagaatttattgctattactgtaatgtataaaaaagtacatatggtcttacttggtttattactattgttttttgcgtttttagcgattataggtgttacttttagataggaggttagcctgatggagaaaattggatttgttggtacaggcgtaatgggttcgagtatggcagggcatttactggaggctggttatgaagtattggtgtatactcgcacaaaaacaaaagcagaagatttacttgaaaaaggagcactatggataaaaacaccaggagaattggctaataaagtggatatattaatttcaatggttggttatccaaaagatgtggaagagctttacttaggcga

SEQ ID NO: 3554 - DNA, 2034 bp, Listeria monocytogenes 4b
  misc_feature (1)..(end): n can be any nucleotide: a,g,c or t/u
gattatatgctttccaataaatatcgtgccctcgaaaataaaaaagcaattgaagccgttgcagcaaaaacagataataaaaaagtgattgatggaatgacagccgtaatggaagttcgtgaatcttatatcaatgcagcctttgatgaaattgatgcaaaatatggttcgatggacaactttttaaaagaaaaactcggactaaccgatgctaaaaaagaacaactaaaaaaagcctatctttattaaaaaagtaagcccttgaaaaagggctttttttttgcgtacaaatagaatctgaagtgaagaaccattttaaaaagatttgtatacaattgaaagacaattcgtgtaatgttaactgctataggtcttaataccctattaggaacagtgctaaagtttaaatacaggctataaatacgtatatttgtataacttttagactaaaagaatcgaattgaagtattttttggttctagtactttttactttaatttttaaaaatatactatatagtaaagttatctaacgggttataacagctaatgttaggtccgaaaacgaagggagggacattgggctgaaatggttggaatctgatattggataaaggttcaggggatacttaatagttagcttattaggaaaacataatttaatacctttattctgttttcagttatttttcaaaatcaagaacgattgatttttaagggggaaaaatgatgaaaaaacagcgtgtagattacaaacggagattagaccaaaagcgagcgcaaaaagcaaaattaattgcggcgcttattacgacaacaacgatgatggtagcgcctgtcactgtgaattacgattcttttaatcaccaatttgccctaagtggtattcaagcggatgcggcaacaattgatttattaggaaattctaatttgaatacacagtattctaatgggaaattagtgattactctttctgggaatcagttagttagtgctagtgcagtatccacgtactatccatactttgaactaccaagtgaactttcttctattttgagtaatccaaatataagagcaaatacgaaaattgattataaaattgcttatttaggaattggcggtattggattatttaatcaaggtacagtaaatggaagtaactcaagcaatttctttattgattctagtagaaatgcggttggtgcaaaagtaaatcacttactgggagttggagttggtagtatatctactttcactttgacaattgatttgctagcgcttggcgtaactgcgctacctagtgccaatgatggaaaattagattttgctgctagaactggtgatgggcttttggatgttgatctgttgaatagtaatgcggctcgtgggtttattactacggatgttggggatgccgacgccgatgctgacgctgatgcggatgccgacgccgatgctgacgctgatgcggatgccgacgctgatgccgacgccgatgcggatgcggatgctgacgctgacgctgatgctgacgccgatgcggatgcggatgctgacgctgatgcggacgctgatgccgacgccgacgccgacgctgatgcggatgcggatgcggatgcggacgctgatgcggatgcggatgcggatgcggacgctgatgcggatgcggatgccgacgccgacgctgatgccgatgcggatgcggacgctgatgcggacgctgatgcggacgctgatgccgacgccgacgccgacgctgatgcggatgcggacgctgatgcggatgcggatgcggatgcggacgctgatgcggatgcggatgccgacgccgacgccgacgctgatgctgacgctgatgcggatgccgacgctgatgctgacgccgatgccgatgctgacgccgatgcggatgccgacgctgatgcggatgctgacgctgatgccgacgccgatgctgacgctgatgctgacgccgatgctgacgccgatgccgatgccgatgctgacgccgacgccgatgcggatgctgacgacg

SEQ ID NO: 3555 - DNA, 3000 bp, Listeria monocytogenes 4b
  misc_feature (1)..(end): n can be any nucleotide: a,g,c or t/u
gttcaaacaggtaacggtttaaaaattgttactgagaaagaaaaaggaaactcctatggttttgctgtcaacaaaggcaaaaatcaagaacttttagagaaattcaatgctggattagttaatattaaagcaagcggcgaatatgataaaattttagaaaactacttaggtaaaaatgcgattaaagaaaatacaactgaaaaaggctttatgggaattattaaatcttcttggccagcactattatccggtttgtggttgacgattagattagccgtagtttcgctaataatcgccttcattattgggattacattcggatttatgaaagtgagcaatagcaaaatcttgcgcgggattgcgactgtttatgtcgatatcttccgtggaacaccattaattgtacaagcattcttcttctactttggtattccagcagcacttgatttcaggatgcctgtattcttagccggggttatcgcgctaagcttgaacgccggtgcctacatggtcgaaatcgttcgcggtggtattcaatcagtcgacaaaggacaaatggaagcagcaagaagtcttggtttaccacataaaaaagctatgatgaaagttgttctaccgcaagcaattcgaatgatgattccatcctttattaaccaatttgttatcacgcttaaagatacatcaattatgtcggccattggactcgtcgaactaacacaatcgggtaaaatcattatggcgcgtacattcgaaagtacttggacatggctaatcatcggaattatgtaccttatcgttattaccattttaacgaaaatatccgatcgtttagaaaggagattacgaaatgactaaacttaaagtaactggactgaaaaagagttttggcgcaaatgaagtcttaaaaggcattgatatagaagtaaaagaaggcgaagtagtttgtgtcatcggaccttctggatctggtaaaagtacatttcttcgttgtatgaataacttggaagaaattactgctggcgaagtagtggtcgatgattttaatattacggataaaaaagtggacatcaataaagttcgcgaaaatatcggcatggttttccaacattttaatcttttcccgcatttgtctgttttagaaaatatcacattagcacctgttgaattgaaaaaaatggataaagaagccgcgaaaagtaatgctttacgtttattagaacaagttggcttacgagaaaaagcagaagaatttcctaatcaactgtctggtggacaaaaacaacgggtggcgattgcgagagcacttgcaatggatcctgatattatgttgttcgatgagccaacgtcagcgcttgatccagaaatggtaggggaagttttaggcgttatgaaagaattagctaaaggcggcatgacgatgatgattgttacacacgaaatgggttttgctcgtgaagttggcgaccgagttatctttatggatggtggctatattgttgaagaaggcaagccggctgatatttttgataacccaaccaacgaaagaacgattagtttcttagataaagtattataaacaaaaagcaagatgactctggaatttccaaaagcatcttgcttttttttactttaaattaggactttttctgtttttcgattgttgttcataggaataccccatatttaataaggttgtatcactatttctagctgtaataaaagttaaactaatcggttgatttgtttcttcatcatagccagctgggatagtcagttctgggtttcctgcaatgggtgctagaaacgtcacggaacctcccatgccaattgttacgaccgcatccagtttatctttttgaagcatagagtcaagttcgttttgcgcctcctgaatcaaattactcgccaaactgtctgcttgtagcttcgtagttgtgctttgttgtgatttgacaagttcggattggccgtatttcatatttctcgctgggttggtctgattaaattgaataattgattctaacgtcgtcataggagcgttgttcacattcaaaaactgattcaaatcatgtttaaagtcagcatttagtaataaggcataatcagtatctaactgttcaaattcacctactgcaacaccttcaatgataatagcacctgcttttttcaaatcatattttattttttttataactgctgtttcttcattgctttcgccatccgctaaaagaccgatacgtttaccttgaagagaatccgtagaaagcggtggattggaagtagtatttattagagcatttgtcgtcaaataggcatcattaacagttcttgttagtggtccgggtgtatcaaatctgcttgataagggaataatacctttgttatttattaaaccttgagatggcttatacccaacagcagattgagcagacgcaggtataataatcgaaccatttgtttctgtaccgattgcaattgctgcaaaatcacttgttgctccagtagcggatccagaactcgaaccagagggatccaagtccgacgaataaggatttttgctttggccttttttacctgagtagccgtttggaagttcttcgtccattccagctgcccactcagacatattggtttttccgagaattaaagcaccatttgcttttagattttcaacaattgtagcgtcctccccgattacccaatcttttaaagcaacagtcccagcacttgtgggaagttcttttgtgccgatgttatcttttaaaaggactggcataccgtataaagcagatttgttggctgaattatctttatctagttgttctgcctccgcaataatagtggggttgatttcggttattgcatttagagtttggccattntggtcatatttcttgattcgatttaaataaataccggctaattctttgtagctaagttgttttgtcgcaatgagttgttggagttttgtaacatcagcaccaatgataagtggttctt

SEQ ID NO: 3556 - DNA, 2824 bp, Listeria monocytogenes 4b
  misc_feature (1)..(end): n can be any nucleotide: a,g,c or t/u
acagccatttcataaccaaatggggaacgagtatcttcgttaattgtacctgtgacatataaacttgtttcttgggttaatgctttagcagttgcgaaaatatcatcgccaacttctgcttttacgacaacgccttgcataaatcctgttccatcacgtaattgtaagaaagcaattttaccacttgaacgcttattcgcaagccatgctccaatagttacttcttttccgacaaattcggatgcttgattgattgtaattttcacttgtctacactccctatttcataaaacttttgattcgatttatagcttcttggaataagtctggatttgttgcataagaaaggcgtatataatcaggcattccgaatcctgagcctggaatgactgcgactttcgcttcttctaaaagagctgctacaaaagcatctacatcctgaaaaccttttttatgtgccgcttcttttacttcaataaagaaataaaaagcgccatctggttttttcggtttaaaacctggaatgctacttagttctggataaaaacgttccattcgttcttcaaaagctttgtacattttttctggaacttcttgactaccaacatacgcttcaagtgcagcatactgggcattagcagttggattacttgttaaatgatccgctaacttactcattccagcaatgatttctttatttgcagctgcgtaaccaattcgccagcccgtcattgaatatgctttagatacaccattaataacaatagttaaatcatacaaacggtcactcaaactcgcgatagagactaaatcagctttgttaccatagtataatttttcgtatatttcatcagataaaatgtaaatctgatgtttttcagcaacttcaccaatagcaataagctcctctttcgtatagcacataccagaagggttattgggtgaatttaaaacgattgcttttgtttttttcgtgatagctttttcaaaatttgctgctgaaattttgaaatccgcgtcaaaaccagtttctacaaaaacaggaataccacctgctaatttgacttgttcgggataagttacccaatatggaactggaataatgacttcatcgcctggatctaaaatcgtttgaaacgcagagtagagtacatgtttagcaccagtacctacgaaaatctggttcgtttcgtagtttaagaactgatctttttggagcttatcaacaatcgcttgttttagctcgatgattccactagaaggagtatatttggtgaatcctttgttcatggactcaattgctgcatcgataatattctgcggggtattgaaatctggttccccagcacctaagccgataacatcaattccttcttgtttcatttgttttgctttagccgtaatcgcaagtgttggcgacggggccactcctttgacacgttttgataacggtaagtccattttattccctcctccaatttagttacaagttttcaatctctctgtaccattcacctgtttcaaagttaatgtcaaagtagtttagcttgtcattcttatctaagtaggcaacttcccaaataggcgtttctttttccattcctaaattcacatgtaaaattttctttggtttcttttcttttgtgactttatcgcgtgcttgttgttctgtaatcccatcagatgcgaatttaacatatactttgtcggattttttctttggaacccaaacaatgatattcttattcttactgttcttaccagttaatacgtaatacacttcttttggcccattatatagataaaattgatctgttgtttttaaatcaacttggccacttattcggtctaaggcttctgtttctgcattggttactggtttttctgcatatctaaagtacagaaaagctgctacgacaagcacaataattatgccgagaataatcgctatccatttgccaatcttacgcttaggttttctatttcgcaaaataatctcgctcatttctatttctaaattaccggaattcctccggcgatatgcattttcattttcgcatagatacattatagcaatagcggcctaagatttgaagtcatatcaggaaaaatttaaccttccttaaagaattcactcacttcttctaataaatccgcctgtttgcctttcaagattggcgcgcttgggattgactctaaaaatgcttttccaaattttgtcgtatctactcgattatcaaaaacaaatacgattccgcggtcggattctcttctaattaaccgaccaaaaccttgcttaaatcgcagtacagcttcaggtagagaataggtttggaaagcattctccccgcgttctttgcgaagggatatttgtgcttttgtataagggtcatccatcggagcgaatggtaatctcacaataactagacatgacaagtcttctcctggaatatcaattccttcccaaaagcttgtcgtaccaagcaaaatagacttatcaaacatttggaattgttttgtcagtcgtgcggcgcttcccgctgaaactccttgcgctagaaggacatactcttctaatgatttttcatttttcatatgataatacgttttttgtaacatatcagaagcggtgaaaagaacgagcatccgtccattcgttttcactgctatgtggcgaatatatttcgcaagttccaaggtatatcgctcaattggtgtgtctttaattgggggcatatcatctggatcatcactcgcgcttttcttatatcaaacggaagatgctttcatatgttctcacgcttcaatactctcgagcacactt

SEQ ID NO: 3557 - DNA, 3082 bp, Listeria monocytogenes 4b
  misc_feature (1)..(end): n can be any nucleotide: a,g,c or t/u
ccgagagcttttttcagcatcgaaatatagttggtagcccgacatccaccacctgtttgcgtcatcaataccgctaaattatttacatcataatcgccgtgtttcagcgcatccatcatttgtccaatcgttaaaattgctggataacaagcatcgttattgacgtaacgtaagccctcatccactgcgcgtggtgtaactgctggtaatacttccaagttataaccgcccactttacaagctgcttctaacatttcaaaatgggtcggagctagctgtggcgctaaaatagtatacgttttcttcatttcctttgtaaataatggacgttcttttggtttcggcataatccctggtttcacgttgtttttctcacgttcttccattgctgcttttaacgaacgaacgcggatacgtgcggcaccaaggttattgatttcatcgattttaagtagtgtatatactttattatgaccttcaatgatttcttggcacatatccgtcgtaattgcatcaagcccacaaccaaatgacgtcaattgcacaaattccaaatcttcacttttagcagtaaagctggctgcacgatacagtcttgcgtgatatttccactgattttcaacccgaagtttatggtcgatttctccaagatgagaaatcgaatcttcggtaagaaccgccatgccgttcattgtaatgagttctggaattccgtggtttacttctggatcaatatggtatggatgccctgcaagaacaatccctttgattttatttttcttaatgtaagtaagtgccgcttctccttctgcttgaatgtctttgcggcaaagttctgcttcctctagccctgcttggactgctttttccatatccgcggctgggacttccgggaaagcgagactcatttgttcgattaatgctttttcattatctaaagttaaaaacggactgatcattggaatatttttctcttccaaagcatccacattgacacgaataacttctgggtaaccagccacaacaggacagttaaagttattcgttgcttcaccgaattccggtttttcgtaaacgacagatgggtagaaaatgcgatccgcttttttcttgattaaatccataatatgaccgtgtgttaatttggctgggaaacaaactgcttcggaggcaatcgtttcgatacctttgtcgtataggtttttggatgatttcgatgataaaaccactcggaaacctaagttcgttaaaatcgtatgccatagtggataattttcaaaaacgttcaatgcgcgtggaataccaatggtccctctagttgcttctgattttttcagcgatttgtaatcaaaggtacgttttagtttatacgcatataaattgggcagtaaattacgcttcgtttcgacacgttccccgcgttcacaacgatttccactaacaaacatccggtcatcgccaaatcttgtcacggttagctggcacgtgttactacaaaggttacagcgcgactgcgaagtttccgcgctaaattcacgtaatttttctaatacgagcatctccgttacttcgccagtttcgtaatgttcgcgggcaattaaagcggccccgtatgctcccatcattccggcgatatccggtcgaactacttcacgtccagttaacagttcaaaggcacgcaagacggattcgttgtaaaaagttccaccttgaacgattactttttcgccaatgtctttcggactgcggagtttgattactttttgtaacgcgttttttacgactgaataagcaagacccgcagataaatcttccatgctcacaccttctttttgcacttgtttcactttggaattcatgaaaacggtacaacgtgaacctaggtctacaggtgcttttgcttccagcgcccgagccgcaaactcttcaatggataaattaagtgtttgcgcaaatgtttcaagaaacgaaccacacccggccgagcaagcttcattaagcatcaagctatccagtgcgccttttttaattttcatacatttcatatcttgtccgccaatgtctaaaataaaatcaacatccggtaaaaattcacgagcagcacgataatgcgccactgtttcaatttcgccaacatcaatttttagtgcggctttaataagcgactcgccgtagcctgtaattccagactgcgcaactcgaactttttccggtaaaatttcatataaatcactcgttgcgtcaataactgattgaagcggattcccattattactagaataaaacgagtaaagaatttcattggtttggctcattaagattaatttggtcgtagttgatcctgcatcaatgcctaaataagcatccccttcataatcttccagttttgctcgtttggctttcatttgattatgacgcgcacgaaaagcttctaagtcttcttgcttttcaaaaagtgctggtaaaatgaccgtatccgtcgccatcgtggtcatatccatattggaaagtcgataaatcatatcatctacttttaaaggtacatcatttaatccagtaaaagctgttccaagtgcaataaaatattccgcgttttgaggcgcaataatatcactatctttcatcttcaatgtttctgtaaaacgatagcgcaattgatcaaggaaagtaagtggtcctccaagaaacgctacttttccgcggattggacgtccacaagcaagcccactaatcgtttgtgtcaccacactttggaaaattgaagcggcaatatcttcttttctagccccttcattaagtagtggttgcacatctgttttggcgaacacgccacatctggaagcaatcggataaatcgtattcgcattttgtgccagttcgtttaaacctgttggatctgtttgaagcagtgttgcgatttggtcaataaaagcaccagttccacccgcgcaggcattattcattcgttgctcaatcccaccactgaaataaataatcttcgcatcttccccgcccagctcgattactacgtctgtctctggaattacttgctccactgcttccgtacaagcaattacttcct

SEQ ID NO: 3558 - DNA, 3761 bp, Listeria monocytogenes 4b
  misc_feature (1)..(end): n can be any nucleotide: a,g,c or t/u
attaatcattttaccgttattcacgggcttccaacaacaagtacggacacgacttccggaagaagcaagccgtaaaattgctgttgaggtaacaacattagcgacaattattgctgtagctggtttattaggaattgtgatgccagtactgacattgttcgctttcatgttcgctgtaattggtcgattttggatttcttatcgccattatcgttccgaaaaattagcaccaaagaaatttggtcctcagccagatgggcttgtagttctgggtgctcgtgcggccactccgtctgcgcgactaaacttgaaagctggtgaaaaaattacagaagtaaacagtcgaccagtgcgtactcgcgaggaactttacgaagcgctaaacttaaatcgagcattttgtaagctgaaagtaattgataacgctggtgaaccacgttttgaacaaacagcactttatgagaatgaatcatttgaacttggtttgttattagtagagccaagataattttaggacaccagtgttgtttgaaagcagcattggtgttttaagtttttgtaaagataagattaatataaaggcatttctacccgaaaaaggttaattcatgctatattttagataaaagtgttacataaagaagggatgggaagtacgttggtaaaaattcttgtagttgatgatgaagcttctattgttacgttactgcaatttaacattgaaaaagctgggtttgatgtggtaacagcagaagacggcagaaccggatacgaactcgctttgtccgaaaaaccagatttaattgtgcttgatttaatgcttcctgagatggacggaatcgaagtaacaaaaaaacttcgccaagataaagtaaatgtgccaattttaatgttaacggcaaaagatgaagaattagataaaattatcggactggaacttggagcagatgactatatgactaaaccgtttagcccaagagaagtagttgcaagaattaaagcaatcttgcgtcgaacagaaggaaaagccgaaataatagaagaaataaccgaagattcggaagctacgatattaattggtgatttgaaaattttgccagatagttatgaagtgtatttacaagatgatttacttgatttaacgccaaaagaatttgagttattgctattcttggcaaatcatcgtggcaaagttttctctagagaccaattgctcgatactgtctggaactatgattacgttggagaaacccgaattgtagacgttcatgtcagccatttgcgcgataaaatcgaactagatacaaaacaacctaaatacatcaaaacaattcgtggcttcggttataaaatggagaacgtgaaataatgaagaaattatggctgaaaatcgggttatccttttttatcttatttttcgttgtgatggttattgttggcgttttttccggggaactaatgaaatcaacgtacttaaatatgaaagaaaatcaattagaagatgacgcaaaaattctgcttcaaacaactaatatggagaatttagatttagataaagatgccgcaactatccaaaaaagtcttgatccacttggcgaggatattgatgcacgcattacggtgatcgatagcaaaggcgacgtggtagctgatacaaaaaaagacccagaaaaacttgataaccatatgaatcgccccgaagtaacagatattctgaaaaaaggggaaagcgttggtatttcaatccgtgaaagtgattcacttggttatagtatgctttatgtcgcggttcctgttaaacatcaaggcaaaacagatggtgtactgagaatttcgatttcacttgaatctgttgatgcggcggttgctaaactctgggggaacttagcgcttattttcggtattgcacttgtaattatcgcagcaatcagtgtttttattgctagaaaaatcactagaccagttcgcgaaatcatcgaagtctctacagatttggccaatcataaatacgatagtcgcatccacggtaaaataagcggagaacttcaagatctctccatcagtgtaaacacattagcagaaagcttggaaacgcaaatgtttgaaattaagcaaaatgagcaacgacttaatgctattgtccaaaacttagtaagtggcgtaatgctgattaatgtcgataaacaagtcatcatgaccaaccgcaccatgtatcaaattttaggagagacagaaatcaccggcaaaccattttatgaagtaattaaaagttttgcactgagccagttgatagaagcgacttttgaaacaaaaaccattcaacaaaaagaaattattctttatttcccgcgcgaaatgattttggatgcaagtgtttctccaattttaggggagaatggggaaattactgggattattttattactgcatgatatcactcaaattcgtcatttggaaaatgttcgttctgaatttgtcaccaacgtttctcatgaattaaaaacacccgtgacggctctcaaaggattcgcggaaacattacttgacggcgcaatgtacgacgaagtgctactaaaaaaattcctaacgattattaaagaagaaagtgatcgattgcaccgtttgattatggatattctcgcactttctagaattgaacaaaatccggtcgcggaaaacgttgagctggttgacgttgacgaggtaattgaacaatctgctcgcactatttttgaaatggcgaccgaaaaaaatattcgagtaaccattccagaaaaaacaagtgcatccgttatgattgaaacagatcgtgacaagctgcaacagatagtaattaacttgctttctaatgcaatcaactacaccccagtcgatggaaaagtagaagttaaatcggtcttcgatacgctgggattttgtttagttccctacttgttatgctatctagtattctatgtatgtttttgtaattgacaagccgttttgtaaactgatagaataaaagtaatataactgatgcgttaataggaagattagtacattttgttgctttataatagagagtctgtggttggtggaaacagataaagcgcaaaatcgaatggacttctaaggactgtttgtgaaagccagtagcgaacagcggctaaagaccgttacttctttaatagaaattttctattgctaagagcctttttaggtacttagggtggcaccgcggataaccgttcgtccggtaacatttatatgttgggatggacggttttttattttcgcaatcagtgaaaaaattggaggaataaacatgaaaaaagtaatattttccggaattcaacctagtggacaattaactttaggaaattatattggagctttgaaacagtttggtcagtttcaagatgaatatgaatgtttttattgtatcgttgacgaacacgctattacggttccacaagatagattaaagcttcgtgagccaacaagaagtttaccagctctttattcagcagggggactggatcctgaaaaagcgactctttttattgaatctgaagttgcaagacatgctcaagccggctggatttgacaatgtcacgtgtgtattgacgaatgaggaccgctgactctttctgtaagctcctcggcgcggggaagtccgtctggggtgttgcgctccttagccatcccctcttcggtcgcccgctcctttaccgtcttatactgccgtggccgcactcgcgtcacctcccttatccctcatg

SEQ ID NO: 3559 - DNA, 2339 bp, Listeria monocytogenes 4b
  misc_feature (1)..(end): n can be any nucleotide: a,g,c or t/u
tctttatagctttctacttgtacagacgggatgttcattttgaacggagaataatattcttgggtgatggttccttttactgtaagccatgtatcgtttttcaaatcggttttttcgggcatttgaacaagcattccaaacacaccagaatcggcaacacagtgaattattccaaaacggaacaaaaacaagttattatcttgggtgacttcatcattataaacaaaaccggtaaattcgatttgtttcccagtaaactcccctggataattataaagaatttccatcgtcattaagtaattactatcattgactttgattgggttttgatcgatgatttccgctttttctttcgccatcattttttcataatcggtttccccaaaatagccactcgtatctggtcttaaaaattgattttgagcgtatgggtcgtcgccagctgcattgtttttcgggaaatgaaatccttttgccgaaacaatggtcgaatcaagcgttgcgacggggaaaagaaaacctgcaattaaggcgtaagaaagtaaaccatacaccataatttttttcaaaatggtattttcgccatcatgggtgtgtcccatatgctctgtttttgcaccaatatcttcatcgcgaaacaccataatgagctgaataatcgcaagtagaaatgcggctatcatcgcagaaaaagataaataagcgtacttcatatttatatatttactgatatcaccagaaatatgtaactgcatcaaataaaaaccaaatccaaataaaataaaaacgcgaaacatactttcaccttctttcggttaaataactaaggcgtataaaaagacaacaatcgttacactagtaacaattaataagacaaattttgctttaaatgctcctaacatcatcattagatttttaatatcaagcattgggccgaacactaaaaatgcaacgatggattgtgtggagaaaacactacggaaagaagcgccaataaaggcatcagcttcagagcaaagggacaatacaaaggcaagaaccatcataagtaagatggataaaatcggaccatgacctatggaaacaagtgtggatgttttaatgtatgtttgcatcgctgcggcaattaaagccccaaacacaaggtatttacctacagagaagaattcatcgactgcgtgttgtacggtatgccatattttttgactcaatgtcatttttgtatgcgcgtgctcctcaccgtgatggtggtgcgcgtgtcctttatgagcgtcttctgtaagtgctccgtcgcttgttaggacttgaaaattagttgtcgtactttcagaaggaccaccagcaagcgctagatttgttgctggaacggccactttttcactagctgcttcatattttaaaaagcgctctttgagtccagttcctttataaaaataagcgataatatttccgacaacgagagctactacaagacttcccgcaacacgtagcaacggaacttcccacgtactaccaaatgcaacatacgttgaaaataatactactgggttgataataggagcggtaagcatgaaggcaataccagcatgaagcggtaccccttttgccagtaaattacgaacgataggaacaatgccacattcacaggaagggaaaaatacaccaataaacgagccaacaatgactgctagaaatttatttttgggaataacacgggcaataaattgttctgatataaacatttgaataaagccagcaataaatactccaattaatacaaacggcagtgcctcaatcaaaatagaaataaaaatggtattcatttggaggaatgaatccggaagatgactaaacatgggattccttctttctttactctttttaataactatttgattctaagcctatcttttgcagaaatcaagtaaaatataaatgactatattttttatttagcttgaataaaaagacaacaatttaactaaattgttgtctttttgtgataatttcttgataatcttgttcgagcatggctttttctgtgggctttaaattcggttgcataagcttggctgcaatttctgacatgcgcatttctaaaatcaacttatcttcttctgtgatgcgacttggcgctttactttcttcatattccgcgaaagtcatccggtggaaagtcatttcattattttcgatgacgagtaattgttctgccacgtggttaacaaaagttctatcatgcgacacgaatagtactgtccccgcaaattgtttgattaacgtttccagcgcttccattgcatagatatccagatagttggttggttcatcaagaatca

SEQ ID NO: 3560 - DNA, 2777 bp, Listeria monocytogenes 4b
  misc_feature (1)..(end): n can be any nucleotide: a,g,c or t/u
gatgacgaaagcggaaatcgccgaagtgactggtcttagtgtagttacagtgaacaagctgattcgtgatttagtggaaaatgaagagattttagaacaagataattcggttgcgactggcggaagaagagctgtttcgtatgaaattaatcctaattttcagcaagtgttggttattagtttgcaagaaaagtggaagaaaattacttattctttttcggtctataatttgcttggtgagccggagtttgtggaggatatgtctggggaggatttggacattactgcgctgaaacggaatacgaaagatcttgtttgcgcttttccgaagatttcttgtgttgtaatcggggtaccggggattgagattggaggtaagttgcgggcgatggactttccgctacttttaaatgtgcaattgcgggagactttggaggcggaagtgaatttgccggtgttggttgagacggatacgaatgcggcaattttagggtataaaaatcgaccaatgaaagaggagaatatcgttggactttattatccggagcgttttccaccgggtgcagggcttttgatgaacggagagattttgaaaggtcagaacggactggctggggagattaagcatatgccgcttcaagtggactgggataactttgacttttcggtcgatgaaattaaagcacacattcgtaaaatggtgctgctaacgatgagtttttatgatccggaaacgattgtgctctatacaaatttttattttgggcagaaggatttcaccgaggaactgacggaagagttaaagcaagtttatccatatgcggttttgccggagattgtgttgtcgcgtaagtttacgacggattatcggattgggcttttggcgtttgggattgattatttggagaataatatgacggattggcggatataactttggaaagaaaatgctctagatttttagagcattttctttattattcaacaaaaaattttaagtctatgaagaaaagagtaataaaatatagttaagtagttgaattaatataatttttaaacaataactttaatacatgatataataacaagtgtaaatgcaatacttacactgaaaaacagcataagctaaattttttatgggaactatgaggtatgatatagagaaaattacagtaatagttcataacaaaattgcgaaaggacgtatttatgtggcagaagcaaaatttgaagcagctttaattaaaaagcttgaaactgaaggatggacttatcgggaagatttatccaatgttagtattaaaaaacttgaagagcattggcgtgatatcttaaatgaaactaacgctcataaactcaatggagtaccattgtcagaaattgagtttggattaattcttcaagaattacaacgtattaaaacaccgtatgatgctcaattattattagtgggtgcaggtggagtagggtcaattcctattactcgtgatgatggttcaagcctggaagttgaaattttttatgaagatgatgtagcgggcgggcgctctcggtatgaaattgtcaatcaagtaagatttgataatctacctaaaggattaacaacaaaacgtataattgatgtagctttacttattaatggtattccagtagttcatattgaagaaaaagatgagcatttacaaaatcagtggcgagcttttgaacaactcaaaggttatcatggtgacggactgtataaaggattgtttgcttttgtacaagttcaagttatcatgagtcaacattcggcgcattattttgctcgtccaaatgcatttgaacaatataataaaacttttgtgtttggctggcgggacgaaaataataaagatattacggatgcatttgaatttattcatcaagtaatgagtatccctgctctccaccgcttagttacagttaatatgatcccggatgcgtcaaatgataacataatggtaatgcgcagctaccaaattcaagcaacaagagaaattttacaacgcatgaaagaaatggaagcaagcggacttgtgcaaaaagagggcgggtatatatggcatacaactggatcaggcaagacagttacttcctttaaggttgcacaactcttagcgtctgcacctagaattaaaaatgtactatttattgtggatcgtattgacttaatagaccaaacactcgaaaattttaaaagtttcgcatatgctcactttaaaaatcgcattaagaaggttaatggaagagagttaaagagagaattaaagagaaaaggctcctcgcaaattttattgatttcagttcaaggattgacaaaagctgttaaaaaaggtttagaaaatgacgactggaatgtcattattatggatgaggcgcaccgaagcgcgagtggagaatctgtaaagttaatcaaaaaggcactcaagaagacaacttggttcgggttcacgggcactccgaacttttacagtgatgaaataaatgatgtcaaaacaactcgagaaatttcaacgcatgatatatttggcaaacgactacatacatataccattaaagatgctattggcgacggaaatgtcttaggatttgatgtaactatttcaacctcatggtgtgactccagaacttctaaaacttaaagagtaaacgnncnnnnnnnnnnnnnnnnnnnnnnntnnnnnnnnnnnnnnnnnnnnnnnnnnnnnnnnnnnnnnnnnnnnnnnnnnnnnnnnnnnnnnnnnnnnnnannnnnaaaa

SEQ ID NO: 3561 - DNA, 1725 bp, Listeria monocytogenes 4b
  misc_feature (1)..(end): n can be any nucleotide: a,g,c or t/u
attaattttcctaaaatacaaacgtttttagttttttagtgagctagaaaacctgctaaatagcgtataaattacatattggataatcgaaaagtaaaacacaaaattccaaaatggccagtgaaaaacactaaacataatttgcaatgagtcaattggctgcgtaagtaaatggatggagtgtaaacgagagaaccgtccaatgtatatcgcataactagataacaaaattaatcctatcaaaagtaattgataacttagtaaactagtccaattaaatcgtcttcttatttctgcaagcatttttgcgaaagaccagaatccaataaataatccaaagaacacaccgacgataatataagtgaaatgtcgccataaccaaggtgctgttgaaagtattccttctgccccgtatatttctaaacgttgtaaatgaagtaaatcagttaaaagatacggtgcatttgggaaaaatactagccaaacaatacctagtggccaaaaaatccaccagacgcgaggtttttttgtgagaaatactgctatttcgaaaggtatataagcaagcccgacatttaaaattagaaaagtgtaagtatctgcagtgaaatgcagcacaagaaagtatccgagtaagaacgctcggcaagtccaaattgctttcgtcatgaaatagtcacctcgtgtttgctattgtatcacaaatcgaggtgacgaggacatcttaacctgctaaatgaaacaaaagtactaaagctagaccaaatgcggaaaggaaaacagaaccgattaacgccgcagcaaaaggttttccacccatttttccgaacgatggcaagtggacatttaaaccgagtccgcccattgacatagcaatgaggaaatatgcgcagatgacaagaaaatcagttacagatgttggaataattccaaagctgttaattgcactagttgctaaaaagccgaaaataaaccaaggtacaggaagttcagcccatgaaaaacggtttttagttccagcattaaccatttttgcaacaacaaagcagactggaacaagtaaggctacacgtgttaatttaacaataaccgccatatcaacagctgatgagccgcctggatctgcagctgcaataacgtgggcaatttcatgaagtgtagcccctgcaaaaatcccataaccgtctggtccaagtggcagaattggataaatcaacgtatagataacagtgaaaatagttcccagtaatgcaataattgtagcagccacagccgtttggttattatcagcttttacttgtggagaaattgcaactactgcagcagcaccacaaatccctgtaccacaagcgaccaaaatagctagttttttatccactccaaaaagtttggctaagaaataaacaatagtaataccaaagctaaggcataaggcagcaatgagaaacactcgccagccagcatgataaatatcaactaagttcaagcgaaaaccaagtaaaataatcccagcacgaagaattaccttgttggaaaactgaataccagtaaaccatttttcaggaactgggaaaagtgcacgaatgataataccaattaaaatagcagttacaagttgtccgagaatcattaaaaaaggcaacttcgctaaaaaataagataaggtagcaatacagaaagtaagcgcaataccataccaaaaagtcttcgttttaaataaaattt

SEQ ID NO: 3562 - DNA, 2166 bp, Listeria monocytogenes 4b
  misc_feature (1)..(end): n can be any nucleotide: a,g,c or t/u
agcatcttttaataatcagattgctagaacctccatgttacatatgaaattttctcaaaaaatgcgtataatggagagtaattttccttcaatgaataggtttttcccaccaaccactcttgctgctgaacctagacgttattacagcaccatgcttccaaataacgaagatcctaatgagcctcaagatcctgagcagtaactttaaaaccaaataaaagccagttacataatagtagctggcttctccttaaaattattttttattttcaatcgcatctgcaattcgttttaacattaataactcatcctctgagtatgtataaggtaattctaaataccatttctcgagttcaggatttccaattaaaggaaaggcgtttaccgaattcttttctcgcaaaccagctacatcatctaataaaaaatcggttgttgttccaagaatttctgctaatttagccaaaataaaaattggcggtcggtggttatcattttcatacttgcttattgtggatgcagttgtcccgattttcgcagccagttgtttttgtgttaacctatttttctttcttaaatgaattaatttttctccaaattccaatacgcccacctcacttcacttccagtatagcaatttttcggaaataattcgagaaattactaaaaagaaatcgcctttttagtttcaaaagacgatttccatattttatacagttggtttcttacgtagaacaccaattaatcctgcgctgattaatgttccaataataattgcaataatatagaaccaaggttgggatacaaggaagataacaaaaactcctccgtgaggtgctaatactttaatgtttaagaacattactaccgcacctgtgatagcacttccggcaataaaactcggaatcattcgaagtggatcggccgctgcaaatggaatagctccttcagtaatgaatgaagcacccaaaatagagttagttaagcctgcatcacgttcttgagctgtaaatttatttctaaaaataagagttgctacaaacgttgctagtggtggtaccatgccagcagccattgttgctgccatgattgcgctaccgcctgttgctacactagctgcgagtgtacccgttgcaaatatataagcagctttattaattggtccacctaaatccgctgccatcattgcacctaacagtaatcctaaaataactgcgttcgttccacttaaactattcaagaagtcattcaaccaagtgttcaatgcgctcattggtacatttaatagcaacattaaaagtccgacaattaacaccgataaaactggatagaataaaactactttgataccgtctaatgtttttggtaactttttaagtgctagtttaattaactctactgcataacctgcaaggaaaccaccaacaagtgctccaaggaagcctgcaccaccaacagatgctactccacctgcaacaaaacctgctacaagtcctggtctatccgatatactgtaggcaatatatccagcgaatactggaagcatgaagccgaatgcaacatcaccgatttgttttaatagtgctgggatttcgttatatgaaccaagttttgcgagttgatcttgaggaacacctaacatttgatcaagcataaacgcgatggcgatagcgatacctccaccaattacaaacggcaacatgtgagaaacaccgctcattaaatgtttataaatttgttgaccgatagaaagtccgtctgcgctctccgtagcttgactaccttcctctgctttataaattggagcattgcctgaaattgcttctttaattagttcttctggtttatgaattcccgctgcaactggtttagcaattaaatgcttcccgtcaaaacgaggcatatctacttgtacgtcagctgcaataataactccatcagcttctgcaatttctttatctgttaaacggttttcaacgcctctagagccatttgtctcaactttgattcgtacacctaatttattagcagtttcttgtaatttttctgcagccatataagtatgtgcaattcctgttggacatgctgtaactgctacgactgatttaccagtttcattggttgaggttggagcaacgactgtttcttctgcgtcttcttgttcat

SEQ ID NO: 3563 - DNA, 2751 bp, Listeria monocytogenes 4b
  misc_feature (1)..(end): n can be any nucleotide: a,g,c or t/u
aatgcatgcctgagcggccgccactgtgctggaaagatattgaaacaccttatttaacgaaaagtacgccagaaggtgcacgcgattatcttgtaccaagtcgtgtttaccctggtaacttctatgcattgccacaatctccgcaaattttaaaacagttactaatgactgctgggtttgataaatattaccaaatcgtacgttgcttccgcgatgaggatttgcgcggtgaccgtcaacctgaatttacacaaatcgatttagagactagctttttaacgaaagaagaaatccaagcgattacggaagatatgttagtagatgtagtgaaagaagcgaaaaatattactatcgacaaaccgtttcctcgtatgacatataaagaagcaatggatcgttttggcagtgataaaccagatattcgttttggtttagaattacaaaatgtatccgatgtcgtaaaagatgttgattttaaagttttccaatccgcgatcgaaaatggtggagaagtgaaagcaatcaatgcaaaagcagccgcagctaatttttcacgcaaagatttagatgcactaggtgtttttgttgctaactacggggcaaaaggtcttgcttggttaaaagtagaggctggtgaactgaaaggcccgattgctaaattcttccctgaagaaaaagcaacagaactaaaagcatctctacaagcagaagatggcgatttattactatttgcagctgataaagcagatatcgttgcagcatcactgggggcgcttcgtaataaacttggtaaagagttaaacttaatcaatgaagaagaacttgctttcttatgggtgactgattggccgttatttgaatatgatgaagaagcagggcgctatgtatctgcgcatcatccattcactttaccaaaagaagaagatattccacttcttgaaacggactcttctaaagtaatggcagaagcttatgatatcgtattaaatggatatgaaatcggcggaggttcattacggatttataaaaaagaagtgcaagaatcgatgttccgtgcacttggctttacggatgaatcagcgaaagaacaatttggcttcctaatggatgcgttagaatatggtacaccgcctcatggtggtatcgcgcttggattagatcgtatcgttatgatcttagctggccgaaataacttgcgtgacacaatagcattccctaaaacaggtagtgcagtggatccgctaacaaatgcaccaggtgaagtgagtgaagcacagctagcagagttgaaactcgagacagtgaaaaaagaaacaaactaaaaaaagaaggtgagcgcaaatgctcaccttcttttcgttttaaaaatcatcacttaattcttgaatgttttcaacgtgtactttattaactaataaccctcgattggaatcattggaccagaatgggccgtccaattctttcgcttcactggagctgattttatttttattataaaaagtggcttccacattgtagcgattccctttttttactgcatcccaactctcttcagaaagtggtagtgtaattgatttgtttccagcgccatcaattttgccagtgatggtattgttttttgatttttggtccaccacgaaattaaaggtaacgtctacttttgacgaagcgtgttgataaagataataaccgccaaaaagcaggatagctactagaacggtgaaaatggggattttacgcatagggaatttcgcgcctccttatctgttctaaacgttcttcctttttcattataagtgtaaaagctaagaagcggaaggggtaaacgccatttctcattgattttttagaatagaggccccatttttaattaattcaccattttaactattcattttgatggtttatcttgtaatgcgtcgattccggtttcgccagtgctgattttaacgacttctgcaagtgagtaaataaatacttttccgtcgccgggttcgccagtacgtagcgtttctttaacgacacgaagtacatcctcaaccgggacagtggaaacaacgatttcaattttcattcgctcgtgaatattgctttctttttttgtaccacgataaagttcgataaatcctttttctaacccagtaccgagtgcttttgtgacagttaggccgcttacgccgattttcgcaagttctttttgaaacaagtgaaagcggtttgggcgagtaatgatttcgatttttgttaatccagacatattgttgcctcctttattcttgatatgctttttcgccgtgcagcgtcaaatcaagtcctttatattcttgttcttcgtttacacggattggtaaaaatagtttgataattacgacgattattgctgtcgctatagccacatatgctaccgttgaaccaatggcgattaattgttttactacgagagaagcattgccgtagaataatccgtctgctccagcttcatttacttttgttgtggcgaaaaggccggttgcgataccaccccaaatacctgcgattccatgaagtccgaatgcatcaagtgcatcatcatattttacttttgctttcaaccagaacacaggccagaagcatagtgctgcggcgaggaaaccaatgataagtgaacttggaacggtgacaaatacagcggaaggggtaatggatactaaacccaggattgctgcggtaatggttgccagcctaagngggcttgtgatgggggaaccatgg

SEQ ID NO: 3564 - DNA, 2028 bp, Listeria monocytogenes 4b
  misc_feature (1)..(end): n can be any nucleotide: a,g,c or t/u
gcctatcgtcacagctgtgtgctggaaagtgcgtaaagtgaaggtgctatattccagcaaaatggtgtattccattttggtagataagaggagctggatatgttcgactttccacttctctattctaaatagagaagttttttattgttttcatgaataaatctggataatcacacaacatactagggaggaaaaaagatgagaaaattaacaaaagggttaggaattttacttgcatcaagtcttgttttaggattagcagcatgtggaggaggcagtgacgacaaagccttaagcacagaaaaaattacaattggaacaacagcaggacctcaccaacaaatcgctgaagaagttcaaaaattagcgaaaaaagacggtcttgaaatcaaaatcaaaacatttgatgattataacacgccaaatacagctttaaatgatggtgatttggatgcgaataactaccaaacaattccatttttagagcaacaaaagaaagataaaggctacaaattagacgttgcttttaaaacagtagcattcccaatgggcatttactccaacgatattaaagacttgaaaaatcttaaaaaaggcgacaaaattgccgttccaaatgatccaagtaacgaataccgtggtttaaaactgtttgaagatgctggcgttattaaattaaaagatggtgtggaagaaaaagcaacgaaaaaagacattgctgaaaacccgcttgaccttgaaatcgttgaacttgaagcttctcaaatacctgcacaattagatgaagttgcagccgcagctatcaatactaactttgcaatgggcgctggactttctattaataaagatgccatttaccacgaacctacaaaagacaatccatatccaaacgttttcgttgttcgtagtgccaacaaagacgatgaagtcgtaaaaacattagaaaaatattaccattcagatgaagtaaaagcatttattgaaaaagaatttaatgggtctgtagtacctgcattctagggagttgttttattttgatcgaattacatcaagtttcaaaatcatttaacgtaaatggaaaaaccgtagaagccgtcaaaaatgtttctattacagtagaaaaaggagaaattttcggtgtcgttggttacagtggcgccgggaaaagtacccttgttcgttgcatcaacctgcttgaacgtccagatgccggccaagttgtgattgatgggaagaacttatctaccctatcaagcaaagaacttcgtgtcgctcgccggaaaatcggcatgattttccaaggatataacctactaaaaaccgcaactgtctatgataacattgccaaaccattaaaattagaaggcgtttcaaaagacgaaatcgagacgcgcgtaaataaatacttgtcaattgttggcttagaggataaacgaaacaactatccaagccaactttctggcggtcaaaaacagcgtgtggcgattgctcgtgctcttgcgcatgagccagaaattctcttaagcgatgaagcaacaagcgccttggaccctgaaacaacagaagcaattttgcaactgttacttaaaattaatgcggaactcggcattacgattttcttaattacacatgaacttgatgtcattcaacgtatttgtgaccgggttgctgtaatggaaaatggtcatttagtggaacaaggtacggttcttgatattttcacgaaagcaaaacacgcgacaaccaagcgctttgtgggatcggaagctagtttcgatatcccgcaagatttgcttgaaaaatatgttgcgactgggaaattggtttctcttcattttattggagacgaagcggatgaacctgcgctcgctcttgtatcacgtaaattcgacgttcttccaagcattttagctgggggaattgatcatttgaaaaacggaacacttggaaaactgctcgttcatttaaaaggggacgaagttgaatacagtaaagctatttcttatttgaaagaataggagtcgtgtt

SEQ ID NO: 3565 - DNA, 2410 bp, Listeria monocytogenes 4b
  misc_feature (1)..(end): n can be any nucleotide: a,g,c or t/u
gctttaactatatagtaagtgcttttttgtttaaactctactggatgatcagggtcactttccgcagttttaattattttattgtttgtttcactatctttaggtatttcatattcaaagctagatggagcggacgtgcttgcggacgtatttgcttgataatacacactgcttattgtccctatagcagaaagggttgttgcacttattatagaaataataatcaaggttttcgcattggatgatattctaaaggctaattgcgaggtcgagataatgttactacctttatagaaaatacgtttgttatttctaagttttgtaagtaaatacggtaagaaaaaggtaatgaaaagtgcagtaccaatgattaccgaagctaaaataactaatgccccaatagaaaagccaagttgtgcccaaatagaacctttagaatcaagtggttgtccagcgataaaatagcctaaaccaattaataaaatcgaaagtaaggctaagatgaatgaaggttttggacttttttcgcgttttgattctgagtggaacaaatcaagtaaagtggtgcggtaaataatacggtaaccagtaaatgatgtaaataacgtgatgataataaagacaatactcgtttgtattactgctgcccaagaaaaggcaaaaccaccaatactatcaagattaattaagttaagtaaaatggttacaaaaagcttggaaagtaatgtaccggcaataataccgatgattaatgcgccaagtcccataataaaattttcataaaacaacatgcgaccaatttcttttttacgaaggccgagtaaagagtaaagtccaatttctttttttctttttcgggtaaagaaattattggaataaaggataaaaatcgctacaaaaataagtagaatgactgaggagcttgaaaatgctgtcgataatttagctgattggtcaattctagctacaacagatggatctttcgaaagaacaaggaatgtaaaataaatcataatgctgaaaatcatcgatgcaaaatataaaaagtaatggacaaaattatgtcgaatatttttcttagctaaatcaaataacgtcatctgagtcgccccccagttttgcaaggacgtctagaattttttggaagaactccttacgtgttttagttccacgatagatttctgtgtataattctccgtctttaataaataaaattcgtttgcaaaaacttgctgcaaacgcatcatgtgttaccatcatgattgttcattcatctcggtcatctaagtcacgcaagctttcaagtaagttggtcgctgatttagaatcaagcgcaccggttggctcatcggcaaaaattaaacttggtgcagtaataattgctcttgaagctgcagtacgttgcttttgaccacctgaaatctcgcttggatatttatcaaggatttctgtaatgccgaatttttcactgataattgctaatttttcttccatttcttttactgggcgtttcgctagtgcgaggggaaggataatattttcacggatagttaatgtgtctagtaagttgtaatcttggaatataaaacctagtttgtcacgtcggaaagtggacatttgttgttcattcatgttttcgagttcttgtccggaaatcacaatctgaccagaagtcggtttatcaatagtagataagacatttagtaacgtggatttaccagccccagatggtcccataattccagtaaattcaccttctttaatatcaatactgatattttctagtgcagtgtagacatttcctttgctaccgtatatttttctcacattttttgcttgtaaaactgtctccattattttctctccttaaaaactagattcggttagtatatgtatcattctatcgtgtatataggactcgttccatcgtatcaaatgacatttacggtagatatccttacaaaattgttagtttagtgaaataaaaaaactggaatccagctaacaaaatcagtcatttgttagattgaattccagtttttacttatattaaatagtaaataatttagaaagttgctcggatggtaacaggtttccaataaagaaagaaccaaattcagcatatcgagcgcttgcttcatcaaagcgcatttccgttacgatgcgtttgaactccagtgcatcatcggaaaataaagtgacgccccattcataatcgtcaaatccgatggaaccaccgataatttgttgtactttgcccgcatagcttctaccaatcaaggccttggccccgattaagttgttggcggtccttccattggaagcatataccaattatcagcgccgtcccgtttttactcattgggtagaaacaatatngcttttagtgggagtgctggatagagtctcg

SEQ ID NO: 3566 - DNA, 1727 bp, Listeria monocytogenes 4b
  misc_feature (1)..(end): n can be any nucleotide: a,g,c or t/u
ttattcgtggtaaagtaccgatgacaaaagcagaagtgcgagcggcaagcattgatttacttaacttagatgatacgtcaaagaaattactagatgttggagcggggactgggagcgttggtcttcaagttgcttgtaatttcccgaaaatccaagttactgcgattgaacgaaacccagatgcagtggatttaattaaacaaaatcaagcgaaatttggattagaaaatgtaacagttatcgaagcatacgcgccaattgaattgcctgaaaaggaaacatttgatgctatttttattggtggaagtggtggcaatttaaccgatattatcgactggtcgttggcacatttgaacccgggaggcggtttggtacttaattttattttgcttgaaaatgcgttaactgcaatgaaccatttggaaaaattaacagtgagtgaattaacgatgaaacaaatccaagtttcgagttggcataaacttggagcaggtcattattttgaaccacaaaatccaaccgtaattatcggctgtaaaaaactagaggagtgaagaaaatggcagaagtacatttcgtcggagcaggaccaggagataaagagttaattaccttaaaaggatatcaattattaaaagaggcggatgtcgttatttatgcagggtcgctcgtaaacccggagttgctagaatattgtaaaccagactgcgaaatccataatagtgcaagcatgaatttaatcgaaatcatcgactgcatggaagcgggcgtgactgctggtaaagaagtggttcgtttgcaaaccggagacttttctatttatggttcgattcgtgaacaggtcgaggaaatgaaaaagcgttcgattcccttcacatgtacaccgggtgtgagttcattccttggcgcggcaagcagttttggggtggagtatacagttccagaagtaagtcagagtgtaattattacccgaatggctggcagaactccagtaccatcgcgtgaatccctccgttcatacgcggcgcaccaaacttcaatggtaattttcttgtccgttcaaggtattagaaaagtcgtttcagaattaatcaaaggcggttataaaccagaaaccccagcagctgtcatttacaaagcgacttgggcggaagaaaagaaagtaaccggcacgttagaagatatcgcagaaaaagtaacagaagctggaattacgaaaacggcgcttattatggtcggtgatttccttggagaagagttttattattctaagctatacgacaaggatttcaaacatgaatacagataaactggcgattattgctgtcacagaacgtggtcgcgatttagcaataacgttaacaaaaacggtagcagcaacgatttttgtaccaggaaagcattgcaatgagcaaacaaattctttaacgccggattttggaacagcgatgcgcgaaattttcacaaaatatcaagcattgatttgtattatggcgactggaattgcggttcgaacgcttgctccagcgatagaagacaagctgtctgatccagcagtacttgtcatggatgaacatgggaaatttattatcagcttgctttcaggacatgttggcggggcaaatgaactaaccgaacaaatcgctatgataactggtggtgcggcagtaattacaaccgcaacagaccgcgcaaatgtagctgcaattgataatatcgccaaacaa

SEQ ID NO: 3567 - DNA, 2894 bp, Listeria monocytogenes 4b
  misc_feature (1)..(end): n can be any nucleotide: a,g,c or t/u
atttgttttatttcaaaggaggaattgctatgcttaagtacaacattcgtggagaaaatattgaagtaacagaaccgatccgagattatgttgaaaagaaaatcgataaattagaacgatattttacggagactccagacgctaacgttcatgttaatttaaaagtatattccgataaaaatgcgaaagttgaagtgaccattccgctcccaaatcttgtgctacgtgcagaagaaacaagtggagatttatatgctagcatcgacttaattgtagataaattagaaagacaaattcgcaaacataaaacaaaagtaaaccgcaagttccgtgacaaaggggcagaaagagattattttgcttattctgatgttaacggcagcacaccaccagaagaaaatgaaggagattttgatcttgaaattgtaagaacaaaacaattttcattaaaaccgatggatagtgaagaagctgttttacaaatgaatttgctgggtcatagtttctatgtttacactgatgcggaaacaaacggtaccaatattgtttattctcgtaaagacggcaaatatggtttgattgaaacaaattaatttaaaataataattaacagatgggggccaatcttggtctccatttttttactcttagatgaagaatttatggcattttgataattttattgattaaaaagagataaccagttgtatattttagttaataagtgatagaattagtttgtatatttaagtgaagataattcctgaaagttattatagatgaaactgcgcgatgacagcgaaaacagtagaggagaatttaaatggctggactattgaaaaagatttttgaatcaggaaaaaaagatgttaaatatttggagagaaaagcagatgagattattgctttagcggatgaaactgctgctctttcggatgatgctctacgtgaaaaaacagtagagtttaaagagcgtgttcaaaaaggtgaaacactggatgacttattggtagaagcatttgctgttgccagagaaggtgcgaagcgtgcgctaggattgtatccatttaaagttcaattaatgggtgggattgttctccacgaaggtaacatgcaagagatgaaaactggtgaaggtaaaacgttaacagcgacactaccagtttatttaaacgcgctttctggtgaaggtgtgcatgttgttacagtcaacgaatacttagctcatcgtgatgctgaagaaatgggcgttttatacaatttccttggactttctgtagggctaaacctaaatgctttatcgagcacagaaaaacgagaagcttatgcatgtgatattacgtatagcacaaataatgaattaggatttgactatttacgtgataatatggttgtttacaaagaagaaatggtacaacgtccgctagcttttgctgttatcgatgaagtcgattccattttggtcgatgaagcgagaacaccattaattatttctggtgaagcagaaaaatcgactattctatatgtgcgtgcaaatacttttgtccgtactcttacagaagaggaagattatacagttgatattaaaacaaaatctgttcaattaaccgaagatggtatgacaaaaggagaaaactactttgatgtagagaacctttttgatttggaaaataccgtaattttacatcatattgctcaagcgttaaaagctaactatacaatgagcctagatgtcgattatgttgttcaagatgatgaagtattaatcgttgaccaattcactggtcgtattatgaaaggtcgtcgtttcagtgaaggtttacaccaagcgcttgaagcaaaagaaggcgtaactattcaaaacgaatccaaaacaatggcgacaattacattccaaaactatttccgtatgtataaaaaacttgcagggatgacgggtactgcaaaaacggaagaagaagagttccgcgatatttataatatgcgcgttattgaaattccaactaataaagtaattattcgtgatgaccgtcctgatttaatttacacaacgattgaagcgaaatttaatgcagtggtagaagatatcgccgaacgtcatgcaaaaggacaacccgtattagtctgtacagctgcgattgaaacatccgaacttatttctagcaaattaaaacgcaaaggaattaagcatgatgtactaaacgcgaagcaacatgaacgtgaagctgatatcattaaacatgcaggtgaacgtggcgcggtagtaatcgcaaccaacatggctggtcgtggtacggatatcaaacttggtgagggtacgattgaagctggaggtttagcagttattggtacagaacgtcatgaatcacgtcgtatagataaccaattacgtggtcgttctggacgtcaaggagaccctggtgtgactcaattttatctttctatggaagatgaattgatgcgtcgtttcggttcagacaatatgaaatcaatgatggaacgctttggtatggcagaagatgctatccaaagtaaaatggttagtcgtgcagttgaatccgcacaaagacgtgtggaaggaaataactttgattcccggaaacaagttttacaatatgatgatgtacttcgccaacaacgggaagttatctataaacagcgttatgaagtaattaatgcagaaaacagtttgcgtgaaattattgaacaaatgattcaacgtacggtcaactttatcgtttctagtaatgcatcaagccatgaacctgaagaagcttggaatctacaaggaattatcgactatgtggatgcgaacttacttcctgaaggcactatcacactagaagatctacaaaatagaacaagcggatatattcacaatctaaatttagata

SEQ ID NO: 3568 - DNA, 2952 bp, Listeria monocytogenes 4b
  misc_feature (1)..(end): n can be any nucleotide: a,g,c or t/u
aaaaagtgggaatagtttcggcggttttagtaatggctttaagcttagcagcatgtggtggtggaaaagacactagtaaatctggctcatctgatgaaaaaacattaacggtttccgttgacgcaggctacaaagactacgtgaacaaaataaaaggtgattttgaaaaagataatgacgtgaaagtaaaagtagtcgaaaaagacatgttcgaaacattagaagcattgccacttgatggcccggctggaactgctccagacgtaatgatgtccgcatttgatagaattggaagcttaggccaacaaggacatttagcggaagtaaaacttggaaataaagacgattacgatgaaaaagaccaaaaacaagtaaccattgacgataaaatttatggcgctccagcaattattgaaactctagtactttactataataaagatttactcgacaaagctccagcaactttcaaagatttagaaacactttctaaagattctcgttttgccttcacttctgaaaaaggaaaaaatactggtttcttagcaaaatggactgatttctacttctcttacggactacttgcaggatacggtggttatgtattcggcgatgaaggtacgaatccaaaagacatcggtttaaacaataaaggttcggttgaaggaattacttatgcaacaaaatggttccaagatgtatggccaaaaggtatgcaagacaataagagtgcagatgactttatccaagatcaatttgttaaaggtaaagcagcggcaattctaggcggtccatggtcagcagcaaactacaaagaagcaaaaattaattacggcgtagcaaaaatcccgacactaaacaatggcaaagaatactctccatttgcaggcggtaaaggttgggttgtaagtaactattctaaaaacaaagatgtagctcaaaaatggttggattatgtaactaaccaaaaaaatcaagaaactttatatgatatgacaaatgaagtaccagctaacttaaaagcacgcgatacagcgaaatcaaaaaatgatgaattaactaatgctgttatcgaacaatacaaaaatgcgcaaccaatgccaaatattccagaaatgtcggaagtttggacaggtgctgaaaacttaatgtttgatgcagcttctggttcgaaaacaccgcaacaatcagcagatgatgcagtaaaagtaattgaagataacgtaacgcaaaaatatactaaataataatgatttggcggggcaaagatagcgcgctccgccatttttttcaacttagctagtgaatctatatctagaattgagggtaacaaaatgaaactagaacaaaaacaaattaaaaatgttcgtcaagcgactttgttatcaatcattccgggacttggtcaattttataataagcaaaattttaaagggattgtctttttcgcactatttgctttgtttatcatagaattttttgcagttgggctgaatgcactgattggccttgtaacacttggatctgtaccgggtgtagaccattccttatttttaatgattgaaggtactttacaattaattgtgacattactatttataggcttttggtttataaatattttcgatgcaagacgcgtggctatgcagtggaacctaggtgaaactgttaaccgttctgcgattgctattataaaaaatatgctcgacaaaggtttcccgtacttacttacattacctgcatacttagtgatgacttttgttattattttcccagttcttgttactcttttcatggcatttaccaactatgatttttaccatattccgccagcgaacttaattgactgggttggatttaagaacttctttaatattttcttcctaagttcgtatcgtgacacgttcctaagcgtattttcgtggacactcatttggacaatctgtgccacttctttacaaattgtcgttggtgtattcacggcgattgttgcgaaccaaagctttattaaagggaaacgtctttttggggtagttttcttacttccttgggcggtaccagcatttattacaattatgagtttttccaatatgtttaacgacagtattggcgcaatcaactcgcaagtcattccacttctaaaccatttgccatttgttgatatcaatgcgattgcttggaaaacagatcctttctggacaaaagtggcgctgattagtattcaaggttggcttggttttccgtatatttacgttatggttactggggtgcttcaagcaattcctggtgaactatacgaagcagctagaattgatggtgcaagtgcgattcaacgtttccgtaaaattacattaccgatgattttatttgtaaccgcgccggtatttattacgcaatatacatttaacttcaacaacttttcgataatatacttattcaatgaaggtggtcccggaagtgtcggagcaggcgcaggatcaaccgatatcttaatttcatggatttataaattaacaacaggtacttcgccacaatacgctgtagctgctgctgtgacgcttcttatctctattatcgttattactgtttcgatgattgcctttaagaagacgaatgcctttgggaacgaggagatgatgtaaatgagagactttatgaaagatcagcggacaacaaagttcttaacacagtttttcacgtatttgtttttaaccgtgctaacgattattattttgtatccgattctaataacagcatcttctgccttcaaaccagggaatatcgcggcatttacgcttgagtggtcggatagttggacgctgaataacttcacgagattgtttaatgaaacattatatcttgattggtacaaaaatacactgattatcgcggttgtaactttccagcacagtggcgcccgctcaaggcatgcagctanagtggctacaaggc

SEQ ID NO: 3569 - DNA, 1704 bp, Listeria monocytogenes 4b
  misc_feature (1)..(end): n can be any nucleotide: a,g,c or t/u
gggcaacacataaaaaattgaaattcgtagccgaggtgaaggagaaagattttattacgaagtctttgatgcataaaaaggtccacgtacaatttgagaatgcgtagcggaagaattatagccgagctctgtttattctatcactcaagaagcctgagggagctttttgactgtatttttttgccaataagtaatctgaaaagtagatattgatagaataaaaaatagccttatcacttatgataaggctattactcattattaaactgtttttttctttcgtttgatgaaaaatagaataccaaagcttaagcaaataattccagccaatgacaaacttaagctagtaatatcacctgtttttggcaacgtcttttcgtctacttttacttggggtttttccgtattttggtcattgtctgctactttgttatctggatcttttggtggaacaggagcgacaggattatctttacttggttcctctgtcacatacacaatgacgtctttcgtaatatctgattctgccacgcttagtgttacaacatatttacctggtgtttgtaagtctactacgtcagcaaaattgctagtgatggtttctgttgctggagttacgcttgcatggatatctgtgaggaaggcttcctctgtttttgtagtgccttctttgtaactaatctcatcatcactagaaatgctgacagtttcttttcctgtatatggcacagtaactcttccagaaaacacaccatagtcattgctttcaaatgtgtaactcacttctccgctatctggtaaattttcccacgtaatagttctagtagctgcatcataaaccccaccattttctggttttatgatggaaacaatgttaccatccttatctaacaggtctgtaggaacagcgtatacaagtgtattattttgtgtcgtttggattggacctactaatgtttgatccattgcttggtactcgccattctcagcagtaagataatctggtaaggaactaatatcttttaactggttattattacagcttacatccaatattgtctctccaacagctagattcgttagttgattgttattacaagataaaattaataaatttacgttttttctaacatctaaattcgttagctgattgtcatcgcaatataaaatctctaaagctagattttgggtagtatctaaattcgttagttgattgttttcacaagataactctattaaagctagattttgatcaatatctatattcttcaacccattgttatcacaagtcaaatatgctagagcttgattttggctaacgtctaagttggttaactggttatcagaacaaaccaaagtgcttaaattcggattttggctaacatctaaatctgtaagttggtttttagtacaaccaagatttgttaaagctggattttgactaacatctaaactggttaactgattgacatcgcaagccaaataacgtaaagcggagtttttactaacatctagctttgttaactgatttctagggcaatacaaatactctaaagctgtatttttgctaacatctagttgtgttaattcattgttttcacaagtcaattcttctaaagcaagatttttactaacatctaaattcgctaacgggttgttagagcaagccaagtcttttagatttagatttttactgacatctat

SEQ ID NO: 3570 - DNA, 2757 bp, Listeria monocytogenes 4b
  misc_feature (1)..(end): n can be any nucleotide: a,g,c or t/u
gggaagaattggaagaacgaatggaatgggaacgacgcgaagagaaaattgatgagcgcgaagatcaagaagaacaagaacgggaacgcgaggaacaaacgattgaagaacagtcggatgattccgagcatgaaatcatcgagcaggatgaaagtgaaactgaatcagacgatgataaaacggagaaataaaaaaagcatggcagaggtcaattgatgaactcgcgccatgctttttattttcgtttctttttgactgctatggtacatctgctaatacaaattagtttttccgtttcgtcagtgattttaatttcccatacttgggtacttttgccaaggtggattgcttctgcagtcgctgttactaatccttcttgttttgatgccaagtgattggcattaatttctaaaccaaagacgatttcatcgggttcgattgatttagcagcaccaatacttgctgcatgttccgctaaaacaacagaaacccctccatgcaaatagccaaacggttgatggactttttctgtcacttctaattgaacaacggcttttcctttttctactgaaacaatttcaatgccaatagtttcttgaagtcccatatgttcccttctttccgaatttgatttatactttattatataagagttggtagaaaaactctagaaaaggtttttaataagctcattgtggtaaaataagaatagactttttgacaggagagatttgatgtcgatatttacgaatacaccattaattgcatctattattgcgattgtgtttgcccaagtggtcaaagttccgattcatattttagtataccgaaagtttaacctcggactaatgttttccactggtggtatgcctagctctcactcggctgcggttactgcgctaatgacaacactcgcaattgaatacgggctcgattcaccttatttcgcgattgctgttgtatttggtattatcgtgatgttcgatgcgactggcgttagaagacaagccggtgaacaagcagttgttttaaacaaattagtaacggatttccaagacttcgtggaacatgcaaaagggctcgcggcacctgaacaagaagaaaaaacgaagcatttaaaagaattacttggccataaaccgatggaagttttcttcggagcacttaccgggattgcgattggattcattttagaaatgtttatgtaaatgaaaagttgactccttgtagtcaactttttttgtttgtcgttagtttacagctttatgttagagggaaaatcatgatatcaacagattttacaaaaggggcaagtttcagtgaaaaaggtaacacttatttttggcatttatacttttatcctcggaatcatagtgggaataattgccgctttatttttagcaatggttcattttgccacgacttttttatgggattatcttcctaatcagtttgatttttcatggtattatcctctactaatcggtttgattgggagtttttttgtaggaatggttcagctgaaatttggtgactatccgcggtcgatgcatgacaatgttgctgaggcgaagaaaacaggacggatggaatatcgcaaagttctgtttcctacgatacttagcgcttggattattttaacatttggggcgagcgttggtccggaagctgctttgattggtattgttggtggtgccacgacttggattattgatcatttaaaattatctatggcgcataaggaagaacttgttagtttgagtgtcggcgcgattatttccagtattttccacgctccgtttagcggactagccgaggaaattgatgaaagtagtcaagcgaagaaaattcccaaaaactctaaattagtgttatcgcttcttatttcttttagcgcgctcggatctttcctttggctgaaatcctttttaaaaatgccagcgagtatttttgcgattcggctacctgacatgggttggtcttggtggtttattttactttttatccctatgattattcttggatggctctttagtgtttatttccagcaattgcaagtctatatcgcgagggcagcttctgtcattaaaaataaaatggtcgcggcggttattggcggtttgagcattggtttatttgggataatttcttccttcatgttattttctggtgagcatcagctgattgaattgacaacaactgtccaaaattattcgattccctttttacttattatcgccttgttaaaacctgttttggtcgctatttgtttagcaactggctggaatggcggtgcaattttcccggcgatttttactagtacgattatggggtacatagcaacattttggatggatggatcaactggtttcttaatcactatttttgttactgcaagttgtacaaaaatcataggaaaaccagttctaactgcctctattttattatttatattcccacttcaattctttccatttattttattaactgcatttatagtgaatagaacttggttagttaccttcaaaatgacagcataacgcctaaggagaaatccttagttttcttatgctgatttttttatatagaatcttccttttttttcttttaatacttcctgtatcgaggtagaatgtatatatttaatatctgtttagtctgtgctgcggagaatagtatttgaccgatatttcagacgcatatatgttattagtattgtagagcagtcttcagtgtttttgttgataatcgttctct

SEQ ID NO: 3571 - DNA, 3019 bp, Listeria monocytogenes 4b
  misc_feature (1)..(end): n can be any nucleotide: a,g,c or t/u
ctggaaagtcaattgaagcttcgtcgccccttttaatgtcgctaaactttttaaagaagcattccctttaatatagagattctttagttttggaagttttgctaatgaagttaagtcggttaaatcattttcttgcaagtaaaatgtttctagttctggcaaaatagcgccagctggattatctaattccaatgttttaatattacagccttgcgcactaatttcttttaacactggtaatgctgcaacttgtgaaatatcttctaacgccttatttgcagagacattaagttcttgcaaattaactaaaccctccacccctgaaagatttactaatgttcgattggaagaaaggttaagtgaaaccaggttcaccaaatctttaattggggccaagtcagatatattattctcacttaaattcaggctcgttaaattctctaaatattgtaatccttcaatattggaaatatccgttgggtcattgcccgtttccccactcaaatcaagttggcttattgctaaaagagccgcactatccactgattcattacctgttgcagccgcatttcctgtgataatcacggctaattttttagcaagattatcgtctggaaacaaagaattaaatgtgcttcctgctggtactactgcttttaaattagtttgtttcaactgacttttgtctgtattaatttctgttttaatattagaagccggttcttttgttttcgctttttcctctttttctgtcgtttctttgcttgcttctgcttcttttggctcttctgccttttcattgtctgaaccagattcgctttctgtagcttcagtagcagtttctgtttctgccgttttcactgtcgtatcttcggtgacagtggtttcatctgcacctactaatagagtatcaaaaggcgctaaataaccaagtaacaatacgctgataataactatactaaatttctttttcaagactttcccctctattctatcttttaatttattttgaataaaattgacactaattaattataagatgttagaaatagttagatagttcgagtcagtactaaatcgtcgggaaaatgtgtctatttttgggtttcacttattaaatcgcagaggaagttctattattagactatccttcgtcttccaggggcgtataggcaaaaaaaacttatcacccctattcataaagtcaagagtagaaaagggacatgtcactcgtttcntctgctaactcctagtactccagaatcaaaaaaagagtaggcagctctctgtctcctctccttgtgagttgcacctatatatctcctagaagcaaccaattacactattttttaaatttctatgagctttcatttagcacgctttttttgagtaaggcgaatgaaaagccccaacattagtaatccaaagcccactaataaaacagttgcattatcatcgcctgtagctggtaatttaatattagatctattttccaagtttccactctcggactgacctgttggacttacttttatagaagagggtgttgagggcttatctccaccggccgcttctgctttatttgtatctttactaaactgagcataaagaataatattatatgctggcattttatctgttgtaaaatcccatttattaccaccagttttcgagtcataccaaccaataaaagtatagccttcttttgttgggctcaatggttcagaaattagctctccagcttcaagagattctgtcgtttgtacatcatccacatcaaatgtcacattcgaaatcgttggtgctagtggctctacgatatgcacctttacttctacagggattgcttctactccatcttcatttgtagattttaacgttacggtataatctcctgcagtgctccatattacagccgtagcgaaatcactttcaattggtgaaccatcactcgttttagcatgaatcgctgcaagaaattccgttatgctgacttccgcgtttttagcgtacgtgatttctttatctgcggtaattactggtgctggtgacttagcgatgtgcacagttacttctacagggattgcttctactccgtcttcatttgtagaccttagcgttacggtataacctcctacagtgccccatgttacagccgtatctaaatcagcttcaattgatgaaccatcactcgttttagcatgaatcgctgcaagatattccgtgatgctgacttccgcgtttttagcgtacgtaatttctttatctgcggtaattactggcgctggcgacttggcgatgtgcacagttacttctacagggattgcttcaactccatcttcatttgtagaccttagcgttacggtataatctcctgcagtgccccaatttacagccgtagcgaaatcactttcaattggtgaaccatcattcgttttagcatgaatcgctgcaagatattccgtgatgctgacttccgcgtttttagtgtatgtgatttctttatctgcggtaattactggcgctggcgacttagcgatatgcactaatacagtcaccgaagtcgcttttactccatcctcattcactgcatttaatgtcacttcatacgttcccgcttttgcaaagtccacaacactttcaaaatcagaagttagtgttgcatcatccgttacgcttgcagaaatatctttgaaaaaggcagcttctgataccgtttcgtttttcgggtaattcatctctgcatctgcgctaataactggtactttagatgctttgattggttgtgtcactttccccgaaaaagttccttgaatagttgcctcttgaacaggttcactaaattgataatcagcggcattcacgctttttatatcttcaaaaagccacttgatttggttattttgataggttcccttattagagatggatttggcagtggttatttgaccgaaattcttcacttcattatcaagaactaggtctgacacgataactttttgctttagagtgattgttt

SEQ ID NO: 3572 - DNA, 2071 bp, Listeria monocytogenes 4b
  misc_feature (1)..(end): n can be any nucleotide: a,g,c or t/u
tccaatctcacttaacagatgaccgggtgttcggaattatgtcccactatgaagtgagcgacttttatccagcagaaaaacttgctgaaattcaagcggaaattgctgctactaaagggttagttgtggtttacgggactggcgcaactgttatagcaccaacaccagacattcttatttatgctgatttagctcgatgggagattcagtgccgctaccgcggagaaaataaacctaactggaaagcagacaatgccggtgaagatgcgcttcgtaagttcaagcgtggttatttcttcgagtggcgcatggctgatcggcaaaagaaaaagctttatcaacaagtagatttcttacttgataccaataaaaaaaatgagccaaaaatggtgcgcggagaagattatcgaaatggcttgaatcaagtttccaaagccccttttagagtagttccttactttgatgcaagtgtatggggaggtcagtggatgaagaataactttgggcttgatcctgcagctgataattacggctgggcatttgacggcgttccagaagaaaatagtttatacatgcgatttggagatattcggattgaagttccgtctaccaatgtagtaaaccattttccgaatgaattacttgggccaaaagtacatagccgtttcggtacggaattcccgattcgtttcgactatctcgatacagtgggtggagggaatttaagtctgcaagtccatccattagtagagtatgcgcaagataagttcggtatccattatacccaagatgaaagttattatattttagaagcagataacgactctaccgtgtatcttggaacaaaagaaggtacaacaaaagaagcgattatgacagatttagaaaaagccgctgaaggaaattaccgttttcccgatgaaaaatatattaatgtcttccctgtaaaaaaacatgaccatattttaattccagctgggacgattcattgtggtggtccaagtaccgtcgtcctagaaattagtgcaactccttatatcttcacgtttaaattatgggactgggaacgcactggactcgatggcatgcctcgccctgttcatttagagcacggcagagaaaatttacagcttgaccgcgacaccaaatgggtaaaagacaacttaataaaccaatttgaaacattacatgaagataacgattcaaaagtagagcgcactggtttgcatgaattagaatttattgaaacccaccgccactggtttaaagaaacggttaccgtccatacaaacgatagcgtcaatatgctcaatttggtagaaggagaaagtgctgtcgttgaaagtattgacgactctttcgcaccgtttgaagtgcattatggagaaacatttatcgttcctgcgattgtcggaacttatcaaatcagaaatacgagcgataatgaagaagtggctgttattcaagcttttgtacgtaatttataaaaaagaaatgcctatcaatatttttgataggctttcttttattcaaaatcaatataatagcgataatgctttcctatataaaaacattcgctgtattctctaaaatcactttctttttgtttcgtcatccgcacccttttcaaaattggttcttgtttgtcgattgcgagcgcttcctgtacttcacgattaggcaacatcgcttcaatatattccttttcttgattcacgacaataccgaagcctttcaaatattcataaaaagaaccgtaataatcttctgctttaagtgagtaatcttgattataaggaataaaactgataaataaagcaaatgccaagtctttcgtaccgcgtagccgcttaatttgtagcaccttgtccccgacagaaagccctagctgtaacgcaatttttttatcggcattgatcacttctacttccgcatgtagcgtagccgcctttttaccaagttctttcatctcattcgtaaaactgcgcactaacgtaaaatgctcatcctctgcttcttcccagtcacgtacaaaagtacctttcgcgcgctctctataaagtaaattctc

SEQ ID NO: 3573 - DNA, 3039 bp, Listeria monocytogenes 4b
  misc_feature (1)..(end): n can be any nucleotide: a,g,c or t/u
gttcatattcgtatttccagcaactaattgtgataaaaatgccccatacatgtacgttgttgccgaaagtgtcgcttctggatttaaaacatccactttatcaagcaaaatactgccatgcgggcgttctaattctgcttctttttcacgcatcacaacatgggcataatttggtgtgaaaaaggaaagtaggtcgccgttttgttgctcttcttgaattcggtctgggaagttctcttgaagccagttgtcagaaattgtttcaccgataatcggtgttcctatgtgtttgtttagtgtagctttagtacttgtttggtaagattgccctgaaatattactttttagttctgctaagttttcgattggtgctccagatgcttttggttgattttctgttgcatacccgtaaaagcttgtttcaccgtgattagtaaatagctctgtttgtaaggatatttgagcgaattcatattggtagactcggtttggcaatgatttttccttaaggttcgctagttcgctagtcagtttataatttgttccataaatatcaaaaccatctgttgcatacccaacaattttcgttaatgctccaatttgaactgctgggaaacgctcactttgtggttgattttggcgggcttgaaccgtgaaaccagtcgcgccttctgtcacatgataatcaatatattgcgacatataagcttcatttgttctcactgctgcttgttctgcaagccccaagtcttgtaagtaaacaaaatcaaactcaagatccccatccactgagacatcataaaaccaaccgcgcgtatgaaaatgcatttgcacactataacgaaacggtccaactacaccgcgatactccacgccattttcgttaaaaccaacttccgcatctctgttaagtagtggataaatttctattttatctcctaaatgcgcgcgtacatatatttgcgacaagcggttttctaatggattttgaatcacttgatttaacataatatctttccattttaaccaagcaagctcaccgctcggataaaatgcggctgataaatccgcttttttaatttcttttaacatcgtcacacatatccacccacttccacttcaaaaacgtctacatcttcactactagtcccaacaaaaactcggtgaagtcccggttcctgcactttttcaagctgctggttatagaatgaaaatgcctcgcttgttaattcaaatctaactgttttttcttcgccagcttgaagcgctactttttcaaaagcttttaattctttgactggtcgtgaaatgctcgctgtcacatcttgtaaataaacttggattacttcttttccagcaatatcactaatatttttaatggttacttccacatgtagtgattcacctagatttagttctttcggaagactgcttgtttttaactcgaattcgctatagctttttccgtaaccaaatggataaaatggttcatttggaatatcaagataatgcgacacatagcgttcgcctttattttccggtgtttgtggtcgtccagtgcgtaaatgattataataaaccggaatttgaccagttgtttgcgggaatgacatggataatttccccgaaggattacttgcaccacttaataaatctgcagtgacacggcctgcttctgtccctgggaaccataattcaagaagagcatcactagattctgctaactctttcacttcgagcggtctaccattaaataatgtaataacaactggttttcctaatgtttggacgaatttcgctaattcatattgtgcttccggcaagcgtatagtagcaagacttcctgcttccccgccccattcatttttttcacctagggcaagcacgacaacatccatgttctctactgccgctttcactgccactttgtcttcttccgacaattcagtgtactccgttgaaacgacttcgaccgtttcaaatacttcacgcaaacctgtttcaacattgatgccatctttttcttcaccgtatacattccaaccaccgagaatatcaggcgacgttgcaagtggaccaaccaaggcaatttttgcttctttagccagtggaagtaatcggtttttattttctaataacacagcagattcaatacctgctgcccgagctttcccgcggctatcatcggttaaaatatcttttgtgcggtcgttattttttaatccgcgatagggatcttcaaatagccctaaatcattttttaaagttaacatccgaagtactgcttcatctaaaaggctttcggataatttgccttcttcaattaaaccttttaattcatggatataacaagtcgtcatcatttctaaatcaacgcctgcttccatcgaaaactgtgcggcttctttaggatttctggctgttccgtgattaattacttcggcaacagcgccccagtcagaaataagtacaccgtcaaaacccatttcgtctcgtagaacatctcggttaagccatttgttcattgttgctggaatcccgtctaccacgttaaaagcagtcatgactaatttagctccagcttgtattgcggcattataagctggtaaataattttgataaagttcgcgcgtagacatattaactgtgttgtattccagcccagcctccgcagccccgtatgccgcaaaatgtttgacacatgccgccatttgctccaagttttcatgtagtttactcgcatcgccttggtaaccatctaccattgcctttccaagttcactatttaaaaatggatcctcaccagttgattccatcacacgtccccaccgcgggtcccgtactaaatcaagcattggtgaaaaagtgacatgatgcccatctgccgttgcttcgagcgccgaaacttctgccatcactcgaacagtctcccggtcaaaagaacaaccaagtgcaagcggaataggaaataccgttttatacccgtgtatgacatccgccataaaaacaagcggaattnctaatcgattcgtttttaat

SEQ ID NO: 3574 - DNA, 2883 bp, Listeria monocytogenes 4b
  misc_feature (1)..(end): n can be any nucleotide: a,g,c or t/u
agcaacttctagtactgagatactttcagctggaataactgtaatgccttgtaagttgcgtgcagataattctacattttcactttcaccggcaactacgattagtgccttagtatctacagagatatttttaagaaaagccgcaaattcttttgttttaggtgcatcgaaagtcaaaccttcaagtacaactaatttttcttcatttactttagaagaaagaattgatttaatcgctaaacgacgaactttcttaggtaatttgtatgcatatgaacgaggtgttgggccgaatacgacaccaccgccacgccattgcggggaacggattgaaccttgacgggcacgacctgtacctttttgacgccatggtttacgtccgccaccacgtacttctgaacgattttttactttgtgagtcccttgacgtagggatgcacgttggctcaaaatcacatcaacaacaactttttcatttggttcgataccgaaaacagtgtcgtttaaagtaatttcgccagcgtttgttccatcttgtttaagtaagcttaattttggcattcgttagtcctcctttccaaatgaattattttgctttagtagcagttttaatttgaactaatgcttttttagcgcctggaacgttaccttttactaaaagaacgttcttttcaacgtctactttaacgatttctaggttttggatagtgatttgttctccacccatacgacctggaagtagtttatttttgaaaacacggttaggtgctactggacccattgaacctgggcgacgatggtaacgggaaccatgggccatagggccgcgtgattgtccgtggcgtttaataacaccttggaatcctttacctttcgatacgcctgtcgcgtcgatgatgtcaccttctgcgaatacgtctacttttacttctgcaccaatctcatactcgtctaagtttacatcgcggaattcgcgaatgaagcgcttaggagtagtattggcttttgctacatgaccttgttcgggtttgtttgacaaaattgctctcttatcttcgaaaccgatttgtacagcttcatagccgtcagtttcaacagtcttcttttgaagtaccacgttttgtgctgcttcgattactgttactggaataagttcgccgttttcagtgaaaacttgtgtcatccctacttttctacctaagattcctttggtcatgagtcacacctcctgttaatttaatatattcttattatagtttgatttcgatgtccacaccgcttggcaagtctaaacgcatcaagctatcaactgtttgtggtgttggattaacgatgtcgattaaacgtttgtgtgtacgcatttcgaattgctcacgagagtctttatatttgtggaccgcacgcaagactgtgtagattgacttctctgttggaagtgggatcggaccagatacagaagcacctgagcgtttcgctgtttctacaatcttttctgctgattgatccaaaatacggtgatcataagcttttaaacgaatacgaattttttgttttgccattactttccctccttttcgcctacttttaaagtagacattctccgtgaaaattacctgaacatccgccatggcaaagcggccgggtgtgtcagcaacctttcacttcatcacatgggcattcccggcaataccggggtgctcgttgtcaaaagggcagaccaatgcctgtccatttgcactttatctattatacacgggttagggatagtaatcaaccgctttttgaaaaaagttttaagttattttcataggaactattatatagaagattctcggttttggtttatcttcaaactgtctgacagagccattctgctcattttatccaaaagaaaaaaacatccgttaatatcgaatgtttttaagatgttcttagtattacgagtcccgcggttaaaagtatcattacacatgccgcaatcaaatctccaaaatgccaatgcaatattcggaatctcgtgcgcccttcgcctccttgataccctctcgcttccattgcatccgctaattcttccgctcggttaaacgaactaacaaataacggaataaaaatcgggacaacaactttcatttgttcgaaaagattaccttcaccaaaatccactccgcgagctcgctgcgctttcataattttatctgtttctcccataagagttggaataaagcgaagtgccactgaaatcattaatgcaatgtcattcaccggcactttgagtacagcaaacggacgaaggatgtaagcaattgcgtctgttaggttcataggcgtcgttgtgagcgtgataacggtcgacatcatgataattaagacaaagcgcaaaaacacaaataccccgttcaaaagcccaaatgaagagatcgtaaatggaccccaatcaaaataaatcgttccgccactcgcaaatagtatttgcattactacggtaaataaaattagccaaataagtggttttacaccttttataaacacttttaacttgatacctgtcatttgaatgaccatgagtgtgaacaacaccattaaggcgtatgtccaccagttattcgctaaaaataaaatgccgatataataaaagcctgctaaaagtttcgttcgcgcatccagaccatgaattaaggactcccctgggacaaaacgacctaatattagtttttcaatcattcaaagaagcccccttttctttacgccagttgttgaagtaccacgctcaccgccattaaaattgtcaatgtcgcattaattaatacgaaattacgaataccaataacaaatgtttttgattttacttgttctttattgaatttaactagattacgatacact

SEQ ID NO: 3575 - DNA, 2212 bp, Listeria monocytogenes 4b
  misc_feature (1)..(end): n can be any nucleotide: a,g,c or t/u
gaagtagtggcagcagctaaaatcgacggttatgagagtggggatgaattagaaagcgctagtactgtcatcgtaacaggtcaactagaaaaacgcggagattcaataatagagcgagcttcagatgatgctgtgataggtgtatatagaatgtctacttttaaaatagcccaagttttaaaaaacgaaacggatgacaacttagcaaaagaaatgacaatatctgtttatgaaaatgaaggttacgatgccaaaacgaatacgacataccatatcgctggctatacaaaaatggaaaaagaagaaaaatatctgttgttgttgcaaaaagattcagaagatgactattatgtcccgacagcggttattttcggaaaaataaacctcaatccgaataaacgatatgaattatttcctaaaaatagcgacacagaatcagcaatcaataaagtacaagccgaagttttaaaaaatcttgaaaatgaaattgagcgagagaataaataattgtactctgttgcattttagttaaattcgtcatctaattttaatacaaaaaaagggtttggattgggggagacgggtattatataaccataagcaatgacaatgccattactttttctcccttttttgtagtgggttgtctttacttaccttaaactcccttttatacttttagcggttgttagcagccactaagagtatttttttgtaaaaaacactaaataaatgaaaactcctcgaacaagggaaagttcgaggagttcggcatttaccaatatttataaatgccactggggatattctaagtgaacaaagatatggatgtttgggagagcatccacttggagaatttaccatagatagatagcgacaagttgtaatgtagtataaatcatacaattcttgtagtgcatcatatatagcactgaattattaaattcctgataaataagaaaagactggaataaaagtacctcatcaagtatatttaatttacgcgggatttaaagaggtgatagaaggttgagcaattttaacatcatgggatctttaatgcttatagctgttttagttttagcagtgtatgttattaccaaagtgattaccaaattaaaaaataagtagagtttaactaaaatacctcaataacattttggggtattttatattttagtgattatttctcgcaatcatcaatgggtggattttgtgtaaagttttattgctgatatgtattaaaaatctatagtttggaggtctaataggtttaaaggcctgtgaaaatagacacattttcaattaaaaatagaaatgtgtctattttatgaatctttattgtaagagcttgtgtaatgggatggctacatatatccttatagatacggtgaaatttatttacataggaggaaatatgggatttttagaagcttacaaatcattttggagaaattacgttaactttagtggcagagccccgagatcggcgtattggtatgtagtactttggaatgttattatttttgtaatactttatgctttagcttttatttttggtatttcagctattatggaagcagctatgggtggtacgggaatggctggcggtggcggtgcaatcgttctggtaatcattttatggctatacttgctagcggctttacttccaacaatcagcttaatggttcgacgcttacatgattctggcaaaagtggatttttcgtccttttaagccttattccatttgctggcggaattattatgttaatttttatgtgtcttgaaagtgatggaccaaaccaatatggtgatggggatatagatagtaaatttgatttttaaatagaaaacgagctaggagataatcctagctcgtttttttaatggattccttcgcttacaaggaaccaattcacttggttggtattaataaaatacgttaagtcgtatttcgttaactcgatacatttttcgttaaaaaggtttttcaagtctgcttttgataattcgtgcatgctgatgttgttgatttttgcgtcgtcgtcaaggcgaatagattccccatttgcggtataaatttcgatatacatcgtgccaccccttgtaaattacatttgtttataattttctttgaatacaccaagttgattcagtgttacaacgagttgctggctgaaaagtggcagtgcttggatttggtctaaatca

SEQ ID NO: 3576 - DNA, 2149 bp, Listeria monocytogenes 4b
  misc_feature (1)..(end): n can be any nucleotide: a,g,c or t/u
atttgaattttgcttttctggattttaatagtaatggggatttagtttttactgataaagatgctgctgttggggcgcctgttggacaagagggagttcaatggggcggagcaaatgcaggcgttttgaatgcgattcaagatttgcgcgctcaaaatccgaacttgaaaataggggtttcagttggaggctggtctaagtcgggagatttctcgacagttgcagcggatccaacaaaacgggctaactttgtgaaaaacgtgatgaagtttgtgaaatatactaatatggattttgttgatttggactgggaatatcctgcttcggtacgggacgctgaccttgttgataataaaaacgatgaaggcacaccaaatgcaaaacctgcggataagcaaaactttattacacttttacaagatttaagaacggctttggataaacaaggcgtggatattaacaagaaatacgaattatcggttgctttaccagctgcaaaatctactttagaaaatgggattgatgtagcgaatttatttaaagtagtcgattttgcgaatgtgatgacgtatgacttaaatggtgcttggacaccgaatagtgcgcatcatacagcgctttacggcaatccgaaagatccgaattatgatagtggtttttctgtcgaccaaaccgttaaatacttaaaagaaaagggagcagtttcgaataaaattgttgttggggcagcattttacactcgaggctggaataaagtagctgctggaacggatacggcattgccagggcttttccaagctgctgaaaaaacgaataaagatgcggatggctcgcttacttacggggcaaacaacgaaaacccaattaaaacaggcgatgggggccgtgctggcggagtttgggcgtatagaagtattgatgcgctaaaagctaaaacgccaacattgaaagaatattgggatgatactgccaaggcgccgtatctttatagtaaggaaactggggagttttacacatatgacaatacgcgttcaattggctataaggcacagtatgtaaaagataataatcttggtgggatgatttcttggatgcagtcgcaggataaaacaacgacttcaactaagcgcgatgaactcacaaaggcgattaaatcaggattattcggcacaaacgctatcccgcaaaacgcgattacttatgcgaatttaaatgtggtagcgacagtgaaaccttatagcgaaaatggggtcgggtacgaaattacaattacaaacaatgaaaaagcggacgaaaccaatgaagttttgaaatcaactgagctatcgtttgaaacagtgaaattacctaagttttatattccagtaaaagcgggcgaaacgttaactgctggcgattataaagcgggtacagttactacttcaggtggcaatacagtagttgatttagcttctgtatacgacgcgcaacaaattccgcaaggcgcatcttatacgttccgtttaaaatcgagtgcatctagtgtggatgtagctaacatttctaaaattgatttaacacatcggatggtaaaatcgagtgtcgaatttggtgaacaaacgatttttggcgggggaactgttgtacctgatccaagcgatgcagaagctgcaacagtaccaaaagcacttgcatcttctaatgtaaccgataaatctgctactctaacgtggacagcttcaacggacaataaagcagtggctggatataaagtgtaccgaaatgggaccgaagttggctctgtttcaggaactacttttacagatagtggcttaactgcaaaaacagcgtattgttatacagtaaaggcatatgatgcggcggggaatttctcgtcagcaagctcggtcctatctgtatcaacgcttgatgcggcaacaccaccagcaactccagcatgggacgctgccaaaacgtccaataagggagatagggtttcttgcaaagggaaaacatatgaagccctagtggtggactcagggaaatgagccaggagctgaacagtggggtccttggttgttaataaattaataggcaaaaacagagattcttttcggagaatctctgtttttatttgaaaaacgtgaccaagactgtattactaatgaat

SEQ ID NO: 3577 - DNA, 2326 bp, Listeria monocytogenes 4b
  misc_feature (1)..(end): n can be any nucleotide: a,g,c or t/u
ttcaagtaataaggtgtcggatattagtgttctggctaaattaaccaatttagaaagtcttatcgctactaacaaccaaataagtgatataactccacttgggattttaacaaatttggacgaattatccttaaatggtaaccagttaaaagatataggcacattggcgagtttaacaaaccttacagatttagatttagcaaataaccaaattagtaatctagcaccactgtcgggtctaacaaaactaactgagttaaaactgggagctaaccaaataagtaacatcagtcccctagcaggtctaaccgcactcactaacttagagctaaatgaaaatcagttagaagatattagcccaatttctaacctgaaaaatctcacatatttaacgttgtactttaataatataagtgatataagcccagtttctagtttaacaaagcttcaaagattatttttctataataacaaggtaagtgacgtaagctcacttgcgaatttaaccaatattaattggctttctgctgggcataaccaaattagcgatcttacaccattggctaatttaacaagaattacccaattaggattgaatgaccaagaatggacaaatccaccagtgaactacaaagtaaatgtatccattccaaacacggtgaaaaatgtgacgggcgctttgattgcaccagctactattagcgatggtggtagttatgcagaacctgatataacatggaatttacctagttataccaatgaagtaagttatacctttaaccaatctgtcaccattggaaaaggaacgacaacatttagtggaactgtgacgcagccacttaaggcaatttttaatgctaagtttcatgtggacggcaaagaaacaaccaaagaagtggaagctgggaatttattgactgaaccagctaagcctgtaaaagaaggttatacatttgttgggtggtttgatgcccaaaccggcggaactaaatggaatttcagtacggataaaatgccgacaaatgacatcgatttatatgcgcaatttagtattaacagctacacagcaacgtttgataatgacggtgtaacaacatctcaaacagtagattatcaaggcttgctacaagaacctacggcaccaacaaaagaaggttatactttcaaaggctggtatgacgcaaaaactggtggtgacaagtgggattttgcaactagtaagatgcctgctaaaaacatcaccttatatgctcaatatagcgccaatagctatacagcaacctttgatgttgatggaaaaacaacgactcaagcagtagactatcaaggacttctaaaagaaccaaaaacgccaacaaaagccggatatactttcaaaggttggtatgacgaaaaaacagatggtaaaaaatgggattttgcgacagataaaatgccagcaaatgatattacgctgtacgctcaattcacgaaaaatcctgtggcaccaccaacaactggagggaacactccgccgactacaaataacggagggaacactacaccaccttccgcaaatatacctggaagcaacacatctaacacatcaactgggaattcagctagcacaacaagtacaatgaacgcttatgacccttataattcaaaagaagcttcactccctacaactggtgatagctataatgcgctctacctgttgataggattgttagcagtaggaactgcagtggctcttactaaaaaagcacgtgctagtaaatagaagtagtgtaaagagctagatgtggttttcggactatatctagcttttttattttttaataactagaatcaaggagaggatagtgtgaaagaaaagcacaacccaagaaggaaatattgtttaatctcaggtttagctattatttttagtttatggataattattggaaacggagcgaaagtacaagcggagactatcaccgtgtcaacgccaatcaagcaaatttttccagatgatgcttttgcagaaacaatcaaagacaatttaaagaaaaaaagtgtgacggatctagtgacacaaaatgaattaaatagtatagatcaaatcattgcgaataatagtgatattaaatccgttcaaggaattcagtatttacccaatgtgacaaagttatttttaaacggcaatcacctaacagatatgaagcccttaccgcacttgaacaatttacgatggctttttttacaccacgctccggttccggacctccgctccatcacggacttcgccggtgcccctccctttctttggccgctcgtggcctccccgctctcctcggcctcg

SEQ ID NO: 3578 - DNA, 3419 bp, Listeria monocytogenes 4b
  misc_feature (1)..(end): n can be any nucleotide: a,g,c or t/u
aaacgtattttgtggcagattatcaaaagaggaaatgctcctaaaatggcatgctacaaaagttcacctcgttattgatgcgactcatccatttgcgaccattgtttctgaaacagcgatggaggcatgcaaagaagcggacattccttatattcgttttgaacgcactagtgaacaaacagataatacttatttggtagcagatattgaggaagcttgtgcagttgcaatgaaacttgggaaacgaatctttcttacaactggtagtaaaaatttaccagaattcgtagctggtttaaacaatcgacatatcatcgctcgtattttaccagtgtctgatgtaattcgttcagccgaagaactaggtctcgttgccgaccagatcattggcatgaaaggaccgttcaccaaagaagcgaaccgaactcaactagaaatgactggggcagatgtattaatcactaaagagagtggaaaacaaggtggctttcaagaaaaactcgcagctgccgcagaattaaatattccagttattgtgattcgtcgcaaaaattaaattatccaatcgaaataaatcatttaagcgaactaccagaaattttaactcaattggaggtctactaatgggaaaagtcatgttaattggtgcaggtcctggagatgcacagctgctaaccgtgaaaggtttagctgcactgcaaaagtcagatgctattgtatacgatcgcctcgttgagccaaaaatgctccaagaatgaatagctagttgtatactcagttaggtggagaaagcaccgtttcatcgtccgattgcccaagaggttatggagctaattcttgttatagaacatgtgccgtatgagctggttgttcgtctaaaagcaggagacccttatgtgtttggtcgcggcggggaagaaggagagacactctataaagcgggaattccatttgaagttattcctggaatcacatccgcgattggtgggcttgcctacgctggaatcccagtaacacatcgtgattttgcttcgagttttcacgtgattaccggacatttgaaaaaaggacgcgatccactagattgggaagcccttgctagactggaaggtacgctcgttttcctgatgggaatgactaatttgcctaatatttgtgcgaacttactagaaaatggtcgaaaagccgaaacgggtgttgcgattgtacaatgggcatctcgcggcaaacaattaacggttaccgggaacttacaaaacatcgaacaaaaagtagcggaatctggtatttcttcgccggcacttattgtcgttggtgatgtggtgagcttacgaccgcagcttaacttctttgaggaaatgccacttttccatacaaaagtattacttccaagagcacgagctggaaaaagtatgctcgcggaacaaattcgcgatttaggcggagaagtaacaatgtatcccaatattcaagtagtagatgttgtgccaacgaaaacaaaagaagaactaagcgaagtaagcgaacttcttttcacatccaaagaagcggtagaacgattttttgattatttagcccagcttgatttagatattcgttctctaaaaaatacccatcttaccgctattggcaaacaaacaaaagaagcttttagtgaaaaaggaattattccagatagtttcattaaaaggcggagcacggaattaattttggagcatttaccacggttacagaaaaatgtgagcaacttaattatcggaagcatagttgatacggcagaagttaccgcaattttagcagaagtggaagcgatggaaatgatgccgttatatgatatgcgtcctgtgacagaacgaccatttgaccttgcaagctttgaacaagtttgtttctcaagttcgcgttccgttcaaaatttactcgacgtactaacaaccgaagaaaaagccattttacaaacgaaaacaattctttccattggaaggttcacgagcgcaacgttagcatcattcggtatcaacaattttatcgaagccgaaagcgccacaccagagagcttaattgaactaatccaaaaaacaaaattagaaggagtaccacaatgaaaaaagcgattttagtcgttagttttggcacaagttatcctgaaacaagagaaaaaacgattgaagcctgtgaaaaaaaagtggcccaagagttcccagattacaacgtgtttcgtgcattcacatccaataaaatcatcaaaaaactaaaaactcgtgacaatatgcatattaacacaccaagccaagcattaaaccaactaaaggaattaggctacaaagaagtcattattcagtcgctacatattattagtggtggtgaatttgaaaaaatcactgcacaggtggaaaaattcaagccggatttcgattccattattgtcagccaaccgttacttgattcgatggaagattacaaaaaagcaatcgaagccattcgccaccaaatgccacctttaaaagaacaagaagcgctaattctcatgggacatggttcgaagcatcgtgctttcagcgcctatgcatgccttgaccatatgttgttaaacgaaccaatttacctttgtgcggtagaaagttaccctggtcttgaccaagtaattgaacgattacaacaagcaaatataaaaaaagcgcacctaatgccgtttatgcttgtagcaggtgatcacgctacgaacgatatggcttctgatgacgaggattcttggaaaagcacgctggaacaagctggcattcaaactgattgtcatttgcaaggtctaggcgaaaatccgcttattcaagcccaatttatcgatcatatccacacggcaatagaaagggtgaaagcacgtggctaaattttacggcattggtacaggtcctggagatagcaagttagtcacgatggaagcagcagaaagactcggaaatttagaaattctctacacgccacaacccaaaaaaggcggcgaaagtttagctaagaaaatcgtcagcccttatttaaaagatacattaatcattaaagaacgccattttccaatgagttacaacaaagaagaaaaaatgcttgcatggaaagaaatcgccgaagaaatcaaagcagatgttcaaaacgggcatgatgttggtttcatcacacttggcgatccaatggtttacagcacttatagctatttactcgaattattaaaaggagagattgaaacagtgacactcgcaggtatttcgtccttttccaatatcgcctccaagattgaattaccactcgtaatggacgaggaaagtttcgctgtcatccctgtaacagcaggtgctgaaaaaatcgaacaagcgctcacttcttttgacacagttgtcctaatgaaagcagcaagcaatttacccctt

SEQ ID NO: 3579 - DNA, 2336 bp, Listeria monocytogenes 4b
  misc_feature (1)..(end): n can be any nucleotide: a,g,c or t/u
aatgaatttatgagttgtgggtgctggatatgtgtaatgagggggtattaatgtagttgatattaaaaggacattttgtagaatgtgtggaagaagggatagaatatgggaataacagcagacaaaatacgttgagtagggatgaaaaagatgggaaaataaatttaacgacaaatcggatggaatgaggcggtcggtgattgtattaaaagacattgatttgcgcatagacaaggccaacttctatttcttctagcagttgtttctccatgagtgtgaataatgtacttgacatagcacagatggttcatgtgattagtgtacagctgatagttagtccaagtcacatttctaatacagtacatccattcattttcattttttctcaccaacatttcctgagctatctatcttgatactatttccattagcacaagttttttggttagcttttagataacctccacttagtaaatcagctacagaagggattgaatttttatctaattggtaggactgaacttgaccttgaaccattgaaataaaggcctcgcatcctttatcgttgattgacttactttgtgatactatgttgggaatagtaaggagtaacaaaacactaaccactaacaatacaattaacatctccaccaaagtaaagcctcgctcatctcgccaatcaattttctttttaaacattaaaactcctccttttaaatttgatttaccatagaaaacatgggatataaaatggataaataaatggatacaattaaaataccaataacgataaaaacaattggttggataaatgaaaataatttttcggtcttttgaagtgatttctgatgacataagttataataaaataaaaattcttctgctaaattaccatttttttcaccgtggatagcaatgtaataaagttctctttcaaatataggcattttttctagtgcttttgttagtgataatccttgttcaagcgtaggaaggatttgcctggcgattgcttgaaagaatgcgggcgattcttcttgcgcgaagaggtgcataatatgcgttatagataaaccgcttttcagcagatatccaagttcgcgcgaaaggtattgcgaataatgaattcttgaaaattggcgaatatatggaattcgacaataaaaataagctcggtcgtaagcatttttttgcttttgttttcgaataaggaaactgaagattagaaaaaggctaagtaaaaaaattcctaataaaactggaattttttcaagcaggaaataagtgaatttagttccgactgtgccgttagttgataattgtgtaaataaaagttcgaatttaggtaagagaaaaattcgaagcaagaagaacaccagaataacagtagagaataagactagtggatattggaaggtcttcattaatgcgtttttttcctccgcttttcttttcatatggacgccggtttcgtgaattgtttgcaaaaagtaaccgtgactagaagcataatgaagttgtgaacaaatgaattcaggaaatccgttttttgaaagagcataggaaaaagaatttccgtttgcaagtgaagtgataatttgttcatatcttttgcgatatttgggcgaagtaatgcttaaatagctaatggtcgcatctaatgagaatcccttttcgagtaaactggcaactctaattaaaaattctccgtcctctttccaattagtgcgctgaaaaaaaaccataggcaactcctttctcgaatgttcttttaatagggtatttaggcttaatctgctgtttattagattggaaataggcttttatctcttgttgcgtaagaacttcatagatagctgttctttttcggtgcaaatgtgtacaaaggggatggcatttttctccgcagaaggtgcaaactaggtgtgtcagcttctgaaaactgattcctagtaagcattgcgctaattcttctgagctaataccgaattcaagtaatcttaataaaactccgtaagcatctccggcatgaaccgtgcttaaaactaagtgaccggttaatgcagcacgaacaactattttagcggtttctgcatcgcgtatttccccgataattaaaatatcaggatcatggcgtaagacggagcgaatgatgggtgcataggtaatgcttgctttttcgttcacttcgatttggagaaagccgggagaatgatgttcaacaggatcttcaattgtaatgatttgcagttcatctttattttctatagaagaaacaaggctatacatagaactggacttaccactacctgtgctaccggaaaaaagaaacaagc

SEQ ID NO: 3580 - DNA, 2047 bp, Listeria monocytogenes 4b
  misc_feature (1)..(end): n can be any nucleotide: a,g,c or t/u
ggttcctatggcggcggaatgaatgtacgatgaaaaccaactacctcaagaacagcactcggattgctaaaaagtggggatcaagctacagaacctagcccacaaaacggctgggcgcaaatccaatataacggtacaagcgcatgggttagctccgattacttaacgattcgtgaatctgttacaaaagtagatgaaagtgagctacaaacagtaaccattcgcgatgactccactaatattagaaataagccaagtcgtgatggcgccgtcatcgaaaaagcaaattctggtcaagggttcgctattcaaggagtacaaggtgactggtataagatacgtacgacaagcggcgaagaaggttatgtagctaactgggtagtcgatgtttctgacaaaggtcaaacatccagccctcgaagcaaaacaaccaaattatccgaagcaaccatcgttattgaccccggacacggtggcaacgatccgggcgctaaagggtcaaatggcacaattgaaaaagaaatgactttgaagacagcaaaacaattaaaacaaaaattagaagctagaggcgctaaagtaatcctaacgagaaacagtgataaatatgtctctctaaaaggaagaacaaatatagctgccgaaaataatgcagatgtgtttattagtattcactttgatagcttagaagacgcgagcaaaggggtaagcgggcaaacaacttattattatgataatagtgataaatcgcttgctgaaagtattaatactacgctcgggaaagacctccctactactaatcgtggtgcaagagtcggcgattattatgtagtcagagaaaattctcaaccagcagtccttctagaacttggttatctaagttctgcaaaagatgaaagtaatatcaactcagcatcatacagaagccaaatcgctgaatcagtaacagatggcctatctaattacttctctaattaaaaaaacaatcattcaggagactgaatgattgtttttttatttacgcatttcatctgaatcgagcattattgttactggaccgtgattgacaattttcacatccatcattgcgccaaatactccagtttcaacaataaaacccgcttctgtaagtttttgattaaataagtcatacagtgtttctgctttttctgctggggcggattttgtaaagcttggacgttttcctctacttacatcagcgtataaagtgaactgggaaacgctaagaatcgcgccgcctcgttctgctaaagaaatattcatcttctcggattcatcttcaaaaattcgtaatccaacgattttttttgccatatagtccacggtttctggggtatctttatgggtgaatccaactaataaacaaagacctccagctatttcgctaatgacttcctcctccacactcacggaagcttcataacaccgttgcagtagtacacgcatcgcttctccactcctttagttcattaatcttctcactgtataaacatctggaatttgttttattttatccactacacgttgtaaatgattaatattatgaatctgtagcgtgaccactaatgttgccatcttgttgttatcaaccttagcattgacgccgttaatattggaagttagactgttaatcacttgtagaatatcatttagcaaaccgttacgattatagccataaatttcgatgtctacattatagtcatttttcgcttgtgaatcagcatcttcccagtccacttcgatcagccgctctggttcaatagcttgaacatttgggcaatcttgacgatgtatagaaatgcctcgaccttttgtaatataaccaacgatagcatcaccaggcactggattacaacatctggatagtcgaatcaatagattacctactccttgaacaactactcctgcattatgcttaatcttcagtttctcattgttagcatctgaattcgaaggtttattttctgattgcgtcaataacttctctgtttctgcttctaattcacgttcttttcgaagtttttct

SEQ ID NO: 3581 - DNA, 2418 bp, Listeria monocytogenes 4b
  misc_feature (1)..(end): n can be any nucleotide: a,g,c or t/u
aattaatgcagatgcacacatgaaaaacagtgagaaaatttttattatcagtgagagcaacacacttttcccagtactccactgctaattgataattacacgttgcatgagaatgttttactgcctgaccgtaataatagtaggaaagcaattggggcgggaaagcattttccactcgtttttctgcgttctttaaatatttagcttccacttcttccgctcttgaaaatttccaagtcttataataaaatgccacctgtaaacaataaaagctaagttcgacagctggtgattcgtgctgcagctctacattttccgctattttctttaatctactttctatttctttaggattagaacaaaccaatagtttaaaaatctcatccaattctttcaaaagtgctctattctcttcatcttcgctcatcaataacacttcttccggtatttctaaccttcttgctatgtgtatcaacgtttccaaagaagcaactttaataccattttctatatttgctaaataaggcacagagataattccttgcgctacgtcttttaatgtcagctgtttctctttacgaatatttttaattcgcaaaccgattaagttcatgatgtcaccgccgttttttcaatattttcctcttaattataaacatttcgaaatggaaaacaactactttttccagctacttttttgctttcatttttatattttctaaaaaagcttgttaaattagcttttttaaactactaacctaaagcgttcgcccttacatagaaaacgttttagatcaaaaaaagcatgattgctcttggacctaaaacgttttgttatatttgctcctgtatagctattttgaaaaaagcttcactaatttgccataatcatcgctgtggattttttgttgtccggcataggtgaaataaaaattttccttttgaattcctaaatttcacctaataccgacattttattacttcttagtttgctcccacatgcaaactactccgttaataaaacaacaagttttatagactctatcccttatcgaatctataaattttctctacacattcccttttaaaacctgtctacgcaaaaacggaaacgtagattttcattttaccattcaaattcaattaatctctaaaaaggaaaattcatcttacttccacctttttcaagtccatatttagtattaatttcctaaaaagacgaagatatcatctatctttgtctcatttttatttaaatagaatatgttttttcttcatatagaatatgatggatgctgctacaatcatttctgaaattggaattgctagccaaacgcccgggataccaatgattggtggcaacactaataggaagatgaccatgaaaataatctcacgcgatatcgttatccatgtagccatttttaccttgtccgatgtttggaaataggtcatcataacaaagttgaagcccatgaacagataagctgtatagaataatttgataccgttacttgctaaatctttaatttccgggctaaagttcccgaacatcgaaacgagcaagttggaaccgaagagaccaacgagcaaaaagcctactccagtgctgaacgctaccataatcgcaattttcaacgtttctatttctttttgtctagctttcgcgccccgataataactaataagtggttgaatcgcggaccccattccaaggaacagcatcaaaatcacactgtgcgtataattgagtaccgagaacgccgccacaccagcagtcccagcaatagccgcaatcgaaatattataacctagcgtaaatacagacaccccaacttccgctaaaaagctcggtaagccaattgctaaagttttcttgaaaaacgctttgttccagtccactttgacaaattttaaacgacttgattttttgaagaaatgggtaattaaaatgagtacaccgataatgattgcaatcatcgtagcaagcgcagaacccgtaacgccccattcgaatacaaataagaataaatagttcaaaataacattactgattgctgttacaataagcgcaatcatcgataaattaggatcgccatcgttacgtacaaaaatacttaaaatattttctagtgtaagcgcaaatccaaatacgagcaggatattcatatactcgagcacataaccaatcgtatcatcattcgcacctaaaaaataagctaatggtactttaaaaataaacgctataattccaataataacagtgattgaaacaacagctagaatcgcattggtgaaaatcgtttgagctttcgcgacatttttctccccaatcgcaaaggaaaactgagtcgcagcaccaatcccaatccaaatagaaatcgctgtaaaaatcgtaaatacaggcaccgctattta

SEQ ID NO: 3582 - DNA, 2178 bp, Listeria monocytogenes 4b
  misc_feature (1)..(end): n can be any nucleotide: a,g,c or t/u
cctgtgtgaaggctcttggggacactcctccatgcttgagcggccgacagtgtgctggaaagactatgaaggttacgacgaacgaattcgcgaacaccttgttacggatgaagtgtcgattggagattacattttaactggtggcgaaattggtgcaatgattgtaatggacagtgttatccgacttttaccgggagtacttggtaataaagattccgctgtgacagattctttctcgaccggtttgcttgaacatccacactacacgcgaccagccgattttagaggaatgaaagtgccagatattttactcagcggaaatcatgcatggatagaagaatggcgcgacaaagaatcgctcaaaagaacctacgaacgccgcccagatttacttaaaaactatcccttaacagacaagcaaaaaacttggctcaaagaatggtctgacagtaaataatcaaaggacgtgattttaaatggcaatttttggaacacctgatgaaaaagaaaccaaaaaatccgagcgtcaaaaagaacgagaagcctatgtacaagaagaaaacgaccaaaaacgaattggtcaaagatggcaagatattcaagtttccactggaccgattaatgtgaatcatgatatcctcacggttgttttcgccaaaagcgttcgcccgagaatcaaaagtgatccagaagcatacttagaaacagtgggctttgaaaatttactacaggaattacaaaagaaagcattagatgcaggcgggaatggcttaattcactgttcgtttaccgagcaattcgtcgatggcctcgtttatcaactcgcatatggaacagccgtaaacatcaaaattacgagattctaaaaaaagactagaaagccagtaattggttttctagtctttttcatttgttgcttgtttctttgctcgctttagtacattcgttaagtcaaaatcagccatcgctttcaccggtccatgcccacaagcaatttccgtcacatcgaaaagctgtaaattttccgccgatgcgatacttgttggaagatcccaagaacccatcgctggaaaagggaacaaccatcgcttctccccacaaatagccgctcctccacgagtttgaaataaatctcctacaaataaatgcccattacgctcatcaaaaaaggaaatggagccaggtgtatgtcccggcgtatcgataattaacagggagccaatcatatcaccatcttttaaaatgtgatcaatgcttactggaagttgatctgaataaccgccttttaacggcttctgtgcttcaaaagcataaatttctttcgtttctacaagcaatttttctctgcttccaatcattacaagcgcttctggaaaagctgctttcactgcgactaaaccgccaatatggtcaccatgcgcatgcgttaataaaatccgttttaaaggtaaatttaatttgtggatgagtgcaatgattcctttcgcgttcgataaaatcccagtatcaatcaatgttaagccgtctttttctaaaattaagtaacaattcaccggaaaaagatacggcaatgtcgtaatttgccaatattgatgtttggcagtaattttcatgcaaaaaccttctttctaatttgcttttttagcaagaattgaatatcgcgttttgctgcacgtgtaacttttttatcatagtagtcatcagtccttctgatagaaagatccagtcgatcaattgaagtcactttcaccgaaaacacgccactcatccataatgggtaacgcaaggcagtaagagcagggcgggcgaaaagtcgatgttgtatttccattccgccaatcgtataaatcaaccgcgctcgtttttttcgccaaggtccagtaagaaaatattttttatctttaaaactatagctctccccaggccaaaacaaatgatcaataacaccttttaacacagccggaacgttaaaccaccaaaccggataagaaaatagaagtaaatcagcggaacgaacatcatttttaagcgcaattatgtcaggggtttgctccgtacgatagccttcaggtaaattagggtcaaaagctaatttgcggatatcatagatttttacctcgattgttggttgttcctgaaaaacagctaaatacttctgaaacaaatctcttgatgtac

SEQ ID NO: 3583 - DNA, 2185 bp, Listeria monocytogenes 4b
  misc_feature (1)..(end): n can be any nucleotide: a,g,c or t/u
tatggggccaccagtgtgctggaaagatttgctcgaacgttcaagtgtattcacctctttttataacttctccataactgtctcggcgcgttcccactcaggaaaagaatcaagaaaagcaagtacttctctggcttctttttctgcttggatgtgcgaggaagatacgatagcaaagctaatttccgctcgctgccataaatcctgataatccgtttcagcaatggagatattgaatttttgttttgctctcgttactattcgtttcaggatagctcgtttttctttgaggttttgcggttcctgcatgaaaaattcactaacgactgattgaatcattttctttcaatttcttccataacgtacgcttcaatgacatcatcttctttgatatcgttgaagttttgtactgtgataccacattcgtatccttttgcaacttctttcgcatcatctttaaagcgtttaagtgtagcaatttcgccttcaaagacaacaattccgtcacggataatacgaacgccactatcacgagtaattttaccatctgttacgtaacagccggcaattgtacccactttggaaacattgattgtttgacgaacttgcgcttgaccaataattttttcttggaattctggatcaagcatccctttcatcgctgcttcaatttcatcaatggctttatagataacacggtgtaaacgaatgtctacactttcgttttctgctgcttcacgagcttgagcggttggacgaacattaaatccaataacaattgcattagaagctgcagcaagtgtgatatctgattcattgatagcaccaacagcagtatgaataattttaacgttaacaccctctacatcaattttgcgaagagatgcagcaagagcctctacagaaccttgaacgtctgctttaataataacgttaacttctttcatttcgccagctttcatatgttcaaataagttgtctaaacttacgcggttggttgcagaacgttgcgctactaacgcacggcttgcacgagtttcaccgatgtttcttgctgttttttcatcttcaaaaacaacaaagcgatcgccggcttgtggtacatcatttaatccagtgatttcaactggtgtacttggaccaacttttttcacgcgacggcctaaatcattgaccattgcacgaacacgaccaaacgtgttaccaacaacaattgggtctccaatattaagcgttccatcttgtactagtagagtcgcaactggaccgcggcctttatcaagttctgcttcgataacagaaccgatagcacgacgatctggatttgcttttaattcttctacttcagaaacaagtaaaatcatatctaacaagttttcaagaccttcaccgaatttagcagagattggcgcgaaaattgtatcgccaccccatgcttcaggaactaattcatattctgttagttcttgcattacgcggtcagggtttgcttgtggtttatcaattttgttgacagcaacaataattggcattcccgcagcttttgcgtggttgattgcttcaattgtttgtggcataacaccatcatctgctgctacaactaaaatcgtaatatccgtgatttgcgcaccacgagcacgcattgcagtaaaggcagcatgtcccggtgtatcaaggaaagtgatttttttgtcatggatttcaagttggtaagcaccgatatgttgggtgataccaccagcttctcctaaagtaacttttgtattacgaaggggaatctagtaatgttcgttttaccatggtcaacgtgtcccataatagtaacaactggtgggcgttcaacaagtttagactcgtcaaccgcttcatttagttcattttcaaagtacacatctaaatctgttacatcgactttaatttcttcttctacttgtacaccgtagtcgtcacaaattagttcgattgcatctttatctaatgattggttaatcgttgcaacaacaccaagcataaatagttttttgattagttcagatggttctctgtataattttttcgctaattccgctactgttagagattcgctgaacacaattttttcaggaagttcttttggttttggcggagttggcggtactgtactgtggtttagcttccctttcttcttcgtgttacgacctttatt

SEQ ID NO: 3584 - DNA, 2500 bp, Listeria monocytogenes 4b
  misc_feature (1)..(end): n can be any nucleotide: a,g,c or t/u
gtgctggaaagtaaaaaataatgtataccaaagaattgcaaaaaaatcttatggtatgtaattattgtggttttcatcatccaattggggcaaaagcacgaatcgatatgctagttgatgaaggctcttttgaagaaattgatgctagtttaacgacagcaaatccacttggttttgaagattatatggatcgtattgagaaagataagcaaaaatctggtttaaatgaagccattgttactggtcatgctacaattgatggtaatccgcttgttattgcagtgatggattctcgttttagaatggcaagtatgggctctgttgtcggtgaaaaaatctttcgtgccgtggaagatgccgataaaacaaataaaccgtttgttattttcactgcttcaggtggcgcgcgtatgcaagaggggatgctttcgcttatgcaaatggcgaaaacctctgctgcatttaaacgatttagcaatcacgggggactgattattacggtaatgacgcacccaactactggtggggtttctgctagttttgcatcccttggagactataactttgcagaaccaggcgcacttattggctttgctggacgccgggtaatagaacaaaccgttcgtgaagaattaccagaagacttccaaacgtcggagtttttattaaagcatggacaactagatgactgtatttcacgccttgatctgcaaaataaattaagttttattttaagcattcacgtgaaaacacctgaagtaggaggtgaagcggatggcgaatgagatggaatttgagaaaccgattttagaattaaaaagtaagattgctgacttaaaagagtacaatgaaacttctgatgtggatttgaccaatgaaattgaaaagctagaaaaacgcttagctaagttagaatcaagcatttatagcaatatgactgcttgggataaatttcaagtagctcgccatccagaaagacctacgacacttgattatatttcacttttgttcgaagacttcatggaacttcacggggatcgcgcatttggtgacgatgctgcaattgttggcggtatcgcaactttccacggtatcccagtgacagttattggtcaccaacgtggtaaagatacaaaagataatttacatcgtaattttggtatgcctcatcctgaaggtttccgtaaagcgctacgtttgatgaaacaagcagataaatttggccgaccaattatttgcttcatcgatacgaaaggtgcttatccaggtcgagctgcggaagaacgcggtcaaagtgaagccattgctagaaatctttatgaaatgagcgatatgaaagtaccaattatttctattgtaatcggtgaaggtggaagtggtggagcactcgctcttggtgttggaaatcaaattttcatgcttgaaaatgcagttttctctgttatttcaccagaaggagcagcagctattttatggaaagatgccagtcaagcgaagaaagcagcagagtctatgcggattacagctggcgatttatttgaacttggcattacagatggaattattccagaagtaaaaggcggtgcgcaccgagatttaaatgcacaagccgaagaaattaacaaaactatcacgaagtctttacatgcactaatggcattttctgaagaacaattaatagaacagcgttatgaaaaattcaagaaaatcggtgtatacgatactttataaacaataaaagaagcggctttcctaattttaggagatccgcttctttggtatatgccaaacgctaaaaagaaagtttacccattcacaagtatagaccaattatgtttatttaagctataaagccgttttcggtacgaatcggaatagaccgatatttaaaatggcgatttacaaagcttctcgtttaaaaaagtgctctgttgaagcttttcatttgaccttttttcatgtagaataaacacatgtgatgaaaaacaatatcattgtctgaggtggtaagtaaaatgaaacgaattgcaattttaacaagtggaggagacgctccaggaatgaatgcagccactcgtgctgttgtacggaaagcaatctatgaaggacttgaagtttacggtattaactatggctttttagggctagtcaatggtgatattcgtaaactagaattaggttctgttggtgatttacttcaccgcggaggtacattcctttattccgcaagatatcctgaattcgctacagaagaaggacaacttaaaggaattgaacaattgaaaaaacatcaaatcgatggccttgtggttattggtggagatggttcttatcacggagcggaagcacttacaaaacgtggattcccagactattggtatcccaggaactattgataatgatatttctggaactgattttactattggttttgatacagcgttaaacactgttcttgatgcacttgataaaatccgcgatacagctacaagtcatgaac

SEQ ID NO: 3585 - DNA, 2292 bp, Listeria monocytogenes 4b
  misc_feature (1)..(end): n can be any nucleotide: a,g,c or t/u
ttaatatcaacgaaccattatttttcggggcaccaattgccttcaacccatacttaatgattccaacgtggattaatgctttcttggttccaagcatcgcctatttcgttatgtcgatgaacttagtaagtattcccgcgcaatcgttcttgctatggtacatgccttatcctgtaacgtcttaccttgcaacacaagatttccgaggtgtgattgcttgtttagcaattatcgtcatcacatggcttgtctacttgccgttctttaaagcatacgacaactccttactcaaacaagaaaaattagatgcaatcgaaacagagaaagaaatggtaacaaattgattggaggaactaaaatgtcagagcaagactatgttgaagaaacagatagcttaaatgaactatccatgaatatattaatccatgctggaaacgcaagaaatgacctagtgaaaggtcttaaccatttagaggaactagcgtttaacgaagccgaggaatttatcgcctctgccaaaaaagaaattgtcatcgcgcatagtctgcaaacagatacacttcaattagaagcatcaggcaatcaaatccgttattccacgctgttctgtcatgcgcaagatacactcatgacagccaaaagtgaaatattaatcggcgagcatatgctacgtttattcaaaaaaatgaccgaacttacgaaaaaataggaggtacgagcatgtttgaaaattatcaatttccaaaagactttttatggggaggagctatcgcagccaaccaagcagaaggcgcatttaaagtagatggaaaaggaattagtttagcagatttgcacaaatatcataaagggaaaacaaatgatgaaatcagtgaggaacaacataaaggagtaagtttggctgatatcaaagcaagtatggaagacaaagtgaactattatccgaaacgccacggtatcgacttttatcacacgtatccagaagatttggctttgcttgctgaaatgggctttaaaacatttcgaacttcgctggactggacacggatttttccaactggcgaagaaacagaaccaaatgaagcgggattaaaatattatgaccaattaattgataaaattatcgaacttggcatggagccaattattacgattttacattacgaaacgccggtggaaattgtcttaaatcacggcggttggcataatcgtaaagttattgatttatttgagaagtacggcaaaacggtacttgatcgctacaataaaaaagtaaaatattggattatcattaaccaaattaatttaattcaattcgaaccatttaactctactgcgattccatatgatgccgtcgatgattatttatccgctacgtatcaagctgttcataaccaatttgttgcaagtgcgaaaatttacgaatacggaaaagcgctaaatcctgatttaatgattggtacaatgctcgctgattgcacggcctatccattctcctgcgatccagatgatatcgtgctcgcaatgaaacgcaaccgcatggaatatttcttcgcagacgtgcagttccaaggcgaatatccacagtatgcgcttaattactttgacgaaaataatattcatatagaaatcacagaagacgacaaagccgttttacaaaaaaacaccatggattatttagcactttcctattattattcccaaatggtggactccaagaaaaatgatttggacccagcttcaattacaccaaacccgcatcttaaagctaatccgtggggctgggcagtcgatccgaaaggcttgtataacgcattgtcgcagtactgggacagatatcataaaccaattatcattgccgaaaatggttttggaatgtatgacaaattagaaaatggcgaaatccatgatgattaccggattgattatttatccgcgcatctaaaagaaatgaaacgcgccatgtatgacggcgtagaaattatcgcatattgcgcttggggaccgattgatatagttagttgctcctccgcacaaatggaaaaaagatacggtttcatttacgttgatttagataacgaaggaaacggtacaggcaaaagaattaaaaaagacagcttttcatggtataaaaaagtaatagagtctaatggggaagacttagaagcttaatgtaacagagcgccagttgtggtagttgatagctaatacaactggctttcgatatatagggggtaacaaaaaatggatactcaaaaagaaatactagcttatttgcataaacaggaaaat

SEQ ID NO: 3586 - DNA, 1941 bp, Listeria monocytogenes 4b
  misc_feature (1)..(end): n can be any nucleotide: a,g,c or t/u
atacgccgaaccgtgaaatcggcaaatacacgattgtcgaagcttatcttactggtagccaactgatttataaagaaatcgaaaacgtgccagaagattttattatgtcgaaagcaatgtttattgaagaagcccctgagttagaagttggtattgcgaaaatcccagaatcattccgcgaaaaatatcatctagttcgtagcacgcctttctacttggaaattctaaatcgtgacgctagtaaaggtaacgcggtcaaagaactttccgaaaaacttggcattaagcaaagcgaagttatctgcattggcgaccaagaaaatgacgttacaatgcttgaatttgctggtcttggtattgcgatgggcaatgctccagaaagaattaagcaattagctgactatacgactgcatcgaacaatgatagtggtgtagcaaaagcaattcaaaaatttgtgctggataaataaaacaaaaacgcagattcgaataggaatctgcgttttttaactatctttttaaaagaatatactttaaaatatattagtagagttttttaataaaaatcgctttaatggaggttatattaatggaacatcaaaaacgttcaccattcccgaaagatttcttatggggttctgcatcggcagcttatcaaatcgaaggcgcatgggacgcagacggcaaaggtaaatcagtttgggacgaatatgtccgcattcctggaactacttttaaaggtacaaatggcgatgtagctgtcgaccattatcaccgttataaagaagacgtaaaactaatggcagacgctggcctaaaagcttaccgtttctctatcgcttggactcgtatttttccaaatggtaaaggcgaagtgaatgaagctggattgaaattttatgataacttgattgatgagttgcttaaatatgacattgaaccgcttgtaacgctttatcactgggatatcccacaagcattatttgatgaatacggtggctgggaatctcgccaagttattgaagatttcacaaattattccacaacgctattcaaacgttacggcgaccgcgtgaaatattgggtttccttgaatgagcaaaatatctttgttggtatgggttatggtcaagcgcttcacccgccaaaagttagcgatccaaaaagaatgtacgcagtaaaccatattgcgaacttagctaatgcgagtgttatcaaagctttccacgaaatcgttcctgatggaaaaattggaccaagttttgcttacacaccacattatccaatcgacacagatcctaaaaacgttcaagctgccgacgatgcagaagaattaaacagttatttctggatggatatgtatgcttttgggcgctatccgaaagcggtttggaaatatttagaagaaaacgatattgcgccagttattgaagacggcgatatggaacttcttgcttctgcaaaaccagatttcatgggcgtaaactattaccaatccgcaactgttgcttacaacccgcttgatggcgttggtcaaaacaacgaaatgaacttcactggtaaaaaaggtagcacgaaagagactggtgttcctggcgtttacaaaaaagtcgttaatccttttgtgaaaacaacgaactgggactggacaatcgatccaaaaggcttacaaattgcgcttcgtcgtattaacagccgctatgctttaccaattttaattacagaaaacggtttaggtgaatttgataaattagttgatggtgaagtaaacgatgactaccgtattgactatctaagcgcgcacgcaactgctattcgcgatgcaatcagtgatggcgttgatatgttaggctattgtacttggagcttgccagacctctctagctggttaaacggctctcaaaacgttcccggtctgtgtgtggtaacccgcatgagaaa

SEQ ID NO: 3587 - DNA, 2220 bp, Listeria monocytogenes 4b
  misc_feature (1)..(end): n can be any nucleotide: a,g,c or t/u
gaaacgcttatgaatgatttaatagaagattttttacattttttaattgtagagagaggtttatccgcgaatacaatcaaagcttatgaacgagatttacgctattttgtttcttatatggatgtagcgaagggattaacagatccgaatacacttgaacgaagcgatatagttggttttatggcatttgcaagacaagaagggaaatcagcaagaagtgtggcgcgctatattgcttcactgcgatctttctttcattatttaatgcacgatgggaaaatgtcacatgacccaatgattcaaattgaaacgccgaagcaagctcagggattaccaaaagttttgaaccttgatgatgtcgagaagttacttagttcctctgatacgagtacaccacttggattaagggaccaagcaatgatggaaattttatatgcgacagggcttcgtgtaacggaacttgtcagcctgaaaatggacgatttacatcttcatatgggttttattcaaacgattggtaaaggagataaagaaagaattatcccgcttggaaaaacggcaacaactgtgttagagaagtatttagaggaagcgagaccaaaacttcgtagaccgaaataccgaaatgattttgtgtttttaaatcatcacggccaaggactcacaagacaaggtttctggaaaattttaaaaggtattgcgaaagaatcaggcattgaaaagccgattacaccgcacaccttgcgtcattcatttgccactcatttacttgaaaatggggctgatttaaggtcggttcaagaactccttggtcacgccgatatctccactacacaaatttatacacacgtaacaaagctgcggttgaaagatgtctacaaacaattccacccgcgcgcttaaaaaatatagttgaaaaggatgagtaaatatgccagataaatttaaacgagtacatgtagttgtaatggattcagttggtattggagaagcgccagatgctgctaaatttggtgattttgatgtagatacatttggacatattgccaaacacgtcggcggactaaaaatgcctgaaatgggcaaattaggtctatcgaatattcgagaaatagacggaattaaaaaagcagaaaaaccacttgcttactatacaaaaatgcaagaagcttcgaacggtaaagatacaatgacgggtcactgggaaatcatgggcctatacattgacacgcctttccgcgtattcccagatggatttccggatgatttaatcaaccaaattgaagaaaaaacaggacgtaaagtaattggaaataaaccagcgagcggaacagaaattatggctgaacttggagaagagcatgtgaaaacaggtgcgcttattgtttacacatcagctgactcagttttacaaattgcagcacatgaagatgtcgtacctttggaagaattatatgaaatctgtgaattctgccgtaaaattacactagatgacccgtacatgcttggtcgtattatcgctcgtccatttgtcggcgaaccaggtgcgtttgttagaacgccaaatcgccatgactatgcgctaaaaccatttaaaccaactgtaatggatgctttaaaagatggcggtaaagacgtgattgccattggtaaaatttctgatatttttgatggtgaaggtgttacggaatctatccgtacgaaatcaaatatggacggaatggatcaatttatcgctgtgttagataaagattttaacggtatgagtttcttgaatttagtagactttgatgcacttttcggacatcgtcgtgatccacaaggttatgcagatgcgctcgttgattttgacggtcgtttagtagaagtaatggaaaaactaacagatgatgatctattaattattacagctgatcacggaaatgacccaacatactctggcacagaccacacacgtgagtttgtaccattacttgtatactcaccacgcttcaaaaatggtggttcagaattagaattacgcaaaacatttgccgatctcggcgcaacagttgcggataattttgaagtgaaaatgcctgaatatggaacaagtttcttaaaagacttgaaataggaaaagggaggaacaccaatcagtttagaaaaagtaaatgaagcagttgcgaaactttcgcagcacagtggcgcctgtncaggcaacgtataattcccttcagt

SEQ ID NO: 3588 - DNA, 3438 bp, Listeria monocytogenes 4b
  misc_feature (1)..(end): n can be any nucleotide: a,g,c or t/u
cgacagtgtgctggaaaaagtaataaccgatcacgagaataatcgtgaataagaaaatcagtgtcgacaaagcattgatagaaagcgaaatcccttgtctagctcgggaataaatttccactgccaatgtcgagaagccatttccagttacaaagaacgtcaccgcaaaatcatctagcgagtacgttaatgccattaaaaatccagctaaaacgcctggcataatatacggcaaaataaccttagaaagaacttgccactggcttgcacctaagtcgcgcgccgcatccattaacgtcgggctcatttcttgcaatttcggcaaaatcatcaatacgacaatcggaatactaaaggcaatatgcgacactaggacggaaataaaccctaattttacgcctaaaatcgtgaagaaaatcaagaaactagcaccgataataacgtccgggctaacaatcaacacattattcaaacttaaaagcgaatttttcgcgaatggttttggcataaatttaatcgccagcgccccgcaaacgccgataatagttgcaatcaccgaagaaagcagcgcaattacaaatgtatttaaaacaataattagtaggcgcgtatcttggaaaacttctttataatagccaagcgtaaagccactaaaattatgcatcgtgccgcctttattaaacgaataaaaaatcaaatagaaaatcggcgcatataaaatcacaaaaacaagcactaaataaatcgtaccccatttacttttcttcatttacgcgcacctcttttctttttcgagcctgttaggaacataattaaaatcatcgcaataattaaaaatacgccaattgtcgaacccattccccagtcttgcgttactaggaaatgctcttcaatcgctgttccgagcgtaatgacgcggtttcctgcaattaaacgtgtaatcataaagagtgatagtgctggaataaaaacagcctgacaccctgatttcacgccatcagcagtgagcgggaaaatcacccgtctaaatgttgtcaaactagatgcgcctaaatcgcgcgacgcttgaatcaacgtcggattaatttcctcaattgcattaaaaatcggtaatatcataaacggaataaaaatataggtcgatacaaataagaaactaaaatccgtaaataaaatctgtttcgaaccaattccaattatttccaaaaattgattcgccgccccgtatgtcccaaaaatcccaataaaggcatacgctttaagcagcaaattaatccaagtcggtaaaataatgaataataaccacaattgtttatgctttaatttcgttaaaagatacgccgttggatacgaaatcaacaacgtaaaaacagtaattaaaaatgcgtaccagaacgaactagccgtcatttttaaatatacaggcgtaaaaaagtgaatataattatctaccgtaaaattgccatctacatcaaaaaaagaataataaacaattaataaaatcggcgcgactacaaaaagtaaaatccaaagtacataaggaacaaggtaaactgtacgggtgcgtctattcatcactgcacctcatcgtagctatcaagccgcttatcgaattcttcctccgtttccccgagacgcataacatgaattgcctctggttcaaacgctaagccaatcttatcacccacacgaacttttctcgttgtgtgaacaagccattcatttccatcagtgtcgatacaacctacttcataatgcacaccacggaaaagcatccagtctacggttacttgcagttgacctttttcagccgaagtaatctctaaatcttccggacggataactacttccacgacttcatttgggcggaaaccttggtcgacacattcaaaacgtctttccacaaattccacttcgaaatcttgtatcattttgccattaacaatgttcgattcgccgataaaatctgcgacaaatttattaattggctcgtcgtaaatatcaattggcgtaccactttgttgaatttcgcctttatttaacacaaaaatttcatcactcatcgcaagtgcttcttcttgatcatgtgtcacaaaaataaacgtaattccaagacgcttttgcaaatcgcgcaattcatattgcatttccgtacgtagttttaaatcaagcgctgatagtggctcatcaagtaaaataacttctggttcattgacaattgcccgtgcaatcgcgacacgttgtctttgtccaccagacatttcgctaatttctcttttttcgtagccttttaagttaacaaagcgcagtgcttcttttactttttcgtcaattgcatctttttttagctttttaatacgcagaccaaaagccacattttcatacacatttaaatgtggaaataacgcataatcttggaaaacggtatttacaggacgtttattggcaggaatttggttaattactttatcccctagataaatttgtccctctgaagcttctaaaaatccagctattaagcgcaaaatggtcgttttcccgcaaccagatgggccaagtaaagtataaaacttccctttttctatttcaaagctgacattgtcaagcactggtggatcattatcaaattgttttgttacgttttcaaaacgaataattgtttctgtcacaatcatttacctcccttataaatatgactctgtcgctactaagatgagtgtcgcttgttcattcgatcgattaattatttgatgttcatctgcggcgtggaaataaattgcttccccttttttggctacatactcatttcgaccaagcagcacggtcacttccccttttagcacgtaggcaaaagtttctgaaagtgatggttccaagcttttaaaacagctatttgcctctatttcaagtagcactggttccatttctttttcattcgattctggaacaagccacttaattctgtaacctttttcttcatcttcaaagaaagtatgctctagttctccgtaaattactttttgattgtgttcttcttcatcaaagaaatctttcggagtagaacctaacacttccaaaatagcaaataacgtttcgatagaaggagaactcaaatctcgttctagctgagaaatatatcccttcgtcaaatccgttcgttcgcctaattcttcttgtgtcaaattcttactgagcctaagattttttatgcgtttgccaatttccatgtcaatgtcctttctttcaagtttagtgatagtaaacctcaagtcacagaagtttactaatattaaacacaaagtttacttacagcaagctacattatacaacaaagcttccacatgaacaatagtttttttgaatttctctaagatagacaacgtttatttttagtgctaaaatttctttaataaaacagcttaggtggcagatattcat

SEQ ID NO: 3589 - DNA, 1741 bp, Listeria monocytogenes 4b
  misc_feature (1)..(end): n can be any nucleotide: a,g,c or t/u
tcaacataatctacaactaagtcccctaacttacgctgttcccaagctcgaaatggtaagttagaatagtgagaaattacataaaaaagaggcaacacaagatgcctctttcaaaaactattatacttaaaaactacattccatttatttaaagaaattcggtaaatactctttatgtgcttctaaaagttcgtccagcatttcgcgggctacagattcgcttggagttagtgggttgattgtcattgcaaggagtgctttgtcgtaatctccagtaactgctgcttcggctgttaggcgctcgaaagttttgatttcttggatgatgccgttgatagcgattggaaggcgtccgcttgctagtggaattgggccttggcgagtgatgacacagtttgtttctactgcggaatcagggtcgatatcaaggatggcaccattgttacgagtattaacgatttgaatgtcgcgtttgtcgttgtagatagagttaattaggttacatgctgcttcactgtagtaagcgccgccgcgttgttctaattgttttggtttttcagcaagttcttcttgtttgtaaagctcgaaaagttcagcttctacttttttaacaacttctgcacgagtaccatgttctgcgtatgcgcgagcttggtcttccagttgttgttttgtttgccagtagtagcgcaagtagtcgattggaatcatgtttagtgtacgcaagaacgttttgtcccaaccagttgcgttgatgtttttaaggcttgagccagcttcatcttctgtcattttgaaaacaacatcttttgttacgtctttgccattatgataaacagttttcgcgaataccatgtggtttagaccaacgaattctacgtaaatttcagaaacgtctacgccaagagtttcagcgatattgcgttcgatgccgatagggccgttacataagccgacaactttcttttggttactgtaacgaagaactgcttctgttaccattcctgcagggttagcaaagttgattaaccaagcatctgggcaaaggcgttccatgtctttacaaatatctaaaataactgggattgtgcgaagtcctttgaacatgccgcctggtccgtttgtttcttgaccaacaacgccatatgaattcgggatgcgctcatctttcacacgtgcatctagtaaacctacacgtaattgtgttgttacgaaatcagcatcttttaaagcttcttcacggtctagtgttaaatgtacttccatgtcaacgccagctttttctaccatacgttttgctaaattaccaacgatttctaatttttcacggccagcttctacgtcgactaaccatagttcacgaactggtaattcgtcttgacgtttaataaatccttcgattagttcaggtgtataacttgatccgccaccaatagttgcgattttaatacctttagtcattatttatacctccaaggatatttttttgaaaaggcttacttatttggtatcaccttttcttctcacagttatagtataggaattttatgaaaaaatagctagtatttgacgaggtttaggtaaggattttctaagtaggaacttgtcacatttgagtaacgaggtgttacatggtaaaataaagcgaaaagaggtgcgaaaatgctttttttggataaaaatttggaattttccgagcacactgtcggccgctcaagcaagcggctagttgcccaaagag

SEQ ID NO: 3590 - DNA, 2964 bp, Listeria monocytogenes 4b
  misc_feature (1)..(end): n can be any nucleotide: a,g,c or t/u
gttgaataacttcttttggttcttcttgttcgacttcttttggttgtgttttaacttcttcttgaggaacaaaaagtgcttttgtatcttcgctcattcttgcgataacatggcttgatactaaacaacctaagtcttctgttgcagctttccctgcttcgatagctgcatttactgcacctacatcaccagttaattcaaccgtagttaaaccaccacgaatgacttcacattgaatcagttcgacatttgctgcttttaaacaagtgtcggcagcaacaacagcaccaagaaaacctgtgacttcaattaaaccaagcgcttcatttggcattttttagcaccaccttaatattgaagtggattttcagccacattttctactgccattttgaacgcatcacaagctgctttacatgcagattggctaccagtcaaaagtgctccgccgaagtttgtttcggatggtgggccatagaaagctccgattgttacgtctgctgcttttagtgctgcatctaacgcatacatagcttcaagtggaggggcgattaagtaagcaatcgcttcaccttctgcaacattcgcttcttttgaaaggaatgtaccagttcttgaaacacaatgcgcgaagtaaggaacactatcatcttcatttgcactaacaaagctagcgccattttcgatgaaatctactgctacagaaagaccactttttacttccgcagggcttggtccggcgataataccgataacttcaccagcgaattttgtggatgcatttccagcaccagcatacatacttttcgcataaacaacatctacttctgctgcttttgttgcttcgtcaagcgctgtataagttacatcatcacaatcagatgtaataataccaaggcttctttgatgcggttttaagtctagttgtttaaatagaccattatctacgttagatacaactttgacacttaaaacggatgcaggtaatttatcatttttcatgaagtttcctcctctaactagcttattttaaatcaataccagaacattttttctcaagcatattgtgaattaattcagcaatgtatgctcctgcttcaactggtggagttccgccgctatggatgttagaaataacagtacgacgagcttctggcataccaattgttggtttgtaagcaatataggcactcatggattcagcagtgactaggcctggacgttcacctacaagtaagcaaactacgtcagcgccagtgatttcaccgatttggtccatagaaggtacacgacaatgtttaacgaaaataatgttatcaaaatctaagttatacattttcaaaccttgtttaatggatggcaagatatctttgatgttagcttcaattgccgctgagctaagtccatcaccaacaacgatttgaagtttggcgttttttgtcgtattcgcacgaatcacttctaccatttcgttgtcaaattcacgacctaagtctgggcgagttaagtattcatctttatcttgacatttagtgttcactgggatgaagttcatttcttttactaaatcctcagaaacgtaagagaaaacggaatcttgtgctacggcatggtccgcacggaaacgaagaattgtttctgttttgtaacgtggaccagcacgccataaaccaagtcgagccggtgtcatttgtttcattttcaaataaccttcacgatcagctggttctggtactagtaattgttttttgatatctacttcagtaatatccgggatgctaccttctgttataactgtttcaactacagatttagttggcgcagctgctactgtatcggttgttttaccaccggacatttctgttaaaatgccttcaatcatttgttttaattcttgttcgttcatcgcttagttcctcccttccttattttaggaaaatagatgcatctccagcacggctagttaatttaccattttcgctgaatcccattttttccatccactgatcaaattctttaattggttttaagccaaataattcacgtaaagtggctgtttcgtggtaaccagttgtttggtagttaagcataacgtcatcaccatgaggaatacccatgataaagttacatcctgctgcagttagaagtacggacaagttttctacgtcgttttgatcggctttcatatggttggtgtaacaaacatcacaacccatagagataccagttaatttacccatgaagtgatcttcaaggccagcgcgaattacttgtttagaatcatataagtactcaggtccgataaatccaactactgtatttactaggaatggatcaaatttcttcgcgaatccataacaacgagcttccattgttacttggtctacgccgaaatgagcgtcagaagaaagttcagaaccttgtcctgtttcaaagtacattacgtttggtccagtcgcagcaccactttgaagggctaattgtctagcttcttcaatcgttgctccgtcaaaaccgaaagctgtattacctttttcagaacctgcgatagattggaatacaagaccagttggagcgccgcgacgcattgcttccatttgagtcttcacgtgtgcaagtacacaagtttgtgttggcacatcccatttgctgcggaattcttcaaatttattaagtaaacgaacaacgctatcagtagaatcatctactgggttaagtccgattaccgcatccccaatcccgtaagttaatccttccattaaggaagcaaggataccatcaggatcatcggttggatggtttggttgtagtctagcggagaaagttccaggaagaccgattgttgtattcgcatgtgcgattacacggatttttttcgcgccataaattaaatctagattggacattaattttgtaacagcagcaataatttctgatgttaggccgcgtgcaacacgtttaatg

SEQ ID NO: 3591 - DNA, 2287 bp, Listeria monocytogenes 4b
  misc_feature (1)..(end): n can be any nucleotide: a,g,c or t/u
cttggatttgcaactcgttttttgatttcgtctgcaatgatggtgaaaggattctcggtatcgttatatccgtatgcagggtgtgtccagtcaccgccgcgcacatcttctacttcaagagcgggcgtaaataaaaacggttcactatctgggaaaactgctaagccaagcacgcgctcatgaggctcactatgataacccgagaaataagcgatgttctctggatctgttaaaaatgccacctcagcaccttggtcttttagccaattttgtaagacatcgatatttttttccataattgtaccttctttccaattgatttctatttcatgataacatgcgaaggaattattttgctaataaacacctcttagtttacgaggtgttatatagtagtttataataaatagtggtacaataatacacatagaataatgaatcaggaaggaagttttttaacatgaagatttcatttcatggtcagtcttgtattaaaataattactggggatacaactattctcgtggatccatttatttctggtaatgagaaatgtgatttaaaagcggaagagcagatgcctgactttatcgttctgtcgcatggacatgatgatcatgtcggtgatacagttgaaattgctaagaattctggagcaaccgttatctgtaatgcggatttggcttcttttttagcagtagaggatgggcttgaaaatatcgctccaatgcatattggcgggaaaagacagtttagttttggccaagtgaagttgacgcaagcttttcacggatcgcagacggttcgagatggtcgcattgttaaccttggtttcccaactgggattgtatttacgatagaagataaaaatatttattttgcaggggacactggtttgttttctgatatgaaattaattggtgaattaaatccgctagacgttgctttcttgccgattggggataattttaccatgggaccagaagatgcggcgattgcggcacggtttttacaagcgaaattagttgttccaatgcattacaatacgtttcctttgattgcgcaagatccgcacaaatttgttgcatcgcttgatgaggggataactggaaaagtacttgaaattggggaaggtatcgaaatctaacaaaataggaatgggtgaacgtgtcgtggccacaaaacatgaacagattttaaaatacattgaaaatcttgcagttggagaaaaaatatctgtacgaaaaatcgcgaaaaacttgtctgtaagcgagggaactgcttatcgggctattaaagatgcagaaatcattgggtttgtttctactattaaacgagtgggaacacttcgaattgaacggaagcaaaaagatagtatcgaaaaattaacttttgctgagattgtgaatatgattgatgggcaagtgctaggaggtcgtgcggggctttataaatcgcttaataagtttgttattggggcgatgacagtggaagcgatggaacgctataccgatgcaggaaacttattaattgtcggaaatagagtgagcgctcatgaacttgctttgaaacgtggcgccgcggtactgattactggtgggtttgatacggacgacgaagtgaaacggttggcggacgagaaagaactgcccattttatcgacttcgtatgatacgtttacagttgcaacgatgattaaccgcgcgatttatgaccaattaattaaaaaagaagtagtatttgtggaggatattttgaccccattagaaacaactgcatttttatctacgtctgataaagtggaagattggcataaaatggaagaagcgacaggtcatagtcgatttcctgtagttaaccgagcgatgcgactgactgggatggttacaagtaaggatattctggaaaaaaatccaagtatttcaattgaacgagtaatgacgaaaaatccgttaactgtgggaccaaaaatgagtgtagcctctgtggcgcacatgatgattcgggagagtcttgcacgcctctcagtcgttgcagatgactcaccatgcatcgggatcgcccgtcgacaggatgtgctgaaacccctgctcccgatttgccacccgcgcggtggtcggtctatccctctttcattctacttgctatgctgttcgtcctcttatcttattctctctaataggctttccggtcctttttggtgtggcgttttttgcacgcggctcccgctctcttttgtttgccttgtcttttccctcgcttttgccccccgcctacaaaaacaaaa

SEQ ID NO: 3592 - DNA, 3296 bp, Listeria monocytogenes 4b
  misc_feature (1)..(end): n can be any nucleotide: a,g,c or t/u
ttgaatatgaaaagagacgggcatacgcacacagaattttgtccacatggtacgcatgatgacgtggaagaaatggttttaaaagcgattgaactggattttgatgagtattctatagtagagcacgcgccactttcgagtgaatttatgaaaaatacagctggggacaaggaagctgtgacaacggctagtatggcaatgagtgatctcccttattattttaagaaaatgaaccatataaagaaaaaatatgcgagcgatttattaatacatatcgggtttgaagtggattatttgattggttatgaggattttacgcgggattttttgaatgagtatggaccacaaacggatgatggtgtgttgtcgctgcattttttagaggggcaaggtggttttcgttcgattgatttttcagcggaggattataatgaaggaattgtacaattttatggcgggtttgaacaagcgcaacttgcttatttagaaggtgtaaaacagtcaattgaagcagatttaggactttttaaaccgcggagaatggggcatatttcattgtgtcagaagtttcagcaattctttggggcggatacaagcgatttttctgaggaagtaatggagaaatttcgggtgattcttgctttagtgaaaaaacgagactatgaacttgattttaatacggcgggactatttaagcccctttgcggagagacatacccaccaaagaaaatagtgacattagctagcgagttacagattccgtttgtctatgggtcggactcgcacggtgttcaagatataggacgtggatatagcacttattgccaaaaatgatctttcattttgacgtgtccattctctttaaatgtcacaccttctgataaaaggagttcgcgttgctcttcccaaccggggacaagtcgaccagctgcattgacgacacgatggcaaggcgtaatttggtcacgcttcgaatgttttagcgtagcacctacgagtctggcgtttttaggaaagccaatcatataggcgatttggccatatgtagtcactttaccgcgcggtatttggcgcacgactgtataaacacggtcttcaaaatctgctggaatcattacgtacctccatttgttcataataaatttagtatacaggaaatacctattttataaaagttaggatgataaaggaatgccagatttttcatacgcaaaaattactaaactcgtggtccattttgctggaaataaagcgagagaagaaggaacagaagtatcagcgaatgtgctcgctgacattggctcggaaatgaatcaaacactagcttcgattttcttagagccatttaataaagatgaatattatcaatttacgcatgaaacagatttggattttaatgaagttcgtacttttgctgcgaatatgtttgtcgcggaggacgagtttctggatgaatccaagaagattttagagcatttatatagcgaaacaacccacccgaatattaaaagtggcgatgtttggattttctttattgagggctgcgttgtcgatggtgatttcacgaacggaatcgggatttttaaagtcgaaaacaaagaagtttttcttaaaaatgatttcaatggcagagaattccaaattggctatgataaagggattaccgggacggatttagataaaggttgcttggttttcaatgtggatcatgacacgggaaataaagtgttgattttagaccggcttaaccgcggcgattcggtttattggaaagataagtttttgagtattgataagataaccgatgagaaattttacacggaaggttttgtggaagtttgtacggattatattaaacaacgcgaggaatcactgcttgataaatctaattttgtaaaagcgacatcggaatatttagcaggagaagagacgttgaatattgctgaatttgctcgcacgacaattgaaaaaccggaagagattaccgaattcaatacaatggtggatacgttcgaacgagaaaacaatgtccgttttccagaaacattccaattagatgaagaaaagcgcgaaaaactatcgaaaaaaatacgtaaaacgattaagcttggcaaaaatatttcggttgttgtgaaagatttagaacagctggaagaaactgattttgtacaaggatacgacgaggaaaaaggcaaaaactatatgattgtgtattatgattaaacgaaaaaaccgaggatgcggaatccccggtttttttgctgtctaaacgacgaacataaagtacagtataaacagtaccatcatcacgtacataatcggatgcacttctttgtagcgtcctttaagtaccatggtgattggatagaaaatgaaaccaattgcgataccagtagcgatagagaaagtcagtaccatcattaaaataacgaaaaaggacggaacagctacttcgaatttagtccaatcaatatgagcgacatttccaatcattaaaatcccaacaatgacaagcgctggagtcgtaaccgcacttgtaattacgccaagaagcggcgagaagaatagtgacagtgagaaacagattgcgataacaacggcagttaaacctgtccgaccaccaacagcaaccccagcagtagattctacataagaagtcgttgttgaagtcccgaaaatcgctccaaatactgttgcaagtgaatccgagaatagcgaacgacctgcgcgcggaattttgttatcttttacaaatccagcttgagtcgcaaccgcaacaagtgtcccggcagtatcaaaaaaatcaatgaagaaaaatgtcaaaataacaatgagcatttgtggtgtaaaaatatctggtaagtgaataattgcttgaccaaacgttgactccatacttggtacagatgaaacaacttgagtcggcacatcaatcagtccaaacaacattccagcaacagcggttgttgccattccaaagaaaatcgcacctttccaaccaattgtcatgtaagcaacagtaacaacaatcccgaaaacagccagtaacactgggccagaatgtaagtcaccaagcgctacaatagtagattcatttggcacaataattccagcatttttaagccctaaaaaggcgataaaaaaaccaatacctgctcccactgcgaattttagttccgttgggattgcattaacgattttttcgcgaagtccagaaatagttaaacaaatgaacactaagccagaaacgagaacaccagccagcgccgtttgccaaggaattccccactgcgcac

SEQ ID NO: 3593 - DNA, 2622 bp, Listeria monocytogenes 4b
  misc_feature (1)..(end): n can be any nucleotide: a,g,c or t/u
aaacataatttttatattctcccgttccttaaaagtcttatctttcattataacgaataaactatacatctgtcactatatttatttctatttccaaatatttatttgttttacataacaaaaaagcgccaaatgcttttacacatttggcgcatcttaaaattttatttaaaggcttgtgcagctttgacagctttatgccaaccttcatataaatcttctctttgttcatctttcatttctacttcaaaacgtttgtctagtttccaatgttttttaatttcgtttttgtctttccaaacgcctaccgcaagtccagctaagaatgccgcacctagaacggttgtttctttgttttctggacgttctaccggaacgcctagaatatcggattggaattgcattaagaagttattagcagaagccccgccatccacacgtaacgtttttaagctaataccagaatcttgttccattgcataaagcacgtctcttgtttgataagcaagagattccaatgtcgcacggataaattgttctttttcggtaccacgagttaatccaaaaacagcaccacgaacatcggaatcccagtaaggtgcgcctaaaccaacgaatgctggtacaacatatacaccatcactagattcaatccggctcgcatagttttcagaatcgcttgattgacgaaccattcgtaacccgtcacgtaaccactgaatagccgaaccagcaacgaatatactaccttcaagtgcatattctacttttccatcaattccccaagctagtgttgttaataagccgttttcagaacggactgctttttccccagtgttcattagtaagaaacaaccagttccataagtatttttcgccatccctttttcaaaacaaccttgtccgaataaagcggcttgttggtcaccagcaatacctgcaaccggcacttcttcaccaaagaagtgataaggcactgtgtccgcatacacttcagaggaaggacgaacttcaggtaacattgcttttgggatattaagcatttttagaagttcatcatcccactctaaatcgtaaatattataaagaagtgtccgagaagcattggaataatctgtaatatgagcacgaccaccagttaatttccaaactaaccaagtatcgattgttccgaaaagaagttctcctttttcagcacgttcttgcgcaccatctacatggtcgagaatccagcgagcttttgtacccgcaaaatacggatcaatcaaaagaccagttttagaacgaatggtatcttcatagccgtctttacgtaattgtttacaaatatcttctgtttgacgagattgccaaacaatcgcattataaattggatttccgctttctttatcccaaataacagtagtttcacgttggtttgtaataccaatcccagcaatttctttagaagaaatatttgttttgagtaatacgcctgcaataacagctaaaatcgaagcccagatttcattggcattatgttcaacccaacctggtttaggaaaaatttgatcaaattcttcttgtgcaacgccaattacttctccttcttcgtcaataatcatcgctcttgaactcgttgttccttgatccagtgctaaaatatatttcttttccatgtaaaattcctcctctagttttaagtacaacgaaagcccgaagaccttcgcttggagctagttattattctagcttatgctaaatcttttttcttgtcgagttgcatcgttaaaataagaattaaaacaaataatactgcgaacacccagaaccacattcctagttctccgttaataatggcattataccctaaagcacctaatgcaccgcccatgattggtccaataactggaacccatgagtaaccccaatcagatccacctttgccagaaatcggccaaacaaaatgcgcaattctcggtccaaggtcacgagctgggttgatggcataaccagtagttccaccaagagacatcccgatagctacgattaatgcgccgacaacaagtggatttaatccatctgaaaaagaatttgcacctagtgatagtaatccaaatactaaaataaaagtacctaatgcttcaccaaaaaagttagatgtaaaatggcgaatagctggcgccgttgcaaaaacacctagttttgttggtttgtcttctgtttgtttccagtgaggatagtaatgtaaccatattagcgttgccccaataaatgctccgataaactgagcaagaatatatggcaatacgtaattccacgggaaagcacctgcaagcgccataccaatagttacagcagggttaagatgggccatactcatatatcctgaaacatatacacccattgtaacacctagcccccaagctaaagtaataacgacccagccgccattctccgctttagatcttttcagtgaaacacctgctacgacaccagcacctaaaataattaggatagccgtaccaataacttcacctagaaattgtgttgctaaacttgtgtcaatcatcttttccaactccttcttcttgcttatttgtatcaccggaattttaacacttactagtccccttacattcc

SEQ ID NO: 3594 - DNA, 3081 bp, Listeria monocytogenes 4b
  misc_feature (1)..(end): n can be any nucleotide: a,g,c or t/u
aggcacaacgctctccgatattgaacgtatggtcaacattctaaatgaacggttagtaggactttcgcttgatgatttaaaagtacaaatacccatggaagtaaaggaattacttgggaagcatgttagaaattacgaaagctttatgcatgtgttttccgattcttttgctcaagcaagtcaacaaaaagtgtattttggcggaaaaacgaatattttaaatcaaccggaatttcatgacattaataaagtccgtgagatgcttcatttgatggaagaagaacaagatgtgtatgaattgtttagggatattcccgatggtcttcaagtgaaaattggccgagaaaacaataatagtctaatggaagattgtagtatcattacagcaacatataatattgctggcgaacgcgttggcggtattgtactcctaggacccacaagaatggaatatagcagaatgatgggactcgttgatgtgatgagccgagatttaaccgatgtgttaaccaaactttatcgtgataaccaaaattaggaaggctgaaaaagcacacgttttttcaggaggtggctaaagtgtctgagaaaaagaacaaaaaagaaagactagctgatgaaatcgaacaagaagaattaaacattctagatgaaacagaagaaactgttgaagaagaggctgcggctgacactttaacagaagaacaagcaaaaattttagagcttgaaaacaaacttgatgaagtagaaaatcgctaccttcgcatgcaagcggacttcgaaaatgtgaagaaaagacatatcgcagaccgtgatgccagtcagaaatatcgttcgcagagcctagcgcaagatttacttcccgcactagacagttttgaaaaagcacttgcaacgacttctgatcaggaagaagtgaaacaaattttaaaaggaatgggaatggtgtacacccccaactctttgttgcttttgaaaaagaaggtattgaagtcattccagctgtcggcgaacaatttgacccgaacttccatcaagccgtaatgcaagatagtgatgaaaatgcaggaagcaatgaaatcactgcggaacttcaaaaaggttataaacttaaagatcgggttatacgcccatctatggtaaaagtaaatcaataaaaaataattactgaataacaggaggaaataacaatgagcaaaattatcggaattgacttaggaacaacaaactctgcagtagcagtattagaaggcggagaagcaaaaatcatccctaacccagaaggcgcacgtacaacaccttctgtcgttggtttcaaaaatggcgaacgccaagttggtgaagtagcgaaacgtgctgctattacaaacccaaatacaattagttctattaaacgtcacatgggtactaactataaagaaacaatcgaaggaaaagattactcaccacaagaaatcagtgcaatcattttacaatatctaaaaagctacgcagaagactatcttggtgaaactgtagataaagctgttattacagttccagcttacttcaacgatgcgcaacgtcaagcaacaaaagatgctggtaaaatcgctggtcttgaagtggaacgtattattaacgaaccaacagcagcagctcttgcttacggtatggataaaacagaaacagaccaaacaatcctagtatttgaccttggtggtggtacatttgacgtatctatccttgaattaggtgacggcgtattcgaagtacattctactgccggagacaacgaattaggtggagatgacttcgataaaaaaatcatcgactatttagtagcagaattcaaaaaagataatggtattgacttaagccaagataaaatggcgcttcaacgtttgaaagatgctgctgaaaaagcgaaaaaagatctttctggcgtaacaagcacacaaatctccttaccatttatcacagctggagaagctggtccacttcacttagaagtaacccttactcgtgctaaatttgatgaattaacacatgacttagttgaacgtactattgcgccaactcgtcaagcattaaaagatgcaaacttgtctgcaagcgatattgaccaagtaattctagttggtggatctactcgtattcctgcagttcaagaaacaatcaaaaaagaattaggcaaagaacctcataaaggtgtaaacccagatgaagttgtagcaatgggtgctgcaattcaaggtggcgtaatcactggtgatgtaaaagacgttgtactacttgacgtaactccattatcccttggtattgaaacaatgggtggcgttatgactacacttatcgaacgtaatacaactatcccaacatctaaatcacaaactttctctacagcagctgacaaccaaccagccgtagatatccatgtacttcaaggtgaacgtccaatggcaaaagacaacaaaacattaggtcgtttccaattagcggatattccaccagctccacgcggaattccacaaatcgaagtatcttttgatatcgacaaaaatggtatcgtaacagttcgtgcaaaagatcttggaactggtaaagaacaaaacatcgttatcaaatcttcttcaggtttaacagacgaagaaattgagaaaatggttcaagatgctgaagctaacgctgaagaagataaaaagaacaaagaaaacgctgaacttcgcaacaatgcagaccaattagtattcactgtagataaaactttgaaagagttagaaggcaaagtggaagaagaagaagtgaaaaaagcagaagcagctcgcgatgaactacaagaagcgcttaaaggtgaagattttgaagctatcaaagaaaaaacagaaagcttaaacgaaatcgttcaaaacctatctgctcaattatacgaacaagctgcagcagaacaacaagcagctggcggtgcagaaggtcaagaggctcctcaaaatgacgacgtagtagacgctgaatttgaagaagtaaatgacgacgacaaagaaaacaaataatcttttttaaagtaaagatcattagtcaacgtctactatggctttgact

SEQ ID NO: 3595 - DNA, 2297 bp, Listeria monocytogenes 4b
  misc_feature (1)..(end): n can be any nucleotide: a,g,c or t/u
aactcagaaaattacttaaatcgaaataaaaataatttaaaagaaaaagctagggagctttttaggaggtaaactttttgaaaaagaatacgtttattgcgatttcactcgcagcagttatcagtttgacgccagcttttacgactaatgttttcgcggacgtgaatacagacattcaaaaccaagataaaaaaattaacgacatcaagtctaaaaaaacagatttacaatcagatctttctggtttagtagcagaccttgagaaagctcaagaaaaagctaaatctctacaaggagaatttgataaaacaggcaaagaactaaaaaaacttaatgaagatattaaaagtatcaatgaacgtattaaagaacgcgaaactgttttaaaagaacgtgctcgtgcgatgcaaaaaacttctaattctaatgcttatcttgaagttatcttagatgcagaaaatctttctgacttagttggtcgtgtttctgcagttaaccaattagttgattctgataaatctattttagaagatcaacaaaatgatgaaaaagctttaaaaacaaaacaaactgctgttaagaaaaaacaagaagatcaagcaacagcaattcatgaatatgaagcacaacaaaataaaatcgaagcacaaaaagctgaaaaagaagcaatcgttgctcaactagcttctgatcaagcaagtgctgaaaatgcaaaagctggtcttgtaagtgaacgtgataaagcagctaaagaagctacagcacgtgcgacagctttacgtgaagcaacatcttcaaacgttggacaagaatcaagtagttcagctacttctacatcaagtggaaaatctaatacaacgaaaaatgttgcatcaaatgataacaattcagcaccaagcgcagcaacaccatctagtggcggatactcagcaatgattgctgcagctaacgcacaacttggaaaaccttatagccttggagcaactggaccaagcgcatttgactgttcaggatttacttcttatgctttccgtgcagctggtgtttctcttccaagaacatctggtggacaatatgcagcagcatctaaaatcagcgctagccaagcaaaaccaggtgacttagtattctttaactatggtagcggaattgctcacgttggaatttatgttggtggcggtcaaatgattaacgctcaaaacaatggcgttaaatatgacaacatcactagcggttactgggctaaatatcttgtaggatatggccgcgtagctaacttctaattattattgaaaagttaaaaagcacctttgtcgttttaaacaaaggtgcttttttatatggtatggtaaagggaattatgaagttcctagtcaaatagagaatagaaaaggagcttaaaatgttaaaaaaatatggggtagtaacgattcttagcctattggttatttccgcgccactaactggtgcgcacgcggatactatcaatgatatgcaaaagcgccaaaatgaaattgaacaaaaaaaatcagaactagataaaaatatagactcgaaaaactcggaattaaatcatttagaaagtgctgaaaaagacgctgcaaaagaattagaatcacttatgaaaagtcttgatgccactaacaagaaattaaaagagcaggaagataaagtgagctctgaaaacgagaaactaaagaaattgcaaaaagaaatggaaaaactgcgcaatgatattcgcgatcgtcaaaaagtacttgataatcgagcgcgtgctatccaaacaactggaacagccacttcttatttagatatgatttttgaagcagatgattttaaagaacttgttgaccgcgtgacagttgtatcggcaattgtaaaagcggaccaaaacattatgcaagaccaaaaagatgatcaagataaactaaaagtagcagaatctgcttctcagaaaaaactagagaatctaaaagtacttgcagtggaattagaagtttcgaaaaacaatatggaaagtcaaaaacaagaaaaaaatgatttagttatggctctagcaaacaaaaaagacttaactaagagcgaacaaacccttttagctagtgaacaaggtgcgcttactgatgaagaaaaacgacttgcttctaatattgcaggtgaaaaagcaaaacaagaggctgcaattaaagccgctgaagagaagcgaatgcaagaagccgcagcagcaagcgctaaaagttcctctgttgttaaacaacaaccaagttcagattcaagtggagctacagaaacagtaa

SEQ ID NO: 3596 - DNA, 3155 bp, Listeria monocytogenes 4b
  misc_feature (1)..(end): n can be any nucleotide: a,g,c or t/u
aggagaacctaacaaccaagccgcaatagccacaacatgagaaccgaaaatgaaccaatcaaaggtattgataaatccaaatgcgacccatgtttctttaaacggtctgactgcttgtgtcccgtaagcattaaaaatatctacaaaaatgtgtaatcccaccgcgataaacgtccataacagtaaatgaataaatgttgctgctgggaaaagtaaatacaaaacagatgaaataagtaatggccaaattgcaagcatcggcaaggaatgtgttattcctcggtgatttctaatataatcagcgttgttttttaattttagtacagtgtcaatatctggaatttgtgaaccaataattgttgctgtcataataccaatggcagcttgagaacttccggcaactaccgggtctacggttgctaacgctccgagtgcaattcccattactacatgtgtgccagtatccaatgactttgcctcctctaaaatcggtcttaaaaaatacaagtggtgctgcctgtaagagcacaacactattcaatcaagccagcattcggtataatagaaatcggcttaagaatgggtatactattttattccctgtctacattatactacacatccggagcaacacacattagaaatctattagaattacgaggggaaaatgagaaaaatgaagagactaacttgggatgaaacaaagataactgcttttcaagaagcactcgtttcctggtatgaagcgaataagcgcgtcttaccgtggcgcgaaaataccgatccttacagaatttgggtctcagaaatcatgcttcaacaaacaaaagtcgacacagtaattccttattttaatcgctttatgactcaatttccgacgatggaagattttgtccaagcggatgaagcggatattttaaaagcgtgggaaggcttaggctattattctcgtgtcagaaacctccaaacagccatgaagcaagtgatggccgatttttctggagaagttcctaccgacttaaccactattttatcgcttaaaggtgtgggaccgtatacagccggagctatcttgagtattgcctacaaccaagctgaaccagcagtggatggcaatgttatgcgtgtcatcgcccgcgttttagaaattagtgaagacatcatgaaagtgtccacccggaaaatttttgaagaagtgttatatcaactaattgacaaagaaaatccagccgctttcaaccaaggtttaatggaaattggtgcgcttgtttgtacaccaacaaaaccaatgtgtatgctttgtccgctccaaccgttttgcgaagcgcataaaaatggcgttgaaacgaattatccagtaaaaataaaaaaagtgaaaacgaaaaccaaagaactattaagcatcattgttatttcagaggacggaaaaattgccatagagaaacgaccagaaaatggtttgcttgcaaatatgtggcaatttcctactattgaaatttcgaaaaaagaaaatgaggaagtagctaaactacaatttttacataattatggcttagacgttttactagaagacgaaccaattgcgcatatcaaacacgttttttctcatttagtatggaaaatggacattcgtgtggcaaaacttcagtcagcaattccaaatgaaaattggtattttgcaacagaagaagaaatgaagcgacttgcttttccagtaccatatcaaaaaatgtggcaagcgtggaaagattttaagggggaataacaaatgaatagagtggcattagtaacaggaagtagtagaggacttggaagagaaatagccatcgcacttgcaaatgaaggctatgatatcgctgttaatttttccagaaatcgcaaaaaagcagaagaagtacaacaagaaattgaacaattaggaagaaaatgcgttatttttaaagcaaatgttggtgacgtggaaaaaattagagacttatttaaagctgtagatgaggaattcggccgattagatatttttattaacaatgcagcaagtggtgtccttcgaccattgatggagttagaggaatcacattgggattggacaatgaatattaacgcaaaagcgctgttgtttgcaggtcaagaagcagctaaattaatgcaacgccatcaaagcgggaaaatcatcagcttaagctcgattggctcgattcgttatttagaaaattacacaacagttggcgtttcaaaagcggcggtagaatcacttactcggtatttagcagttgaacttgcaccttttggcattgcagttaatgctgtttctggcggcttaattgaaacagacgcactaaatcactttcccaatcgtgaagaattgttaaaagatgctataagtaaaacaccagcgggtcgaatgattgagcccaatgacttagtaaatgccgtattattccttgcgagcgaaaaagcagatatgattcgcgggcaaactattttagtagatggcggcagaacacttttagtatagtaaaacaaaataggtaaaaattagctattttatgtaaaaaaagttcttttttgaggaaaatattccgtttcagcacgatattgtttttttgcagtcttgccttatgttataataataatgattttgatagtacctgaggaaagtaggataaaggatgtacttgcccaaagagaaagaaataattcaaatcaagagctcaacatagcggagaacttcatcgtacttggaaaaagacagtggtgcttaaatctacggagaatattattatcggcggaaacgaccacacattagttgtggaagcagacggacgtaaatgggtaacgcgcgaaccatctatctgctattttcatagtgattactggtttaatgtaatttccatgattagagaaggcggcatttatcattactgcaatctagggacaccatttgcagtagatgaacaagcgcttaagtacattgactatgacctcgatattaaggttttcccgagatggataggtttcaatttgcttgatgagggcgaatacgaacaacagccgtcgccaaagtgaagtacccagactcaattgaccggatacttcgacataatgtggatgtgttaagccactggattttggacaaaaaaggtccgttttcccct

SEQ ID NO: 3597 - DNA, 2218 bp, Listeria monocytogenes 4b
  misc_feature (1)..(end): n can be any nucleotide: a,g,c or t/u
aataaaaatgtcttagagctagtgaatttatgtttggaagaattcggagcaattttatttgcagataataaaaagctttatttttacgatgaaaaaagttggtatgtaaggacagagaagcaatttcgttatttatataatacagaagaagtttcggtggatacgaacacagataatttgaagacggagataaaatgttacggcaagcaaaaagagaatgccgataagctgactggagataataagtacatggcggttgtcacatatacttcgccaaatgaggctatttacgggaaacgaatggcaaatgctaaaagtgatgacaaaatcacgaacaatgatgacttattaatttttgcaaagaaacaaattctagatgttccggagacagcgcttactatttcttacaaaggaaaagaacctgttttagagcgggatgtttggtatttcattcatgaaccgatggggtttgaaacagaagtaaaagtaacgaaaattaaatcgagtcatccttggagtaagaagtttcaagaaattggcttcagtaattcgcgacgagatatggtccgaattcaaacgcaaattgctaatcaagtgaaaaaaacgagcgtagatacaaataaaattaattcgttttcgagcatcgcaatgaatgctcatgattccccaattttagcggaagtagtaggtgtggtagatgccccctcaaattagagtgttaacccatgtagatgatacagttttctatccgcagacacatgtaacggctgtggaaggtttggactcggctacaactactacatctggattaatgcccgccagcgacaaaacgaaattaaatggaatcgaagctaatgcagaaaaaaataatgtgactgcaatcgatattgccaattggaataaaaaacaggacgcaattttggtttctgaaaatggctctaatttcaaaataactgtcacaaatgctggtgaactaaaggcaacaaaagtggaataggaaggaggttgcgtatgaagttggatttatggaaatgggaaatgcttcttcaaggtcgagaatttagaaataaaacaaatgacaactggcaaaaattaatggattggtccgattttatttcaacaggtttaagcgcgatttatgtctatgtaaataaagcagatgctactttaaataacaaaattgatactgtggataaggcggtaaatgcaagggtaaatgaattgattagcgggacagagcagttaagtgaagtggtcgacgccagagtggatgcatttggcgcacgcttcccagtactaagagaacgtttaaaccaagaacaggtaatttacaataaaaaaagcacggtgcaatttgacgtgaatactattataaatatggaaaaacaagatattgggctgctaacaagtaaaacaatctcggaagcgcaaaccgtatgttttttaaatatatcaagccttaatgaagacgcggatattgttcttgaaaaaacaggcgagacaagcttctcagaaaatttaacaagtctagtctttgcaaaaattggaacgaatgaacgctaccaaatggagccagttggtgcataaaggaggagtgagcaatgactgaaataaagcgaatgctgcagacaaaagaagataattcaaaagaacaattttatccagagacgcatgttgcggggattgttgggttgacggaatatgtgtcaggccagcttccgacaggcgtggttagtgttaatggtaaggctgggcgcgtgttgctagatgcagaagatgtccacgctgccaaaaagagccacaaccacgaagtcgcaacatacacgacggacggctttatgagttcttttgataaacaaaagattgatcaattagtttcaccagaagctggcgtgacaagcataaatggcaaaacagggattgttgatttattcgcagcggacttagatgcagcagagataaaccacacgcatgcagaagcaactactacagaaagtggttttttggcaaaagaggacaaagaaaaactagacgcgatgcaaataatcgcgctggaaactattaaggaggttatagaatgactaaaattgtaaaaatgtcagagaaaaacgaacatggaactctagaacaattctatccagaaacacatgcagaggctgttaaaggacttgtgtcggtttcagaggaagagaaggcgacatggaacgagaaagaaact

SEQ ID NO: 3598 - DNA, 2000 bp, Listeria monocytogenes 4b
  misc_feature (1)..(end): n can be any nucleotide: a,g,c or t/u
aaacgataacatatgataccttacttaatgaaccgactgctccaaccaaacaaggtttccttttcgatgggtggtatgacgcagaagtaggcggaacaaaatgggattttaacacgatgaaaatgcctgcgaacgatattaatttgtacgcacatttcagtaaagaaacgccacttattcctagcccatctgacgaatcagactcgaaacctaccaatggatcaatcactataaatgaaccgagtgcaactagtatgccagcccaaaataataacatcacagtaacagcaggggaaaatactccagaactaacaacagctaaacttccgaaaactggagataataacccgtggcaaacactattcgccgggatattactttcatcatccgcgttttatatttggagaaaaaaagcataattaaaaaacccagtatttcctaaaatggagattactgggtttttggtttaatcaagaatctcaatatagccttctgtcccattgatgcgaatttgctggccatcttttataatggtagttgcattttcgacacccacgacagcgggaaggccgtattcgcgcgcaatcactgctccgtgcgtcataagcccgccaacctcggtcacaagccctttaatagatacaaatgcgggagtccaactagggtcagtataagccgtaacaagaatatcgccatcttctaaatccgctttttccatatctaaaatgacgcgagcgcgaccttcaactgtccctgatgaaactggaagtccaagaatggcgtctttagggagattttcgcgtttgtattcgccgttaatcatttctccatcagaagtaaggatgcgtggtggcgttaatttttcaaaagtggcgaaatcacgttttcgaacgttaataagttcgtaatcaacttgaccagtacgcacgacttcgcgcagttcctcaaagtaaagaaaataaatatcttcttgctcttgcagaatgccatcttttacaagttgttcgccagctcgaagtaaagccagtttgtaaataaagtagcgattaatcatcccgtatttaggatactcacgatagccgatgaaatgacgtaaaatatcgattttttcttttgtttccatcgctttttgttccccgtccggaagctcttgcaaacgtcttaggatttcttgttctttatggaaagcttctttttctccctgagcaaatttgtgcatactcgcgccggagtcgaaatttttgatgttacttaaaatcagcggaataagcgttagcgggttttcaatccaacgagttttggttaagtcaatttcacccgcacagcgcatcccgtatttttgaaggtaatcttctagcgcttttttggtttctgcaccaccttctaaagtagctagttcattcatgaaatcagggtttttcgtttgttctaaataggctctgacagcagggtaggggcgaatgacgtcagctacatctaataattcaagtcccatttgtgaagtaatattgtttggggctgattctgacagtttatcggcgacatttttttctccgagccactggtaaatatgttcatttaaccaagctgaagcgtccatacctgccataatggcatcaatgctagtaggattaaataaaactcgctttaattcttccaaatcctctacgataaaatcaaacaaatcagatccgtttttcgtttcaatggattgcttcaagtgctttatagagttttcgctgtttcgaactaattcaaaaacgctagatgaatcaggaatgctacgcacgggtggttttccagacacgggtgcctgacttggattttcctcggttggtagtggaggcaggaatccttttttgttaattacagtgagcaaggcatctttaataagtgggtctgattgaccgagtgaattgaccatcatatcgcgagaaactttggctgacaggctctgagtaatatcgacaaacaccgccctcctgctgtatacatagagg

SEQ ID NO: 3599 - DNA, 3037 bp, Listeria monocytogenes 4b
  misc_feature (1)..(end): n can be any nucleotide: a,g,c or t/u
atgctgctcgagcggccgacgtgtgctggaaaggaaattgaaaagcttgatggcgtaatctctgtcattaaaagtggtggtcaataccaagtagttatcggtaaccacgtaccagacgtatttaaagcagtattagaagttggcgggatttcagctgaaggtgacgaaggaagtagtgcaccagcaacaggtaatatcttcaaccgcttcatcgatatgatttctggcgtatttacaccagttctaggtgtattagccgcaacaggtatgattaaaggtttcactgccatgtttgtagcatttggttggattacagttacttcaggtacgtaccaactactttatgcaattggggattgtttattctacttcttcccaatcttcctaggttacacagcaatgaaaaaattcggcggaaacatatttatcgggatggctataggtggtgccttagtttatccaacacttgcaggtattacagcaggtgacccactttatacacttttcgcaggaacaatttttgaatctccaattcacgtaacattcttaggaattccagttatcttgatgtcttatgcatcttctgttattccgattatcgtagcaacatattttggttccaaagtagaaaaaggcttcaagaaaatcattccagatgtaattaaaactttcgtagttccattctgtacattattaatcgtagttccaatcactttcatcgtaattggcccaattgctacatgggctggtcaattattaggagcaggaacaatttgggtttataacttaagtccaattatcgcgggtctaattttaggtggtttctggcaagtatttgttatctttggacttcactggggtcttgtaccagtggcaatcaacaacttaactgttcttggacatgatccaattttagcaatgacatttggtgcatcttttgctcaaatcggtgcagtattagcagtattctttaaatctagaaacaaaaaaatcaaatctcttagtatcccagcatttatttccggtatctttggtgtaactgaaccagcgatttacggtgttactttaccactgaaaaaaccattcatcatgagctgtatcgctggtggtattggtggcggaatcattggttttgcagggtctcaaacatatatcatgggtggacttggaatcttcggtcttcctaacttcttcaaaccaggtagcggtatttcaggcgaattctggtgggtagttatcgcaatcgttatcagcttcatccttggtttcatcttaacttatgtagtaggtttcaaagatccagctgatgtagtagtagaacaatctaacacagtagaaggcgaaactttaatcgaacgtgaaacaattccagctccagtagttggcgaaatcgtaactttagcagacgtaaaagacgaagcattttcatccggtgcacttggaaaaggtgttgcaatcatcccaactgttggacgtgtagtagctccagcagcaggaacagtaacaactatcttcccaactggtcatgcaatcggtattacaactaaagacggtgcagaagttttaatccacatcggtatggacaccgttcaacttgaaggtaaattcttcacagcacacgtgaaacaaggcgacgtaatcgaaaaaggtcaattactaactgaatttgatattgaaggcatcaaagctgctggatatgacgttacaactccagtagtagtaacaaactccaatcaatatttagacgtaatgattacagatgcaaaagaagcgaaactagaagaacgtttaatcacattagtaatctaaaattcattaataaacagcttgggcgtaaatctgctcaagctgtttttatgttatactgagggaaaaataggcggtgagcggatgttagcaaagggcgatttgatagggataatttgttgttctgatggtcgaaaaaaagaagacgagaaggatttgaagcgccttaaacaagtcttagaaaaggaatttggacttcaggtggtttttgcgaaaactatttttcaaatagatgattcgccttttaatggtactcctgaggaacgagcagccgaattaatgaaactatatcaaaatatggatgtaaaaatgatttttgacatttcaggaggggatgcggctaatcaagtattaccatatcttaattttaacattataaaaaaagcagccaaaccttttatcggctatagcgacttaaccgtaatattaaatgcaatttttgcgaagacgaagcagcctggctttaattatttactgcgaaatttagtaggtgaagctagcgagatacaacgagtccaattccaaaaaacatttttcgagaatcaaattgcgataaatgggaaatcccttaatgagtttgaatggagcctgggtgagatcgttggtggaaatatccgctgttttttaaaactagcaggaacagaatttatgcctgacgtctcgaataaaataattttgttagaaagtttaggtggaaaagaggcgaaaattgcttcttatgtagcgcaattagaacagttaggtgtgttttcgaaatgcttaggaatagttgttggggaacacactgaggctgagaagaacggggaatacgacagaataggaatcttatatcaacagattggattaaaatataagttgcctgtttttcgaactaaggaaatcggtcatagcagcgaagcaaaaccatgtttaattggcacaaaagttaatgtttcacgtgaaacattaacaaatttttaataattttattgcgaaatattcataattaacctttaatatagaacttgtaagcaaggaatacaattagttttactccctttttgctaattgtagaattccttaaaatcctaaactccctttttggaccgacttgattgtcggtctttttttagttctttttaagtaagacggtcatagtatcaagttcttctgatattgttttactaacagtcaagatttctcctgtttttaaattaatattatatgccggtttggtttcaaatttgatttc

SEQ ID NO: 3600 - DNA, 1631 bp, Listeria monocytogenes 4b
  misc_feature (1)..(end): n can be any nucleotide: a,g,c or t/u
gtgctggaaagccaaacaggtcaaggtaaaacagctgactccgataatgcacttgagaactcgctttacggcttgcctcaaggttctgcctttacaactaaagggcaaaacacttatgaatctgcatctgctattttaggccaacaaggctatacaagtgctgtattccacggtaactataagagcttctggaatcgtgatgaaatttataaacaatttggttacgataatttctttgatgctagttactacgatatgaacgaagcagatgtttctaactacggacttaaagataaaccattctttaaggaatccgaagaatatctatcgtcattacaacaaccgttctacacgaaatttattacgcttacgaaccacttcccttatccaattgatgagaaagatgcttcgattgctccggcaacaacaggcgattcatctgtagatacgtatttccaaacagctcgttatttagacgaatctgtgaagagctttgttgattacttgaagaaatctggtctttacgataactctgtcattatcatgtacggtgaccattatggtatttccgacaaccatgaagaagcaatgacaaaaattcttggtaaagattacaacacttttgaaaatgcccaagcgcagcgtgttcctttaatgattcacgttcctggtgttcaaggtggcgttcaagaacaatacggtggtcaagttgacttacttccgacattacttcacttacttggtgttgataataaagagtacttgcaatttggtacagatttactttctaaagaccataaacaacttgttccattccgaaatggtgattatataactcctacctattcaatgattggtggtaacatgtataatcaacaaactggggaaccaattgctacggaaacaaaagaaatgaaagaaacaaaagaaaaagtagcaaaagaattagagctttcagattctgtactacaaggtgacttgttacgtttctatgctcctgatggtttcaaaaaagtggatccaagtaaatacaattacaataagaaaaaatcaactgattcatccgataaatgagaaaaagagtccagaatatctggactcttttttacttacctaaacctctcataatatacgccaccgtatcatcaatttctttggcatcatcccactccacgtcgggcatcacgacaaatcttgttagcataaatccgacaatattcgtgataagagcgcgcataatcgtgctgttcggcatatcaacaatttccccgcgctctttataataatcaatcatttgatcaaattgccctttgacatgtgtcataaaaatttctgaaaactgtattcttaactcatcgtgataaaacagttccataaagtaaattttgatgaccttaccattctctttggcaaaatcaaagcgattaacgatgatttcccgaatgaatgactgaaaatctggatactcactttcaaacacttctttgacaaagctttgtgctaaaaatggtatcacaccaccgataagcgttggcatggtaatcgccattagtaaatcttttttcgttttatagtgtctaaaaatggtgccttctgcgaccccagcttttttagcaatttcattcgttgaa

SEQ ID NO: 3601 - DNA, 2121 bp, Listeria monocytogenes 4b
  misc_feature (1)..(end): n can be any nucleotide: a,g,c or t/u
tttattcaaaaaattattgagtgtttcgggcattggaccaaaaagcgcgctagctattattgcttcaggcgatgtcgttccactgatttctgctattgaatccgaagacgatgtttatttaaccaaatttccaagcgttggtaaaaaaacagcacgccaaatcattcttgatttgaaaggcaaactagctgatgttgtcgcgagcgaaattgtttatgttgctccagaaaacgatatggttgctggactttctccgcaattagaagaagctgtattagctttagaagcgctcggttatagcacgcgagaactaaaaaaagtaataccaaaattgtcaaaagaagaagacctaacaagcgacgcatatatcaagctagcactacaattaatgacaaaatagagaggagcttgtggcatggatgaacgaattatttcaagtgaaacggtagacgcagaagaagtatcttttgaaactagtttgcggccacagaacctttcacaatatattgggcaagacaaagtaaagaataatttaacagtttttatagaagctgccacactccggaatgaagccttggatcacgtgcttttatacggacctccagggcttggtaaaacaacgcttgcaatggttattgcagctgaaatggggagtcaaattaaaacaacgagtggaccagcaattgaacgaccaggtgacttggcgacaattttaacaagccttgagccaggggatgttttatttattgatgaaatccatcgtttatcgagagcgattgaagaaattttatatccggcaatggaagattattgtttggatattgtgattggaacaggtccaactgcgcgctctgttcgtctagacttaccaccatttacattgattggagctaccacacgagcgggacttttatcggcaccactcagagatcgttttggcgtaattgaccacttggaattttatacagaagagcagttaacagaaattgtactcagaacttcgaatatattagatacaaagattgatgatcttggtgcacgtgaaatagctagacgttcaagaggaaccccacggattgccaatcgtttattaaaacgggtacgtgatttcgcgcaagttcgaggaaacggaacggtaacagaaaagctagcgaaagaagcacttactttgcttcaagtagatccaagaggattagataccattgaccaaaaattgctccacacaattatccaatcatttagaggcggtccagttggactggatacaatcgctgcaagtattggagaagaacgagaaaccattgaagatatgcaagaaccatatttactacaaatcggttttctacaaaggacgccgcgcggaagaatcgcaactgaaacggcgtataaccatttaggaataagttatgaaaaagaggtataaagcatgaaagtagaagatttcgattttgatttaccagaagaattaatcgcacaaaccccactattagaccggacttcaagccggctaatggtgcttgataaaaagtcaggtgacataaaagaccaacatttcactgatattatcagctatttaaacgaaggggatgcactagtattaaatgacacacgtgttctcccagcaaggctgcatggtattaaagatgaaactggcgcgcacattgaagtgctccttttgaaacaaaaagaaggcaatgcatgggaaactttagtaaaacctgccaaaagaattcgaaaaggtgctaccattacttttggtgatggtgctttaaaagcgatttgcttggaagagctcgagcatggtggtcggattttagaattttcttatgaaggcattttttatgaagttttagaacaacttggcgagatgccacttccaccatacattaaagaacaacttgctgatcaggatcgttatcaaaccgtctatgcgaaagagaatggttcagcagcagcgccgacagcgggccttcattttacagaagatttactggcgaaaattagcgcaaaaggtgtagaaatcattttcgtgacgcttcatgtagggctcggaacattccgcccagtggacgtagaagatactgccaatcataaaatgcattctgaattttatcgtttaac

SEQ ID NO: 3602 - DNA, 1650 bp, Listeria monocytogenes 4b
  misc_feature (1)..(end): n can be any nucleotide: a,g,c or t/u
tcgtacgcgttcccttgcttacactggcagagggttatttttttgcacaaaaggagagatttcggatgcaaaaacaagtagttgtcatggacgaggcggcaatcaaacgtgcgctcactcgagtaagttacgaaatcatcgagcggaataaaggcacgaagaatttagcgcttgtcggtattaagacgcgtggtatctatcttgcagagcgtttgcataagcgtatacttgaaattgagggtattgatgttccagttggagatattgatattacactttaccgagatgatttatctttcaaagatgataagactcgcgaacccgctgtacatgggacgaacattccattcgatattaatggaaaaaaagtcgttcttgtagatgatgtgctttatacaggtcgaactgtgcgtgccgcaatggacgcattaatggatgtaggtagacctgcgcaaattcaccttgcagtgcttgctgatcggggccatagagagctaccgattagagcagattatgtagggaaaaacattccgacatcaggaaacgaacgagtagaagttcgcctaaccgatgtggacaacgaagaagatgcggttattattaacaaaaatgaataacaatgtaacacttttttaaaagcagtcctgtgaggctgacaaagagtgattaatttctataggggattattctatactctttgtcgacacagacaaggggtattttttatgaagaaagagggaagaaaatggcagaaacgacagaaacagtgacaaaaccagtactagatatacacgaaagaccaagcttcaataaatggattattcttagcatccagcaccttttcaccatgtttggctctactatctttgtgccaagtgtgacagggttaagtccgggagtggcgcttgtatctagcggactcgggacacttgcttatctaggaattactcgcgggaaaatccccgcatatctaggttcttcctttacctttattgcaccaattactgcactacttgcagccaaatctggcggaggtccgggcgcagttatggtcggaacgttctccgtcggtgtagtatatgcgattgtttctctaattgtttactacgctggtgttgactggattcaaaaggttttaccaccaattgttgttgggccagtaatcatggttatcggtttgtcgcttgctccaagtgcagcagcgatggcgatgggaacaaacaatggtaaatacagtttagaaactttggcagtagcagtaattacgctccttgcaaccataatcgcaatgatgtttttcaaaggatttatgggcttgattccaattttgttcggcttcacagtcggttacttaacaagtatggcttttgggatggtagattacacgttaatcaaaaatgcctctttcttccaaattccagatttcagcattccatttgtaaatatcgacccagtaattaccgtgacggtcattctaagtatggcgccacttgcgtttgtcacaatggcggaacatatggggcatcaattactacttaatcgaattacgaataaaaacttctttaaagacccaggacttcatcgttccttacttgcagatggtacggcttcgattatcgcatcgttcatcggcggaccacctgtaacgac

SEQ ID NO: 3603 - DNA, 3704 bp, Listeria monocytogenes 4b
  misc_feature (1)..(end): n can be any nucleotide: a,g,c or t/u
tacagcatgcttgagcggccgccactgtgctggaaaggaaggggaaaaatacagaagctggaggaatgacatgaatcaatcagaaacgaaagcgttagaagcactgcaaaacggatcagacatacgtggaatagctattgctacggaaaaatatcagattacgctaacagacgaacgtgtagaaaagattgcttatggctttgcgaaatggctaaaagaggagaaaaaagtggaaggtcaagcgaaagtggcaattggccatgatagcagactttcagctgaacgtttaaaagcggcacttgtcaaagggttaacttttgcaggaatcaatgtggtggatgtagggcttgcaactacgccggccatgtttatggcaactcagtacgaagactataactgcgatgccggcattatgattacagcgagccacttaccttttatgtataatggactaaaattatttacgaaatctggtggagctgaacacgaagatattgattatatcgtggctcacgcagataaatcattcatagaaaatggactaaatcttgggaaggtaacaaaacaagatttactttctacatatgcagcagacttaacggataaaattagagctggaatcacagatgcagctgacaaaatgaagccacttctaggaagccatattattgtcgatgcagggaacggcgctggcggcttttttgctgagaaagtattggcagaacttggcgcagacatttctggaagccagtttttagatccggatggaaattttcctaatcatattccgaaccctgacaatgaggaagctatggctagtttgaaaaaagcggtccttgctagtggagcggatttaggcgtgatttttgatacggatgtagaccgtgctgcgattatggataaaaatggcgaaagtttaaaccgcaacccattaattgctgttatctctagtattattttagaagaaaaaccaggaacaactatcgtgactgactccacaacatctgggcatttgcaaacctttatcgaagcaaaaggcgggaaacaacaccgatttaaacgtggttatcgtaatgttatcaatgaagcactgcgcctaaatgcagacggaacaccatcagaaattgctatcgaagtaagtggtcatgccgcattaaaagaaaattatttcttggatgatggcgcttatctcattgccaaaattttaatgacttatgccactttacgaaaaaatggaaaagatttgccagatttaatagccgatttaagagaaccggctgaaagcgaagaaattcgtttgagtattaccgcaaccgattttaaagcttatggaaaagaagttctagctgattttctgactttcgtagaagctgatccggatatggaattagaacctgtgaaccaagaaggaattcgtgtgaatacgaaaggtgcgcttggtgaaggctggttcttactacgaatgagcttacatgaaccggtaatgccgatgaatttagaaagtgatgaagctggcggcatccgaaaagtgaaaaatcgtttagcaggatttttcgcgagtaaagcagaattaaagatgtaaactacaaagcagctgatatattttggctgctttttaatatgctttgagttctaaataatgctagctgcatagtacagtatgattgtgaatatgttattatagttatacagtaaataaatatgtcaaaaatagctactaagaaaattgacttatattgggaagttttaaactaatttaagtttcaacaatgcgatacaatcaagtgattttttgatatatttatttgctaatagacaaaaaaggagatgcaactatgaaaaagcttagaatatttactttgatgcttgcttttgctctatttttacttggtggaggaattgttgcacaagcagcagaggaagccccaatcgatgaaaagatagtggggaaacggtaacaaatgacggagaagagtttatagtcgatgagattagtgatttagaagatgttaattcaacaacggggacgttagatacatctgatgaagttgaggttgatttatcaggattaactattgaaaatgaggaagccgttctaaccccaggtttaaaaacgatttttggcggagatggtagaaaacttgtaacaaatacaactcaatatccatattcaacgagcgcttaccttgtaatggaatttccaaatggaaaaacttatataggtagtggacaattgattggtgaagattctgtacttacagccgctcattgtttatatggtaaaaaagatggtggatgggcaaaaaaagtgactgtatatcctggatataatggcacgaaagctccttttggaacagcaaaagcaagaaaaatgtatgttccaaaagaatggacaaaaaaagaaccttctacagaagattatggtgttattaaattagataaaaatattgggacaaaaactggaacaatggggttaacaactaatacatctggtgcaattactattagtggttatcatggtgacaaaaaagggaaattgtacactcaaactggaaatatctctcaagtcactgcaaataatgttttttatagattagatacaacaggtggtagtagtggtagtggtgtttataattctaaaaaacagattttagcagtaaacgcatatgaatatttaaatggtaccggggacaactttggtacaagaataacaaaagaaaaactaaataatatttatacttgggcgtttgacaataatctttctgtaagcaaacaaaaagggataaattacgagctccacgtccaaagtaagggatggatgggaaacgttgctaatagtatgacttcgggcacagttggccttggcttacgagcagaagcaatgaaaattagtttatcagggatgccgtattctggagatattcaatatcgctcacatgtacaaggtagtggatggcaaggttggttgaaaaatggggaaatttctggaactcgtggacagtcaaaacgtctggaagctttccaagtaaaattaactggaaatatggctaaaaattatagtgtgcagtatagagcgcatgtccaaaataaaggttggcaaagttgggttaaagatggagcaacagcaggaacaacaggagaaagtttaagaatagaagctgtacaaatgcgactagttgcaaaataaatttaaaagaatttggtgtgtaaaatgccaaattctttttcttttaccaaattgattgaaaaagtagagctagtatagtagaattgaaaagcaagcacttactttaaaagggaaataaagtaaaggagtgtgttttttggaaacttggattacaagtattatggctgattttggctatataggtatttttgttttgattatggttgaaaacttgtttccacctattccctctgagattatcttaacttttggtggatttatgacgacagttacatcattgaatgtcgtgatggtgattattgtagcaacactaggttctgttgtgggcgcaattttactgtataaagtcgcttcttattttggtaaagaacgactcacgaaaattgtattaaaatacggccggattttgcggctgaaggaatctgatattgaacgcgcagaaagtttctttttgaaatatggaactttccagcacacgggcggccgctcaagcagcgatgctaggtggccctaaagg

SEQ ID NO: 3604 - DNA, 2460 bp, Listeria monocytogenes 4b
  misc_feature (1)..(end): n can be any nucleotide: a,g,c or t/u
agtgagatgattgttccgatagaatgggcagaagaccaagggattttggtagaagttgatgtagcggaggcttatgtggatgaaagctatgaaacaacaatcgagtggactttgacggatgctccgtaaaaacctgttagcaaaagttaacaggttttttcatgttataagcccattgttttctaaatacactagtttctcgtataatagcgttaagtaatttgcgaaaggtggaagaaaatgacttcggtaatgtggtttcggagagatcttcgagtaaacgataataaagctctctatcatgcttgtaaagaggacgatttgcttttgttatttcaagtaaatccagcacagttcatcacaggaagtcctagccaccaagctttttttgcaagtgtggctcattttaagcaagaaatcgataaaactgcgcatttacaaatcatgtttggtgaaccgatagaatgcttccaacaacttaaagattcgctaccaagctgggataaagtttatttcaaccgtgatgaaacaggatacggagcaaagcgggatgaggcggcgcaagcgttctttgacgaacaaaaaatcgaggttcaagccttccacgatagctatcttcattcagcggaagaagtaaagaaatctccaacagaatactataaaatttttaccccttattataaaaaatggcgcgaagaaataaaagaaacgccgttcaaagtgactttaaagcatgagaatatccggaaagaaagcttgtttctgaaatatgaagaacaatttgcggaaatgactagcgatttaccgatattagatattggtgaacgagcagcgaacacgagacttgcgaattttattaaacacgatgttgctgactatgacaaagcgagagatttcccggaactggataaaacaagccatttatcacgttatttacgaacgggggaaatctcgattcggacgatttggcagacacttcaagaaacagaagcaacagaaggacgagctacatttgaaaaagaactgtgtaggcgcgacttttataatatgatttacgtttcttttcctaaccaaaaaaacgagccgatccaagaaaattatcgttttattgaatgggaaaataaccgcgaatatttcaaagcgtggcaagaagggaagactggtttcccgctcgttgatgcggcgatgcgccagttgaaagaaactggttggatgcataatcgactaagaatgattacggcgtcctttttaacaaaagatttgctgattgattggcgttttggcgaaaagtattttcaacaaatgctgattgattatgatcctgcgagtaatattggtggctggcaatgggcggcttcgactggaacggatgcggtgccatactttaggattttcaacccaacgacacaatcacaaaaatttgattcgactgggaaatttattcgaaaatatgtaaaagagttagcgaatctacctgataaatatattcatcaaccagaaaaaatgtcagaaactgagcagaaagagcatggcttgctgttaggaaaagactatccatttccgatagttgaccataaagaacgacggaaattagccattgcacgctacgagtttagcaaagagcattctaggggaaatatatagataatgagtcaatcatttaattaaatgattgatttttttgtggcagtattcacaaagaataagtcttgagcaaccttctaggagtaagaacctgggtatgttaaaattcatttatcaagtgataagggggaatcacaatggcgcaatttttaaagctatttctaacgagtgcagtagttttcttgatttttgatcttttttggttactcgtagcttctaaaaaaatgtatcaacaatttattggggatttaatgggggatgtaaaacttgctccagcagttattttttactttatttatgtcgttggtgttaccttcttcgttttacttcctgggacagaaaaaggaagtttaggttacaccattttagcaggcgcgttgtttggtctagtttgttatgcgacgtatgatttgacgaacttggcgacacttaaagattggccgattacgatgaccgttattgatctcgtttggggaacggctgtgacaactgtgacttcagtgactgtttcatgtattaatctgcatgtctcgtcgggagtaggttcctaatgatgtagtcagacagcacccgtctattacaaagtatgctacacggggcggctgaagtacttagtagaaaagaggtccttcatagaatcagtgtttttcatgtagcggatgccgactcgggtagtaatttagcttctttaatgccagcgatctttgatcatgtttccccgagagaatgttcagcgaaggaattggtagaggaagtagctagcacggcgctcatcggtgctcggtggcaattcagggatgagttttgcgctatact

SEQ ID NO: 3605 - DNA, 3471 bp, Listeria monocytogenes 4b
  misc_feature (1)..(end): n can be any nucleotide: a,g,c or t/u
gactccttctaattcttttctttcttatctttacggatttttagcacgatgaaaacacagccgattaaaacaaccgcaagtcctgtaactagaagaggtacactagccatcccatcttttccataagaaggactaaacataataataataagacctatactaataagaaatagtgcattaacaattttcattttcaacccacactaacttggaaatagagtacagagcctatttcagttgcttttattgtttctttggcgatttttgctgccttttcttcgtcttcaatatttgtttcaaaagtaagtttcatacctttttcgtctatttttttaaaagttacaccgtctttatcatatgtttcaagtaattcagtaatgtaatctcgcttcattggacaattaagaataatcatttaaaaaaacctccttttctatagtttaacgttatctttcgcttcttgcaatgaataaaaatggtgcaggaattcctacatgatatactggctaggcacaatttagctgcacctagccagaaacttattattttctaagctttcatctcttcttctggtacaccaacgcgatttgcggtaataacaaatggtacccaaatcaagaacgcgacgaccatatttatgagtgaaattactggtgccatccaatctcccccggttgctaagaaggaattcagaagtggcggcattacccaaactactgcaattttaactgggccgacaatgccaagtgttgttgcaaagtaagcgattgttaccattaccattggcgcgataaggaatggtattaagtaaattgtatttaatacgatcggtaaaccaaacatgattggttcgttaatattaaatatacctggtgcaagagacaatttcgcaactgttcgtgcatccgctcgtttcgagaacattagtaatgcgataatcagtacaagcgtaccgcctgatccacccatccatacatacgcatcgaaagaaccacgtacccattcgaatggtaatttagcgccttcttgtgccgcactaatgttttgtagttgtgctgtaccccaaagtgattctagaaccggagcaagtacgttcggaccatgaatcccgaagaaccatagtagttgtactaagaaagtaactagtaaaacagctccgtacccttgcgaaagtgataataacggctcttgaattgttttggaaatccaagtaataacgtccatatttgtgattttgaagaatgcccagtcaataataccaacaacataaagtgcaactaacgcaggaataatcgccgcgaaagctttacttacagccggtggaacagaatctggcattttgataataatatttctgcgcattaatttcgcataaataatagttgatataaaaccgaaaatcattgcggtaaacaagccggtaccatttacttggcttaggctaaagaatccgtaaattccagcaaattcttttggtaacgtatttacatcgaaatttgcattagaagccgcaatcgcagcttttactgcatctaagcttacagtaacagttaagttcataacaaaagcagcaagagaaactagccccccagctaatcgatccacttcatatgcttttgataaattataccctagtgaaaaggcaaaaataattgaaacaattgctaatgtcccattgtatacatatccattaatcccgataagtggttgcatcgcttccacaaatcctgtccatccccagtcagttggaaaatccctaaaaaacgcatttaaaagtactgcaattgacccagccatagtgattggcattgttgaaataaaagcatcacgtaatgcaactagatgtttttgtgaaccaattttcgctgctactggcacaaaatacttttccaaaaatgctgttaatccattcatattttatcctcccgtaaacctttttatttaacactcatcttttaaacaaaatataatttctatgtataaactccctttaagttgatcagctatatctgtttactttgtcctagtaatccccattactaaaacaaaccagatggaatctttgcatgacctcgtgaaattttgggagccctcctctccgcttcatgataaggcttacatttagattcaccttaatctattgcaatttccgtgccaagtactaaatttggaaaaaacatcctttaatctcttgaaagccttgtctttcttgcctttaaacttgtattacacacatacagaaaaaaactgtgtaagtaagcgttaacattacacagtttactaatttatccattcttctttctgtgttataatgagcataagctaagtaataccaacaattcgaggtgataaatatggcagtcaaacgagatatgccggaagagtcgaaaaatagtaaagttgtgaaaaaagagcatttttcgattgtgtttcctgatgatataaaagaaccaaaaaatgcgagtgaacaaaaaaagcaagatgttgaaaagaaaacagatgataattaataaaaaagagcatccgcggggatgctcttttttatttaatagagaagataaccatttctttatcctcatcaattcggacatttacgtccatgcctaacttatctttaaaaagtgccgtaatatttagatagtcatcatagctaccgatatcacttttttcgtatccttgtagaattgtcggcttgatacgcacaatgtaatcatcatttgatgtttcttcaggattataagtatagattttcttaccattcttatcaaaaaagtcatatgttgcataggattcattgtttgtgatatacacatctttttgtgtaacataagcattatcggcaacgctgtagtcaatcaaacctgcgtaatatttattggtagatggttcattaatttcatattgtttataagctaatcggaataagtaatcaatattgtagtaactattcacgcggaaatagaggtttttatctttagattttttatctacaccaatatctgtcgcactaattgggaagacttcatataatttgccgtctatttcgtaagctacttcatacttatcaaacacttcttggcgctgaaaaaagccaaacataattgctaagattacgataattcctacgaaaactgcgacgattagagcgggcagccatttcttttttgattttagttgttgcattattttcatcctttgtcatgaattgctttactattttatattgtaccagtttatggatcattatacattatttttctgaggatagggctgatttgtagaaaaaagactactctgccttaagcaaaatagtcttttatatatttaaaattagtgtcgcgcacctcacatcgacatgcaatcatctgcgttaccctgatagttagctcgggccaggcgacctcgcggcacatgagaagcactgcttaatgctgcttccttccggacctgacatggttcacaggttcccat

SEQ ID NO: 3606 - DNA, 2556 bp, Listeria monocytogenes 4b
  misc_feature (1)..(end): n can be any nucleotide: a,g,c or t/u
gtgtcttgaaagaattagcaaaagaagactgggttgttatttacgataatgtctgtttctctccgaaagaagcactttatgccgtagatgcatttaaaggcaaggtaaaacgatacatatatacatcatcactctctgtttatagtcaaaaaggtcgagctttagttgaagctgactttaatccagagcattattataattgttattggagataaagaagattttgattacggtgaagggaaacgacttgctgaagccgtatttttccaaaaagcttcttttccagtagttgcagttcgttttccaatcgtgcttggacttgacgattacacaaaacgccttcactttcatattaatcatattaaaaaccaccaagaaattgggattagtaatggacaagctgagattggctttattacttctgatgaagcggcgcattttttagagtgggttggtgtggaatcggatctgacaggaccggtaaacgctacctccaatggcacatacgcattaaatggtttcatcaaaatgcttgaagaaaaaatcgggaaattagcactagttgaagaggtgacggatgacgtcgatgattctccgtttggcattgaaaaaacctattatttagataatacgaaagctaccgaagctggttttgtgtttaatgatttaaaagtatggttaccagctttagtgacagctattttaaaagaaaattaatttgggggaaaaataatactatgttaaactttgaagaaaaaaaagcattaatagaatctatcgacggctttgaattacacgaaatttctatgggccgtattaatgtacactatccagcaagtaaaagagacaagaaaatcatcgtcaaacatcttcatccaaacggtaatgcttttgtttatgcaccatttctagaggtagagccactcgacaaacaaggctatgtgaatgtaaaagattactctgaaaatgaaatccgcgtattactattagaagcaaaagaattcatggatagtgacgaggatggctataaagaaggtctaactaaaatatatcaagacaatagtggcgaaaaactttcactagtgtatgaaaataaaatgtgggttatttatacgggggagaacttggaagcagttttcccaacccttgaaagcgcagaaggttatttgcttgatgaaggtttttttgaagcttaattgacggaggcgagttttggtggagaatttagaacagctgcaagaacgagttgcagtaagtgatggacgagcaaaagcagatttagtaataaaaaatggacgaataataaatgtgttttcaggagaaataatggacggagatattgccatcaaaaatggttatattgctggtattggcaattttccagatgcagaaaagataatagatgctgctggtgccttcattgcacctggttttattgatgcacatgtccacgtggagagtgcgatggtcacacctgctgagtttgcccgtgtcttactcccaaatggtattacaacgattgttacagacccgcatgaaattgccaatgtggctggagaaaaaggaattgaattcatgctagaagatgccaaaggagtaccaatagacatgtttgtcatgctcccatcttctgttcctgcaacggaaggcgaacataatggcgaaacattacatgctgagaaactccatccgctttatagacatgaaaaagtaatcggccttgcagaagtgatggattttccatctgtagcaaaaggaagttcggatattttaaccaaaattatcgatgctaaaaaagaaggcggacgaattgatggacatggagctggcttaacgagcgctgatttgaataattatttggctgttggtattcggacagatcatgaaagtactactgctaaggaagcaacagaccgcttacgtgccggaatgtttgttatgctacgcgagggaactgtaggccgtgatttacttcaaacaattcctgcagtatctgaaaaaaatagccatcgtttttgcttttgcacagatgataaactaattaatgatttaattacggaaggatcaattaactttaacattagactggctatcaaaaatggaatagacccaattaccgctatccaaatggcaactattaatgcagctaattgtcataatttgccataccttggtgcagttgctgcaggataccaagcagatattgtttttctaacagatatagaaacagtagaaattagcaaagttttgaaaaatggagaagtagtcgtggataatggtgttcgtcacgaagctgcatttaagcaacaagcggcagtaccatttgtatctccaccaattaatcatcatgtgagtttacaagatttagcattacctttgaccaaagaaacgtgttatgtaatcgggatgcaacccaatagtttatttacagaaaaacgtatcgaacaagtggctattcatgacggtaagtttgttccaaccgtggaaaatgatttactcaaaatggcagttgtagagcgtcaccatgatactggttgtgttggataaggcattgta

SEQ ID NO: 3607 - DNA, 2411 bp, Listeria monocytogenes 4b
  misc_feature (1)..(end): n can be any nucleotide: a,g,c or t/u
acgtcaagaagtcacggggagataatttcgacatttgaggaagtgacgtatgataaggaaattggccttggggtttatgatattcatagtccacgcgttccgactgtgactgaaatccaagacaatattcgccgagcgttacgtgcaattgatgcaaaacaattttggattaacccagattgtgggttgaaaacgcgtaaagagcctgaaacgattgcggcacttcaagatatgattaaagcgactaaagaagttcgtgcggaatatcaagtattagagaaataaaggaatggaggagaggtaattatggcaaagctgaaacaagagacgatagcagcgcaaattggaaatagaaaatgtgaaagaacgggtgctgtcaatatgccagtctacttctctacagcttaccagcatgccgatcttggagtgtcaacggggtatgattatactagaactggaaatccgacgcgagatgctttacaggaagcgctcgcggaactagaaaatggaacgcatgcttttgcaacgagttcagggatgagtgcgattcaacttgttttccagctttttaaaactggcgaacatattattagttcacaggatttgtacggggggacttttagatattttgaacagtttggtgcgcaatataatattggattttcgtattgggacggggcggagattgctgatttggagaaattagttcgtccggaaacgaaggcgatttttattgagacaccaacaaatcctttaatgcaggaaacagatattgcggctgtgtctgaatgggcaggtgcgcatgatttacttgtgattgtggataatacattttatacaccaattttacaacagccgttaactttgggcgcggatattgtgattcatagtgcgacgaagtatcttggtgggcataatgatgtgcttgctggggcggttattgtaaaagaggagcgacttgggaatttcttttttaatcagttaaatgcgacgggtgcagtgctatcgccatttgatagttggttattgattcgtggccttaagacgctggttttgcgtgtaagacaacatcaagcgaatgcagagaaaatcgcggcgtttttggaatcacatgaattggtggaggaagttcgttatccagggcgcggtgggatgattagtttctttattcaagatgcggcgctcgtatcgccacttttgaaagaacttgagttatttacttttgcggaaagtttaggcggggtggagagtttgattacttatccaacaacacaaacgcacgcagatattcctgaagagttgcggaattcttatggacttacagacaaattattgcgcatttcggttggaattgaagctagtgaagatttgattgctgatttatctaaggcactcgatgcggttttggaaggggtgagcgctcgtggctaatgaatatgcgcaagatacggctgtgattaaagcgagcctcgggattgataaagagacaggtgcgcttaatacgccaattcatttatcgtctactttccatcagcatgactttgataattatcacgcttatgattatgcgagaagtgggaacccaacgagagaaaaagtggaacaagcgattgcggaactggaaggtggtacgaatggttttgcctttgctagtgggatggcggctgtttctgcagcgctctttactctttctaagggagaccattttattattgcgaaagatgtgtacggcgggacgtttcgtttggtggagcaagtgttgccgcgttttgggattacgcatacttttgttgatacgacaaatattgacgaagttgcgaaggcatttcaagcgaatacgaaactggtttacttggaaacaccttctaatccgttgctgcatgtgacagatattcggactgttgcaaaacttgcgaaagcgaatgggtgttatacgtttgttgataatacatttttgacgccgttaattcaaaaaccgttagaattaggtgcagacttggttattcatagtgcgacgaaatttcttggagggcatagtgatattttggcggggctaattgtcaccaataatcctaatctggctgaagcagtgtactttttgcaaaattcgactggtggggttcttggagtgcaggattcgtggttgttattgcgcggactaaaaacactttctgtgcggatgaaggctgggacggaaacagcggagaaaattgcgctatttttaaatgcggagccagatgtggtggcagtgcattatccggggttaccttctcatgcgggttatgacatccaagtggaacaggcgacaagtggcggngccgttttatcgtttgatttaggcagtgaggaagctgtgcgagaactagtaacacatttggaattgccggtattttctgtgagtttgggcgcgg

SEQ ID NO: 3608 - DNA, 1673 bp, Listeria monocytogenes 4b
  misc_feature (1)..(end): n can be any nucleotide: a,g,c or t/u
acggctatcgacttcgttatttaaaccattaattttaaaaccacctctttgttgcaactttgaacatggtcttcttttgccaactaaagcttctacgacaagttcttcattagtataaggtccgtacacttcagcagtatcgaacatcgtaatccctgcatccattgcagtgcgtacgacttcaatcatttcttttctatctttcgcaggtccccggtgataattgagtcccatacagccgaatccaagctctgaagttactaaaccagtgtttcctaattgtctctttttcataaaaatatgctccttttaaaccaaatttttaaattagaaatatcaggatgttgtatttagtttatcagttgaagtgaactttaagtcaagcgtaactaatttatttttaagagcatgagatagtttaacaaaagcgatgattaattttattttattgatgggggcttattctttgttcttggaaggaaaaattgcataaaagctgtcttaaataagcgctaggaacgattttagtagttttaatagtactaatacatcaagaaatgttacgaaaaaatgtcgacaaatactcaaaatcacgtaaatcagttgtaaatgagtatacgaattaaacgtattttctaagataataatatttatgatggaaattcagaaagggtgataacaagaatgaagtatatcgattaccatgattatatgcataaagacgcgataatatatgcttatctccaaaataattttccgtatatccgcaaacgaataaaggcgtgggaaagttttacgctagatcgagaagatattctattggtgaaaagtggcgcaatatttgaagaaattagtgggaagaaaaaaggcatagcacgatgctttttttcgaaaagtttaatttttcctactagaaatcaaatagtattgaaagctttcgaaacttcagaaatttgttttatcaatgctgaaacagcttttgggaaattagaaaaagatcagattttatccaatttttttctacagattgcggagaaaaacgaagaagacatgcgaagacaagcatttcttgggacagagaactcaaaaaataaaattatttcaacgctcaacttcttgctagaaaataataaatctaataataaaacacccatctttcctgaatggcttcaaataaatgttttggcacagttagcgaattgttccatctctaccatttcttctactgtaaacgaattacatgcggaaggaatattagatataaaatcttcgccctggaaacttaaaggcagagaaaagaggatagaaattcttgaaaatgagcaccagaaaataaagcttaatgaaagaaagcataagagtaatgttttctaatggtataagacttgaaaaaactttttgagtacttttccaagcacaaaaattatactaaaagaggtggaagtaggacttgaagaaaaatattttagtcgtaatgattgtttcggtacttgcaattagtgcaattgtatcagcttttttcttaatgagagacgatgcttatgctattgaaacggaaggctttacttatagcccgaaaggaaaagtagtagatttctcatcagaagcccaagtatacgatacatggattaacaatgagaaaacanntacagataaaaaagaaatgaagaacg

SEQ ID NO: 3609 - DNA, 2080 bp, Listeria monocytogenes 4b
  misc_feature (1)..(end): n can be any nucleotide: a,g,c or t/u
ttcaacttaatgctaatgatgaccaatattgcggaattaaccgcagtaatactgaagaaaaagtgggaatcgttacaactggagcgggaacgccatagacgttcatgccaatttggaaagaagctggaattatgtgatttcccgttgtcccatccgtgatgattgctaaacgtatggaaaaaatgggcgcagatgcagttatcgcagaaggaacagaagcaggcggacacgtcggcgaaacaacaacaatggcacttttacctcaaatcgtggatgccgttactatcccagtcattggcgcaggtggaattgcagatggtcgcggaatcgtcgcagcgcttgctctaggtgcaaaaggtgtccaaatcggaacacgcttcctagcaaccgacgaatgcccagtacacccggactttaaagcagccgtgattaaagcttccgaccgcgacacaatggttaccggaagaaaagccggtgcccctgttcgctcgattaaaaacaaaatgattaaagaatacatccgtttagaagaagaaaacgccgatcgcgacacgttagaagagctaactttaggttctttacgaaaagcagtacaagaaggcgacacagacaacggctctgtcatggccggtcaaatcgctggcttaattacagaaatcaaaccttgtaaagatgttattgaagagatgatgacagatgctaagaatgtgattgcagggttagaattataaaataaaaacagttattttctgcttaataaagtagagaataactgtttttttgtagttgcgatgttgtttacaaaggtaaagtcaaaaaatgcactaatttgttctgtagttggctatatttatacacagaggttcacaaaacgctcacaaaaggaaagtagttacgatgctataatagaagggtggaaaactagacatagagaggaatcaccaagatgagagagataaaagtcaacgaagcaacgttccaaaaacatgcctcgaagctagacagcaaaagcgcgggaagctatttgccgttaaaaggtggaaatatggcatactcacgagcgaattctatcaatcagttacggtctgcattaattgatttggtcgatgtggtagaagatttccaagccgtgacaaagcaagatgcgggtagattaaagaaaatgggcatggcctatgcgaaacaagatcaagcgatgggacagaaaataaatcagctggaggtgcgatagatggacagcacgcacacccggttagaacagcaactacaacaagtgaaaaaagcgcaggatgttttacaagataatctggggcagactaagcgcaaacaagtggaacaagaatggttagaagaagatagtcaccaattagaaatggagaaacaaggattattggacttcttgcgaggcggttggcaaggggaggaagcgaatggtttccaccgctatctagaagaacaacaacacgaagaagcgatggcatggcgaaaagatttgtcggaaaaacgtgttcatttggaagaagaagcgcggactactagagcagaaatgcacgatatagagaccaaacaagcctccttgcgaaaggagtggaaccaatgagtcgaatcgacattgcagaactcaatggctttcttcaaggattacgaagcagtaatgctgaggctaaaaagatgatacgcggaattcaacaagcagcaagcaagtatgcgcaagataaaagtttaaaagggcaagcagtatcagcttcccaaagctattttgcttccagttatccctctattgcacaaagtattttagaagctctagaagaaagtgaagaacgtctagcacaatacatacgcgagtttggtagccaagtcgacagctcgccttccgcacgaattgatgcggaaatccttcaagaagcgatggcgaaagtggcgagtttgaagcgaaaagaagaagatttacatcgccaactcactgcaccgaatacgaaaccggatantgcacaagtctacgtagttcaagcaagaagagcgcgcgccccgctactgctgcaagctatcgaaaaagaagaatactagagaggacatgagg

SEQ ID NO: 3610 - DNA, 2321 bp, Listeria monocytogenes 4b
  misc_feature (1)..(end): n can be any nucleotide: a,g,c or t/u
aggcgccaatttctggaaatcaattaacacagaaaacaaatgttagccgccaagtgattgttcaagatatttctttgttaaaagctggcaatgaaccaattatggctaccccacaaggctatatttatgcgaaagaaacaagttatacaggggaaaggcgcgttattgttttgaaacatacgaaagaacaagctgccgaggaactaaatattttggtagatcacggtgtttccattattgatgtgattgtggatcatccaatatacggcgaaatcaccgcttcactacatttaaaaagccgttttgatgtagagaaatttgtgcggaaattgcaaacaacaggagcaacaatgctgtctggtttaacggatggaacacatttacatacgattgaagcagatacgaaagaacaattagaacaagcgattaaggcgctagataaagctggatttttaatctaaccatttttcaatataaattctaggaaaaagctagtaactatggtagaatgtatgttaggtatttataaacaaatagtcgtatggaggtgctagatatgccattatcgccgctggatatacataacaaagagtttacccgtggttttagaggttatgacgaagacgaagtaaatgacttcctcgatcaaatcattaaagattatgaacaagttattaaagagaaaaagcgtattgaggacactttaaataatagtgaagaacgtttaggtcattttacaaacattgaagaaacattaaacaaatcattaatcgtggcacaaacagctgccgaagaagtgaaagcttccgctgaaaaagaagcaaaacttattatccgtgaagctgaaaaaaatgcagaccgaattttaagcgactcactttctaaagctcgtaaaatcgcgattgaaattgaagacctaaaacgtcaatctaaagtattccgcgagcgtctgcgtatgttagtagaagcgcaaatggatttaattaaaagtgaagattggcagcaaatgatggcttacgatgtagatgcaacagaattagcgtctattaaagaagtcgaagctgctgaatcagaagaacgttaaaaacgattataagagacaagtaaattttttagacaaaggatatgaagcgagttggtaaatggtgcgagaccaactatcctctaaaaaatagaaatcactctttagttctaacccgaaaaagcaatcgcttgagtaagtgttagcgcgagccagcgttatggcattaatgaagtgggcaagcaacaaaattgcatgtcaacaagggtggtaccgcgaatctcgtcccttttttgggagagatttttttgtgtttaaaaataaagatttaaaggagaatagagtatggaatataaagatacgttattaatgccaaaaacagattttccgatgcgtggaaacctgccaaacaaagaacctgaatggcaagcaaaatgggaagaagaaaaactatatgagaagattcaagaaaaaaatgctggacgcaaggcgtacattttgcatgatgggcctccttatgctaacggtgagcttcacatgggtcacgctctaaacaaaacaatcaaagatattatcgtccgttataaatcaatggctggcttcagctccccgtatgttccaggttgggacacacacggactaccaattgagacagctatcgccaaaaaaggcgttaaacggaaagaaatgtctattgctgaattccgtaaactatgtgccgaatatgcaatgacgcaagtagacggtcaacgtacaggattcaaacgacttggaattaacggtgactgggaaaatccttacattacacttttaccagaatacgaagcagagcaaatcaaagtcttcggtgaaatggcgaaaaaaggttacatttacaaaggtaaaaaaccggtttattggtctccttctagtgaatctgcgctggcagaagcagaaatcgaatatcaggataaaaaatctgcttccattttcgttgcttttaaagtaacagacggaaaaggtgtactagatgaaggaacgaatatcgttatctggacaacaactccttggacaattcctgcaaacatgggtattactgttaaccctgatttggactatgtagtaattgaatccgctggggaaaaatatgttgtagcagaagcacttttaccaagcttacgcgaaaaactaggctttgaagatgcgacagtagtgaaaacagttcgtggttctgaacttgaccgcgttgtaactaaacacccattctatgaccgtgattccttagtaatgaacggggaacatgctactgctgaagccggta

SEQ ID NO: 3611 - DNA, 2761 bp, Listeria monocytogenes 4b
  misc_feature (1)..(end): n can be any nucleotide: a,g,c or t/u
aaacctttataatctccaacgacatccatgccttcaaaaaagtcttttaaattactcaaatcagtaatgttattattatcagcataggctatagttaatcctcttagtgtatttaaagaatcaatggaagttaggttgttattgtttaaataaaggactttaagttctttcattgtagcaattggagctatattagtgaacttattgtaacttagatttaagtttgtaatatgatcatttgcagttaatgatgataagtcggtaatgttattccaagttacatctaaactttcgagtgatttaaggtttgtaaattttttaaattcttcattatcaatttggtgatatgctggatttaaccaagcatacgagttataagaaaatgattttaaattatctttttcaagtaagggagtgaaatcagtaatataatccccacctaattctagttcttcgagtgcgggcatttcaccaagggctttaatatcatttaaacctgtagtaacaccaacaattttcttcagattaggtaaatcttttatttgatttaaatttttaatttctgtttggtttgaaaaatataatttggtcatattaactgctttttcgagtccggttaaatcactaattaaaccagtgacagcataaccaggtactccattcatataagagatatcagcgacactaatggtttcaagattcgcttcagtcaattcggttaagaatggatttcctacgatgctcttaagaccttcgtttaaatacggatctggtatatttactacatcagttgatgctgcccgaacattactaaaaggtaaaaatacggttgtcattaaaaataaaactaacattattttgattgctttttgcatatgtttaatttcctgcttgttttttgaaatgtattcgtaattatttattcgttaaaattaactatttcaacaacaaaattaattgattaaagtagtatttccaaccgaatacatttctaagcaaggttataatatcatgaggaatctttattaagcatggtttttttgatgggatttacttaaaatagagtgaggttcaaggtttcgacataattgtttttagtactgttttacgatgggaatgtgttgatggagctaggtttttcttcaatagacagacgttaaaaggatgtagatggatatatataacatataaatcgggcaatgattttatattattctgaaagtattgaaaagtatttgtttggaggatatatttttcgggaagaattacatgctcgcatgcatatttgggccgtaattcgttttgcttcgaacgggtgaatgggagtgtgggttttcgatagatggtggaaggattttgatgctgggtgaaaggttgtgtggtggacgcactttacaggaaggattacatgctcgctttgctcgcatgcatatttgggccgtaattcgttttgcttcgaacgagccgaatgggatggaggggttcaaatggatggtggacggattttaatgggttggaagtttttgtgtggagggcgcattttacgggaaggattacatgttcgtttcactcgcatgcatatttggcccgtaactcgctttgcttcgaacgggtgaatgggagtgtgggttttcgatagatggtggaaggattttgatgctgggtgaaaggttgtgtggagggcgcattttacgggaaggattacatgctcgtttcactcgcatgcatatttggccggtaactcgctttgcttcgaacgggtgaatgggagtgtgggttttcgatagatggtggaaggattttgatgctgggtgaaaggttgtgtggagggcgcattttacgggaaggattacatgctcgtttcactcgcatgcatatttggcccgtaactcgctttgcttcgaacgggtgaatgggagtgtgggttttcgatagatggtggaaggattttgatgctgggtgaaaggttgtgtggagggcgcattttacgggaaggattacatgttcgtttcactcgcatgcatatttggctcgtaactcgctttgcttcgaacgggccaaacaaaaacacgttcctaaggctcagaaaggaacgtgctctttcaactggtaaggttgaaagacaattgggttgcgcgcccaattgttaaagggagtgttacttatatgttgaccgtgaaatcacgggtacaacctagagataatttatcatattaatacactactgctttaaagattagcaatgtattggaaatattataatatatctgtaaattcgtgtcaattcatatctttataaaaattcataaaatttaatagttatgcttcgtgaaacagcttagtcgctttttttggtgggtttttgtacaataatagtgaggtgaagcgtgatggtaaatgaagcgaaattatatgtttatggttcaacgactatttgtgcgagttgtgtcggagcgccatcctcgaaggaaacagaggaatggcttcgagctgcaattggtcggaagttttcagggcagccgtttgtggtggagtatgtggatatttttaatccgccgaatgagaaggctttaccggatatggcgaataaaattgtcgaggaagattatatgtacccagtcattgtggttgatgatgaaattatctgcggaaggcaatcctcggttgaaagatatttatcaagtaatgaccgcccatggttacttggcaactttccagcacaggtcggccgctcaagcatgcgatggaggttgcccatagt

SEQ ID NO: 3612 - DNA, 3148 bp, Listeria monocytogenes 4b
  misc_feature (1)..(end): n can be any nucleotide: a,g,c or t/u
agcgtgtttagtccctaatccggctaagataactggtttttccgctttttcaatccgtgctacggcttcctgtattgccgcttcatctagttttggattttcttgttcgaatttgactggttttgcttcaaggctcgctttaattacttgtgacggaatatcatttggaatcgttaggacagcgacgcctttttctttataagcggtgcggattgcttcatcaaccacatccgcgagtgtttcagcattatcaatttgtttattatacacggcaacatcttcgaaaatcgctggtaaattgacttcttggaaaaagccggtgtttaagacgtcggttgtcacttgcccagcgagtacgagcattggcacatgatccatttttgcatcatacatcccgtttagaagatgaattgctccggggccgccgatagataatgcgacaccaattttgcctgttaatttggtatatgctgctgcggctagtgtcgccacttcttcgtgtcgaacgtgaataaactcgattgcttcttgttcttttcgtaaggcatcaactactgtatcaatcgaatcaccaggtaaaccatatacgtggtcgatcccccaattttttaatgtttgtacgagtgtttcacttgcttttacttttttcattttactttctcctcccatggatgttttctctaatgtccaatagttttcgtttaccctgtttttaaaagagtattcataaaagagaattgacgaactattcagaagtgcttataatgaaggcaaggtggtgatcaaagagatgcaaacaaaattgcactgctctcgactttctaacaatggctttaggattgtttagaaagtaagagtgaaataaactcttcaatccttcagctagtttaaccaacattaaactattaaaggagaattataatgaaagagtttatcgagccataccaatataattttatcaaaaatcaattagccaatgtttcacgcgcataccggtccgccaatgatacttcgactttgaaggcgttaaaatcgctaacagaggagaaaatcaatgaactattcccggaaagcgtgctagaggagcataaggaactgtttagcgagctccatgcgattacttcaaccaaagaagcagagccgtttttagatgggttaaaagcctatgtgattcctttcgcgccacctagtgatgtgaaacttaaaaaactttttgcgaaaacgaaaaaattaaaaattcccgcctggtctaaactagatttgcgcgactatactttttacggctggaatgatatcgctcagcaacgtaaatatatcgtgacttacgaggacggaaatttggtcggcgtacaaggaactatttcgacagagattcaaaagggtgtttgttcgatttgtcactcgcattccaaagtatcgctctttatggcgaaaacgaaatcttcgagtgacggcatttatacgacaaatggtaattacatttgctacgatagtgatgtgtgtaatcagcaaataaaaacccacgaaacgttagatgaatttattgaggttgttaagaaacgcaaataaaaaacagaaagtctctcatttttttgagaggctttctgttttttatttaatcgaatctcgcaatttctgacgttgtttatccatccatgtttcttccggaaattcacttagtaagttgtcggcgaattccgctaggtcatctcctacaacggcttttaattctaggttgtcggctgcggcgttttcgaacatctcgagtacattctttaggatttcaaacatcccagcgccttttgcaaagttccataaataggtttcgatagctttcattgcggttttgtaatcttctggcaaagcggctattcgttttttgtactgtttgtaatctcgtttttcttcgcggtattttttgtaccaattaaacattacgcttgccctcctttaacctgcatgatttttccttgaataaaatcccaacgcttccaaaaaatagctagttcttcttcaccagctgggctcaatgtgtaaaattttcgtggtggacctaattctgattttttcttttctatctcgactaatccttttttctccagacgaacgagaatggtgtagacggttccttcgacgatttcatcaaagcctaggtcattgaggtatttggtgatttcgtagccgtatgtttctcctctagaaatccgctccaaaatcattccttctaaactacctttgagtaactcggttagtcctttcacttgaattcactcctctactagttgttactaggtacaagtatatagtaatacaaagtaggttagttgtcaacctgtttgtataaaaaaaactgctctctttggcgagaacaggttttttctattgaaaaagtacttcttgattttgtttcatcgcgtttaaattagcaatgttaaccgttaaaaatttctttttcggagcttctaaagtttcgagccattcgtttgttaattttgttgcgatttcagctgctgcatcgttttggcaaatgaagccgatgtttttgtattggcatttctcatcaagattagcgtagtggtattcttcgctttcttcgggattgaaaatgtccatataaaaatttcgattgcctttgaggaattgcatgtgggtatcatttgagtctactaggttgaaatcgcgtttggtgaactgattgatcgcttctgattttacatgtgataggtcgaagcttacttttgtgcttggtttttctaggttttgaagctggcttgcttcaaatgatttagctgcttcttggtcggatgtgaatgcttggagctgttcttcgacacgattcattttagtttcaaaatccagttcgtttaggagattttcggtttgtctgatgacgttaattgcttcttcaaattggtcattttttatgtaggaagtcactttttcggctgcttcaattttgatttcttgttgcattgctgcagtcatatcgcgccatgattcccacttttgttgccagtttcccatggtttattctcccttacccaataattttcgttaaatagttttgtgtttctttgaatggtggacgccgcgtattgcgacatctctgtccagatatagtgcttgcgctgaaccattatttattaca

SEQ ID NO: 3613 - DNA, 2638 bp, Listeria monocytogenes 4b
  misc_feature (1)..(end): n can be any nucleotide: a,g,c or t/u
acccgctgcctgagcggccgcaactgtgctggaaagaatgaaactaacggaagtaattttacgagtacaagagtcatgtatccagcaaatataaaaaagtccaccaaaatgaaattagcaggtaaatctactaaagaaattatacgagcgttaaacatcaaaaaactaacacaacaaaaattaggctaccaatctcccattaatttcaggaaacaagcagcctaatttaagtgatttttattccattctcatttttttatgtcagtacattagtgaaataatatctaatagttctttttcttataaaatttcttcttgcataaataaccctagcccgccgatatcatgatgctttgcgattttatctgctttttctaaagctagcggaatgccattctccattgctacaccaatttcggctaattcaatcataccgacatcattttcattatccccaaaagcaattgttgaatcaagattaatgtaaccattttccgcaagataagtgagaccttttgccttatcaattccttcattcataatatcaattaaattcgaggcagacgcaagaacagaaagtggcaagccttctaaagctgctttgatttctgctcgtttttctaaatctgattcaattacgagtacttttagtgggaattcaccttcccgaagcacgctgaatggatccgtagttaaagtaattggaacttgttcattttccggtaaagttttatttaattcgttgaaaaaggcgattttgcctgtattggttggtccgagaattcgctccgttgtataaatatgataattaacgtccagcggttcaagcgtttctaataccgtatgtatcaaatccagttcaatattacttttatataaaatctctccagtagtaaaatcgcgtactaatccgccattacaagaaatgactggcgttttgatattgagctcgtggataaatggtaaaattgctaaatccagtcgccccgttgcaaggaaaagtttttttccgtttttttgccattccattaaaacttctttgttgaggggatgaatttgatcacctttttttactagtaatgttccgtccatatctgtaataactgtatcaatcgctacatttgccaatagttttcgcacccttctaaatttccgttattatgtacctcgattatagacgagtttcgcatgattgtcacgccgatatttggtatactaaatgggaatggaggacgataattagtgaagaaatattttataacaatcatgattttactttttggcgcgttatttctcagtgcttgtcaaaaagatgacgaggttgaaaattcttctcctcctaaagtagacttaaaaaacgaaatacccattattttaattcatgggagcggtggcgatacacattctttagatgaaatggcagatcacttaatgaatgaatacaaaagttctaatgaagcaatgtcaatgtcaattaactcaaaaggaaaaatcacataccaaggcaagctaacaaaagatgccaaacgtcccattatcaaatttggcttcgaccaaaaccaagcaactccagatgattggtctaaatggttaaaaatcgcaatggaagatttgaagtcacgttacggtttcacacaaatggacggagttggtcattctaacggcggcttggctttaacttattttgcagaagactactctaatgacaacgcggtccctactctgcgcaaattagttgctattggctctccttttaatgatttggacccagacgataatggcgaagatttagcttttaataaattaccatccaacacccctcaactagattattttattgacaaggagactaaaattagtactgacctagaagtactatccattgctggagctcttagtgaagataatttaaccgatggtattgtcccaacgaatagttcactcgcttccagacttttcatgcctaataacgcaaaagtctatatggaagatttacaagttggtgaaagtgctattcaccaaacattgcatgaaacatctgaaagtatcgaaaaaacacattggttcttagagaaatcgagccccgaaaaaaaagaaattaaattaatttctaaataggaggaataatatgctacatatacaagcaaaagtccaagttaaacctgatttagtagcggaattcttggtggaagtgaatttagtaatccaaggctcgctttcagaaaccgaaaatcatggctacgaattggttcactctgtagaaaacgcaaatattttctatattctagaaaagtggactgatgaagcagcaattcagtttcataacgggacagagcattataaacgtttcaaaaaaaatgtccccgcttttttagcaatgccgattgaggtggatttacttgcgccagttgagcgacgatagtattttttaacaagaattttttttgcaactaacatcattttcgtcttagtaaagataaacttacctgtattagtatagccttcttttgtgcggattatttgttcatacactatctcctctacttcaagtgattctattgtttgctcgccgtccacattaaatgggttcccactttagaaaataagcaaaaaggattggctcgcatacgcgagccaa

SEQ ID NO: 3614 - DNA, 3223 bp, Listeria monocytogenes 4b
  misc_feature (1)..(end): n can be any nucleotide: a,g,c or t/u
aatgctcaaagaaggaatgctaatacaggcgatttctagaacaaatcgaacttttgaccttaatagcaaaccacatgggaaagtacgtttttatcgccaaggtgatgaaatgcgcgaatttgttgaaaatgcgctacgtatttatacgagaggtggcaatgatactcttcaagaagcggaagaagagacaaaaaatcagctgcctaaagatttagaaaatgacgatattcttgcaaagccccagagccaccaaatcaacgaactagaagaagctatcttaagattgaaagagcttgctggcgatgattttagtcaagttccacgaggccaaaatgatctaaaagaatttgttggtcttgctttaactactcaaaccaagatccagcaattaatccaacagggttatgagctaggaagcgagattgaggagctaaatgaacaaggtgaagcgactggaagaatggttcgtttgaacatttcaagtattgatgaatttggtgctttacaagctcgtttatatgatgctaaggagaaattacctcctgaagagcgtccagatctcactgaaataaagattggaattgaattttatcatcacgagataattgactatgatatgttagttgagcttctgaatacctttatggacgaaaaaaataaaagtaataaagatgctatcgaaaaacacatcgtaccaatggatgaagaaagtcaacatgaaatccatggaatcgtggatgatattgaagcaggtcatatcacagaacattttacaaccgattctcttcaggaaacacgtaagaaataccgcacggaacatcgagagcttaaagttcgccgttgggcagctaaccaaaaagtcaatggtaatcgtattgtagaagctttcgacttattcctaccagggcatacgcttattgataatccaaagctagcggatattgtgcgtgagattgaagaagaggaaaatatcggattttttgaagcctctgattttgaagaagagctaatggcattcttcaattcactataagcaaatatgagttttatttataataagagaaagaaggaaaaaacataatggcattatcaactgaacaaaaaacaaaaatgtgggcaatgctcaaccaaacacgcggtcaaattggtttaactgcgtataaagactatatctttggaattttgttttataaatacttatctgaaaaagcaacacattggctaaacggcgtattacgcggggaaaattgggagagtgtttattctcaagattctgtaaaggccttaaattatatgaaaaagaatcttggatatgcgattcaaccaaatgaattctttgtagactggaaaaaagcaattgatacggaccgtttcaatattgggatgatgacagatacatttacgcattttaatcaacaaattgcatttgaagcgaaaaatgattttgaaggaatttttgatggtatgcgctttgatagtgcggatttaggtgctaatgcacaagctagggctagtgtcatgatttctatgattgaattgctatcctctcctgaatttgatttatctggtagtaatgatactgtttcagatatttatgagtatctagttgcacaatttgctactgtcctagcatctgatatgggacaatactatacaccaaaagaaatatctaatgtaatggctcggattttaacttttggccgagaagatatggaaaaattttctatctttgatcctactgttggttctggttcacttttacttacaaccgctagttatatgaagaactcaggtagacgcggggtgattaagtattatggtcaagaaaaagatgcaacaccttaccgtttatcaagaatgaatttgatgatgcacggtattgaatataatgatattaatattaatcatgcggatacacttgaaagcgattggccagatggggtagtggatggaaaagatactcctcgaatgtttgatgcagtaatggcgaatcctccttattcagcacattggaataataaagatcgtgaagatgacccaagatggcgggaatatggtgtttcacctaagacaaaagctgattatgcctttttattacactgtttgtatcacttagaagataatggacgcatggcgattattttaccacatggtgtattattccgcggagcttctgaggggcgtatccgaaaagctttaattgataagcaccagattgaggcaataattggttttcctgaaaaattattcttaaatacaccaatacctgtttgtgtagttattttaagaaagaatcgtattgaatcagatgttctgtttgttgatgcgagcaaaggatttgagaaaattaagaaacaaaataatttacgttctgaagatgtggaaaagattgttgatacagtaattaaccgtaaagagatagagaaatactcacatgtagcaactttggatgaaataaaagaaaatgattacaatttaaatattcctcgatatgtggatacttttgaagaagaggaggctattgatttggtggcgcttggtaatgaaatggttgcattaaatgctgatattaaaaaagccgagactgattttcttggtttattagatgaattagctgttactgcggatacgaaggaaataattgaagctactaaggcggtatttcgatgaaaaaattagaaaaaagcgtaccagtaatccggtttaaaggcttttctgaagcttgggaacagcgtaagttaggtgaaattgcgaattccttcgaatatgggcttaatgcaagttctaaaacatatgatggagaaaataaatatattcgaattacagatattgatgaaagttctcatgtatttaatcaagataatctaacctccccagatataagtttagataacctaaatcattacttattagaagagggtgatattctcttagcgagaacaggagcaagtactggaaaatcttattgttacaataaaatagatggcaaagtattttttgctgggtttctaataagagcaaaaatcaaacatgaatataatgtcagttttatctttcaaagcactttaacagaaaggtataataattttattcaggttacttctcagagatcaggccaaccaggaattaatgctcaagagtatgctagatttgctttatatattcctaaattaaaagaacaacaaaaaataggtgactttttcaaacaactagacgacactat

SEQ ID NO: 3615 - DNA, 2283 bp, Listeria monocytogenes 4b
  misc_feature (1)..(end): n can be any nucleotide: a,g,c or t/u
gtgcggaaataacagtcaacctagtcgtatgctgcgagcggccgacagtgtgctggaaagaagaaaatttcaagctaaatctaagcaaaaaagttaacttcttttcgcttggttttttttataattaagttgtagtgaaaatacggaagttctggccagcggaagtattaaaaatggaggtttggacaatgaaagagaagttatttcaaaaactagacgaaaaacgagatcgcatgatagaaattcgtcgttacttacatgaacaccctgaactttcttttcaagaggaaaatacggcgaagtatattgcggatttttataaagaaatggactgcgatgtgcggacgcatgttggtgggaatggcgttgtagtaacgattgatacaggcaagccgggcaagacacttgcaattcgtgctgattttgatgcacttcctatccaagaagaaacaggtctagcttttgcatctaaaaaccctggtgtaatgcacgcttgtggtcacgatggacatacagcttacatgcttattttgggcgaaacacttattgaaatgaaacaagaattaaccgggaaaatagttattttacatcagcatgcggaagaaactcctcctggtggcgcgattcaaatgattcaagacggggcgctggatggtgttgataatgtccttgggattcatgtgatgtctacgatgaaaacgggtgaagttttctaccgtgagggtgcaattcaaactggtcgctcttatttcaaacttaaagtacaaggtcaaggtggacatggctcatctccgcatttagcgaatgatgctattgttgcagcaagtgaatttgtagtagctgttcaaacggtgattagtcgtcgtttaaatccatttgatgttggttcgattacaattggttcttttgatggaaaaggtagctttaatgtcatcaaggatgcggttgagcttgaaggcgatgtgcgctctatgtctgaagaggcacgcaacattattcaaaaagaaattacccgtatcgttagtggaatagaggcaatgtttggcgttacttgtgaacttgattacaaaaatgattatcctgttttaaataatgacgaagctttgactgattttgttgttaaatctattaaaggggcgaaaattccagaaattacagatgttgtgcgctgtgaaccgcaaccaccatcagaagactttgcttattatgcaaaagaacgtccgagctcatttttctatgtgggagcgatgccggcagatgggcatttttatccgcatcatcatccaaaatttgacatcaatgaagattcattattaattgcatcaaaagccatgggagcttgtgttgtagattacttaaaaggagagaataactaatgacttcaacagcgtataaaggtacaaataaacttattgttgggattgttttcggggttatcacgttttggcttttcgcacaatcaatggtgaatatcgttccggccgtgcaatctgaccttggaatttcctctgatttacttagtattgccatcagtttaaccgcgctattttcaggtatttttatcgttgtagcgggcggtatggctgacaaatttggtcgtgtgaaattaacttatatcggacttattcttagtatcatcggttcactgttacttgttgtcactcaaggggcgacgttacttattatcggccgtattattcaaggactttcagctgcttgtattatgccagcaaccctggccttaatgaaaacttattttgaaggggctgatagacaaagagcgcttagttactggtcgattggctcatggggtggatcaggtatttgttcattcgcaggtggagctatcgcaacatacatgggctggcgctggattttcattatttccatcgtattcgcactgcttggaatgctacttattaaaggtactccagaaagtaaagtcgttcaaaatacaaaagcaaaatttgattcatttggtcttgttctttttgttatcgcaatggtttgcttaaatcttattatcactcgtggttccacatttggctggacaagcccaattactattacaatgctcgttgttttccttatttctgcgggattatttttccgggtggaattacgacaagcgaacggatttattgatttctcgttatttaaaaataaagcttatactggtgcgacactttccaacttcttgttaaatgcagctgctggaacactagttgttgcaaatacttatgtgcaaattggtcgcggttttacagcattccaatccggtta

SEQ ID NO: 3616 - DNA, 1704 bp, Listeria monocytogenes 4b
  misc_feature (1)..(end): n can be any nucleotide: a,g,c or t/u
cgacagtgtcctcggaaagcaaccaattaggtgctcctttttctttatttagcttcatggtatagtttttctaattcttcttctgaaaaatcgtaagcgttacgacaaaaatgacattctgcttctgcgccgtgatcctcttctatcatggaacgaatttcttcttttccaagtgaaattattgcactgccaaagcgttctttggagcagttacattcaaaggaaacggggattttttctaagatttgtagtttatcttcgccgcctgcaagtttagctaaaatcgattcaggagtttcgcccgcttcaatcattctagaaactgttggtagagccgtcagatttttttcaatttcatcaatgatttcatctgtcgcaccagggagtaattgcaacatgaaaccgccagctgcttcgattgtatcatctgggttaacaagtactcctacaccaacggaggaattgatttgttcagatgttgctaggtaatacgtaaaatcttcaccaatttcacctgaaataattggcgtttgtccggtgaaattttctccaaagcctaaatcttttacaactgaaagcattccggatgttccaacgccgcggcggacgtcaagttttccagcttcatttagttcgctgaagtgaacgtgtggatttgttacgtatcctctgatttgaccttgtgcgttactatcagctacgattggaccgattgggccgtcgccttcgatttttacagttattttttggtcttctttttgcattgctccaaggaaaagtgttcctgtcatcgttctaccaagtgcggcggatgagacggaccatgtatcatgtcttctttgtgcttctttgattgtttcggttgttactgctgcatatacacgcgccatgccatcgtaggctaacgctttaactaaataatcactcattatataaaactccttttatttttctgtagttggtttgtttcttctatatagaagttctagaccttttaatgttaaaaatggatctaaaatatctactgcagaagatttttctgttatcatccgagcgagcccgcctgttgcaactactactgggcttgcgttggattgttttttgatttctgcgataatcccttcgcattggccgacgaaaccataaaagatgcccgcttgcatggatgccacggtggatttgccgatgatttggtttgattcagcaatatctacgcgtggtagtttagcagcgcggttgtatagagcttcggtcgaaatcataatccctggagcgatggcgccaccttggtatacgcctgattcatcgatatagcaaaatgtggtcgcagtgccaaaatcgactacgataaccggtgtcccgtattcttctgatgctgctacggcgtttacgattcggtcagatccgatttcgcgaggattatcgactttgaggtttaagccggtttttattcctggaccaacgattaatggtcggatattaaaatagcgtacgcacattgtttccattgcgtgcataatcggtggaacgacggacgaaataataattccttgaatatcagaaggagttaaattcgcataagaaaaaaagttcaagactgtcattcctaattcatcggatgtgcggtgacgatctgttgtatgccatgtcaagtntgttatactcacgcagtagttcacgtatacagtaatatcctaattattt

SEQ ID NO: 3617 - DNA, 2036 bp, Listeria monocytogenes 4b
  misc_feature (1)..(end): n can be any nucleotide: a,g,c or t/u
agttgcggagaaagcattaattaataccgaatttcaaatgccaattttacggaaaaaccggttggtggattctggtgcgaaagggttttattactttatcgccgggcttacaaatgcttattgtggtaaggcggtttctgaccccgttcgttttacggaagtagagcaaacagcggaacataggcatgttgaaacaagcgagccgaaatatcgttattgctcggaatttattatcaaacaagcgactatttcacatcaacatttacaggaaattctcgcagctaaaggggattccttagtaattgcaggtaatgagaaacaaataaaaatccatatccacacaaatgaaccaaaagaagttttaagcctcatggcagcatacggcgtgatgacgtatcaaaaagtagatgatatgcgtctgcaatatgaagtcacaaaaaagcctcgcgcaaagattgctatagtgaccgattcgatagccgatttaccagaagcatttttactggaacaccaagtacatgtattaccgatgaatattttagctggagaagagaattttcttgataaattgacggttggcccggacatgatgcaagaaaaattaagaaaacaaacgaaaatgagtacagcccagccaacaatccgtacggtggatgccttgttatcttttttagaacacaaatatgaacatgtgcttgttatctccgttgcggcgaaattaagcggaacttatcaattaatcaaacagcggataaaagcgcgggagttgtcctcggactggatacgtgtaattgattctaaattaaattcggtcgcgcaaggaattttagtgaaacaagcagtagaactagtggaatcaggtaaatcatgggaatctatttatcccgaagtggaacaaatgattgagcggacctttatttatgtggcggttgcagatttgtcgccgatggtccagtctggcagaattccacgagtgttaggaaagcttgcgcagaaattatcactctatccgattgtgagtttggacgagtccggggatggcaaattgataggcgtatcgtttagccaaaagcaaagtatgaaaaaaatcattaaaaaaatagcaaaattacagctgaaagagctggcgattacacatgtttcttcaagagacaccgcggcaatttggcagaagcaacttgaaaaagaaaccggggaaatcagctacttagtggatagttcggcagccattgcgattagtgctggactcggaagtgtcgcagttgcggggattaaaaaggaggaaacgatatgatgtattggacagtagcactcgctttacttgtttactttatactctggtttattatttcaaaaataaaaggaaaatattcgctcgttgatattgcgtggggcggcggctttgttgttgtagcatggactggatttttaacgacatttagcatgacagcgcaaagtataaccatacttgttttagtgacgatttggggtgtccgtttgttttggcatttagcgcgccggaattggaacaaaccagaagattatcgctacgttaatatgcgcaaacgctggggaacgacattagttaatttgaaagccttcttaaatgtcttcgtgttgcaaggtgttttattatttattattgctttaccgattacacatagttttgctaatgaaacagcgacattcgcttggtggcaaatcctcggtattgttatctggattattggctttatttttgaagtcggtggcgatttgcaattagaaaacttcaagaaaaatccagccaataaaggcaaattattaacaactggattttggtcagtcacacggcatccaaattattttggtgaagcacttagttggtggggtgtatttttagttgcctatacgcaattaaatgatctctggctgattactagcccgattgttatactttttattacatttgttccggtgtccgttcttgaaaaaattcagacagagcgattcacttcacaacgtaattcttgaagtagatttagtagtagagaagg

SEQ ID NO: 3618 - DNA, 2791 bp, Listeria monocytogenes 4b
  misc_feature (1)..(end): n can be any nucleotide: a,g,c or t/u
gatggccaagattatgtcatgattgatacagccggaatgagaaaacgtgggaaagtgtatgaaagcacagagaaatatagtgttttacgtgcaatgagagcaattgaacgctcagacgttgttcttgtggttatcaacgcagaagaaggtattcgtgagcaagataaacgaattgctggatatgcgcatgatgccggacgtgcgattattattgtagtaaacaaatgggatgcaattaacaaagatgaaaaaacaattaacgtatggacggaagatattcgggagcaattccaattcttaagctatgcaccaattgtctttgtatctgcgaaaacaaaacaacgcttaaataacctattcccacttattaatcaagtaagcgataaccattcattacgtgtacaatcaagtatgctgaatgatgttattagtgatgccgttgcaatgaacccatcacctatggataaaggtaaacgactgaagattttctatacaacacaagtggctgtaaaaccaccgacgtttgttgtatttgttaatgatccagaactaatgcatttctcgtatgaacgtttcttagaaaaccggattagagaggcatttccgtttgagggtacgccaattcgagtaattgctcgtaagcgtaagtaaagttttcgggaggaaaaatataatgacacagaaaaaagtagctattcttggcgctggaagttggggaacaggtcttgcacttgtcctagctgataataatcatcaaccagttatttggggaaacttagataaaattgtgaatgaaattaacgaatcgcacacgaatagtcactatttgccagatattattttaccaactgaggtaaaagcgacattgtcacttgatgaagctattgatggtgcagaaattgtcgtaattgctattccaacaaatgcgatgcgaatcgtttgtaagcagttaaatgaagcgctaaaagaaccaaccattttagtgcatgtgagtaaaggtattgaaccagaaacaaatcttcgaatgtccgaagtgattgaagacgaaatagatgcgtccaaacgtaaagcgcttgttgttctttctggaccaagtcatgcggaagaagttgcgcttcgtcatccgacaacactttgtgcgagctgtaaagatttatcagctgctgaaattgttcaagatcgtttcatcaataataatttgcgtatttatacgaatgatgatgtgattggtgcagaaattggtggcgcgctgaaaaatattatcgcactaggtgcaggaatttctgacggccttggttatggcgataatgctaaagcggcactaatgactcgcgggatggcagaaatcactcgtctcggtgttgctgttggctctaatccgcaaacattttacggattgacaggtattggtgacttaatcgttacttgtactagtgtgcattcacgtaattggcgtgctggtaatatgctaggtaaaggcgagaatttagatgaagtattagaaaaaatgggcatggtcgttgaaggtgttcgaacagctaaagcagtacatggttgggcgaaaaaactagatattgatatgccaattaccgaatcgatttacgcgattttattcgaaaataaagatgctcgcgaagcagttgatttattaatgggtcgcgaaaaaaagatcgaaaaagaatcattttaatagaaagagtcagaatgggctatccgcttattttggctctttttttatgaaatatgctagaatgtagcagaagagccaaataataaaaagtaggtggataatatggaagttactcgtacagataaagccgtaacactaacttggaacaaagaagaagtcagcgaaggcacagtcgtttttgtaagtagtagtcctaaactagaggataatagtgatcctgttttcaaagtaacaaatgatgttgatcactattcatatgacacaaaggatattcctatttatttctttttagagacaccaaacggagatagaaccactgtttcagaacgaattttgccacttgaaagtgtattcaattttcgagatatgggcggttatgcatccaaaaacggcaagcatgtaaaatggggtaagttatatcgctcttctaatttagtgaatattaatgagaacgatgcagctttgcttcaaaaactacatattaaatggatttgtgatttgcgcagtagttcggaagtacaagcacaacctacgcctgcaattgaaggtgtgctaaataaacatattcctattggtactgccaaaaatgaagaaacaaagctaccggtaacaaatgatacaactatttatgaaccgctgatgggtgaaagctaccgcgtgtttgtgcaatcagtggaaggctttagagaaatttttacagaagtattagaagatgcaaaagctggattgccgttcgttttccattgcactgcaggaaaagaccgtacaggcgtcctaggggcattattactaatattgttagatgtaccagaaaaaacgattttcggcgattacgccatcactaatcgctaccaggacgacattttacaagaaatgggaggaatcgtggcgctcttttcgaatggaaccgaaaaaattgatttagaaacgttcaggccaatggcagaagctcgtcctgaatatttggaaattgcctttgatgaaatgaaaaaacaatatggctcagtagctaattatttagaaaaaggaattggaattactgcggcagaaaaagcagctttccaaaaagaaatgttagaataaaactaggctcagaaacct

SEQ ID NO: 3619 - DNA, 1961 bp, Listeria monocytogenes 4b
  misc_feature (1)..(end): n can be any nucleotide: a,g,c or t/u
tttctaataatattgaaagtaaagcccgtttagttactgtttctctttctaatggagcgcgaaatttgaaaacaattttattggatttatatttttgggttggaacaattgttagtgcaaccggaccaactttttcttgaaatattttgtctgtcattataatgctcctttcaagcaatgatctcactttcctattgtatcctaagttgttgccacgcacaattttctagcataaaaaacagcctagaatttaatctaggctgtttactcgtattatttacctttaatgtagttcacaccatctgcttttggtgcttcggatttaccgataaagccaacaagcgctaagatagttaatacataaggcgcaatttgtaagtaaacgtctggaatgtctttgaagaatggtagcgatccgccggtaattgccaaacattgcgcaaatccgaagaaaatagctgcccccattgctccaagtgggttccatttaccaaaaatcatcgctgcaagggccatataaccttgaccggaaatagttgcgtgtccgaaatcaagtgtaaaggattgggcgtaaaccgcgccacctagaccgccaaggataccagaaatgataaccccttggtatctcatccagcgaactttgattcccatcgtatctgctgcaagaggatgttcccctacagaacgaagacgaagaccaaaacgcgttttataaataataaaccaagatgcgattgcaaatagaatcgccacataactcattaccggaatgtttttgaagaaaatatcaccaataactggaatatcacttaaaacaggaatatccggtttaccaaagtagtacttaatttgatctgtttggcctttatcataaattacttttacaaggaataaagatagaccggttgctaaaaagttaatcgctacaccactgattacgtggtcagcgcggaagttaatagttgcaacagcatgtacaagagagaataatcccccaacgaccatcgccgcaataagtgaaatccaaggagttaaattgccgaaagtgtcttggaaagtaaggttaaagacgatagcagagaatgctcccataaccatcataccttctagtccaatattaaccacaccgcctcgttctgaataaacgcccccgagagcagtaaaaattagtgggcctgccataagcagtgtactagaaacaattgttgctaaaatggctgtcattctgctttcgcccccttcttaaattttgccatcgcccagcggataatgtagctggatgccacaaagaagataatcagagcgataattacgttgactaattcgtttggaacgcccgcaactgctggcatgtttagtgctccgacttttagagcgccaaacaagatggcagagaagacaatcccaattggagaacttcctccgagtaatgcaacggcgataccgtcaaaaccaatccctggagaagaagttaatacataagccgttccgtatgttccaagaccttccattacgccaccaagaccagcaagcgctccggcaataaccatggaaaagataattgttttctttacactcataccggcatattgcgatgcattttcgttaaatccaactgcttcgatttcgtaaccaaaagtagttttgtttaacattaaccaaataataagtgcaaaacctagggctattaaaatcccccaatgtagagacgaataatctgtaagtgattgtaataattcagattgtaaggaagcggacgcatgaatttcttgcgttttgtccaaaccatctgtaagtaaattttgtacgacatagttgaaaatataaagtgccgtgtaattaagcatgattgttacgataacttcattcacacgtaaagttgcttttaatatacctgggatgaatgcccaaagtgcaccanaaaccataccagtaataatcgcaagtggtaaatgaatcca

SEQ ID NO: 3620 - DNA, 3745 bp, Listeria monocytogenes 4b
  misc_feature (1)..(end): n can be any nucleotide: a,g,c or t/u
gtttaccttgccagaacgcggatttgccaaggagcacagtcattgatggaactaggaacgggcggacgatgaaggtatcgagtctgacaccaattgccgtaattaagccaaattgtactaagagctgaattggcagtgtagttaggactccgaaagttcctgctaaaattaaaccagcagacgtgataaccccgccagtttggccaacaccttctgtaatcgcttttctaagtggcattttcttgctgtttttccaaatactagaaatcataaagatattgtaatcttccccgagtgcgacgatgaaaacaaaggcatagagaggaattaagccagaaatcgcctctactcccatcgcgtaatgaatgatgacccaaccaaggccgagcgctccaacgaaggacaagagaactgtagcgactaagtaaagcattgctgtaatcgagcgcaagtagcataaaagtaaaatcgcaatcaaagcgataacaagcggaataatcactttttcatcgtgctctgtcaccgcgcgatcatcatattgtgtcgcagtttgtcccgcaatatatacgtcatttcctttgtcggctgcggcacgtacttttggaacgacatccattgcttcattgctataagggttatcttttaaaataagtgtatatttttgataacctttgcttcgttctggaccagtcactgaagccactccatccacattttcaagcgaactcttcattgattctttggagtttaccactacttgcattggcgcaggcataccggcaccaaatgatcactaattaaggtaaatccttcccgagatggcatatcttctgggaatgttgaaagtgtgtcatacgtgtatttcacctgagttgtaaaaatcccacatccaattaaaataatcaatgtgataattaaaattcgtacaggatgtttcgcagacatttcaccaattttatgccaaaaacggttttctttgtggtgttttggtgttttgccttttttcttcgcgcgtgtttcttccatttctacggttcttgggacaaatggccagaatgacacacgaccgaatatgcctagaagtgctgggacaagtgttagcgaggaaatcatcataatgaaaatcgctaaactaaatggtacggcgaaattgtggaatgaaccatattctgctgctaataatagaagtagtgcggtcattacggtcaatccactaagtgcaattgcgccggctgttccgctaaatgcttctttaaatgcttggaatctgtttttctctgtgtgcagatggctgcggaatctggatattaagaataaacaataatccgttccggcgccaaatagtaatacggtcattatcgagagcccttgtgagccatatgtgataataccttctttcgcgagtaacccaagaatcggcgtaattactaagtaggcaaaaccgactgcaatcaaaggaattaacgctaaaattggcgaacgataaattactagtaaaaagactaaaacaagtagtactgttccgattagcagcgaaacatccgcatctttaaatagtccactcgcatccacgctaataccagccggtccagttgtccgagcaacaagcgcatcatcagcagatactttctgtgcaaatggattttctccaatggttgttttagccgctgattcaagttgcttgaagctctctgttagttgatctgaagtcgcactgtctttcataataacggtttgaataaaagtagttccgtctttagaaacttgttgtttgagcgccacgggtggcattttatcgtaaggaaccgccattttttgatagtctaccgggttttcggtcaattctttgctgtatttttgaatattaactaagtcttcggttgttaaaccagttgaacgataccaagtgataagcgctggtaccccgtccgttccagcaaatttgtcgtcaatgagtttttgggcgacaacagaaggctctgaattcggtaaatctttcgcagcgtcatctttgtaatcagctgcttttggaaagaaaaactgtaaaataataattgcgataatccaaatacctaatgttataaaccggcctttcttgccaccaaccccactggcaattttacttaaaaatccatctttcattataaatccccctttagtttgcttatttttttcgtttatcattcgataagtgaaacaccaaaaaaagaagcacgctaaattatacctcttttttacatataccaaacatcattaagttgattaattcatcaatttgttctgtagtcgtttgcttttgcgcaaagctgcctttcccagaaaaaagagggctaatagtggacaaacagtatctcgcagcagtctcagcactgacaccatcacgcaattcgccagcattttctagacgctcaaaaaatagttgaaatggttccaaataggttttttgccataatttataaagtaaaaattgattttctggtttcatttcattaagaatatcgtgaatcattaatagaatattggttggatgttcctcaattaacataattaacatatcatgtaattgttcttcttttgctttggtcacttgcataattggatgcatttccacttggatattttgcgtcaattcacgaaccacttcaatatatagggattctttatcttcaaagtggtgatatagtgccggttgggtaatgttggcaattttagctatttctcttgttgaaactgcccggtaacccttttccataaataaatcacgtgctgtatccaaaatttttcttctagttattcctaattcttctgcccgagtccgcttcttttccatcatcaccccacctttcttattttgttgcagttagtaatggaaggtttttattaatgagcttttctagtgtttctttatgccatttacgacctagaacacgcttactaacaagatattttccttcctccagctcgccttcttcggtcactgcacgaatatataaccgataaactaatttctttttctcaagcgcaatttgctgaaccgtttccccatccaaaaagtgcatttccgcatcacttaatttaaatacaaatgtaaaaattcccgcttccgtgaacgcgagaataagcgaatgtctccctcgcatatggggccctgcatataaaaaatcaatcgtttgaacggtcaaattattgtcagcactatatgttcttacttctttttctaatcggtctttcaaactagcagccaaaataagcgcctcccttgctgatttatattttaccagaaaatggcgggttgaagtagggaaagttttttgatacttaaaaaggattaaattatttcccttcataattcataaaaaagtcaaatcaagtattctcttcttgattcattcatgttaatatcaatattagtgtttattaagcgggtataaacgttctaacgattatataaataataaagggaagttggtttgcaaaatgggagaattaggtaatatcgaaacacgaaacgggagaacatcattttttgacggaggtttactgcaatatattggttggacaattcttggcactttggtgacgatttgtacgattggtatttgctatccatgggcttaatgtatggttcatggctggaaaatcaatcatacagccatggaaggaagacgctctgaattccaaggtactgcggttggactttatgtaactggataaatggtttggctacatgcatgctatgggatgg

SEQ ID NO: 3621 - DNA, 3615 bp, Listeria monocytogenes 4b
  misc_feature (1)..(end): n can be any nucleotide: a,g,c or t/u
ggcggaatggccaatgtgtatttggcgcatgatattattcttgatagagatgttgcagtaaaaattttacgaatcgatttacctgatgaaagcaaccttattcgtcggtttcaacgggaagctcaatcagcatcgagccttgttcaccctaatattgttagtgtttacgatgttggtgaagaaaatgatctacattatattagtaatggaacatgtggatggaatggatttaaaacagtttattcacgaaaatcacccaatcagttacgataaagctgtagatattatgcttaaaatcgttcctgcggtggcaattgcccatcaacatcacattattcatcgtgatttaaaaccacagaatattttaatcgatcatgatggcgtagtgaaaattactgattttgggattgcgatggcactttcagaaacatccatcacacaaacaaattctttgttaggttcggtgcattacttatcaccagaacaagcacgtggtggaatggctactcaaaaatcagacatctattcactaggaatcgtgctatatgaactattaactggaaaagttcctttcgacggtgagtctgcagtttctattgctattaagcatttgcaagcggatattccatcagcaagagcgcaaaatccagaaattcctcaaagcttagaaaatattatcattaaagcaacggcaaaagatccatttttacgttatcaaaacgcggaagaaatggaaaaagacttgcaaacttgtttaaatcaagaccgtttaaatgagcctaaatatattttcccaacagatgatggtgatacaaaagcaattccaatcatcgcaacgaaagacacgatgcaaaaccttgacaaaacgattgtcccagaaggaaaagtagcagcggctgaagttgctcccgaagagaacaaaggtaagaaaaagaaaaaaatgagtaagaaaaagaaaattgctctcattgtttcttctgtcattatcatttttatcatcggtattttactactgtggcttttaggcaagagccctgatgaagtcgctgtgccggatgtttctggtaaaacggaagaccaagcagtagcgctactccaaaaagaaggctttgtcataggtaaaacggcagaaaaaaatagtgatgaagtagcggaagggaaagtaattaataccgacccagaagctggagaaatgaaagaaaaaggaacaaaaatcaatttattcgtaagcattggttctaaaaaaataactatggacgactatacaggaagaagctacacagatacaaaagcgttacttgaagaacaagggtttaataatatttcttcggaggaagcatatagttctgaagttgaaaaaggcttaattataagccaaacaccgactcaaggaacggacgtagtcgctaaatctaccgatgtgaaatttgtcgtaagtaaaggtgcagaaccaatttcgcttaaagatttacgcggctataccaaaacagctgtagaagattatgcctcaccacttggactcaaagtttcaagtaaggaagaaaattcaaatacagttgaaaaaggacaagttatttcgcagtccccatcagctggaactgcaatgaatcctggtgatacaatcgagattgtcatttctgcaggaccaaaagaaaaacaagtcaaagaagtaactaaaacatttaacatcccatatacaccaagtgatgaagaaaacccacaaccacagaaaattcaaatctacattcaagataaagaccatagcatgactagcgcttaccgagaaatgagcattacacaaaatacctcggtagaaataacttttcaaattgaagaaggttctagcgcaggctacaaaattatcagtgatgataaagtaatcgatgaaggtacagtcccttatccaaattaaaaatagaacggaggaaatgtgctggaaggacaaattatcaaagcgttgagcggattttactatgtattttcggaaggaaaagtatatcaatgtcgagcaagagggaattttagaaaacgaaatatttctccacttgtaggcgatgatgtagaatttcaaatagaaaataaaacagatggttacattttagatgtaatgtcccgggagaatgcccttgtgcggcctcccgtggcaaacattgatattgcaattttggtgttttcggcagtagagccggatttttccacgaatcttgcggatcgttttttagtagctattgagaaggaagatatcaagccagttatttgcattagtaaaatggacttggcatcagaatctgaaaaagaacagattgctgtttacaaagacatttacgaagcgattggttatgatgtttttgttaccaatgatgaaccggataaagaagccattaaagactatattagtgggaaaactgcagttatcgctgggcaatctggtgtaggaaagtcgactctcctaaatagcttaaatagtgatttaactttaaaaacagcagaaatttcgaacgcactcggtcgcggaaaacatacaacgagacacgtcgaactaatgccgattggcgatggatttgtcgctgatacgcctggctttagttcaatcgaatgggatgacttgcaacctgaaacattacaattttgttttccggaaatggaagatcgtcgtagtggctgtaaattccgaggttgcatgcatgacaatgagccgaattgcgctgtaaaaacagctgttgaagcaaatgaaatagcagaatttcgctacaaacactatatccaaattttacaagaattaaaaaacagaaagccgaggtattaagaatgggaaaaatagctccttcgattttaagtgcagactttgcaaatcttgcaagagatattaaagaagtagaaaattgcggtgcagactacattcatattgacgttatggacggacatttcgttccaatattacatttggtcctgctgttgttcaagccattcgcccagaaacaaaactaccacttgatgttcatttaatgattgaaaacccggatacatacattccagaatttgcaaaagcgggagcagactacatgacggcgcgtgtcgaaacttgttttcatctctatcgcacattacacttaatgcgctcttacggggtgaaagctggcgcagtgcttagtccagccacaccgatcgatgattaacaacgcgttttaaaagaactggatatggccctatttatgacagttaatcctggatatggcgggaaaaatccattcgggaagaactataaaagactaatgccgtgaagaaactaggggacgaaaaaggcctcaatctggaagttgaagtaaatggcggcgtggatcatgaaacagcataattatgccgtgatgctggcacacatgtgtttgtgggtgctcgttacatgcatggaaataaaaatcggcagacaccaagttgtctattacgtgccatctggcgcgagtaaactaatagtacggctgggacctcagctccagccttatttggtaaggaagaagggcactcaagtatgaaaatactaatatcattgctggcggacccgcgtccgaaactcctgtttagcacatataccgccgctgagattagtggatcgcttac

SEQ ID NO: 3622 - DNA, 1623 bp, Listeria monocytogenes 4b
  misc_feature (1)..(end): n can be any nucleotide: a,g,c or t/u
ggttttgcactcgtagcaaatgaagctatttttaaagttcaacaagatactcaatatctgaagccgtatcaaaatttaaaccgacctcaggaacaaatacctgaattaagtgaggaaggcgacacactattgaattttctggaatggacgaaaaagaacaacaaattagtggaaataatgactgtttgggacgagctaattatcgggacaatagaaacgattgaagcaaatttagtaatgattaatacccttgcaccagaagaatttgcatctgatgggaaatgctttatagaatgcgacaatattgttgatatttgtattgatacagcgcgactgaaatttattactgcttaactatttaacactaattataattaataaaattaataattcaaacaaaaagtaaaaattttacattttgcataactttttggaatgaaaacatgctataataattttgtaatattaggaaaaggaccagttttatctcaattaaaactggtccttttttagaaagagagggcagtgaagttgttagcggcaagttaaaaaaagagaaattagcaaggcatcgaatgaaattacattgaaaaagggagagcttgacacatgaaaatacatgcaaagcaaaaaaaatcttagnnagcctgatnnctattatgttattcctttcactaatacctggttatgcaccaatggcggaggagacgtcaactggggtagaagtaccagaaaagaaagcgggagaacaagcaccaacagaagtgaaagaagaaagaacagaaaatgaagtggtttttaataaccacgacgggagctttacaaaacaaatctttgcggattctatcaatatggaagttgatggcgagatgaaacgcatcgatgcgaatgtggagaaagaagcagattctgacatgattgttccaaaacaaactccattagaactaggcttcttagacaaaatggaagacggcgcatatcagaaactaacaaaagctggcgcagaagttacttttcgcttaaaaggagcacgtacaggcgaaaatgaacaagcagttacagaccaaccagcgacctacaaagaaaatgaagttacttatgaaaatgtatttcctaaaacagatttacgtcatttaacttttccacaatcagtaaaagaagacatcgtactacatgaacctaatcaagtagatacgtatgtttatcaaatagaaacaaaacttggtttagagctggcaaagaatggtgatgtgctattcaaaaataaatccggtgaaacaatgtatacgcttccgaaaccagttatgacagattccaatgtcggcgctgagaccggggaagcagcgttatccgagaatgtttcctttgaagtgaaacaactcaccaaaacagtctatgagttacaattaaaagtagatacagcatggctaaatgatgtcgcgcgcgaatatcctgtctatattgatccatctgtccggttagatgaagtgtataatgccaacatcaattcagcaaaaccaaccgaaaccaatatcggaagcaaactttgggattctggccaaaatgcttacacgttaaaacttggtaaatgggacaattcaacaggaaataatgccgcctatt

SEQ ID NO: 3623 - DNA, 1946 bp, Listeria monocytogenes 4b
  misc_feature (1)..(end): n can be any nucleotide: a,g,c or t/u
gcccatcaatttctacggttaaatataaaacatcaatattccattttgctgcttcttctaatgttagtccagcagttgaatctgtgataatttttatttttctcatatagccacatccagttttgcttattttatcttattataacatccccggcagtatacacaacctataaactagttttaagaaaagagaaagaaatggtatttgtctttctattctgtattttttagcgtatgatagatatataaaacacacaaaatttgtagaaaagtatggtgataaaatgaatgtcacttcttacaattggaaagaagaagtagccaatgctataacgcatggtattgggtttatccttagtattcccgcgctcgtcttacttataatattcgccgccggaaaagataatcctctttatttaacaagttttttaatttatggaatttccctcatgttgctttatatttgttccaccctgcttcatagttttaaaccttgcaaggcgcggacggtttttaacattatggaccacgcagcgatttatgtattaattgctggcagttatacgccatttgttttgattacgattcaagggacactcggctggacactatttggtgtcatttggggcctcgcaattgctgggattatttataagatattcatgactggcaaattaaaacttttgtcgacaagtgtttacttacttatgggttggatggttatgtttgccattaaaccgctttatgccgggctgactccaactgggttttggttacttgcaactggtgggattatgtttacagtaggtgctgttttttacagtatccctcgtgtcccgtatatgcacgcgatttggcatttatttgttatcgcgggaaccgcttttatgtatttctgtattttattttatgtttaaataacgcaatgcaaagaccttctccaatgcgagaaggtctttttatatagtatgtcacaattgagacttgtttttaattatgtcatactatataatgattagcatagcataataaaaggatgtgattcccatcgaactttctcctagacaacatcaaattgttgcctatgttcgcgcgaatgagcctgctacaggtgactctatcgctgcgcatttaaaactaacacgagccaccattcgagctgacttgtcaattttaaccatgactggcattttagatgctcgtccaaaagttggttacttttactctggtttagaaacgaatccaattcactttgatgaaattcgtcagttaaaagtagccgatattatgacacaaccatttttcgcaaaaaaagaaacgagtgtgtatgatgcgattgttatgctctttatggaagatattggtagtttatacgtcgttgatgaggatcttttggttgggcttgtctctagaaaagacttgctaaaaggcgcccttgctgatgcagatacaaaagcgacgccgattgcgacaattatgacgcggatgccaaacctcgttaccgttacgaaaaacgacactgtgttacatgccgcagaacaactcgtattccaccaaatcgattcgcttcctgttctagaaaacaccaaagtcgtcggaaaaatttcaaaaacccgtattactgcgctatttgtagatacaattaaaaaggtttagtaggaggaaaatatggaaaatccggttattatatacgttatttcagatgctatcggagaaactgctcaacatattattcgcgcggtaacagctcagttttcgcttaataagcctgcggacattcgccgccatgcttttattcgtgatgagagcgctttacttgaaacgttagaagaagccaaagcggcagatggtatcgtcgttcaaacgctcgtacaagctaagttagctgagtatgccactaatttttgtgtgcaaaacaatattccaaacgtagatttgttacatac

SEQ ID NO: 3624 - DNA, 2421 bp, Listeria monocytogenes 4b
  misc_feature (1)..(end): n can be any nucleotide: a,g,c or t/u
aaccatttattgaaggttccagacgcaattttcactacgaactggacaaatgctactgggggagacttagacttaatggctgcagggaaccagattgtaaccaatattcctgctaactatataagccagtttaataatggggataacctattagaattttacgataacaactatcaaaaacaagaccaactaactacaacacctggatataccattgatgtacctgttggaactgattttaatcaattaacaccagacaaaacgaaactcgcactaacatctggacgaactttactcgcgcaacacgaattcgagtattatgatgatggttcaagttcactaatccacaatggcgtagcagcagcaccgggtcaagcgaccattttcatcaagagcaagttttccacgcaatcgaacaaatttgccagaacacaagttacagtaaacatcactgcgctaaacggcggacctattacagtgaaacatgaagatacaacaggacaagaacttgcgccacctgtcattttaaatggtaaagacggggacccttatacaacgacacaaaaaactttcccaggctatactttagttgcaacaccagccaatcaaaatggtacattcaccatgaacccggctacagtcaactatgtatacagcgcaaatgattataaactaacatctactttcaaagatgcccaagggcaagaactgaaagcgccagttgtggatacaaaagattaccatatccaagacaactatactacaacagcagcaaccattccgggctattctttagttgcaacacctgctaatcagaacggaacttttggagctgggaatgtcacggttaattatgtatacaaaaaagacgattatacgctcacttccacttacaaagatacgaacggtcaggaactaaaagcaccagtggtagatgcgacaacgtatcattatcaagacacgtatacaacaacagccgcagttttcccaggttatacgttagtagcaacaccaaccaacgctactgggacatttggttcgtcaaacatcactgttcattacgtatatcaagcaaacggctatcaattaacttctacatttaaagatcaacaagggaagacgatctcaccagatgatgtcgatactaaaacctatcacgtgaacgatccctatacaacaactgccaaaacgatcccaggctacacattagtgacgacccctacaaacaaccaaggtaattttggaacaagcgatattacggttgattacgtttataaagcagaagattatacattaacttcgacgtacaaagatgcgcaaggtaaagaattaaaacaacccgttgtagatagtaaaaaatatcatattcaagacaactattctacaagtgcagcaaccattccgggttatacgctagtatcgacacctgcgaacgaaacaggaaccttccatacgagcgatgtcacggttaattatgtgtataaattaacagacttaaaattaacttcgacatataaagatgcgcaaggaacggagttaaaaccgcccgttgtagatagcaaaacgtatcatattcaagataactatgctacaactgcagctgtcattcctggctatacattagtcgcaacaccagcgaaccaatcaggtacttttggtagcacggatatccaagtgaactatgtgtatcaagcagttgcttataaactaacttcgacgtataaagatcaacaagggaatgatttagctttaccaaaagtagattcgaaaacgtaccatattcaggatggttacacgacgagtgatattgctattccaggttatacattagtcgcggctccaacgaatcaaacaggtacatttggcgcgagtgatgtaaccgtgaattatgtctacaaagccaatgactacacactaacttcaacatataaagatgcgcaaggtaaggaattaaaaacgccagtcatagacagtcaaaaatatcacattaacgacacttatactacgacaggagctactattccaggttatacattagtcgcagcaccagcgaatcaatcaggtacatttggcgcggcgaatgtaacagtcaactatgtatacaaagcagatgattacacattaacttcgacctacaaagatgcaaacggcaaagaattaaaagcgccagtcgtagacagcaaaacttaccatacaaaagataactattctactagcgcagnaaccattccaggctacacactagtggcagtaccagcaaatcaaacaggcatatttaatacgagcaatgtgacagtcaattatgtctacaaagcgaatgaatataccttaacttacactttgaaaaatgcgcaaggaacacaactcaaaccagctatcgcgaaaaaaggatccatcattcaggatggatatgcaactaaa

SEQ ID NO: 3625 - DNA, 3463 bp, Listeria monocytogenes 4b
  misc_feature (1)..(end): n can be any nucleotide: a,g,c or t/u
acataattagcttaactcgtttttgtttccttgtcaacaaaaataaaacaataaaaaacaacctaacttgaaaaattaggctgttactaggtttattcggatttttgattgtaaactttctgcatttcattatctaaatgacgactatatttatccacaaattttaacacttccgcatattgtgcatccgttacgtcttcgaaaactaccttgtcacgatcgaggaattcttgatgcaaatcatcgtggacttggttaatttcagcgcctttagctgttagacggaaataaatttctttcttattctccggtttttgataactttcaatatagcctttatccatcagcttttttgtaattttgctaatcgcgctctttgtcatatagaaggcttccgcgagtttcgttacattaggatcttcatttttggcaatgtattcgatgcagtggacttcagaaggtttatatccctctagcgctttttccatcttcactttattaatccaagcgagcttattaaataaatctctgacgttcgccatgacttgttcatttttatccatgccatgccctcctactctatctgcttgtagtatagctgttttttgtgtccggttcaactatttattgcctttcgtagctaaaaggggaacttgaaagcgctgtttgttaagagtgtgtaaatttccagtgttatcaatattatttcactgttaagatttgttatacttaacacataaactgtttggaaggggctgacatgattggagatataccgcaaaagcgcggcagaaacatttacacaactagaagcaacagaacaaggcttaacaactagtgaggtaacaaaacgacaagaaaaatacggttttaacgaactgaagaataaaaagaaagatccactttggaaacttttcctggaaacatttaaagatccaatggttattgttttagtcattgctgccttagtgcagttggttttaggcgaagtggttgaatcgcttattatctttttagtacttattgtcaactcgattattagcgtagttcagacgaggaaagcagaaagttcgcttgatgcattacgagaaatgtctgcgccggttgccaaagtaattcgtgatggctctaagcaaagtattcatgcgcgcgaacttgttccgggtgacgtcgttattttggatgctggtgatttcgtcccagcagacggccgtttgttcgaaagcggctctttaaaaatcgacgaagggatgcttactggtgaatcggaagcggtcgagaaatatattgataccattccagatgaagtggggcttggcgaccgtgtgaatatggttttcagcggttccctcgttgtatatggtcgtgggatgtttgttgtaacaggcacagcgagcgaaacagaaatcggaaaaatcgccggacttcttgaaacagcagaagcaaaacaaacaccactacaaagaaaactagaatcattcagtaaaaagctaggactcggtattttagctctctgtgtacttatttttgcagttgaagctggtcgcgtattactcggcgacaattcagcggatatggcaacggcgattttaaatgcctttatgtttgccgtggccgtagctgtagcagcgattccggaagcactttcttctattgtaacgattgtacttgcagttggaacaaacaaaatggcaaagcagcacgcgattattagaaagcttccagcagttgaaacactaggctccacaagcgttatttgtacagacaaaaccggaacgttaacgcaaaataaaatgacggtcgtcgattactatttacccgatggcacaaaagaaaatttcccggaaagtccagaaaattggtcagaaggggaacgccgtttgattcatattgcggtactttgtaacgattcaaatattaacagtgagggcaaggagttaggcgacccgaccgaagtggcgctaattgcctttagtaataaaaataatcaagattacaatgaaattcgcgaaaaattcattcgtgaaggcgaaattccctttgattcagatcgtaagttaatgtctacgcttcatacctttaatgaaaacaaggcaatgctaacaaaaggcggaccagacgtgatgttcgcgcgttgcagttatgttttccttgatggggaagaaaagccaatgacagaagaaattttagcgaaattaaaagaaacaaatgaagaattttcgaatcaggcgctccgggtccttgcttacggctacaaacggatgcctgctgatacaactgaattaaaattagaagatgagcaagatatcgttctagttggcttaactgcaatgattgatccgccacgtgaagccgtgtatgcatcgattgaagagtccaaaaaagctggcattcgtacagtcatgatcaccggtgaccataaaacaacggcacaagcaatcggccgtgacattggtttaatggatgccgatgatatcgcattaacaggccaagaactagacgcaatgccagaagaagaactcgacaaaaaactagaacatatcgcagtctacgcccgagtttcaccagaaaataaaatccgtatcgtcaaagcttggcagataaaaggcaaaatcacagcaatgactggcgacggtgtcaatgatgcacccgctttaaaacaagccgatattggtgtcgcaatgggtagcggaaccgacgttgcgaaagactctgccgcgatgattctgaccgatgataatttcgtttcgattgtggatgcggttggcgttggtagaaccgtttttgacaatattaagaaatcaattgcttatctatttgcaggaaacctaggtgcgattattgcgattttattcgcgctagtgctggactggattaacccgttcactgcgttacaattactatttatcaacttagtcaatgactccttaccagcaatcgcactaggtatggaaaaagcagaacctgacgtaatgaaacgcaaaccgagagatattaacgaaggcatttttgctggtggaacgatgcgcgccgttatcagccgcggtgtattaatcggtatcgctgttatcatctcacaatatatcgggttgcaaatttcaccagagatgagtgttgcaatggcatttactacgcttatcctagcacgtacattacaaacatttgcagctcgctcgaatgtccaaaccgcatttggcgcaggattcttcagtaacaaatacgtaatcggtgcggtattactttgtttcgtcctatacggaattacagtattaccaggagctcgagaaattttctcaatcccagcatcatttggcctacatgaatggtcgatagcagcggggctagcacttgcagcagttgtgatgatggagattattaaattagttcagaataagtttttcaaataaattatataaacacagaaatcactcgttttgcggaggatttctgtgttttttctttc

SEQ ID NO: 3626 - DNA, 3707 bp, Listeria monocytogenes 4b
  misc_feature (1)..(end): n can be any nucleotide: a,g,c or t/u
gcggttcttgcgcatttttgtaatccacaattaaaccgttttttgcagtatagttttctttcacatacgtttgaacagaggtggaagtgggtgtggtttcttttggtgcactcactgtttttttaggttctggacgaaggaaaaagaaaaatccggcgccaataaggataattaaaatgaaaattaagatgaatcgtttcattcgagttccccctgatgaacagcaatttgattgcggccgttttgttttgcttgatagagcgcttggtcagcagcttcgaaaagtgattcggttgttgaaaagttggaactagcagaagcaacacctatagatacagtaactttgccacttgcgggattataaggaaacttcgctcgttccacttcttcacggaaaaaatcagcaattagagcagcttgctctgtaccaacgttttgaagtaaaacagcaaattcttcgccaccaattcgtgcaaacatggttcttggcgggaaggtgcgatttttaagaatgctactaaactgagcaagaacggtattaccagcttgatgaccatgaaaatcgtttatttctttaaaatgatcaatatcaatgatgaaaagagataaagattttttccttttttgcgatttcgcaaaaatccaaccaaactgttgggtgaaaaagcgcatgtttggtaaattagttaaactatccgtcatcgcagtttccgtcaaattttggataacgagattacttttatcaatgtaattgcaggcgtaaaataccagtaaggcggttacaaagaatagcaggaaatactcgataatctcaaaaccttgcaggattcgtccttcgtcaaaattattcacgaaataataaagaatcgctgggaagtttaaaatgattaaagcaacaaatctcgaaaagcgttgttttttccaaaaagtaacaagtaaacacgcggcaaaaatgagcgtcatcaaaatgacatagcgactagtaacaggagaagcaatatcaaaactaatccgaccaaaaagcattactaaataggcgaaaatgagtggaacgcggccaccgaaaacacttgttaccatcaaaatcaaaatccgcatattcgtgtaaataacgggattattttcgtaagcaccttcataaataaaataaatacctgctaaaccatagtagacgcctagtaggatggaaagaaatagccgtctaccaccattttgaaaccaatttgggcgatattgtcttatttttcgaaaagacatcccttggataaaaaggatagcgagaaagagcgctaaactatctatgtatgaattaactagttcgaacaaatggactcatctcctttttactctcttaaacaactggttctgtttcgcgaatatgcacttggtttcgtccatttcgtttcgcattatatagcgcttgatcggctgcatttagtagctcgttcggatttggataatttctgccgtcataatttgcgataccagcagaaatagtaataacggagctagaagcaacaatcggaacatcaattttttcgactttacgtcggattttctccgccaaatgctccgtttcactgacattaatatttggcaaaataatggcgaattcctcgccgccaatccttgatatcactgtgtttggcgggaagctgatttttaaaagcatttgactaaaagtggataaaactccatttccgactaaatggccatatgtatcatttacccgtttaaaataatcaatatcaataataatcacacttagattcgatttttttaacgtagcatggttaaatgctgcttcgaacgccttttcaaaatgacggaaattcgtcaaacctgttagcgggtcaaggatggtggattgctgcaaatcataaattagcttattcgatgtatcgatataataagccgctgaaacaataataaacgtaataaaaaaagaaaccaaaaaatagagcatccaaacaggtaagtcatttatggtatacaataaatgtattttttgatgtaaataaaatagcataaggggaatcgcactaagtttgactaaaacgactttttgaacggaactaagtcgaagtttagcgacttccatgcatacaaagtgaaaaccgataattaaaaacgcgtaaatcaaattggcaaacagcgcatcaccgagaaaaagttttcctgcgacaattagtaatagcgcgatagtagcaggacctgccgaagaaaataaatgcaggacgattaaaatattaagtagcatatctgtataaatcccagaatctgtgccgggtaatccgcggataataaaataaacacctagaaggccgtagtaaatgcccagtgcataattaataatttcattagaaaatttaatttggaaccaagcaggctttttttctctaatagatcgcagtgccattccgtgaaaaaaaagcgctgataaaaaaagcgccatgctgttccataatgaatcaagaatatttggcataaaaaaatctcccatatctcagcataactaatcagctgaactgttaatataggcagaaggaaaaataaatgaatttttagctgagacgcagtacaaagaaccaaccaatgggcgaaagcgttctctaagaggatatgtggtaatgacgacgagataagctaaaatctgcctttttgtaattaaagctggatttcagtacaatggatagaatgatgtagaggatttttagtagtttgtaaacttaactattttcacatattattacaaagagttataaaaaagtcaacttgtgtcacaattgatatagaggggtgtaacgatgcaaaaaatagtgattatcggcgggggaattgttggagctagtgccgcctatttattgtcaaaagaaaacgtgcaagtaacgctaattgattcagatgaaccgggacaagcaacgcgtgctgcagccggaataatttgcccgtggctttctaaaaggcgaaacaaatattggtatgagcttgcaaaaaatagtgccgccttttataaggaattggcgggaacgctcgaaggagatactgggcggaattcgggctataaacaagtcggtgtgctcgcacttcgaaagacagaagaaaaagtaacagaactgtttaatcttgcgaatgaacgacacctcgatgcggaagttatgggtgaaattgccaagttgtcagaagaggaaacaaagcaaaaatttccgttagttaaaccgggatttggctcggtctatgtaagcggagcagcaagagtgaacggtagtttattttgtgaaaggctactttatgccgcaaaagaaaatggggtaaaaatcaaatcggggcgagcgcatttttctactgacggaaaagttcgtgttgacggggaagatgaacattacgacaaattaatcattgcagcaggcgcatggttaaaagaattgctagacgaggcgagttttcatacagaagttttagcgcaaaaagggcaattgctggaacttgattttagcgaatttcaaacggatgaatggccagtaattttaccaccgagcgcgaaatcaattgttccttttgataatgggaaaattatcgtcggtgcaacgcatgaaaaagctgctggcttcgatacgaaaccaacagcagaaggtaaggcagaaatactaacagaagtcagccagtttatggaaggggatttagcgagtaaagtgacccatgtggcg

SEQ ID NO: 3627 - DNA, 3103 bp, Listeria monocytogenes 4b
  misc_feature (1)..(end): n can be any nucleotide: a,g,c or t/u
atagaaggatatgagtatacatatgtttttcactaaagataaactacgaggccggctggatgaagtcgcgctttatcgttacgaaaaaacttatcctatccgtaatttccaagcagccgaggatatggatggagaaatcgctgcacgaccaaataacgtcttgtatgataatgaattgactatcggggaaaactggtcaggtagggaccgttatgtctggctcaaaacaaccattacttttccagacaccaaaactgacacgcgcttgattggctactttgactttgggaataccggcgacggccacaattccggctttgaatcactattatttgttaatggggaaccatatcaaggcgtcgatcaaaatcaccgcgaagttcttttcccagatagttttgctggaaaaaaggtggaactggtcttccgtttatggtccggactggaaggtggcggcactcctactatccagacacaccagttaaaagaagcctttattggatacttaaatctcgtcattgatgatttgtatttcacgagtaaagcaactttaaaaacactcgaccaactcgaagaaaaaaatccaacccatgcgccgctcctccaagcgattaatcgcgcttaccttgcaattgattggagtacaccaggatccgaacaaaaccttgcctcgatggcaacagccaaccaaatcttacaagccgcactggaaaaaatgccgaaaaactttcctatcaaagtggcggctgttgggcatacacatatagatgtagcatggctatggcgcttaaagcatactcgcgaaaaagccgcacgatcattttcgactgtgcttcatttaatggaagactatcctgaatacttatttctccaatcgcaaccgcaactttacgcctatatcaaagaagattacccagaaatttatgcgaaaatcaaaacgaaaattagcgaaggaaactgggaagctgacggtggaatgtggcttgaagcagattgtaatattcctagcggtgaatccctcgtacggcaaatgctctatggtcagaaatttttacgcgaagaatttggtaaaccttctagttttctatggttgccggatgtatttggctatagctgggctttaccacaaatccttcgtaaatcaggcattaagacttttatgacaaccaaaataagctggaatcaatataatcgtatgcctcatgatacgttccagtggcgcggaattgatggtacagaaattttgacccatttcatcactgcaccagaaaaaaatagccgcatttcaacctataatggcaaaatgacagcacgagaacttgttggtctttgggacaaatatcaagataaagaggtaaaccaagaattactacttgcttacggctacggagatggtggtggcggtgtgaaccgagaaatgctagagatgctccgtcgttatgatacgatgccaggaattcctgaagtaaaaccaaaaagtgctacttcttatttcaacgatttacacgaaacgataaatacgacagaccaatatgttcatacttggaacggcgaactttacttcgaatatcaccgcggaacttatacgagccaagcatttacgaaaaaaatgaatcgaaaaatcgaactcggcttacgaaatagcgaatggctatcggttatagcgaatctaaaacaaggaacgtcttacccaactgaaaaattagcaggcatttggcaaattttacttcgaaatcagtttcatgatattattcccggctcttccatcaaagaagtttatgacgacgctctaattgagtacacggaagctatgacggaaaataatacgttaatttctaatcaattgaccaatttaactacagatgccgatgaaaaaataacactttggaatagttccacttggtccagaccgcgatacatcgaaatttcacccgacaatcaatcgaaccatttagccttttatgatgaaaataatgctccactgcctgcgcaaaaattggtaaataatacctggcttatccagcatccaaacatacctgcgcttggtgctacaactatttctgttaaagaaacagcaaacattttagaacaaccatcttttcactataaaaataaccaattggaaacacccttctatcaaatcaaatggaataaagccggacaattcacgtccatttttgacaaaaaaaataaccgccaagtaatagcggaaaatgcgcgaggtaatgtatttcaattatttgaagataagccgatgtggcatgacgcctgggatatcgacctattctatcaagaaaaacaaaaagaaatcagcgcgctagattcagttgaaataaccgagaacggcccactccaattcactatgaagcaagtgctacattccgaaaatctcaaatcactcagtggattcatttttatcacgagagccctgaaatcagatttgaaaccgaggtcgactggcgagatcgtaaccagttgcttaaagtcgccttccctgtcgctgtgcatgccagtgaagctagctatgacatccaattcgggaacgtcaaacgcccaacgcactggaatacaagttgggattatgctcgctttgaaaccgttggacatcaatgggctgatctttcggagaaaaattacggagtcagtttgttaaatgattccaaatacggctatgatattaaagattcaactatccgccttacacttctgaaagcagccggttatccagatccagatgccgatttaggaatccaccaattcacttattcgctctatccacatcaaggtgattttttagacggggaaacagttcaagcagcatgggaattgaataatccaattttcacttccaagggcgaaattgaaactttttctcttttccaagtgaccaatccttacgtgatgattgatagcattaaacaagccgaggacggtgatggtatcattttacgattgcatgaatttgcgggaactcacggcgaagtaacaatcacaagtggttacccgatcacctcaatcacagaatgcaacttacttgaggaaaacgaaacatcgctttccaatccgacctttgcagtagctccatttgaaataaaaacatacc

SEQ ID NO: 3628 - DNA, 3150 bp, Listeria monocytogenes 4b
  misc_feature (1)..(end): n can be any nucleotide: a,g,c or t/u
gaaggcttacaaaaatttggtaaagctaacgacatggaaaaaggtacagatggttacaactacttgcaatcagcttctgaagcagactacaaaacaaacttaaacactgctgttcgtagcgattatgatttaatttatggaattggttacaaactgaaagatgcaattgaagaagtttctaaacaaaaacctaaaaatcaattcgctattgttgatgacacaattgatgaccgtgataatgtagtaagtattggatttaaagataacgatggttcttatctagttggtgtagtagctggcttaacaacaaaaacaaataaagttggatttgttggtggagtaaaaggaactgttatcgaccgttttgaagctggtttcactgctggtgtaaaagctgttaatcctaacgcacaaattgatgtacaatatgcaaacgatttcgctaaagcagacaaaggacaacaaatcgcttcttccatgtattcaagtggagttgacgtaattttccatgctgctggtggtactggtaacggtgtctttgcagaagctaaaaacctgaagaaaaaagatcctagccgtgctgtttgggtaatcggtgttgaccgtgaccaatgggacgaaggaaaagttacagcaaacgatggcaaagattacaatgtaactcttacatctgaaatcaaacgtgttgatatcgctgtagaagaccttgcaactcgtgctaaagctggagatttcccaggcggaactaaaattgaatacggtcttgataaagatgctgtagggctttctgaacatcaagataatatttctaaagacgttcttgctaaagtagaagagtacaaacaaaaaatcgttgatggggacattaaagttccagaaaaaccttgattttatagttataaaaaatgagtaatatgaacgaagtaaaaccttttatgaaagtcggtatcaaacgtaccggctttcataaaaaaataatttgtaagcgttttaatttgataggtaaacccttttactaaaagaaaataatcggtatattggaatttatgattgcaatgaatgccatttagaaataaaataaggagatggcttttttaatagcttaaaaatgcaaggtaaactttcgtacatagatggtattataaatcgcattttacaacataccaaagtatttaagctgaaaagtcattgaacaacaaacggataaaaaactcggaaccttcttcgggaggaagtacggggagaggcggcgtccttcgagagaatcgcgcgtgtggctgtttttccagtttgaaccagacgacaaggggagtgaagaagtggactttgttattgaaatgttaggaatcaggaaggaattctctggatttgtagcaaatgataacattaccttacagttaaagcagggagaaattcatgctttgttaggtgagaatggcgcaggtaaatctacgctaatgaatgtcttgtttggtttatatgaaccagatggtggcgaaattcgtgttcgtggtacgaaagaaaatatcaatagcccgaacaaagcaaatgagcttggaatcggaatggtccatcaacatttcatgttagtggataaattcacggttgcagaaaacatcatccttggtaaagagccaagcaaactcggtgttatcgaaaagaaaaaagcgattgaagaaattaaagaaatttctgatcgttacggcttacgcgttgatccaaatgcagttgtacgagatatttcaatcggtatgcaacaacgtgtggaaattctaaaaacgctttaccgtggtgcagatatcttgatttttgatgaaccaacagctgttttgacaccccaagaaatcaaagaattaatccaaattatgcgttcccttattaaagaaggcaaatccatcattttaatcacacataaactaaaagaaatcatggatgtttgtgaccgtgtaactgttattcgccgtggtaaaggtatgggtactgttaatgttccggaaacaacaccacaagatttggctaatttaatggttggtcgtgaagtgatctttacaacagagaaaatagatgccaaacctggcaaagatgttttagaagtaaaagatttagttgtgaaagaaagccgcggagttgaaagtgttcgtggacttaatttgactgtcagagctggcgaaatcgtcggaatagctggagtcgatggtaatggtcagagtgaacttatttcagcgattgcaggtctttctaaagtaactagtggtagtattcttcttaatggcgagcatatcgaaaacaaaaaacctcgtaaaattacggaagctggtttaggacatattccagaagaccgtcataaacatggtttagtactcgaaatgtctctaggagaaaatattgctttacaaacatattataaaaaacctatttctagcaaaggcttcttaaatcataaagcaatgtacgactttgcgcgtgagttaattgaagaatacgatgttcgtgcaagtagcgaatacgtagcagcaaaatcgctttctggtggtaaccaacaaaaagcaattattgcaagggagatacaccgtaatccagatttcttaattgcggctcagccaacacgtggactagatgttggagcaattgaattcattcatagacgcttgattgaacaacgagataatggaaaagctgttttacttatgtcgttcgaattagatgaaatcatgaatgtaagtgaccgtattgcggttatatacgaagggaaaatcgttgctattgttgatccgaaagaaacaacggagcaagaacttggtctgatgatggctggttcatccaaacaggaagcggaaatgggggagaaagagcatgtctaaacgactacaagcattagttatcccagttacagccgttatccttggacttatctgcggtgcgattatcatgcttatttttggatatgacccaattgctggttattcggctctgattcaaggtgttatcggagaaaatttctatattggtgaaacaatccgccaagctacaccgtacattttagttggtctatctgtgcagttgcatttaaagctaacttttcaatattggtcggctttccagcacacgtcggccgtcgagcagctgtaggtgccgacagggnagttttag

SEQ ID NO: 3629 - DNA, 3125 bp, Listeria monocytogenes 4b
  misc_feature (1)..(end): n can be any nucleotide: a,g,c or t/u
tccaccgagttcagcaacttcttttgtaaaagcaattgtttcagctgtgttattggagcctgttccagcaattaattttgcacgtccgtcatttgtttcaattacttggcggaataattttattttttcatcatgggataaagttggagattcgccagttgttccagcgattactaaaccgtctgagccatttttgattaagtgattcacgagatgatgaattctttttttgcatactttatctttctctgggtgaattggtgtcaccattgctgtaattactttccctaaatccatctttcatttcctccttacttaatttccaaacaaaatacgtcatgaagggcattgactgctgaaattaagtcctcttcttttactaatacccaaatagtagtatgactatccgctgattgtaaaatagggatatttttttcagataatgcgccaacgatttttgcgtaacaccgggaacgcctgtgattccggcgccaacaatagaaactttcgcacaagcttgtcgtacagttgtttgtaagtctgcatcttctaatagttgttttactacatgagatttttcttctggcaccgtaaaaatgacagagttggtagagatgttaatgaaatcaaggctgattcctgcatctgctaatattttaaaagcgagttgttgcgcttttaccgaatctgtttgtacggatatttgtgttaaattggttacatgtgctacaccggttactattcgttctttcacgtcaaaatgatctgaatcattggttaatgaagtaacaagtgttccagtgctttccaaataagtagaacggattcgcattggtatttttgcagtcatcgctatctcaactgcacgtggatggatcacttttgcaccttgatacgccatattgcttacttcgttgtaacttactcgtggtagtgaacgtgcgtgttctacaatacgtggatcggctgtcatcattccatctacatctgtaaagatatcaatatagtctgcttgtaacgaaactcctagagccgctgcggatgtatcacttcctccgcgtcctaatgtggaaatatccccatttgcagtaataccttggaagccagcaactacagctacatcaaggttcgttaatgcatctttcaaacgagctgtatccacttctgtgatttttgcatttaaatggtcgtctgatgtaatgatgcctgcttgaccaccagaaaacgcctctgctttaatatttgcttcttttaacatattggtaaatacagatgctgaaatagtttcgcctacagagagtaaagtatcttgttctcttgctgttagctttgtatttttagcaccaataagttctaatagtgtgtctgtcgcataaggatctccgtatctaccaatggctgaaacgacaacaacaactttatatccttcttttagtacttgtttgatatgattgaatgccatcaaacgtgatttttcattttgtacggatgttccgccaaatttttggacaataattttcattacttacacctctaaataatcgctagtttaactaaactttcagctatttgaatcgaattccatgcggcaccttttagtaagttgtcagaaacaatccacatatgaaaacctttaggatcgtcaatgtcagcacgaatacgaccaacgaagacttccttcttacctgcagcttgaacagcttgtgggtaaacttgatttgctgggtcatcttctaggacaataccaggtgcgttttttagttcattttggatttctttagcagttatgccttctttatccacttcgatataaacactttcagagtgtccgctaactactgggatacgaacgcacgtagcagaaacttttattgtgttgtcttccatgattttttttgtttcattgatcattttcatttcttcgtatgtatagtcattctctgtgaaaacgtcaatttgtggcaatgcattaaaagcaattggataatgttttttgtcccctttaacgggcatgatttgtggagtgaattctttgttatctaaaactgctctgctaccatcttttaattcttgaatcgcgcttacaccagagccagaaacagcttgataagtggaaacaataatacgatttaagccgaatgcttctcgaatcggttcgagggctgctaccatctgaatagtggaacagttaggattagcaataatacccttatgtgagaaaagtgctttttcattcacttctggaacgactaaaggaactgttggatccatacgatatgcactcgtgttatcaataacgatagctccacgtttaactgcttctttcgcaagtgctttcgatacagaaccaccagcgctaaataaagcgatatctacgccttcaaaactttcaggtgtggcttcttgaatagttacttcttcaccacggaaggatagtttttttccagcagaacgaatagaagacaagaatgaaacttgctttatcttaaaagtcgccgcctcttctagtaattcaatcatttgggtaccaactgcaccagttgcacctacaactgcgacatgatagctttttgtcatagtttacaattcctccttcaatttaatcctcgtattcctgcctaaaaacagaaatctggttaattttacacttactttatcataccataaacaaagccttttcgcagttttttctacgcattagcaactatttttttaaattgtttgttagtttgaaataaaaaaaccacttccaaataaatgaaagtggtttttgattaattttcggtttgttctgattgtgctttcgcagcagcttctttgttgttaattggttgttctacttttgaagtatcttttttcgattcagagcgttcttttttaagttcgaagtatttgtcgaatacttctttggagattttcatatttgttttttggtccgtaccatatggacgataaatccaaggaacaacaacggaaattgctatttccggtttttccactggcgcataaccgacgaatgttgtattccaaacactggccattttgttaccttcttttggtccatcatagaacgcatctgcggtgcctgttttaccagcgacatcgtaatcacttgaagtgaaaac

SEQ ID NO: 3630 - DNA, 3131 bp, Listeria monocytogenes 4b
  misc_feature (1)..(end): n can be any nucleotide: a,g,c or t/u
ataaatttcttttatataactagaaaaggctttcaacagctgtgttaatacagtttttatcgaagtagggcgggaggcaaaaggcagaaaaagaagcctagctaatatgctagacttccgttgtgtttgcaacttcttctaaaaaagtgtcgacaatgctgtcacgtttgtcaacgaaatttgggttggctcggcttggatgaacgcggttagaaagaacaattaaactggcttggtgtttcaaatcgagcaccataaaagtaccagtgaatccggtatgatataagacagaatcaccgcgtagatcccagcctagcccgcgacttctattgagaccaggggtatgatttatttgcatcagttgccaagttttttcagaaagaattggagcaccgtgttgtagcatgagcgcatctcggaatttggaaagatcgcttagggtgctaaaaagtccggcatggcctgtgcctgatttggcagtccaagctttaaaatcatggacatcaccttgaattaaaccgcgcgtttggtcaagttcggttgggatgacttgttttttatttgcgggatgaaaacttgtatttgtcatactcaggggttctaaaatattgttttggatggctttttcataattgccgtccattttactaatcaaataaccgagtaaaagaaaattagcatcggcgtatgtgactacggttccaggaatattaatttgtggcgtggcatacacataacgaataacgtcctctcggttgttcattgagaagttagggatattttgtgcaaggccggagctatgtgttagtaaatgtaaaatcgtaacattattgtaccggaaatctggtaaatacatttgaatagggtcgtttaattggaatctttgttgttcgataagttgcaaaatacgagtagtcgtagcaattactttggtcaaagaagcgatatcataaatgttttctgttgttcttggtaagatttctgcttctggaaaaacggattttaatcccatgatgttattttcttccagataattagtttttatttgataactaattcccggagtggagccgttttggacgagttgatctagtgattgcttcgttttgtaaaacatatctaaactcctttataaataggttgccacatttcccgctcgatagcttcggtgacattcgttaattcgacttgatggatgttttctttaatagcttggttagcgacagcgatggctactgcacgcgatgtttcgcgaagggtgcgcacatgtggtagaagggctgcgcctgctttgtttggtgaaatctgctcagcgacagccatggaagcagcagcgagcataccatctgtaatatatttcgcacgagtgacaagagcacctagtccgagccccggatagagaagtgcattgttcgcttgaccgatttcataagtagtatgttgatattctactggtttggaagggctacctgtaacaataagcgcttttccatctgtccactgaattaaatcagaagcagttgcttcggctaattttgttggattagaaagtggcaaaatcgctggtcgttctgtatactgggtcatttttttgacgatgctctctttaaaggcaccggtgacaccagaacagccgattaacattgttggatgaactgcttccattaagttttctaacgtatctgtgggcacgttagaccactcagtcgacggatgtgcatatttcttttgcccggtagttaagtcggtcatattatcaagcactaaaccatttcggtcgactaaataaaaatgctttttcgccgattcaaaaggaagaccagtttcacgcatccactgagcactaagttgatcagcgataccgattccagcagttccagccccgaaaataataatcttttgctcgcttaatggtattttggaaacttggatcgtcgcaagaacagcagcaaccaccatggccccagttccttgaatatcatcgttaaatgtacaaattttatcgcggtaattatgcagaatacgacttgcattcgcgcgtccaaagtcttcccagtgaaggatggctttcgggaaaacttctttcataacattaacaaaagaagcaataaaagcgtcatattcactttctgaaaggcgggggcgtttatttcctagatatagtggatcgttaagaagtgtttcgttgttcgttccggcgtcaataacaactggcagaacacggtctggtgcaagtccagctgcaaccgtataaaccgctaattttccaacagcgattttcacaccattcacaccccagtcgccaattccaagcacaccctcaccatctgttataacaatcatatcaatattcggattattttttgcgtagttttttattgatgcgcttaatttttcgggtgcaaaggcatcaataaataaggcttcatccggcgcagtgtattctttatggtactggataactgcgtcgccgatagttggtgtataaataattggcaaatagtcagtcacgttttttgttacgacataatagtagagggtgcgattttcattatataagtttgttaaaagctgatgtttatgtaaaggtgtttctaaattttctatttgcgtctcgatgcgcacggcttgttgttcaattgtttcgataattggtggcagtaatccgtccaattgatagcttgctctttcttcttttgaaaaagcggttcctttatttaataatggattattcatatagtcaaaacctggttttacagtcatttttcagcactcctttttattctattctattttacatgggggaaagaagaataacaactgattccaaacaaaaagaaaacctgacaataagcagattttcttttttatttttaatgaaaataataaccttgcgcatagggaatgccgatttcttgaaggaattctagctgctcttttgtttccactccctcgacaattaaggatttatgatgctttttaacataattatgaagttgctcaaagaagatttttttgccatcgctctcaaataaatctcgtagtaataagcgatcggttttgacaaaatcagaatggtgcgcaaaaacgcgatgcaagtccgcataaccggagccaaaatcatcaatagc

SEQ ID NO: 3631 - DNA, 2528 bp, Listeria monocytogenes 4b
  misc_feature (1)..(end): n can be any nucleotide: a,g,c or t/u
gaggcccctctagcatgccatgctctgagccggcccgcccacgtgtgctggaaagtaacattgaaggctgttttagaaggccggagcgcaagttttaaggtgggtgttcgacctggttgaatgcctatttaaaacaaacctcctcctcttaaaacagcttttttcattagaaatttaattaaaggatgggaaacaatgaaatcatttcagttggtggcaacggctgcttcgggtttagaggcaattgttgggaaagaagtagcgcgtttaggctatgacccaaaagtagaaaacggtaaagtatattttgaaggagatttatctgcaattgctagagccaatctatggcttcgtgtagctgaccgtgtgaaaattgtggttggtgtttttaaagcaacgacatttgatgaactatttgaaaagacgaaagctttaccttgggaagattatttaccgcttgatgcacagtttccagtggctggtaaatcagttaagtcaacactttatagtgtgcctgattgccaagcgattgtaaaaaaagccatcgttaaccgtgtcagtgaaaagtatcgtcgttctggtcgtttgatggaaacaggcgcgttatttaagttagaagtttctattttaaaagatgaagtgacgctaacaattgatactagtggtgcgggattacataaacgtggttaccgtttagcacaaggtagtgcgccaatcaaagaaacaatggcggcggcacttgtactacttacgagttggcatccagatagaccattttatgatcccgtttgtggttctggaacaattccaattgaggcggcactaattgggcaaaatattgcgcctggttttaaccgcgagttcgtgtcagaaacatgggattggatgccgaagcaagtttgggcggatgcgagacaagaagcggaagatttagctaactatgatcaaccgctaaatattattggtggcgatattgatgctcgtttaattgaaatcgcaaagcaaaatgcggtcgaagctggccttggtgacttaattacctttagacaactacaagtagctgactttcaaacagaagatgagtacggggtcgttgttgcgaatccaccatacggggaacgtttagaagacgaggaagcagtgcgccaactttaccgcgaaatgggtattgtttataaacgcatgccgacatggtcagtatatgtccttacctcttatgaactttttgaagaagtttatggtaaaaaagcgacgaaaaaacggaaattatacaatggttacttgcgcacagatttatatcaatactggggtccaagaaaaccacgtcctaaaaaagaagattgattgaatggaggagttaagtttggtagaaacattagaagaggaatttttagcgtatattaaaaagatggaagcactggaagaagcactggcattagtttattgggatcttcgtacaggcgccccgtcaaaaggaatggaaggtcgctctgatgttattggcgttctatctgaagagattttcaatatgcaaacatctgaagaaatggctgcttttattgctggacttaaccttgataaagaaaatctatctgaaatcactcttaaaactttagaagaatctcaaaaaaaatatgatttaaacaaaaaaatcccaagtaaagaatacgcggaatatactaaactagtagcgcaagcagaaacggcttggacaacagctcgcgaacaaaatgattttgcagcttttgaaccgttcctaacaaaaatccttgaaatgaagcgtaaatttgttgaatattggggttatgaagaaaataaatatgacacattacttgatcaatatgagccaggtgtaaccgtatctgtgcttgattccgtatttgaaaaagtacgcgacggaattatggcgattcgcgaaaaaatcgcaaatgaaggcgtgaagccagatgcgacgattttaaataccaaaatatccgaagcaaaacaaaaagaatttagcattcgcattctgaataaaatgggctttgactttgaagcaggtcgtttagatgaaaccgtgcatccttttgcgactggtttaaatactggcgatgttcgtattacgacccgttacaatgaaaatgattttaaaatggctgtttttggtacgattcatgaaggtggtcatgcgatttacgaacaaaattttgatgcagcacttgtaggtactccacttgcaaacggcgcatcaatgggcattcatgaatcacaatcattattttatgaaattattatcggttctagtttagcattttggaaaagtaattatgctgacttccaagcgattacaaaaccggcttttgatcatgtgactttggaagatttttaccgcgcagtgaacatctctgaaagttcgctgattcgaattgaagctgatacattaacttatccacttcatattatgattcgctatgagcttgaaaaagcacttattaacggtgaattagaagtaaaagatttaccgaaagcatggggcgactaatacgaag

SEQ ID NO: 3632 - DNA, 3423 bp, Listeria monocytogenes 4b
  misc_feature (1)..(end): n can be any nucleotide: a,g,c or t/u
aaactagctttaatggttttgtcatggttatccctcatttcttctcttttatcgtacaaaaaatctccttattaagcaaattagtagtataatgaacagatagtcgaccaaaaaaggaggctactcatgttatggaaggagtaggaaataaagtgattgttttagcaggaatgattggtgctgggaaaagtagctatacagagctaatcgcaaatgaactcggaacaaaggcattttatgaaagcattaaggataaccgcatccttgaaatgttttatgaagacccaaaaagatgggcttttgccttacaaatatattttttaaatacccgctttcgtagtattaaagctgcgttaacggatcaaaataatgtgcttgatcggagcatatacgaggacgcgctttttacgcaaattaattttgaagaaggtaacatttcggagcctgagatggatacataccttgatttactcgacaatatgatggaagaacttgcttatatgccgaaaaaagcgcctgatttgttgatttatttgcgaggaagtttagacactgtattgagccgaattgctctccgtggtcgtccttatgaacaaacctttgataatccaggtttacttgactattacaagcatctgcatagtcgttatgacagctggtttgagtcttatgataagagtgaaacccttgttattaatatcgacgaaatagatattaatcaaccaaatgacgcagattatgtcatgcaacttattcatgaaaaattaaaacgctaaaacaggctttttgctgttttagcgtttttttaattgatttcgcctaattcttttttctttttccgaatcgccagtgtagcgttaagctccccgccaatcatcaaaataatgccggtcaaataaaaccataacattaaaataataattacaccgatactgccatatgttgctgaatagttgccgaaattatttacgtaatacgcaaaacctagcgaagcaactgtccaaccgattgttgaaaaaagcgctccaggtagaacactaatcaacgtactgcgccggtttggtgcgacccaatataaaaaggtaaatacgacaaaaataacgatgagtgtaacggtccaacgaagattattccaaaagctaagaaagtcttcggagaaattcaaatgattaattaaaaacatccctatttgttgtccaaatacaagtaatagcaaggttgcccctactgtcgcaagcattgcgagtgtgaaaaacatcgataataatcgttgcacgacgtagtttcgcttattggttacgccatacgctttattgagcgatttcatgaccgcattcatgccattcgaggccgaccataaagtcgcgataatcccgatagaaagtaatccgccatttttctgcgttagtaagttatttaaattttcttctaaaaagtccataatctggtctggcgcgaattctttaatcatattaaaaacggaatctttatcaatatgaagataggcaagtaatgttgccgcgattaagagcattggaaaaatcgaaaacagcatataataagctaactgtgctgcatttcctgaaacatcatttcgacctactctcgcacttactgtttggccaatttgaacaatcccgtttttctttgtatatttaactacttttttccacactgataaggccccctgttctagtcattcgtctggaagtttttcttctactatggtaaaattttgtctattagcttgaaaggagcaaaaagatgaatcttgaaaccccttcacaggaaaacttgaattttatgttaaccgaaattacaacgaaactaaaaatggtgaatgttggtgtttttgaaaatctggagcttgactctgttgattataacgcacttatcgatatttatcagctaattaaacgtaaatccaatttcagcccgcgtgagatgcaattatttgcagaagaattacgccggattcgcaaataaaacaaattccagccactttttagtggttttttgtttggaaataatcggtaccaaaatccactaaatcacgcatatcataaattttcgtcggcgctccgataatcgtcgttgggtgaaagtcacgttctttctcataagcgcgacctaacgcgataaacacttcactattataatcaatttcctgatacttctcccaaatgatttcgccattttttagaaaagctgcctggttttcgatgagcggaaatacattggagcgttcttccgctaaatgaagcgatgtattgttattattatctaccccgaacaagataattttcgcatcaagttgatacattttccctagcggcgattcatctcccatgcttttcgcaagtggctggttggcaagaatttgttttttatcttttccccaagcacaaaacgaatggtatggatgaaaacttcgctcaacatctggcatagtacgaaatgtttcggcaatgacacccattccacgagttggtgttacaagcggatcaaatggcggtgtttctctgcgaattattttccaccaactttcaggaactggcggattttcccactttgcaggatcacttaattgacctgtttgagccggcattactatattgcctgattcaccaaccagttcttgcaatgccaaaataacggtaactggaccaccgcaaatccagtgtgcttttgacatggaggcatgaaaaataatcgtatctccctttttaatacccgattcttgtaggtccgacacgattttttgttttgttgctggcttttttgttcgccagatagccattttttctcccattgtatgtcaccgcctctaaaaataaagccagatgcctagaaaaaaacggcaaactaaaagcagctgtgtgaaacttgtgcttttacttgcattctgttctaaatgcatctggctaaatagtttaattaatcgttttcgccttgatacgttaaaatttctggaccatcttttgtgattgcaaaagtatgttcatattgcgcagacaaagagccatcaacagttctagcagtccagccattatcgtccattttggctttccaagcacccatattgaccattggttccactgtaataaccatgccttctttcaagcgaggtcctttgccagctgtaccgtaatgtgggatatctggtttttcatgtaaagttggtccaacgccgtgaccaataaactcacgtacaacagcaagattttctgattctacatatgtttgaatagcatgaccaatatcgccaactcgtgcgccaacttgtgcttgttcaatccctaaataaagtgctttatgcgttacatccattaaatgtttcacatcatctggcacttcacctacggcataagtccaagcagaatcagcaagtgcaccgcgataattcacgaccatatctactgt

SEQ ID NO: 3633 - DNA, 2690 bp, Listeria monocytogenes 4b
  misc_feature (1)..(end): n can be any nucleotide: a,g,c or t/u
taattggtttgatgactcgtaaattgcgcacattttgaatgaagcggtttgtgaatggactggggcagaaacatttgtgatgaacgcaggcatttttatgacagactttgaagcagggattgtgacggaatttgatatccaccaaatgttaccgcatccgctcaacgcgattgctttatcgatgtctggtgaggagcttgaaatacttattgacggaatctaccgaaagaaagctgaactgcaagatattccgcttcgaggttttggtttccgaggcgagtattttggcaccgttttgatggacagagctggttttgatgcggaaaatcaagtggcactttttgataataaaccgattgataaaacgcgggaataccggattgcgacgcatgatacgtttgtgttcgcaccatttttcccgatagtaaagcaaattaaacgaaaagaagtatatacaccggagttactccgagatattttaaaatggaaacttaaaaaaatgtacggacaggaggaagacaagtgacgattacgattcaagatttaaactacgagattatcaccaattatcgcgacgcttttgacgaggagaagttaaatgaacggtttagcgatattcttgggcgatatgattatatagtaggcgactggggttacgatcaactccgtctcaaaggcttttttgaagacgataaccgcaaagccgcatacgacaacaaaattagcacgttaaaagaatatatttacgaatactgcaattttggttgtgcgtattttgttattaaaaaagtaaaatagtaaatgaggtagtttggaattgaagaattataaagcgtatttaattgatttagatggcacgatgtatcgcggggcagaagttattcctgaggcgatcatttttatcgaaaacttaaaacgtgcgggaattccgtatttatttgtaacaaacaattcaacaaaaacacctgggcaagtagcagaacatttaactgacatggggattcaagctgtaagtgaggatgttttcacgacgtcacaagcaaccgtgcaatttatgatagaacaaaaacgcgaaaaatcggtttatgttatcggtgaacgtggaataaaacaagaactaacagataatggatttgaaataacttctagtaatccagcttttgttgtcgttgggcttgaccgggaagtcaattatgagaaattttcaaaagcagcgcttgcggttcgcggtggagcgatgtttatttcgacgaatggcgatgcggcaattccgacagagcgtggtttgcttccgggaaatggttccatcacatctgtcgtttccgtagccacagaaacagcgccagtttttattgggaagcctgaatccattattatggagcaagcactcgcaaaactcggtgtccataaagacgaggcaatcatggtgggtgacaactacgaaaccgatattatggcgggcatcaattatggcatggatacgttaatcgtacacactggctttacatcaaaagaagcattattaacgaaagaaatccaacctacatacgctgtaaacaaactaactgattggaaatttaactagaagagcggaatttttctgctctttttttaataaataggaggttagaaaatggtctcaattcaaaagttaacgaaagacaattttcacgaaacagcaaaattagaagtgcatccacaccaaaaaacatttgtcgcagaaaactggtattccattatcgaagcaagttttgaagaaacgtatcattcgcttgtgatatacgcggataatatgccgggtgggtacgcaatgtatggaatggatacagatgatggtgagttttggttggtacgatttatgactgggaaagagcatcaaggtaagggctacggcggagatgcgctagaacaaattatcgagatagtgaaaaatctaccagaaaaaccagcacgtctgcgtctatcttacgaaccagataatacggtagcagagaaattttatgcaaaatatggatttgaaaaaacgggggagatcatcgacggcgaggcagtggccgacttgtggttcaaacgttaaaatcgggtatagaatggggataaggaggatgctaaatggacatttttaatgatttctttgtgatatttttaattgcagcgactgcctttttcgtggcaagtgaatttgccattgtcgcaatccggaaacctactgtcctgcaactagtagcctcagaggacccgcgagcgaaatatgtaaaaaaagttacttcgaatatgaatgattatttggctgcctgtcagttaggtaatacacttgccgcacttgctatggggtgggttggtgaagcaacaatgcgtggctggttggagccgttatttttaatgttacctgtaccagaatccgttgaaaagccgatttcgatttttgtttcgtttattttaattacattcttaaatgtggtactcggggaacttgctccgaaaacatttacaattcaaagcacagaaaaagtagctctgtttatcgcgcgcccgcttgtgtattggtatcgcctgacttttccactcaattggcttttaaataactcggcgaatttaatcacgcggatgtttggggtaaaacaaacagttgatgcggaccaaatgacaccgaccgaactgaagattatttttgaagatagctataggca

SEQ ID NO: 3634 - DNA, 2402 bp, Listeria monocytogenes 4b
  misc_feature (1)..(end): n can be any nucleotide: a,g,c or t/u
atcgctatgtgcaattgatggaaaccattgaaatttttgttgatgcagcaattgcgaaagcagctcatttcggttatgaaatggatttggagaaattgtatgctcgtatgcaagagatggagcgcctttcgtatctaactgacatagaaaattattatgatgcacatcatcgctttattctttgtttaatcagttttgcggaaaatccctatcaagtccgtatcgtcaagcaaattttcttccaaatgattcatttttcagatggaattaatatgtttaaatccgtcgaaattagagaatggactaacaagaaaagtaaccaaatttgtgagttgctcgcagaagaggaaactgaattagccaggaaaacaattaagtctatgtttgcggaattaacgattcaagcctacagataaaaagagctgtcacaaaagtgacagctctttttgatataaataaaaaccgtttttcttaccagaaaattgaaaaccatagcggacatacatttgattgagcgtctcattgctttcgatgcaatctaaccgaatgaaaggaacggacatttcgatacctaatttttccgcaaaataaatcatttgtttacttaatgaaattccggaaaatgctcgagaaaccataatccggtgtaaataatatgctttatcaattgccaaatcttcccataaatccgtatcccaatcacttggcgtttttcgaataatcattgcgcccgcaagtgcacccgcttccgtttcaaaaagggcaacttcaccaagttcaatacgttgttcgatattatggacatcaaaaccatgcaaaatatcgctccactgggttgaccccgactcttttaaccagcgagctgtatctatcattaagtcatttattttcagacggtccgttggcgcagcaaagcggactagaaattccagtccgccagccgtaattttattttggttcattgttatcttttggagcttccggtgtttcgggagcttccggagtctcgggtgcctcaggagtttcaggaacttccggcgtttctggtgtttcaggagcctcaggagcttctggtactacaggcgtttcgggttcttttgttgcctctggtccgaagccttctggatgtgtatcttcagcaaatggatcagcttctgttgttccaaatggatttacttcttcttccacgatgaccgtttcttctgtaaaagtgccttctgttgctgcgtataaatcatcgtagaacacagcgatagaagtgattagataaggataaacataaagcgaaataccaagagtaattaaccacgatgctaagattaacacgagtccaccaaacgtagcaccggcagcaagagctgaaagtacttcagcaggatcagctgtataagatgtagtagccattccgccagcaacgataaccgtacctgcaatcgctacagcaagaggaattaaataccataaaaggaatgtaagagatagtccaaaaagtctacctttgtgtccattcatcatgtggcggctttctgtaatagcatctagcgcagaaatatttgggttatctcgtaagataaagaatgtttgtgaataagagtaagttttaataattcctggtacgattaagagtaagctccataagaatgtgaaaatagagattagtaagtaagctaagaccgtacgtccaaattgtttaaaaccactaaacatataagcaacatctggttgttcacggcggctaattgctaggtacacccaagcaaccccagtataaagtggtccagttagtaggaatattgcaatccaaccaatgactgggatccaaccaattaatcctccaccaacagtttcgattagccaagcaagcacaaatattccaatggcaattccccagttgccacgaagcgactcttttgctgtctgttttacttgtgaaatagtcatcatagtaaaaactcctttttcatttatttttaagtataatagcaaaaatacctacctttaaaatagcacattttctaggactaatacagtaataagaagtgttacaaaaaaatgctaaaaaaaggattatatttctatttaatggggaaaagtaaaattgtgtagtatgattaatttggaggtggcgcgtatggcccatgagaatttaagagaactagaagatcaattgattgaattgcgacaaacatatcaagaggtaatcagtgaaacacgagagtttgaagacccacaactccaaaatggaccaatcaatgcagcggaggttagattaagtgcattacgtcacgaaattgccgaagtagagaagaaaatcaaaaaagcagaaagcaaaaccgaataagaaaaaagcgtccatttgtttattttgcagaggggcgtttcttttacgtagatctggaggt
